United States Patent Application Publication US 2008/0229439 A1 - sequence listing, part 11

SEQ ID NO: 22158 - DNA, 2596 bp, Oryza sativa
  Clone ID: TF_OsC569_1
atgccaccgatcccatctctgtggatccgcgtcttcttctcctggctgctgctgtcgctgcccgccgcggctgccgccgatttcagccactgcggcggctgcgacgacggcgacggcggcggcggcatatggagcacggacaacatcctgcaatgccagagggtgagcgacttcctcatcgccatggcctacttctccatcccgctcgagctgctctacttcgccacctgctccgacctcttcccgctcaagtggatcgtcctgcagttcggcgccttcatcgtgctctgcggcctcacccacctcatcaccatgttcacctacgagccgcactcgttccacgtcgtgctcgcgctcaccgtcgccaagttcctgaccgccctggtgtcgttcgccaccgcgatcacgctgctcacgctcataccgcagctgctcagggtcaaggtcagggagaacttcctcaggatcaaggcgcgggagctggaccgggaggtggggatgatgaagaggcaagaggaagcgagttggcacgtgcggatgctcacgcacgagatccgcaagtcgctcgatcgccacacgatcctgtacaccaccatggttgagctctccaagacgctcgagctgcagaactgcgccgtctggatgcctagcgagagcgggagcgagatgatcctgacacatcagctgaggcagatggagacggaggactcgaatagcctgtccattgcgatggacaacccggatgtacttgaaataaaggcaacaaaggatgcaaaagttctcgcggcagactcagcgcttgggattgcaagcagaggcaagcttgaagcaggtcctgttgctgcaatacggatgccgatgttgaaggcgtcgaatttcaaaggagggactccagaagtgatggaaacaagctatgctattttggtcttggtactacccgaggatggttcactaggatggggtgaagaggagttggagattgttgaagtggttgctgatcaagtcgcagtcgccctatcacatgctgcagttctggaggaatctcaattgatgcgagagaagctcgccgcgcaacacagggacttgctgagagcaaagcatgaaaccacgatggccactgaagctaggaactcctttcagactgccatgtatgatggaatgcgacggccaatgcactcgatccttggtctagtctcaatgatgcagcaagaaaatatgaaccctgagcaaaggcttgtaatggatgccattgtcaagacaagtagcgttgcgtcaacattgatgaatgatgtcatgcaaacatcaaccgtaaatcgtgagtatttgtctttggtgaggagggcattcaaccttcattcgttggttaaggaggcaatcagtgttgtaagatgcctaactggctgcaaggggattgattttgagtttgaagtggataattctttgcccgaaagggtcgtcggtgatgagaagagggttttccacatcgtcctgcacatggtaggtactctaatacagaggtgtaatgcaggctgtctatccttgtatgtgaatacttacaatgagaaggaagagaggcacaatcaggattggatgctgcgaagagcaaacttctctggcagctatgtgtgtgttaagtttgagattaggattagagagtccagaggtaatcttttgagttcgtcatccagtcggagacttcaagggcccaactctaccagttctgagatggggcttagcttcaacatgtgcaagaaaattgtgcagatgatgaatggtaatatttggtcagtctctgattcaaaaggccttggagaaactatcatgcttgcccttcagttccagctgcagcatgtgactccggtctctggagcatcctcggacttgttccgatcagcgccaattcccaattttaatggactccaagtcattcttgtggacagtgatgacaccaatcgggccgtaactcacaagctcctggagaagcttggttgcctagtcctctcggttacttccggcatccaatgcatcaactcctttgccagtgctgagtcatctttccagctggtggttcttgacctcaccatgcgtacaatggatggatttgatgtagctcttgcaatcaggaagttcagggggaattgttggccaccgttgatagttgctcttgcggcaagcaccgatgacaccgttcgggatcggtgccagcaggcaggaataaacggtctgatccaaaaaccagtcactttagcagcactgggagatgaactgtatagagtccttcaaaacaattgaaagagcctcatggttctcatttctttcaatctcaatagattgctgtagcttgattaatagttactacgctactagtttctgccaggttaggtccatacaatcacaaaacatttgcacaaacaaaatgtatagggagatattaaaacatcctgcctttaccttggttccttggtgaaggaaagaaggtagaaattttgaagaggtcatacagttagaacttacttattcatttgtaaaccctatttagattattaatcatttgtcaggtaaattaaaaaaaaaaaaaaaaaaaaaaaaaaaaaaa

SEQ ID NO: 22159 - DNA, 976 bp, Oryza sativa
  Clone ID: TF_OsC115733_1
ggcacgaggcgatcttctcaaagccatcaacggcgttggggtcgccgaatccgatcccggtggtggtcatgtcgtcggagaatgagccccagaggatcagcagatgcttgacagccggtgccgaggatttcatccttaagcctctcaagatgaacgatgtccagcgcctccggaaatgctccggcgccaccaggccgaagtccgccgtcgccggagacgatgaccggtgctgcaacacggccaagaaggcggcggcggcggcggcagccacaccggagcagcagcagcagcagcagagatcgccgcatgttttttggtttttgcaggtgatgaatgcatccagcttcgaggtgtcgcactacttccagctcatcttcaagctcatcctgctcgcctacgccgtgctgtgcctcagccagctcctgcacagatggtccaatggcagcagcctcctctccctgtggtgcgcatgaattcaagaaattaaatcaaatcgacgatccagaaggctggattgattaatttcccattatcgatgaaaaaaattgaaaaaaaaagagagatggatgaagactcagtggcatagcgtggatttatccgaaactgaaacctcttcatcaagcaagagtgcagctaaggtggactaattggatgcatgatgatctccatcccagctaagcatgggggttcttaattaattcagctataatataattttcaacagccatgcatgcagcagcagctaagatgtgatctttctaggggtagatttgttacttatttgttcttaaattctcaagaggattctaaccaggttattaattattttcagaggtttttaagtggtactatactactactgctacttagattattttgctgagagagaaaagagtagcagtacagtagcaccacaatttgctcatttgtataaagcggccccgcatgatttgagtgggcatctggtgtcgttttt

SEQ ID NO: 22160 - DNA, 562 bp, Oryza sativa
  Clone ID: TF_OsC36724_1
ccggccgggatccaaaactattccaagcaaactcttccagttttctgtttttctcatcttctgcttcccctgtgtagagcacagtagaggttccatcagcttgctctcatggtgttccaaacccaaggatccaacctgagggcattgctcgttgaggacatcaaagtgaaccgcatgatcctgtcgcagatgctgcgcaaattccaagttgaaaccactgtggttcagaatggaaaagaagctgttgaactattccttggaggagaaacatttgatattgttttgactgacaatcttatgcccatcatgactggtcctgaggcaatatccaagatccgtgccatgggtgctactgatgtgatggattgtggagtctcagttgacgccaacagcatggaagagttcaaagatgctggtgctgatctatgtgtgcccaagctgaagcttgagattctagagcacatccttcaggagaccaggagcaagaagaacaagagcagcgcttaggtttcagaagaaatcaagggactatctgtcatcattagtgtcatagttgttgact

SEQ ID NO: 22161 - DNA, 325 bp, Oryza sativa
  Clone ID: TF_LIB3433-027-P1-K1-D5
gcaaagcctttcatgccaagcacacacaccatctgcatcttctcttctaccattcttgctttctccttggagcctctttcttttggtctttcagagaagagaaacatatttgtgcaagctttggcttttttcatgggaggggctatagaggctccggtccatgttctggctgtggatgataaccctcctgacagggagctcatcgagagggttctcaagacctcttcttttcaagtaaccactgttgattccgggagcaaggctctggagttcttggggctccatgatcatgaggacagcccaatttctactcaatcagatcagc

SEQ ID NO: 22162 - DNA, 1874 bp, Oryza sativa
  Clone ID: TF_OsC6964_1
tgcagctggtgctttgaagaaatatggaatcatagttacctgtgtggacacgggaaaggaggcaatttctaggcttcagccacaatattaatttgatgcttgtgtaatggatgttcagaggcctgatatggatgggtttgaagttaatagattagttcgttcgaaaaatggaagctctggatgacacttctcctgaaaacatagaagttacagcgaattccaaaaatacgatgccatataatactctaagtgggcttgaagtagcaaataatcggaaaaccttggagagtttcaggatgttcaaagattcgtcagatgcaatagattcagtgaacttactagtaactgtcgaagacactggcataggaataactaaggatgctcaaactcgcatttttacacctttcatgcaagcggatggttccacctcaaggacatatggtggaactggaattggtttgagtattacgaaacgcctggttgaattgatgggtggagaaatagggttttgtgagtaaaccaggagttagtagtacattttcttttactgctattttcaaggaaaataggaaagatccaggggatatcaaaaggtattgtcctgaacctactccaccagattttcaaggaatgagagcgcttgttgttgacggaagatgtgctcgtgctgaggttaccatgtaccatctgcggagacttggaatacaatgtgatcttgcagccacatctgaatcagcactttctgctctattggaatcctgcaattcaagtgtaaaaagcagtctaaatatggtgcttgttgacaaagaagcttggggcgaggactcaggcttggcatttttccggtgtcttatagatcttcggctgaagggcacactcaagtcttggcaaaccatgccaaagttctttcttttggcaggttcaataactcctgctgactctgattgtttgaggttggcggggtattctaatagcataagaaaaccccttcgtcttagtactgttgctgcttgtcttagtaaagcactaggggttggacttacaggccgacgaagtagagataattctttggttcttcgaagtgtactaacaggaaaaaacattttagttgtggacgacaatgctgttaatcgcatagttgcagctggtgctttgaagaaatatggagctatagttacctgtgtggacagtggaaaggaggcaatttctaggctccagccacctcataaatttgatgcttgttttatggatgttcagatgcctgagatggatgggtttgaagctactagattagttcgttctgtagaaagtaaaatcaatgatacgatccaggcagcatctgctaaaaacccatttggagataacaatattgcaaagcagaagagctatgcagtaaatcgagaacagaagtttgattggactgctatttatgtttcatttgacaattggatgaaatctatttcaacatcacgccttcagccatgtgcttaaggggaaactttgaccatttttacccagtggaaatcaatgagggacatacattgaactgacatagcctccttcatgctgttccagtgtagtggctgacaagatgacatcaatggcgttcttgttgtacagctaatatagattatgagaaggctaatgctcctgtttattctgtattcttgagtgtacatatgaaatggcaagaaaatagtgagagttggaggatttgtctggtggcttgaagaatgtaaataggaatgttcatatccatcttttctgaggtctggttatgtggggtgtaagttgtacatatgttctcttgtagaaatgtaattgattattagattacggcaatgttccaaaaaaagtaaatatattaagcttcc

SEQ ID NO: 22163 - DNA, 3478 bp, Oryza sativa
  Clone ID: TF_OsC18122_1
gccagaaatggatgggtttgaagccactagaaggattagagtgatggaaagagatctaaatgcgcgaactcctatattgggcgatgacggcagatgttatacaggccccacactgaggacgtgcctgaaaacgcgaaatggatggctatgtctccaagccatttgaaggggagcagctgtacagcgaagtagcgcggtttttcccaaaatcatgaccaagttgaataggaaggtttatatggaatgtaaattggtggaggatgttgccacgcaccgatcacatgccatggcacagaattttgtccaagatgctgtgttcccaagagaatgaagcacaaaaggtgtcgagatggaaccgcccatgttctgatctgtagtacaccatctgacctagaggcaaaattaactgcgcaattacatgagaacaagatacatgtgcagcaaaggtactcaaacaatttcttgaagtcaaggcgtgtgaaaatggcagctgcatattcactaactgcagaagaagcagaagtcgttctcgtagatgccctctgcctttgtaatataaacgtagggagagaaaatttttcctgtcttcttttttttttcctcgggaattttacggtgtacatattaggtgttggtgatatgtgcaggcaattccttggtatatttggatgtgtttttttttttttctgcaaggtttgtggaagctgtaaatgacacaattcaaaggtgaagcctttggtttcttccattgacatttttgacaagaatattgatgccgtaggatctcggctgttcttttgcaaaaaaaaaaaaaaaaaaaaaaggagcagttcgagcggcagcaagggtgggcgatcaagaagatgtactcctcctccaacaagaagcagtcgtcgccggggcccgggcccggcgacgccgccgtcgcggagatccgggagcccgccgaggagtacgccccggtcatcttcgcccaggacgcctacaagcacgtcatctccttcgacatgctctccgggaatgaggatcgggataacatattacgggctaggaaatctggcaagggtgtcctgactgctcctttcaagctactgaataatcgcctcggagtgatcttgacgtacactgtttataagtatgagctccctgcatatgccaggccacatgaacgcatccaagccgcgattggctatttgggcggcatatttgacatacaagcactcgtcgagaagttgctcaaacaactcgcgagccaggaatccatcatggtgaatgtgtatgatacgaccaacgagagcccgatcagtatgtacggtgatgatactgggagtggcatgtgccatgtcagcgtgctcaactttggtgatccgtcgagaaagcatgagatgcattgcaggtttgaaaaaaagccaccatggccatggctggcaataacgtcatcgtttggaactcttgtgattgctttactgactggtcacatatttcaagctactgtccatcggattgctaaagttgaagatgatttccacaagatgagcgaactcaagaagcgtgcagaagatgcagacgtcgcaaagtcacagttcttggctactgtttcacatgagatcagaactccaatgaatggtgttctagggatgctccaaatgctcatggatactgatttggacacgacgcagcaggactatgttagaactgcccaagctagtggaaaagctttggtctctctcatcaatgaggttcttgatcaggcaaagattgagtctggtaaacttgagctcgagacggtgccctttgatcttagaacagtttgtgacgacattttatctctgttttgtgggaaagctcaggagaaaggactggagttagcagtgtatgtctcggatcaagttccacagatacttattggcgatcctggcaggataagacaaatcattacgaatcttgtcgggaactccataaagttcacagagagagggcatatatacctgacagttcatgtagttgaagaggtcatgagttgtttggaggtagagacaggaattcagaacacaaacactttaagtggctatccagtagccaacagaagatgtagctgggagagcattcggcttttcaacagagaattacactcatctgagaagtcttttgcgcccatcgcatctgattcaataagcttggttatatctgttgaagatactggcgtcggcatcccatttgaagcccaatcccgtgtgttcacccctttcatgcaggtaggtccatccattgcccgcatccatgggggcactggcattggattaagcatcagcaagtgcttggttggtctcatgaagggagaaatcggttttgcaagtaagccccatgttggttctactttcaccttcaccgcggtgcttatgagggcacactgcaaaggaaatgacatcaaatcatcagaatttaaagggatcaatgcattggttgttgatcataggccagtccgtgcaaaggttaccaagtatcacttgcaaagacttggagttaagaccgaactgacagctgagctaaatcagttcatttctaaattaaactctggatcactgactgcaaagctagtgctaatagacaaggaaacctggcttaaggaatcccattgcacgcctcttctggttaacaaattgaggaataatgacaagccagactctcctaagttatttcttttggggagctctgcaagttctcccaagggcggttcagatacatccagggaacataacttgaatgtaataatgaagccgcttcgtgcaagcatgcttcaggtctcactacgacgagcactaggtggggtcgataaggtgcactgcaggaatggagtagttggcaattcaacattgggcagccttcttcacaagaagcaaatcattgttgtcgacgacaatatcgttaacctgaaggtggctgctggtgctcttaagaagtatggtgccgaagttacttgtgcagacagcgggaaaaaagcaatcacattgctaaaacccccgcacaattttgatgcttgtttcatggacatacagatgccagaaatggatgggtttgaagccactagaaggattagagtgatggaaagagatctaaatgagcgaatagaacgcggagaggcgccaccagaatgtgctagtattcagaggtggcgaactcctatattggcgatgacggcagatgttatacaggcaacacacgaggagtgcctgaaaagcgaaatggatggctatgtctccaagccatttgaaggggagcagctgtacagcgaagtagcgcggtttttccaaaatcatgaccaagttgaataggaaggtttatatggaatgtaaattggtggaggatgttgccacgcaccgatcacatgccatggcacagaattttgtccaagatgctgtgttccccagagaatgaagcacaaaaggtgtcgagatggaaccgccccatgttctgatct

SEQ ID NO: 22164 - DNA, 765 bp, Oryza sativa
  unsure (1)..(765): unsure at all n locations
  Clone ID: TF_LIB4309-004-Q1-K1-F10
catccatcatcccctacctctcgctctctctctcctctcctctcctcttattatcatcgcatccatcccgcacttctctctctttggtggtggtgctcgctctcgctcaccctgctttgacctttggatttttatttttaaggatccaagaaagtgctgtttcttgggttgcttggaggtggaggagtttgggagattgtttgtgtttgattgattggttgattgattggaggaagatgacggtggaggagaggcaggggagggtgggaggccatggtgtgagcggcggcggcggcgggagagaccagttcccggtcggcatgcgggtgctcgccgtcgacgacgaccccacctgcctcaagatcctcgagaacctcctgcttcgatgccagtatcacgtgacaacaactggtcaggcggccacggccctgaagctgctcagggagaacaaggaccagtttgacctggtgatcagcgacgtccacatgccggacatggatggcttcaaactccttgagcttgtcggcctcgagatggacctcccagtcattatgttgtctgcgaacggngaaacacaaactgtcatgaagggtataacccatggtgcatgtgactatcttctgaagccagtgcgtcttgagcagctaaggacgatatggcaacatgtgattaggcgtaagaattgtgatgctaagaaccgtggtaacgatgatgacgctggtcagaaggcacagggaatgaacaatgaggtgagagtattggtgc

SEQ ID NO: 22165 - DNA, 996 bp, Oryza sativa
  unsure (1)..(996): unsure at all n locations
  Clone ID: TF_OsC51348_4
cccacgcgtccggatctaccatattatttcgaccatctattacaatacaagcatcttatgatatttggatgaacatgccaaagtcagatgtgcagataatttagtaaaaacatagagcacataataggagaacatctttgtatgcatatagagaaaaaaggtagtggaaaccttatcaattgtgaaaaataatcaaatatagaaccaagctggtttaggctaaactngatatggagatctctccgaatccctatgtcaaaaccatcgctgccctggaaagcgacgcggcgatcgaacgcgatatcatatcgaatcatctccacttctcgatcttattcagttggccgtgccaggcgtcaccggatccacgccttcagatttgggaaagttgctggctgcatcgccaagatttggctggggaaagttggtagcgaccgagaaatcgtccgatcaggaggatttcttggttggtgtggcaaccccatccgatccgaggatttgaagcctgattatattctaatcttcaacaaatctgatgcagcaaactggcagcctcttccttctgttcttccagagaagagaaacatatctgtgcaagctttgccttcttccatggcagtggctatagaggctccgttccatgtcctggctgtggatgatagccttcctgacaggaagctcatcgagaggctactcaagacctcttctttccaagtaaccactgttgattcggggagcaaggctctggagttcttggggctccatgatcatgaggacagcccaatttctactcaatcagatcagcaggaggttggagtgaacctgatcatcacagactactgcatgcctggcatgacaggatatgatcttctcaagaagatcaaggaatcgtcttatttaagggacatcccagttgtgatcatgtcatcggataacattccttcaaggatcaatagtataattaaggaacaagccccacagctcacgtcgtcttaa

SEQ ID NO: 22166 - DNA, 912 bp, Oryza sativa
  Clone ID: TF_OsC41886_1
atggctcaaagggtaggacactctgctgatggggtttttgtcatgatcgttgatgaagataagtcacatgccaacttcgcaagaggcatgctctccagcctcaattttcatgtgatagtgtactcaagtcctgtgaatgcactcgtttttctggagaataacgcacaagacgtcgctgtagtcttggcagcagtggacatgaaacaattgagtggttttcagttcctcgaagctgcaagagtgaaacgccaggaccttcaagttatcatgatgtcagctgagacaacaatgtccacaatgatgaggtgtgttaaactcggtgcacgttttctagtgaagaagcctcttaacgaagaaactgtaggtaatctgtggcagcatgttgacctgaaagttttgaagatggagaagatcagggaattactgcaagatgaaaataatgaagaggaggaagtgaattcctttgaagctaagaaggctgattcagttaaagttcaatcagatgagaagggacatgacaatgctaaaatctctaacactgctgctgctgaagggtctgatgaaaaagtctctagtggtgatggtcatgtagtgcctaaagcgtataataatgtgaatgttgaagagagcataggtagtaacaatacttcaggtgaacaagtctccgacaagatcaagagtgatgcaagagttggggtgatccttgtggactacccagattttgaggatgatgagaccaagaaacccacaagcacttagatataatccggtctcgactcgactctgtgtagagatcgagtgagctgagaatgtggggggaacaagtgactgaaagaatgcactaccatatatgtttatggtagtgtttgtatcttactttctgcaaaataagaaatgcaccatgtgctgaat

SEQ ID NO: 22167 - DNA, 962 bp, Oryza sativa
  unsure (1)..(962): unsure at all n locations
  Clone ID: TF_OsC41886_2
aacaccaaaaaatagaaccatagcaagtagaatccatagctttgagaaactcatggctcaaagggtaggacactctgctgatggggtttttgtcatgatcgttgatgaagataagtcacatgccaacttcgcaagaggcatgctctccagcctcaattttcatgtgatagtgtactcaagtcctgtgaatgcactcgtttttctggagaataacgcacaagacgtcgctgtagtcttggcagcagtggacatgaaacaattgagtggttttcagttcctcgaagctgcaagagtgaaacgccaggaccttcaagttatcatgatgtcagctgagacaacaatgtccacaatgatgaggtgtgttaaactcggtgcacgttttctagtgaagaagcctcttaacgaagaaactgtaggtaatctgtggcagcatgttgacctgaaagttttgaagatggagaagatcagggaattactgcaagatcctggacaagagacggtgataactattagttatgaagagcaattctctggagaaactgaagcagatgaaaataatgaagaggaggaagtgaattcctttgaagctaagaaggctgattcagttaaagttcaatcagatgagaagggacatgacaatgctaaaatctctaacactgctgctgctgaagggtctgatgaaaaagtctctagtggtgatggtcatgtagtgcctaaagcgtataataatgtgaatgttgaagagagcataggtagtaacaatacttcaggtgaacaagtctccgacaagatcaagagtgatgcaagagttgnggtgatccttgtggactacccagattttgaggatgatgagaccaagaaacccacaagcacttagatataatccggtctcgactcgactctgtgtagagatcgagtgagctgagaatgtggggggaacaagtgactgaaagaatgcacta

SEQ ID NO: 22168 - DNA, 612 bp, Oryza sativa
  unsure (1)..(612): unsure at all n locations
  Clone ID: TF_LIB4371-041-R1-K1-A4
cgctttttaaagngcgctacactacaaggcctctcccccccgctgccgactgccgtcttgctctccctccctcccaaccccccactctccccgctcctcctgcgagggctcggcgaggggtggctgggcctgagcgcgggcatggacgccaccgccttcccctacgggctgcgcgtcctcgtcgtggacgacgaccccacctggctcaagatcctcgagaagatgctcaggaagtgttcctacgaagaaatatcgcctctacctgagtaggttgcaaaagcagaatgaggaaaggatattaggcgctgctaggcaagatttcagtcacaagggaacatcagaaaaccttaacctccgaagttccttccaagagcaaccaagcaacatagcaaatggatatccgcatgcttctcagaatatacaaactcaggccaacatgctagattctcagctagaggacaccaagagcacagtgcccttgcctgtgccagataaaaaaagaactctagcaagtgatgctgctgactcacagaatgtcaccagtgcttcaagtttaggtgggggttctgtctttcaaaagcatggccggtgaatcaggacaggaagccatca

SEQ ID NO: 22169 - DNA, 699 bp, Oryza sativa
  Clone ID: TF_OsC1528_1640
ttttttttttttttttttgcaacaacaagccagtaaagttgatctctcccagtcacacgttaattgataagtgcaacacacatatatgcctcagtaagacttagattgcagttacaccattacttttgatacttgagctaatgcaatcatgtaggagaaaccctgccttttatggttcatgcttgtgtaaattacctgccatatcccaaatgcttcccaaactgatgcactgttggcagaagagcatctcacaatcggcgacaacgacgggcagcttggagagcgcctcacacaccttgtgccaccggtgctagtcgtggcacctgctcagctcctccttgcacttgtccaccgcgcaggaagggcactgctgcccggcgccaccaacaccctcaacgcgcgcggtcacttcaccggcaccgaggccacagctgacaagtgacggccaagtgaccaactaaccagtagagcagctcactgtagcagttgctccaagagcccttccttgtctaggttcaaatctcaaatccgttgattcacaaatcataatcactttaagcggcgcggatgatgcggatcggttgagctccgtgtggcgccgccgagctcctcgtcacatcgggcggcaagaccacacaggcggcctacgggctttcttcgacggcggtggtgacggacggcgccggatccgcctcgtgc

SEQ ID NO: 22170 - DNA, 983 bp, Oryza sativa
  Clone ID: TF_OsC99563_1
atggcgtatgagaactatgcaaatacaactgttagtgtgaatttgaatctgcagtacagatttcacaatctggctgagtttgacgatgggaaaaaaagttgccggaaacggctggatggtcataacaggcgtcgaagaaagccacagcatgatgcattgaaccctaggagtttccttccgtatcatcaagcgaatcagttttcagtctacccgcaaacatttccgatagctgatcagaacgccgacgccttaatgcgtccgcttgatcgtcaccctcccttctccatctcattctcagggaccttccgggaaccgaagcagttcccctttatgcaagatggcgggagcggcctcggcgcagcgcgccacgatctcctgcggcccttctcttccccagaagatggagccaacattaccacaacccgcagcgcatgcaacggcgtcccccacgggctggacccggagtgtgctctctctcttctgtcatcgtcgctgcatccctcccccgctgccggcatctccagcgcaacagctccaccgcagttcgccccctcttctttcagcagaatcgccgcctcgtcgcaagccgtaaccaccgcattcgcatcagatggaggatcagttgccggtgaccatgtcttggttcctgctgtcacatatgaagatccttcccaagcaatgccattctcttggcaggtgtagagcagaggctgtgattttgctgttcggttcgtcaatgaaaggttgatgatggtgctccggccgctcatggtgttgtagaaccgcatgtggacgttgacggcgaggaggaagatggcgatgagcgcgaagtagatgatggagtggacgaggatggagaggccgctggtctggaagttgccgaactccacgatcctccccttccccgggatctggaacagcagccccggcgacagcaggatgaacagcaccagccctatgaacaccggcccccaatccgccat

SEQ ID NO: 22171 - DNA, 4384 bp, Oryza sativa
  Clone ID: TF_OsC1735_1
ggaaatcaaccagaattatcctgaattaaaaaaacagaaactggattcatcagggggaataaacaaacagtgaaaaggggacaggggtttactaatttagggtttattttatgcgtcgtgatgatggtccacgattttttttttttgaggataaacctgtaatctgcctcatttgtatttagctacatgggtactgtcaacggtaccttccaaattacccctgctactatgtaaagatgacaaaagacagtttcatgctaaagcaccgtatagatacacaaaaatgtcaaaaaaaaaaagaggtaaagacatatcgatgtaattaaacaccatcttgtgatacattaagcagcagattcacaattgcaccagcaaaaaagaaatcaaggttacttactcattttagcccagaactaatagcgtccccatctcaccttgtgagggcacacttgatacattccttgtcacagaaactacttgccaactctgcgcagattcatccaatattttgtcagggtttctctgctcccccaaatgctctgcccccatccatccacacttcttttctgggaggggttcatccttacaattatatactctcccgttcttatcaaagttccaaggaaattcaaacagtcaaaagttgtctggtttcaaaccttctggctgttgcaaggtatttccttgataacaccacaaaacgattacaatacagcaccctctgcagattatatcgtaccaaaatccagcctctcccatttgaaggatctaccagaattaaaccgcagcaaagctcgcatgaatacacaaacacaaacacagactgctgctatcgcaagcatggaatggatataggggcgagcgagcaatccccgtgaatgcataggacgtcttagcaagccagcatccaaaatagcgcactggttgcaagatcttatttgcaatgcttgaattgcagatttatttttctcaccaacattccctgattgatccatatgaatttcctctttgccaaccattatagtaacttggttgttcttcctgtccaccaatttctgtgctacaagctcattgtacgcattgttgttcctcaacttggcataagtttcaggggactgaccatcatcatctagcgctgagtgccaacagctcaaaccaatctgttgaggatcatctgtcaaagcatcaacaatatccactgcatcctcaatggatgcagccaggtgcaatggagtcaaaccacctgggccagctacatttggaaggaaggggtacaatttggaatcatcagggcacacgacaacaaactgtacaagcaagcgcgccatgtggctacttttccttttcactgccctgttcaggagatggatctctgagagcatttccagagtttcctgtgatagttcatcactggccaaactcctcttggcaaggatttccagaagagttttagtaagagagcaccagtcccgctcacttgaaaacagcagaaggtatctgaagcgtgcagttgagaagtacatcaaatccaaaccagaagaatcagatttttcagcagatgtactggcagctgccttctggaagagccatccaagttcgtttagaaagtgcaaaacttcatcctttggctttagccgcctagcatcatgagcctgatcatctgaagagccgtcaacaaactgtgaaccctcaagctcagcttcaaggcttctcaactcctgacaaacacttgaattggcaatgataacaggaaagctgttccctctgaacctattctcgacctcaatgaagtaacgtccaagaataagatgtggttctccaggtaagtcaaaagtctcaacacctgaatcgtcatatattgttcctggatatgcagagcacagtacttcttttgatatgtacttccccgtactggtacagtggatttgggtgccaggaattgtcagattacggcccttaagaatgagggaggtctttctcccaccaacaacagcaattggtgagacaaaggtcaactctggggtattccatgttctccatgattttgataagcgggttgctccatctttgtatgacaccaactgggcatcagttcgaactaaaaaccttccttttctccagaagtccaaatcggaaccttggactaatgtgtttactcgctggagaagattttcttcaagttcatcccatgcaatagcaggcattgaaagatacattgatagtacaaggcaacctggccgaatgtatccctccatttcgttggggctgtgtttgagccaatttacaatctctccacgaaggttcccagggattgtgcttggctccttgccaaatagtttaaatatgattctaccagtacggtcctgtccatctgaatttgaagttgatggcgaatgatctgaacaagaggttgaggtataacaggattgatatgcaggatttggtggtgaaccattttcaattggccgttctgaatccttaaacagctcaagtggtggtgcacgccaagcccgacttgtgctaacctcaactgtcgcaatatcttccccgtagtctgcaatacgagcatcttcgtctaccgaacggatggggaaaaacttatgtgttacaggcggagatgatgatggagatctctcatccagaggattgctactctcggaagataagtacttatttgcagtgtccatcttacaaggaacatcctcctcggtgctaccaaagagccgtagtgacaagtatggcggggtttcttggtctggttgcttgtacatttcaggtgaccgttcaagagcatcattcttgcgagtggcagaaaatacccggatagatttctcgtgggaatttacaacattagctggctctgttgactgactcttgctcttgttattaccactgctgtcactgctcccttgggactgagacgtattgctatcagggtttgatgtcgcgagggcagttgataaaactgctagcaagtccatggttgatggcacagcttgcttgtcgaatccgtcagcttgcttgtcaaatccattcgtttgtttgtccaatccattggtttgcttctcgaatccattagttgtcctttgaacagaatcttgttgttggctatgtgacgcattcaaatcaacagcttctgatggaggagactttgaagcagagttcccgttatttatagagtttattttacttataatctggaccagattgtctttatctggtatcggagggatgctgggcagtttaccaacattactgccttgcaagcgtgcaataaccgtgatcagatttacaatatcctgtgtcctatttgctgcattttcctggtttccaggtagcagcagctgcgaagcaacatctgttggctgggtttttcttcgccgcctgttgtgaccggcgagcctacgtctgcagctcctcttaccctcatcaaactcagagagcgggtgaaatctactgcactgctgacagaagcgctgcatctggttgccaaccagcgccttcgtggtcttgccgtggatctcgcagactttgtgtctccggtgataatccttggcgttggtcagatccgccctgcagtcatccacctggcacatcgggtagcttccgccaccaccgcctgagtttccaccgcctccgcctccacctcctcctccactggcacttccaggcgatccagaccgaaccctcttgctcggcctaacaactggctcctgcgccggcgccgacgacgcaggcggagaaggcgaagaagacacggtagtagccgccgggctcacatccatcggcgtcgccgcgtcctcccgcaggccgagctgaaggttcagcccaccgctacccccgccgccctgccgcagcgcctcagcagccttagccgccgccggcggcgactgttgctgctgctgctggtggtggctcagcccccgcgttgacgcgcagcgcatcggaggacggcttggcggtgagggcgcggctatcccagtcccacatcctggggttccagttccctcctcccttagcctccgccgccgccaccgcggcggccggccacgggttcccgcgcttcttcgccgccgtggcatggggaggcagcggctggatctggtgtaggaacatcggaggggccacctgcggccccacttccctctgcatctctcaacaccgccgccgccgccgccactcgccgccggccaaaacccgatccacccctctccggatcttttcacgcacggcacctcacgcagcctctcttcaactcctcttcacgtcaacctcatcggaatcgagaaatggaagaatcggcggcgagaagtggatgaaggaagcaaccaaccaaccagggggatcgcgcggtcggcgtgagctggggaagagagaaggggag

SEQ ID NO: 22172 - DNA, 1255 bp, Oryza sativa
  Clone ID: TF_OsC53012_1
atggccgcgctcgccgccgcggcggccgcgggggacggcggggcggcgctgccgctcctcctcctccgccttccactccccctccccctcctctcctcggcctcgggctagccctgcctctctcctccccactccagccaccgcttccacctcccctcccctaggaggcacacaccacacactagcactagctcgtcgtcgatcgcgcgcgccaccggccatgggccgcggcggcggttcctcctcgtccgctgctgttgctgctggcgcgtcttctagctcctcctcctcctcggtggccgcggcggcgaggaggggcgcgggccgtgccggcggtggcgccccgtcgggcggcggcggcgggccgaggtgccaggtggagaggtgcggcgtcgacctcagcgaggctgggcggtacaaccggaggcacaaggtgtgccagacgcactccaaggagcccgtcgtcctcgtcgctggcctccgtcagcgcttctgccagcaatgcagccggttccatgagctgacggagttcgacgacgcgaagaggagctgccggcggcggctggccgggcacaacgagcggcgccggaagagcgcggcggacacggcgcacggcgagaactgccgccacgccgaccaggacgccggccggagccaccagggcaccgggaacccgccgttccagatcagataaacctacctaagcatgctccctctcttctgtcatgcagccatgctagtgtgagtgtgtgtgttcgtgccactactactactacatgtctacatcgatctatctacctatatatatccaccacctacgtcccttcttcctcaaatcaatcaaatctatctatctatctatttatctatccctgaatctatctctatccggtgtgctttgctgctgctgattaactggcagtgtgatcatctccctctactgctgctacatatatgcagtgctatgctggagaggcataaatgtgctatatatatgttctctgccacaaccctaagctaattgtaacctgttgattaagcaggtgttctagggattctctctctctctctctgtgtgagggtgtgtttgatgtgtaattgtactattgcctttgcccaacagaaacttgtaggctgcagtgtgcctatgtatgctgttgtgccgggatggcagtggtaatatatgctgtttgagtcaccgtttaaaaaaaaaaaaaaaaaaaactcgagactagttctctctctccgccggcat

SEQ ID NO: 22173 - DNA, 1377 bp, Oryza sativa; identical to SEQ ID NO: 12763
  Clone ID: TF_OsC324749_1

SEQ ID NO: 22174 - DNA, 1692 bp, Oryza sativa
  Clone ID: TF_OsC11432_3
gcagtggtgtggccaagcttgaatgctccagtgaggctgcttctctggctgccaagctgatggacgcgccgccatcgccagatcggctcgccggatcagtggagctccatgcttctccaggctgctgctgattgagagagagagagagagagagagagagagagagagagaaacagtttttttttttcaggaggaattcatcaggaatctgctgtgctccttttctctgggagagaagcaaagagcaggttggagcagcagcagctgggatctgtaactggcatgggttcttttgggatggactggaatcagaagagctcggtgttgtgggattgggagaatatgccgccgataggaaatagcgcgaacgagaatcccaagaatgtgatgctggctgaatcaaaacttgcaggtgttggggttgacataggccatgaatcaggccattcttctggtggtactttctcttctagctcagagattgggtatggttcatccaagagttccatatccgcgtcgatcgattctccgtccaaagtggggaacaccatagagctcaattttgcatctgcggaagagcatgataagaacatggacaagggtaagagtaaagttgatgacaccggaacttctcgatcaccggtggtagcagccaatcgtgtagagcccttgattggcctgaagcttggcaagagaacctattttgaagatgtctgtggagggcagaatgtcaagagttctccatctggtgtgagtgtggctaccccatctcctggtctggccaagaaggtgaaggtggctcagcagaacactcagaacccacactgtcaagttgaaggctgcaatgttgatctctcttctgctaaaccttaccatcgaaagcaccgagtctgtgaacctcacagcaagactcttaaagtcatcgttgcgggtcttgagcgacgcttttgccaacagtgtagtcggtttcacggtttagctgagttcgaccagaaaaaacgaagctgtcgcaggcgcctccatgatcacaatgcccgcagacggaagccacaaccagaagcaatttccttaagttcgtcgaggctctctacattactctatggtgatgcaaggcaacaggcaagttttctatttggtcaagctccttatggtcagatgggaagctgtgcaagttcttgggataacccagtaccaggaggcttcaaatttacagcaacaaaagctccttggtcaaggccaacaatagctgccggtgttgatgggacgcatgtatctaatcagcaggcatcgggcaatgtactgccacatggagcacatcatagttttgatggtctcatggcgttcaaagaaaccaacgcgaaggtccttaaccaaggcatggaagcttctgctgtcgcttccggctccgctagaggcccagactttgagcatgctctctctcttctgtcaatcgattcagtgggtgctgcaaaccttcagccaggttctcagattcaccctggtgtcaccgccattgccggcacctccaaccctgtcatgatgccatctccagcaatctggcaaggaggcttgtcccttgatcagcaggcgcagtttcaggctttcgaccgccttggcaacgacgacgacgaagatcatctccagctcccaaagccttcctatgacaactcccactatgatcagatgaactga

SEQ ID NO: 22175 - DNA, 951 bp, Oryza sativa
  Clone ID: TF_OsC148343_1
cacgagacgagaagactgattcattcgctcgcgtacacgcctaggcgctccgagaattcgtgagggaatcccgcatcgccggagccgatcggcggcgccgcgggcgggtgggggggggttagggttagggttttgggggtggcccaccggggatggacgcccccggcggcggcggcccacgcgtccgcggacgcgtgggcggcgagcccgtctgggactgggggaacctcctcgacttcgccgtccatgacgacgactcgctggtcctcccgtggggggacgattcgattgggatcgaggccgatcccgccgaggcggcgctgctcccccctgccccgtcgccgcagccggcggaggcggaggcggaggccgcggggccggcgtcgctgccgtcgtctatgcaggcggagggaagcaagcggcgcgtgaggaagcgcgacccgcggctggtttgcccgaactacctcgccgggagggtgccgtgcgcgtgccccgagattgacgagatggcggccgccttggaggtcgaggacgtggccacagagttgctggcaggggcgcggaagaagccgaagggtgccggccgtggtagtggtgcggcagtcggcggaagtggtggaggggctagccgtgggacaccggccgagatgaagtgccaggtgcctggttgtgaggcggacatacgtgagctgaagggataccaccgccggcacagggtgtgtttgcgctgcgcgcacgccgccgctgtcatgcttgatggtgtccagaagcgctattgccagcagtgtggcaagtaaggctccatttcctcattccaggctgctttatgaacttgtggaagatccattgggatcagtagcagtaggagggataattaagtgctttaacacttatacaatcattgttgctatatgatttggtgtttaatgcattataccttttctaaaacct

SEQ ID NO: 22176 - DNA, 2270 bp, Oryza sativa
  Clone ID: TF_OsC8701_1
tctgcgttttctttctttgcttttttttttcttttttttgttcctttttctttttttttttttttttggaacaaaacagatcatttcatgatcatgaacacttctcatccaatggcaaatatcctggtggtttggtttcaaaaatagaaataataaatcctggggttgcaggacaattcgcccccaaattattcagagtccatcactgacagggtaagatcatgaacggagtaaccagtcatcaacccgttccaaatagatgcagcagaatcagtgcagatggccatagccggagctgctgccattgccaggatgcatgaacgcctgagcctgcgaggcatgatcgagcggaggcgggtcgtcgccgtcttgccagaatcctcctcctccggtggacgggtgcagagcatgcatcacactgacagggttcgtcggggcggtgacggtggcggcggcaacggcgaggggcggcatcactccaccgggatgcacctgggagccggcctgaacgtcggccgggccccaggaatcgcttgacagaagagagagagcacgccgaagatccggggctccattcgagttggaggacacgacggcacaggctggatccacaccaaggcaggaagtccaaaaagcttgtaacagataattggtggatctagcctctctgtttttgtttttgtttttttgagaaacaatttgtggttctagcttgtccataaagcaagcttggttgaggaccttcggggtgtttcccttgaatggtatgagcccatcaaaatcatgatgatgcaccgtatgcgacacaacattgcctggcatctgcagggtagagaaattcagatcctcaaggcctatagttttcattggcttcatccaggggagttttgcttctgtaaatttgaagcctcccaggttgtcacatgaagaaattgcattgcttctcacttggccaaaaggagattggccaaagtaaatatctgtctgctgccttgcatcgtaaaacatcgtggcgagccttgatgaaccaaatgaaattgcctcttgttgcggtttccttcttcgtgcattatgatcagatagacgcctgcggcaacttttctttttctggtcaaattcagctaaaccatgaaaccgactacactgttggcaaaaacggcgctccagaccagaaacaataacctttggtgccttagaatgagcttcacaaactttgtgcttgcgatggtattctcttgcggaggacagatcgactttgcagccttcaacttggcagtatgagctttgtgtgctctgctgagacaccttcatcttcttgaccacagtagatggacaagtcacacctgaagctgcagaggagctcttgacattctgccctccacaaacattttcaaagtaagttctcttccctaacttgagtcctattaccggctcaccatggctaactgccacagctggagaagtgcccgagtcttcaactctaccggcctcgccatccttgcacatgttcttgccatgccctttgacagaagcaaacctgaactctaagctgttccccagcttggatgaggaatcgaacgacgctgacaaggagctcttcgatgaaccattggctagctccgagctagaagtgaacgtgccaccggatgaattggtggatccatgatttgcggccgcgacaactacacctcttggttcagggtgaggtatgctcttgggattttccattgtattcggaccgaaaggcgctggattttcccagtcccaaaacacagggctcttctgattccagttcatcccaaaagaagccatggctgaattaaggatctcaactgctgctgctcacacttgtatatattgcaaatctcaactttcctttctcccagaaaagaaacacagtggatccttcctctccctgcaaatcttgccctcaatcagcatgaccatgcatagcacaaccttgagcataaatcaaaccgatccgaggaggtgatgaataacaagtagcagcgttgaaagttgaaaccaattggctggcagaactaaagcaacagagactccattgttgttcttggctgagttctcacccacctcgacttgagagagatcctatcccacttgtttccccgacctaaaagacgacagcatcaaccccatcaaggctggcccccattcatcaccacaaccacccgctatttaaaccctttccaatctatcccccctgccgcttccccgcggcaatcagagctgcattatttgttccctcgtgc

SEQ ID NO: 22177 - DNA, 1075 bp, Oryza sativa
  Clone ID: TF_OsC152916_1
cctcctcctcctccgactccgatccacccccgggatcccgcccatggagtgcaaccccgtctcctccaccacctcctcctccctgctctgggactgggacgccaccgcctccgccgagccgccgccgccgcccgggaagcgcggcgggagggattcgtcgtcggcgtcggcgtcggcgaagcgtgggaggtcggcggcagcagcgggggatgcggcggcggtggcggcggaggcgccgcggtgccaggtggagggctgcgggctggagctgggaggctacaaggagtactaccgcaagcaccgcgtctgcgagccccacaccaagtgcctccgcgtcgtcgtcgccggccaggaccgccgcttctgccagcagtgcagcaggttccacgcgccttcggagtttgatcaggagaaacggagctgccggagacgactttctgatcataatgcccgtcgacggaaaccacagacagatgtgtttgcttttggctctggaacactaccgcgatcactgtttgatgataggcagcaaataagtttcgcatgggataataacgctccacttaaccatgcaaacaccacttcaagttcctcgtggacatctgacttacagctctcccaagtgatggacataagcaaaaggtcacgaaaagctggggcagacagtgcaaatatccgtttgtcaaatgctttgccaactctttgtcatgacacaaatgagctcttgccaataaaaggtgcagatgcatctgaaactgcttcaaaactagatggagcactagatgttcagcgtgctctctctcttctgtcagctagttcaaggggtttgactgaccccggacaccaaacatcttctatcatccaatttacgaattcgaaccaaaacagcacattgcccagtgtaccaagcgaaggaaactctaatgtacccttttgggttgatggacaacatcaagcagtagagcctcaggtgtttcagttcacaatggacaccggtaacactgtgtttccggatctagagcggatcaaaccttcctacgagtcttcaatgtttggtctgaaccagatacattga

SEQ ID NO: 22178 - DNA, 1543 bp, Oryza sativa
  Clone ID: TF_OsC1737_1
atttgctcggggagttcgatgaggagaagaggagctgcacgaagcggctcgacgggcacaacaagcggcgtcggaagccgcagcctgatcctctgaaccccggcaaccttttcgccaatcaccacggagcggcatgattcacctcgtacccgcagatcttctcgacggcacgcgggggcgcgggcgtctatttgttgcgcgggcgcgggagggggacggcgccgccgctactgctataaggagcgcgccgtgcaccgcctctcacaatgtcgaccgccgccgccgccgccgctgcccagagctggtgcttcgccactgtcaccccgcgctcccgcgccacagtcgtcgccagcctcgcctccccatcaccgtcctcctcctcctcctcctccaacagcagcaacctcccggcccccttccgcccccgcctcatccgcaacacccccgtcttcgccgcccccgtcgcccccgccgcgatggacgccgccgtcgaccgcctcaaggatgggttcgccaagttcaagaccgagttctatgacaagaagccggagctcttcgagccgctcaaggccggccaggcacccaagtacatggtgttctcgtgcgccgactctcgcgtgtgcccgtcggtgaccatgggcctggagcccggcgaggccttcaccgtccgcaacatcgccaacatggtcccagcttactgcaagatcaagcacgctggcgtcgggtcggccatcgagtacgccgtctgcgccctcaaggtcgaactcatcgtggtgattggccacagccgctgcggtggaatcaaggccctcctctcactcaaggatggagcaccagactccttccacttcgtcgaggactgggtcaggaccggtttccccgccaagaagaaggttcagaccgagcacgcctcgctgcctttcgatgaccaatgcgccatcttggagaaggaggccgtgaaccaatccctggagaacctcaagacctacccgttcgtcaaggaggggatcgccaacggcaccctcaagctcgtcggcggccactacgacttcgtctccggcaacttggacttatgggagccctaaatccgaccgtccgtccgttcagttcgtcagtttacgccaacgcttttgcataagtactacctgaggatatcgtccccgatcatcgatgtgaacgcgtggagtactactacgtacgtaccggatggttcgatatatgtgaatgctgtattaagtaataacaagaaatatatctcctctactttttcctgacgcggagttgtactgcctatgatgcataatttgatcgcagtgtgatcaaaagacatcagctataatgtcttaataatattattatgaagagtttacctttttactaccttttaaaaaaaaaaaaaaaaaaaagagaactaaaactagatgtagatcgcgagtccgtgcgccgactctcccccgtgcccgtcggcgaccatgggcctggagcccggcgaggccttcaccgtgcgtaacatgggcaacatggtcccagcttactgcaagat

SEQ ID NO: 22179 - DNA, 3175 bp, Oryza sativa
  Clone ID: TF_OsC113993_1
gcacgaggggtgcagcaggagaggagacgcgagcgacgacgacaaacaaagcagcgctcctgctcgctcgcatgccgtggctccccctccctgccgtcgctgtccatgtcctagtgaagtgtgaagccgccaatgaagacgatgtgaatatgctgtccattgcacaaggttgggcgagggcgggcggcggccagatcctgcctcccccaggatacttcggcccgcgttcccctccccccctcactcccacgggacacgcgccgccctacgcctcctcctcccttctccaactcccccaagactgcttgtgagagaagctactctaccctgctcggtttcttgattctctctctgcctgtcgtcggattgattgcaagatcaagataggctgcacagtggcgtgtgtgattaatcatgtgtgcctgatgcacttgtagctggggatgcaggtgaatctgaggccgttactgtaccaagaacaggaggatcactagaggggaagagattcttgacgaagcacacaaagggaggatcctaaattgatgtagcaggaatgtcgagtgggctcaagaagaagggcctggagtgggatttgaacgattggagatgggattcaaacctgttcttggccacaccatccaacgcttctccatccaagtgcagcaggagggaattgggccgagccgagggggagatcgattttggtgtggttgataagaggagaagagtctcaccagaggacgatgacggcgaggagtgcatcaatgcagcaaccacgaatggggacgatggccagatttctggtcagagaggaaggagcagtgaggacgagatgcctaggcaaggcacctgttctagtagcggtccgtgttgccaagtcgacggctgcacggtcaatctcagcagtgccagggattacaacaagaggcataagttttatggtaattatttgacatgccttgtcaggtttcactttcttcaagaatttgatgaaggaaagaagagctgtcgctcacggctagcacaacataacagaaggaggaggaaagtacaagtgcaggctggtgtagatgtgaattccttgcatgaaaatcattctttgagcaacacattactcctgttgttgaaacaactttctggcctagattctagtggtccatctgagcaaatcaatggtcctaactatttgaccaatcttgtgaagaatcttgctgctcttgctggtacacaaagaaatcaagatatgctaaagaatgcaaattctgctgcaatagcatcacatactggtaattatgttgcaaaaggcaatagtctacatgactcaagaccacatattcctgtaggcactgaatccactgcagaagaacctacagtggaaaggcgtgtgcaaaattttgatttaaatgatgcttatgtggaaggagatgagaatcgaacagataaaattgtgtttaaactcttcgggaaagagccaaatgattttccttctgatttacgtgctcagatcctcagctggttgtcgaattgcccaagtgatatagagagctatatcaggcctggctgtatcatcctaactatttacatgcgcctccctaattggatgtgggataagcttgctgccgacccagctcactggatacagaagctaattagcttgtccactgataccttgtggagaacaggatggatgtatgcaagggtgcaggactacctgacattgagttgcaacggtaatcttatgttagcgtctccctggcagcctgcaataggcaacaagcatcagatattgtttataacccctattgcagttgcttgttcttcaacagcaaacttctcagtgaaaggtctcaacatagctcaaccaaccacaaagttgaagatcttgatcaaagcagcctttcatttccctttgttgttgctgaagaagatgagccacatacgagctacatctgagactccaaaagattgtactgagggctttcctgctgcaagatttagatggttgctgtcctttgcagttgatcgggaattttgtgctgttataaagaagcttctggacaccttgtttcagggtggtgttgatctggatgtccaatcaacagttgaatttgtcctgaaacaagatttagtatttgtggctgtcaacaaacggtcgaagcctttaattgactttctgttgacatacacaacatcttctgctccaatggacggaactgaaagtgctgctccagctcagttcttgtttacacctgacatagctggtccatcagatattacacctcttcatattgcagccacatacagtgatactgctggtgttttagatgctttaactgatgatcctcagcagctgggaatcaaagcatggaagaatgctcgcgatgctactggattgactccggaggattacgctcggaagagaggccacgaatcctacatcgagatggtccagaacaagattgacagcaggttacccaaagctcatgtgtctgtcaccatatccagcaccacatccaccaccgacttcaccgaaaagcacgcgagccaatcgaagactacagatcaaaccgcatttgatgtggagaagggccaacagatcagcacaaagccaccactgagctgcaggcagtgtctcccagaactcgcttaccggcatcatttgaacaggtttctgtcaaccaggccagcagtactctccttggtcgccattgctgctgtctgtgtctgtgtagggttgatcatgcaggggccaccccacattggaggtatgagaggtcctttccgctggaattctttgcgttcaggccccaagtgatatggtagattgactgccaagcatctgcaaatacagttcagctgtatcatgcagcatggagatgttttgcttcgagtctgtatattcttgtaacatagatttatctttttacggaataactatatttgtttactactttactgtacaacatttagaattcgaaacttgcatatctagaaattccattggacaggcatcctgaccttgatagaatgcagtactatctgaatggttttaccgtgagcagagcagctgacagagtgacagtgcttccatgctctttaataatactccatccgtctcataatataacaaaaaaaaaactcaactagtctctcccctcgtgccgaattcctgcag

SEQ ID NO: 22180 - DNA, 543 bp, Oryza sativa
  Clone ID: TF_rsiceg_12459.y1.abd
ctgcaggaattcggcacgaggcctcttctctctccccctctcctggaggagagagaggagaagaggagggggggccgcgccaagagccacgcgcgctacagtctccttcccacccgcgaccgcgagcaatggagatggccagtggaggaggcgccgccgccgccgccggcggcggagtaggcggcagcggcggcggtggtggtggaggggacgagcaccgccagctgcacggtctcaagttcggcaagaagatctacttcgaggacgccgccgcggcagcaggcggcggcggcactggcagtggcagtggcagcgcgagcgccgcgccgccgtcctcgtcttccaaggcggcgggtggtggacgcggcggagggggcaagaacaaggggaagggcgtggccgcggcggcgccaccgccgccgccgccgccgccgcggtgccaggtggaggggtgcggcgcggatctgagcgggatcaagaactactactggcgccacaaggtgtgcttcatgcattccaaggctccccgcgtcgtcgtcgccg

SEQ ID NO: 22181 - DNA, 1203 bp, Oryza sativa; identical to SEQ ID NO: 12759
  Clone ID: TF_OsC300385_1

SEQ ID NO: 22182 - DNA, 3456 bp, Oryza sativa
  Clone ID: TF_OsC51748_1
atggaggctgcccgggtcggggcgcagagccgccacctgtacggcggagggctaggcgagcctgacatggacaggcgcgacaagaggctgttcggctgggacctcaacgactggcggtgggacagtgaccgcttcgtcgctacgccggtgcccgccgcggaggcgagcggcttggcgctgaacagctcgccgtcttcctccgaggaagccggggccgcgtcggtgagaaatgttaatgctagaggtgactccgataagaggaagcgggtggtggtcattgatgatgatgatgtggaggatgacgagctggtggagaacggcggcgggtcactgagcttgagaattgggggtgatgctgttgcccatggagcaggggtgggtggtggtgctgatgaggaagacaggaatggcaaaaagatcagggtgcagggaggcagtcctagtggccccgcgtgccaggtggagggctgcactgcggaccttactggtgtgagggattaccatcgacgacacaaggtctgcgagatgcatgccaaggctaccactgctgtggttgggaacactgtccagcggttctgccaacaatgtagtagaaagtcttacattgtgaaacggagggactattatggaagtaatgattttggatcgtaccttttgattttgaagaataattttagattccaccctcttcaagaatttgatgaagggaagcgaagttgccgccgacgtttagcaggccacaacagacgaaggaggaagacccgccctgaagttgctgttggtggttctgcatttactgaggacaaaattagcagttatttattgttgggtctccttggagtatgcgccaatttgaatgctgacaatgctgagcatttaagaggtcaggagttgatatctggtcttttgagaaacctgggggcagttgccaaatcattggatccaaaagaactctgtaaactcttggaggcatgccaaagcatgcaagatggatcaaatgctgggacctctgaaacagctaatgctttggtaaatactgctgtagcagaggctgcagggccatctaactctaagatgccttttgtgaacggtgatcaatgtggcctggcatcatcatctgttgtaccagtacaatcaaagtctcccactgttgcaactcctgaccctccagcatgcaaatttaaagattttgatttgaatgacacttatggtggcatggaaggtttcgaggatgggtatgaaggttcacctacaccagctttcaagacaactgattctcccaattgtccatcatggatgcaccaagattctactcaaagcccaccacagactagtggcaattcagattcaacatcagctcagtcactgtcaagctcaaatggagatgctcagtgtcggactgataaaattgtcttcaagcttttcgagaaagttcctagtgatttacctccagttttgcgatcacagattcttggttggttgtccagtagccctactgatatagagagctatattagacctggttgtattattttaacagtatatcttcgcttagttgagtctgcatggaaagagctctctgataatatgagctcatacctggataagcttctgaatagttccaccggcaacttttgggcatctggtttggtatttgtaatggtacggcatcagatagctttcatgcataatggtcaacttatgttggacagaccacttgcaaacagtgctcatcattactgcaagattttatgtgtgagaccaattgctgctcctttttcaacaaaagtgaatttcagggtagaaggcttgaacctagtcagtgattcctcaaggctaatttgctcatttgaagggagttgtatattccaggaagacaccgataatatagttgatgacgttgagcatgatgatattgaatatctgaacttctgttgtcctctccctagttcaagagggagaggatttgtggaggttgaagatggtggatttagcaacggcttcttccctttcataattgctgagcaggacatatgctctgaggtctgtgagctggagagcatatttgagtcctccagtcatgaacaggcagatgatgacaatgccaggaaccaagctttagagtttctaaatgagctgggctggcttcttcatagagcaaacataatatctaaacaggataaggttcctctagcatcctttaacatatggagattcagaaatcttggtatatttgccatggagcgggaatggtgtgctgtgaccaaactgctgttagatttcttatttactggactcgttgatatcgggtcccagtctccagaagaggtggtgttgtcagaaaatctgctacatgctgccgtgcggatgaaatctgcccaaatggttaggtttctgctgggatacaagccaaatgaaagcctgaagagaactgcagagacattcctattcagacctgatgctcaaggcccttccaaatttacccccctccatatagcagctgccacagatgatgcagaggatgtattggatgcacttactaatgatcctggactggttgggatcaacacgtggagaaacgcgcgagacggcgcaggcttcaccccagaagactacgctcgccagaggggcaacgatgcttacctgaatatggtcgagaagaagatcaataagcatcttggcaaaggccatgttgtcctcggcgtccctagcagcatacaccctgtaataaccgatggtgtgaagcctggtgaagtcagcctggagatcggcatgaccgtgccgccgccagcaccgagctgcaacgcctgcagccgtcaggccctgatgtaccccaactcgacggcgaggaccttcctgtacaggccagcgatgctgaccgtgatgggcatcgccgtcatctgcgtctgcgtcggcctgctactccacacctgtccaaaggtttatgcagctcctacattcagatgggagctgttagaacgtggaccaatgtgaggaggagcttagaatggaataagtgtagttgtgttttacgtaagtcgagagcttagtgtgctggctaagatcaaaataacagtactatgtgaggaggatgatcctttgtatttaaagcaggatcgtttcgtttatataaaagcttacataccgtcattattaattattattgattagttattattatttatattatatttaccgcctaacatgtaaacagaacatatgttccataaaattcatggtgtggttgtagaaaaaaaaaaaaaaagagcttcttaatggaggcatgcttctggctgctttcggttcactctagacatctagttttgtggctacaagattttgtcggtgttgtattgttgtaaactcggaataaaacttttttttttcgtcagcgttgtattgttgtaaactccgccataaaacatttttttcatgcgctttaaaaaaaaaaaaaaa

SEQ ID NO: 22183 - DNA, 2548 bp, Oryza sativa
  Clone ID: TF_OsC952_1
atggattgggatctcaagatgcctgtttcttgggacctggccgagctggagcacaacgccgtgccgaacatggcggcggcggcgagcgcggcggagccgggcattgccgcggtggcggcgtcgcgcggggcgccgggccggccggagtgctctgtcgacctcaagctcggcgggctcggcgagttcggcgccgcggacgcgctcaaggagcccgccgccgcggcgaaggcgccggtgtcgagcgccgccgccgccgcctcggtggcgaaggtgccgccgtccacgagcacgctgaagcggccgcgcggcgggggcggcggcggcggcgggcagtgcccgtcgtgcgccgtggacggctgcaaggccgacctgagcaagcaccgcgactaccaccggcggcacaaggtgtgcgagccgcactccaagactcccgtcgtcgtcgtctccggccgcgagatgcgcttctgccagcagtgcagcaggtttcacttgcttggggagtttgatgaggctaagcgtagttgtagaaaacgcttggatgggcacaatcgacgccgcaggaagccacaggcagatagcatgagttctggcagctttatgacaagtcaacaagggacaaggttcgcgtccttcactcctccaagaccagagccaagctggcctgggatcatcaaatccgaggagaccccatattacagccatcatcaccaccctcatccggtgatgaccagccggcagccgcatttcgtcggctcgccgtcgtcggcgacgacggcggcgttctcccccaaggaaggccggcggttcccgttcctccatgagggcgatcagataagcttcggcggcggcggtggcgcggcggcggcggcgacgctggagatctcggtgtgccagaccaccgtcgtcgcgccgccgccaccggagagcagcagcagcaacaagatgttctcctccgacgggctgacgacggcgacgacgacgacgaccaccgcccaccaccaccaccaccaccaccaagtgctcgactccgattgtgctctctctcttctgtcatccccggccaactcctccagcgtcgacgtcagccggatggtccagccgtcaccggcggcggcggcgggagccgcaccatgaccaccctccactccagcatagtactgcgcttagctaattaagcagcaacttaacttgatcttcgtgtgaccgatcgatggctcgcgcggcgaataataagtatgtggcggcggtgatggtggtggcgctgctgttggcggcgccggcgggagcgcggtgacatgcgggcaggtggtgagcatgctggcgccgtgcatcatgtacgcgacggggagggtgtccgcccccaccggcggctgctgcgacggggtcaggaccctcaactccgccgccgccaccaccgccgaccgccagaccacctgcgcctgcctcaagcagcagaccagcgccatggggcgacctgaggccggacctcggcgcccggcactcccatccaagtgcggcgtcaacatcccacaggctgtcaggctttcacgcggttacggccactgcaacctgccgccgtcaggccaccaccgccgaccgccagaccacctgcgcctgcctcaagcagcagaccagcgccatgggcggcctgaggcccgacctcgtcgccggcatcccctccaagtgcggcgtcaacatcccctacgctatcagcccttccaccgactgctccagggtgcactgagtggatcaacgtcaagtgatgccacaataataatggagagatggatccatcgatctgcggctctcattttgcggttgctatctgcaatattcgtcgtcgtcagagagatcgagctagaaatgcatgttactcctccgttctgttactatctgcttacctgttgcttcgtcgcggtttgatagtcgtcgttatagctagtgtaagagtgtgagggttgattttgatctgtctcctttacgggacgaggggcagacgaatcatgcatgaatcttagaggacctgcttgcattgtaccttactgcatgcatgcatgcttcaatatatatccatcaaatgaagagtcttttaataaaaaaaaaaaaaaaaaaaaaaaaaaaaaaaaaaaaaaaaagcagctgaacgccgtgctggtgccgggctccaacgagaacgagatgaactaccacggcatgtttcacgtcggcggcgagggctcctccgacggcacgtcgccgtcgctcccattctcgtggcagtagttttgtcagtaactgtatgttgctgccttagtttcagtagagttggttcttcatttcttttcagtgatcaaattatggtttctgttcttatctgccatggtaagttcctttttttgtcttcttcttcttgccttcatttgagttaattacagcattgatttgtgtgaacaaaattcatcataaatcagttcctcgcgagatcatgggtctcaacatgatggtgccaagtgagaactgcagtattgtgcagttttcagttttgagtctaagttgtataaacttgcag

SEQ ID NO: 22184 - DNA, 770 bp, Oryza sativa
  Clone ID: TF_OsC1528_2153
ttttttttttttttttttttttttttttttacatgtgaagaatcacaaagtcaaataataaatagatagacagaaagatatgtaaatgcaacaacaagcagtaaagttgatctctcccagtcacacgttaattgataagtgcaacacacatatatgcctcagtaagacttagattccagttacaccattacttctgatacttgagctaatgcaatcatgtaggagaaatcctgctttttatggttcatgcttgtgtaaattacctgccatatcccaaatgcttcccaaactgccaaaatcttgtccatcagatttaggccacctctgctcctcctcatccccatcatacttagcaatcggcgacaacgacgggcagcttggagagcgcctcacacaccttgtgccaccggtgctagtcgtggcacctgctcagctcctccttgcacttgtccaccgcgcaggtcacttcaccggcaccgaggccacagctgacaagtgacggccaagtgaccaactaaccagtagaggcagctgactgtagcagttgctccaagagcccttccttgtctaggttcaaatctcaaatccgttgattcacaaatcataatcactttaagtggcgtggatgatgcggatcggttgagctccgtgtggcgccgccgagctcctcgtcacatcgggcggcaagaggacacaggtggcctacgggctttctacgacggcggtggagacggacggcgggagaggaagagggacaagggggcggcgct

SEQ ID NO: 22185 - DNA, 3025 bp, Oryza sativa
  unsure (1)..(3025): unsure at all n locations
  Clone ID: TF_OsC98_3
tccggnaattcccggngtcgacccacgcgtccccacgcgtccagctagcggctatcaaacccccacaccactgctcgatcgatcgtcgcagccggagtaactaaggcagagatcagatcaggcgaattaggagcatatggcgctgtcgacggcgcagacaggggagtcgatgcactcctcgacgttcgcgtcgcggtacgtgcgcacggcgctgccgaggttcaggatgccggagaagtcgatccccaaggacgcggcgtaccagatcatcaacgacgagctgatgctcgacggcaacccgcgcctgaacctggcgtccttcgtcaccacgtggatggagcccgagtgcgacaagctcatgatggccgccatcaacaagaactacgtcgacatggatgagtaccccgtcaccaccgagctccagaaccggtgcgtgaacatgatcgcgcatctgttcaacgcgccgatcggggacgacgagacggcggtcggggtgggcacggtggggtcgtcggaggccatcatgctggcggggctggcgttcaagaggaagtggcagaacaggatgaaggccgaggggaagccccacgacaagcccaacatcgtgacgggggccaacgtgcaggtgtgctgggagaagttcgcgcgctacttcgaggtggagctcaaggaggtgaagctgacccaagggtactacgtgatgaacccggagaaggccgtggagatggtcgacgagaacaccatctgcgtcgccgccatcctcggctccaccctcaacggcgagttcgaggacgtcaagatgctcaacgacctcctcaccgccaagaacgccgagacagggtggaacacgccgatccatgtggacgcggcgagcggcgggttcatcgcgccgttcatctacccggagctggagtgggacttccggctgccgctggtgaagagcatcaacgtcagcggccacaagtacgggctcgtctacgccggcgtcgggtgggtcatctggcgcaacaaggaggacctccccgatgagctcatcttccacatcaactacctcggcgccgaccagccaaccttcacgctcaacttctccaaaggatcgaaccagataattgcgcagtattaccagctcattcgtctcggattcgaggggtacaaggacatcatgcagaactgccgggacaacgcgacggtgctccgggaggggatcgagaagacgggccacttcgacgtggtgtccaaggactccggcgtgccgctggtggccttctccctcaaggactcgtcgcggtacacggtgttcgaggtggccgagagcctccgccgcttcggctggatcgtgccggcgtacaccatgcccgccgacgctgagcacgtcgccgtgatgcgcgtcgtcatccgcgaggacttcagccgcggcctcgccgagcgcctcatcaccgacctcaccaagacggtggccgatatggacgcccacgccgtcaagaaggccgccgccgagccggccaagaagaccgtgcgggagatagagaaggaggtgaccacctactggcggagtttcgtcgccaggaagaagagcagcctctgggaggacgagggcaatggtggtagcggcggcccaagatgttgctcgtcgtcctcgccctcgcaattaccggtgcggtcttcgacggctcgcgagtcgctggaccacatctccatcaactgcactggcggggtcggggccacatccggctgccgctccgtccactcgcgccgttcagcaccgacgaggagggcgaggctcctcgtccccgctcagccgcggctttgcttggatagtcccgactggaggcagtcggcggcggggagggagtgggaacaggagcgggacgacggcgacgacagaagaggaagttggctcgcgtcggaatcttggtggttcgtaggcgatgatgccaccgccgccgctgccacccgagttcgacgcgagaaacggcgtgcctgcgccggggcaggcggagcaggaggcgatggagctgcacgggcgccgccatcctcctcctcggcgagcacgagggcggcggcctcaactccgggcggtgggatgcgcggttcgcgcatgcactacctacggtactacgacgcggcattcgacgcggtggacgcggcggggttgctggagactagacccgcgagggccaaggtggaggagatgttcgcgcgggagatccgcaacgcagtggcgttcgagggcgcggagcggtttgagcgccacgagagcttcgccgggcggcggcggcgcatggaggacggtggcggtttgcagtggggttcgaaggcggaggagaaatgtttattgccgtcgtcctccttggctcgtcgtcccagacgccaaccgtcgcccccggtttcgctgcgccccgatgggagcttgccaccagccgtcgccgccgctccactcgtcctcccactgccacgagcctccgcggccgagccgccgcgctgcgccccgatgccgccaaccgccgctcccctcgtcctcccgccaccgctgccaacagagaaagagagaatatagcgccgtcaagaaggccgccgccgagccggccaagaagaccgtgcgggagatagagaaggaggtgaccacctactggcggagtttcgtcgccaggaagaagagcagcctcgtttgctgatcatcgactcctgcactcgcgcgtacataaagtgcaggaacgaataattcttgacccgtcttgcattgagttcttcgtttgctgctgcttcttttctttttttttttccttttcacccgctgaattttgagttcagtttcaaattcgcttcgatagatttgtgtatgtcacaccgatttgtggcattcttgcagacaagttaccaatatgaaatgcgtataggcatgtacacgcagagacgtgtcaggcagaacagaagtgagatgcaccgatctgtaccggccatggcatggaattggtttgtcatgggctatagttggttgacagaataagttcattttgtgaccctt

SEQ ID NO: 22186 - DNA, 381 bp, Oryza sativa
  unsure (1)..(381): unsure at all n locations
  Clone ID: TF_8955113
atccggtacgagtntcanggggctcngtggatctctctccttcaggcccttgcnnccatncctgntggaccaccaactgtaangatcactggtatagatnactcngtgtcngcttangcnccaagcagcaggctatanctggtctgaaagangctgtcccncntcccctgcctgtncaaggtgcnttgaaattccncccacttganatctccgncancaaggtggnggcngancatcncgnaatcatccccggggaatccctcgccntgaactncaccctgcnagctgcaccacnttccagacgactcngtaagcncngccaacnnccntgacttnntcctaatgatcgtnaanancctgtcccctaaggtacccaccctg

SEQ ID NO: 22187 - DNA, 651 bp, Oryza sativa
  Clone ID: TF_OsC1713_4566
ctatagcgcgcccaggaacgcgtccgcgcgtgacttcgacggggacagcccggactccgggcttcgcctctccttgtcgccgcccgcgccggccgtggcgtcgtcgtcagacgccaggaggcagtgcagctggaggctgaagcagatggcgagggcctcgccggtcttcacgcggagggactccacatcgagggcatcgaggcgggacaccaccgggttgaactggaagggcacgtcgaggcgctctgcttctttcgtgagcgccatggccgtacgagataaattagcagcagctgcagcagcaggagctcgcggccgcgcaggaggagctccccgccagcctcctccccacccgccggtggcctgctgccgcatctcagcgccggcgacggcggcaccaggcgagcgcgtaggggcgacggcagcacctcgtgggtggagggccgccggcgacgggcggagcggctgccgcatcccggagcctcggcgcggctgacggcgggagcttccagatctggtacatccctctctctccagcctctccaccgcctttggggactcactttcgccggcggcaagtgacgatgacgatgggcggaggtcgttccggaactccggatgggggcgggagttcaacccaaacgtgatcat

SEQ ID NO: 22188 - DNA, 918 bp, Oryza sativa
  Clone ID: TF_OsC97073_1
tggtggctgagagtccaaggaaccatgccattgaagccaattaggaagatgaacccacatgtgttcattcatggggtggtgaatggatcttacaatgcaccattttttgtgacacgcttccgggaggccttgttccactattctgctatcttcgacatgttggagactaacattcccaaggataatgagcagaggttgctcattgagtctgctctatttagccgggaggcaatcaatgtgatctcttgtgagggactggagaggatggagaggccagagacatacaagcaatggcaggtacggaaccagagggttgggttcaagcagttgccattgaaccaggatatgatgaagcgtgcgcgggagaaggtcaggtgctaccacaaggacttcatcatcgatgaggacaacaggtggttactacaaggatggaaagggcgcattttgttcgcactgtcgacatggaagccagataatcgatcatcttcatagcttgttcagctctaattattgcatgatattgtaaatgtagacctgttcatatttttttggggggcatttggaccgattgttcctggtaggcaatatattgctaggtatgttatttgaacaaccaagtaatgggaaacttctgcttaggaattgtcttatatgatgatctggttaatctctgtccgtacataagatgaacccgcctgttcctagaatctctgcacatttgttgtgatcattattgttgcttccgacgggaacagttggttcaattttggtggagctgctagatatgttgaagttgtagaccttgggttgtcttatgtatggatgagccttgtacagtatttcttccaaacattcagtacttgtcactaagttctggttctggataatctatcatgcacgtgcattctctattcgtgc

SEQ ID NO: 22189 - DNA, 1437 bp, Oryza sativa
  Clone ID: TF_OsC348872_1
atggagaccatgtcatacccttgctcccttctcattcccttctccacacaatttgaagagatcagtagcagtagcctcctcctatggtctcctcaagcagaagaaaatcctcatgagaatgccaatatgtatgaatttgatgctgatcactctcatgatcagattcatcaagatcatcagttcttggacatgatggtcatccaagaatctgctaatgaatttgatggtgatcactctcatgatcagattcatcaagatcatgagttcttggaaacgatggtgatccaagaatctgctaatgaatttgatggtgatcactctcacgatcagattcatcaagatcatgagttcttggaaatgatggcaatccaagaatctgctaatgatttgctgcaactgcaagatgatttctctgtccccaatgctgatccattagcagctagctttgaatttgatgagagattagcagtggcagggcacgagaacggcaacgtggtggcaacccaggaggagagcgcaggtgaccttctcctcgccggcgccatggccgtggacgccggagacgctgtccacgcctcggcgatcatgtcgaggcttgacgacctcctcgccgacatcgccggcagaagaagctgtgaagcaacaagcccgggtgatcacctggcctactacttcgcccgaggcctcaagctccggatctccggtgcggccacgccggcgtcgtcgccgccgccgccggcggccaactggtcgtcgccggcgtaccggatgctgcaagagctgacgcctttcgtcaagttcgcccacttcaccgccaaccaggccatcctcgaagccacggcggatgacctcgacgtccacgtcgtcgacttcaacgtcggcgagggcgtccagtggtcgtcgctcatgtcagacctcgccgccgccggccgccaccgctgttccacctcacggacgctgaagcttctcctcctcggcacgatcacaatccttcaaccaaagctggtgatcctgatcgaggacgagctatcccgaatcagcaagaacccaccatcaccgtccctcgccgcgccgccgccgttcccggagttcttctccgacgcggtggcccacttcacggcggtgatggagtcaacggcgagctgcctcgtgagctacgacgacgaggcgtggctgagcctgaggcgcgtgggggaggaggtggtggggcccagggtggaggacgctgtggggaggtatgggtcactggcaggtggggcccagatgatggaagggctcagggctcgtgaggtgagcggcttcagcgttgctcaggggaagatgttggctgggctcttcggtggagggtttggggttgtgcatcaggagaaagggaggctcgctctctgctggaagtccaggcctttgatctcagtgtctctttggtgtcccaagtag

SEQ ID NO: 22190 - DNA, 2433 bp, Oryza sativa; identical to SEQ ID NO: 12807
  Clone ID: TF_OsC334805_1

SEQ ID NO: 22191 - DNA, 1443 bp, Oryza sativa
  Clone ID: TF_OsC39025_1
ccggccggaatgagaatgtgcgacgatgtgagattccaccaaaccaagccaagcaagcctcacaccctcgcccgcgtcgtcttcctcctagccgccgctgctctgggcaacgtcagcggcgcggtgtaccacgccgatcctgctgctgccgtgtacgcgtctctagtccctggcatggctgtggtccccgggcgtgctccgccgtccgccgtgcagatcgaggcggcgaggcggtggaaggagctggagaagatggccctgcggtcggtgaatctcatggtgacgtgcgccggcgccatccaggcgggcgactacgcggcggcggccgggagcctgtccgacgcgcgcgagatcttcgccaagatgcccaccacccgcaccgggatcggccgcgtcctcacccacttcgccgacgcgctcgccgagcgcctgttcccggcgttcccgcagtccgcgccgccgccgcccccgccacgcggggagcagcgcgagctcttccgcgggttctacgaggcggggccgtacctcaagttcgcccacctcgcggcgaaccaggccatcctcgaggcgttcgaggggtgcaacagcgtgcacgtgatcgacttcgccctcaccgatggcatccagtggccgtcgctcatacaggccttggccgtccgccccgggggcccgccgttcctccgcatcaccgggatcggcccccacgccgccggcaaccgcgacgagctccgcgacgtgggcctccgcctcgccgagttcgcgagatcttgcagcgtccccttcgccttccgcgggatcgccgcggaccagctcgacgggctccgcccgtggatgttccaggtcgcgcccggtgaggcagtcgccatcaactccgtgctccagctccaccgcctcctggtcgaccaggacgccgccgccgcggcgtcgttcccggcgcccatcgacggcgtgctagactgggtcgcgtccatgaaccccagggtcttcacggctatcagccgccatggcggcggcgacggggcgggcaacccgctcgccgaggcgtacctgcagggggagatcgccgacatcgtgagccgcgaggggagcagccgggtggagcgccacgagcagatgccgcggtgggtggagaggctgcggcgcggggggatgacgcagctgccgctcggcgccaccggcctctggcaggcggcgatgcagctccgcgagttctccggcgccggcttcggcgtccaggagaacggcggcttcctcacgctcacctggcatagccagaggctgtactcggcgtcggcgtggcgcgcgaccgcggggaagaagatgacgatgatggctagcggcgccgccgacgccatggaggagagtcagaacagcaacaccaacggcggcggcggcggaagcagtggtggtggccatggtgctctcaaccaaatcatgcagtga

SEQ ID NO: 22192 - DNA, 1464 bp, Oryza sativa
  Clone ID: TF_OsC545_37
atggtccgcaagcgccccgcctccgacatggacctgccaccgccgcgccgccatgtcaccggcgacctgtccgatgtcacggccgccgcggcgggcgcgccgacgttgtctgccagcgcgcagctccccgcgctgcccacgcagctcccggcgttccaccacacggacatggacctcgccgcgcccgcgccgccggcgccgcaacaggtggcggcgggtgagggtgggccgcccagcacggcttgggtggatggcatcatccgtgacatcatcgccagcagcggcgccgcggtctccgtcgcgcagctcatccacaacgtgcgtgagatcatccggccatgtaaccccgacctcgcgtccatcctcgagctccgcctccgctctctcctcaactccgaccccgcgccgccgccgccgccgccgtcgcatcctgctctcctccctcccgacgccacggcgccaccgccaccacccacgtcggtcgccgcgctccctccccctccgccagcgcagcccgacaagcggcgtcgcgagcctcagtgtcaggagcaggagcccaaccagccgcagtcgccgaagccccccaccgcggaggaaaccgccgccgccgccgcggccgccgcagcggcggctgccgcggccgccaaggagcgtaaggaggagcagcggcggaagcagcgcgacgaggagggcctccacttgctgacgctgctgctccagtgcgcggagtcggtgaacgcggacaacctggacgaggcgcaccgcgcgctgctggagatcgcggagctcgccacgccgttcggcacctcgacgcagcgcgtggcggcctacttcgcggaggccatgtcggcgcggctggtgagctcgtgcctggggctgtacgcgccgctcccgagcccgtccccggcgggcgcgcgggtccacgggcgcgtggcggcggcgttccaggtgttcaacgggatcagcccgttcgtgaagttctcgcacttcacggcgaaccaggcgatccaggaggcgttcgagagggaggagagggtgcacatcatcgacctggacatcatgcaggggctccaatggccggggctgttccacatcctggcgtcgcggccgggggggccgccgagggtgaggctgaccgggctgggggcgtccatggaggcgctggaggcgacggggaagaggctgtcggacttcgcggacacgctgggattgccgttcgagttctgcccggtggctgacaaggccgggaatctggacccggagaagctgggcgtcacgcgccgcgaggccgtcgccgtccactggctgcgccactccctctacgatgtcaccggctccgactccaacacgctcgggcccctcccgtccgcctccgccgtgcgtcccccgccccttgtcaactcgggaccccccggaatcatggctactttacaccctatacttctcattgacattgtgacctag

SEQ ID NO: 22193 - DNA, 3183 bp, Oryza sativa
  unsure (1)..(3183): unsure at all n locations
  Clone ID: TF_OsC65210_1
tttttttttttttttttccacatcaatgcaattaataattaaaaaaacattttcacacacatcaatgggcaaaaatgtttgaccctctgttgcaacatggatcatgaatagaccaaataagttggccgaaaagatagttctcaggttgacaacagcacaagactagccaaaacccagttcaacattttgagcatattacaatgttactgtctgccacagtgcagtaagcacctagtaaaaacagagtaactggtgtcaattacaaccggatcaactgactggattgatcgcaagaaccggtgacgctgcagcgaacatcatccggaccaggacctaagtctattttctaagtggtagtgtggcactaagctgcaacatgacaacagaagcaactaattaacatcacataaaaacatggatatctacatgcatgcttggttatcttatggcttcaacaacttgggctaccaattctccctcatagcctgcattgcatgaattggtttgaatcagaagaagaaccaacccattggaatcacaagtgcactccaaattctagataggcatacctcaagtcattgggtccatcaaaccaacaccaacaccatcgatcttcatacatgacatactgccactagccatcttattgaaatacctagatcttatatttgtcgcgatgccaaaaaaaaaaacaactaaaaataagagagagcatcatttggcgtccatgttgagatggcatagagtattcgtcccttccatccttgcaagagccattggtgatctatatctatcacgaagtccttgtggtagcagtccttgaccttgttccgcactacctgaacaatttctggattcaatggcagttgcttgaagccagcccgttgattccgcacctgccattgcttgtatgtctcagggcgctccacccgatctatgccctcacacgcaatgacattcagagcagctcgtccaaagatgttttgctcaatcagcagccgctgttcgctttcccttggggtagttgcatccagaacatcgaacaaggccgagtaaaagaacaaagcctcccggaaccgtgtcacaaagaatggtgcactgaatgagccattcactattgcatggatgaacacatgaggctgcatcttccggatgttgctgagcacaatatcccttgggctgtcgatcacaacactctcatccatcaagttcttaaattgatactggcaattcacaatgagcacctcatcaggatcaatgttcagatcctctttgcggactgactccatcttaaccgctgcaatggcattgtacttgaatggcaccccaaactcctgggcgtatttactgagccggtgccctgtctcctcaatacgctcagttggccggaaaccaggctgggggaggtcaatgccagtcatccttacctccggtggcccaccctccctttgtgatatccgccgcaggaagcacggccactggaacccatactgtataccgtaatcaacgatgtgtatcttcttcttacccaaggaagcattgtagatggtttgattggagaaaatgaaggacaccttcttgaagcagatggcagccatgtacagctggtacgcttggaggatgtccacggctgaggtgcgcttagccacgagcgactggtgcaccaggctgcccgtgccagcgatccgcgcctgcaagccctcagcaaagcaatgagcaaggcgctgcgtcgcgtcgccggtcggtttcgcgtgctgcttgatctgcttaagcagctcggtggcgctccggcggtcgtcggtggccacggcctgcgcgcagtggatgagcagcgtgcgcaggtccaccacgtccctcccgccccgccgccctcccttcaccttcccgttcccacccttcccgccggcgctggcctcgttcttggccgcctcctccttcatggcaatcctcagcttctccatcatctcggtgcaattctcatgggagggcatcatcaccttgtcgaacatggcgcgcgccgcgacatcgtccccctgaaccgcggtctgcttgctgctcctccctccctccagctccagctcctcgtcgtcgtacgggttcttccgccctcgtccgccgccgcccgaggcggttgccaccaccacatccactgaagcttgtcgtcgctgggcaggaacctcttggcctcctcgagacccctgaggtaattattctccgacgaggcctcgaggtcgatgatgagcttgttctcggtggggaggaacttgttcgcctcctccatccccttgaggaaggcggagtcatgaggtcggagttggccgcggcgaagaacgcggcgggatcgagctcgatgctctcgtactgcggcacgggcaccgcggcggcggcaacggcggtggcggtggcggcggcgtcgtaggagttgatggcgacggaagtgtaggaggaagaggtcggggaaaagccagggtcatagaaattggcggaacggagttgaaaaaggggtcagcgggctctagaggtaggctactcacctagcaccaccaaagttttggagatacgtggcggccttttgaagttgtagcgannnnnnnnnnnnnnnnnnnnnnnnnnnnnnnnnnnnnnnnnnnnnnnnnnnnnnnnnnnnnnnnnnnnnnnnnnnnnnnnnnnnnnnnnnnnnnnnnnnnagaggcgggggtcgtcggagttggaggagcgggagttggaggagggatcggagaggatctcgaggaagggctgctgcgcctggagcagcgccgggttgtcggggtagtcgtagaagaacttgtcgtcgatgtcctcctccatcagcatcctcgagatgaacggcagcaccaggtcctccggcgcctcctccccctccttcaccatcgtcgtcgccgtcgtcgtcggcggcggcggcgagggggggaggtcgaggtaggcggagggggagacgggggcgaggtcggagaggtagaggaagagggacggatcgtcctcctccccaccaccaccgatgccgtacacgtctcggattgcatcatctccacaagcggggaacgagtcggccgccgacgagcccatggcggcggcgaggcggaggagggggtttagtgggcgatgcggccgccgacgaggaagtggtcgcgcccgccgtgcgccgcccacgccggcgtcccg

SEQ ID NO: 22194 - DNA, 2323 bp, Oryza sativa
  Clone ID: TF_OsC65210_2
ctaaaaataagagagagcatcatttggcgtccatgttgagatggcatagagtattcgtcccttccatccttgcaagagccattggtgatctatatctatcacgaagtccttgtggtagcagtccttgaccttgttccgcactacctgaacaatttctggattcaatggcagttgcttgaagccagcccgttgattccgcacctgccattgcttgtatgtctcagggcgctccacccgatctatgccctcacacgcaatgacattcagagcagctcgtccaaagatgttttgctcaatcagcagccgctgttcgctttcccttggggtagttgcatccagaacatcgaacaaggccgagtaaaagaacaaagcctcccggaaccgtgtcacaaagaatggtgcactgaatgagccattcactattgcatggatgaacacatgaggctgcatcttccggatgttgctgagcacaatatcccttgggctgtcgatcacaacactctcatccatcaagttcttaaattgatactggcaattcacaatgagcacctcatcaggatcaatgttcagatcctctttgcggactgactccatcttaaccgctgcaatggcattgtacttgaatggcaccccaaactcctgggcgtatttactgagccggtgccctgtctcctcaatacgctcagttggccggaaaccaggctgggggaggtcaatgccagtcatccttacctccggtggcccaccctccctttgtgatatccgccgcaggaagcacggccactggaacccatactgtataccgtaatcaacgatgtgtatcttcttcttacccaaggaagcattgtagatggtttgattggagaaaatgaaggacaccttcttgaagcagatggcagccatgtacagctggtacgcttggaggatgtccacggctgaggtgcgcttagccacgagcgactggtgcaccaggctgcccgtgccagcgatccgcgcctgcaagccctcagcaaagcaatgagcaaggcgctgcgtcgcgtcgccggtcggtttcgcgtgctgcttgatctgcttaagcagctcggtggcgctccggcggtcgtcggtggccacggcctgcgcgcagtggatgagcagcgtgcgcaggtccaccacgtccctcccgccccgccgccctcccttcaccttcccgttcccacccttcccgccggcgctggcctcgttcttggccgcctcctccttcatggcaatcctcagcttctccatcatctcggtgcaattctcatgggagggcatcatcaccttgtcgaacatggcgcgcgccgcgacatcgtccccctgaaccgcggtctgcttgctgctcctccctccctccagctccagctcctcgtcgtcgtacgggttcttccgccctcgtccgccgccgcccgaggcggttgccaccaccacatccaccgcctccttcttcacgctcaccacaggcgccgccgccgcagcgaatccaacctgaagcttgtcgtcgctgggcaggaacctcttggcctcctcgagacccctgaggtaattattctccgacgaggcctcgaggtcgatgatgagcttgttctcggtggggaggaacttgttcgcctcctccatccccttgaggaaggcggagctcatgaggtcggagttggccgcggcgaagaacgcggcgggatcgagctcgatgctctcgtactgcggcacgggcaccgcggcggcggcaacggcggtggcggtggcggcggcgtcgtaggagttgatggcggcggaggtgtcggaggaggaggtcggggagaggcgggggtcgtcggagttggaggagcgggagttggaggagggatcggagaggatctcgaggaagggctgctgcgcctggagcagcgccgggttgtcggggtagtcgtagaagaacttgtcgtcgatgtcctcctccatcagcatcctcgagatgaacggcagcaccaggtcctccggcgcctcctccccctccttcaccatcgtcgtcgccgtcgtcgtcggcggcggcggcgagggggggaggtcgaggtaggcggagggggagacgggggcgaggtcggagaggtagaggaagagggacggatcgtcctcctccccaccaccaccgatgccgtacacgtctcggattgcatcatctccacaagcggggaacgagtcggccgccgacgagcccatggcggcggcgaggcggaggagggggtttagtggatttgtagaggcggtggcgcggcgagaagggtggggggggggggaagcgcggacgcgtgggcggacgcgtggg

SEQ ID NO: 22195 - DNA, 2454 bp, Oryza sativa
  Clone ID: TF_OsC2627_1
ttttttttttttttttttttgccaaattatcttatctattcacaacgaaatgtttccaagaacatgaagtggccaattgagcggagagcaacaacatagtggtaagaccctagaggccatagccactggtcacacactacagagacactcataccaagattgccaaatccattaggcctacctaataaacaacagagtgtgcaacaaccatgataataatttctttgcaatgtttaaattgcaagacaaaattcatattactggagttaaacatgcctgcaaatggtgtaggaatcatgatggtcgaggcaggtgtgatcagcatcgccatgctgagacggatacaagctcgccacgctgccaatagagtgcaaggcctgctccacgcttctccacatggaagcctcggacctgcacccgcttcaagaggcagtcagcctgtgcctccgcaaggttgctgagtggttgaggtgcaaaccctgctgatgttagcactgtccgccaagcgatcgctttgtcagctctacgccgcccaagaactgcatcctccactctgggctgaatcagaaacctctcgatcttactgacagcatccgcatcagtgccagcagcatcaagtgattcaagaagacatagacaagactgtaagcaattcaagaagtgttgggaaaatgggaggtcgctccgatcactgccatagtcaatagcaaccacaatcttaggagcaagctgtttcaccaactgaagcatagctgggagtggagtgcgtgctgagcaaccaactgggaggcttactgcaacaacctcatcagctgtaggagcaatgagttccataggatcaaatgcgtcgagattaatagcattgaactcaaatggaataccaagatcagcagcaaactgtgagaggttatcctgagtaagatgcagctcaagcgggtggtgggaggcggctgagacgaaggctgtgagcttcaacatcggcaaggacacaccgccagagccacagcggtgagcaagctcctgcaagaacgaagcccactggccgccgacaccgaggtcgaaatcaatgacgcggatacaagacgcggttgtgctggcgatctcatccagaagcgcctgagttaccgtgaagttggcaaactggagcacgggggagaggtcggagaaggatttgtaagcggtgagcttcagggcgacgtcgagcggagacgtgagacgggtggcggcgtggtggccgtcggcgagcgcgaggaggagggcgtcctttaggtaggaggcggagcggaggaaaggcttcccaattgggggaagctgctgattgagccgcgccaatatctctcgcgcgcctatggagttgccgacttcggttgccttcgccgccgctgcaagctcgtccaggaggtgttgctgctgcgccgccgccgccgccgcggttgacttcatcgcgttgcgcggatgctgcatcgaaggctggagctggaagggtaccgcgctatgtagcgttggaaacgggaggcattgcgcgggcgccggcggcggtggctggggctggttgtggaggaggaagagattgtcgggcacggagtggtggcgcttcggcggtggctggagcagtggctgttgttgatggtcggagaaggaggggaacggcatgaacaaggtggaggccggcgtcggctgatgctggttgaggagtagtgtgggtgatggcaagccaaggagagggggcttcatgtcagcgccgttgtggaaaggcgcagtagtcgccggcggcggctggagcgccgcttcgggcgacaggaggccgaaagcggaggtggccttgctattgctgccgctgctgcttgtgagcgacctcccgccggaggacgacaggtcggaggcgagggcggctggcgaggagacgccaccggggtgatgctgcagcgggaacccgaacccggcggcattggcgaggagctgctgctgcgagagccccggcgcctggggttccatgtcgccgggggcagccatgatccagttcaaaaatgtctgctcctggcctgccgccgccgcggcgtcgccgagcatggcgtcccagctctcctccgcgacgaagcccacatccagggcccccggtatgggcggcagctcaccgccaccgccgccgccgtgttcgccgggggccgcccatctggtggcttcggcggcggctgcgctgctctccgaaaccgccgccacgccggtagatatagaatccgccgcgccgctaccatgggacgaagacagcgtcgatgtggagttgggcgggctcgggctccccctgcagtccagcaccgacctcggctccaccagcaacgaccccccgccgcccccgccgccgccgcccttgtcctccggccaaagcagcgccgctatgctccccgcgagctccgccgccccgttcccgtcggcactgaagggtgccgccctcat

SEQ ID NO: 22196 - DNA, 1365 bp, Oryza sativa
  Clone ID: TF_OsC364342_1
atgggggtgatctctggtggtggtggtggtgacgacgacggctacggcggcggcgacggcatgctccggtcactccactcctcgtcgtcttctgacacggataacaacagcggtggctgcaagaacaatggcggcggcggtggcgaggccgccgccgccgttgagggtggcggtgatcagcgtgccgttgcggcggcggcgccgtcgacgcgggacttgctgctggcgtgcgcggacctgctgcagaggggggacctgccggcggcgaggcgagcggcggagatcgtcttggcggcggcggcgtcgccgcggggcgacgcggcggaccgcctggcgtaccacttcgcccgcgcgctggcgctcccggtcgcgccgttcctgcgtttcgcgcacctcacggcgaaccaggccatcctcgaggccgtcgacggcgcgcgccgcgtccacatcctcgacctcgacgccgtccacggcgtgcagtggccgccgctgctgcaggccatcgccgagcgcgcggacccggcgctcggcccgcccgaggtccgcgtcaccggcgccggcgccgaccgtgacaccctcctccgcaccggcaaccgcctccgcgccttcgcccgctccatccacctccccttccacttcaccccgctcctcctctcctgcgccaccacggcgccccaccacgtcgccggcacgagcaccggcgccgccgccgccgcctcgaccgccgccgccgccactggcctcgagtttcacccggacgagacgctcgccgtgaactgcgtcatgttcttgcacaacctggccggccacgacgagctcgccgcgttcttgaagtgggtgaaggccatgtcgcccgccgtggtgaccatcgccgagagggaagcaggcggcggcggcggcggcggcgaccacatcgacgacctgccgcggcgggtcggggtggccatggatcactactcggcggtgttcgaggcgctggaggcgacggtgccgccggggagccgggagcgcctcgccgtggagcaggaggtgctgggccgggagatcgaggccgcggtgggggccctccggcggccggtggtggcgcggcatcgagcggtggggcggcgccgcccgcgccgcggggttcgcggcgcggccgctcagcgcgttcgccgtgtcgcaggcgcggctgctgctccggctgcactacccgtcggagggctacctcgtgcaggaggcgcgcggcgcctgcttcctcgggtggcagacgcgcccgctgctctccgtctcagcgtggcagccgtcgtcgtcgtagccggcgacgaagacgacgatggcgacggcggcggcgaccacgggctagggtttgccaagctcgattga

SEQ ID NO: 22197 - DNA, 2251 bp, Oryza sativa
  Clone ID: TF_OsC13353_1
ttgtgctctggttttccgcagcgtcgggccgaccagtcgaattgtctcgcccagactggcacgacgctggtctgtgtgttttttttttttttttatgactatgcaagaatattattaactatggcagccatggatacatcatacattgaatcgcaaagaaaattattatcatacaacttctctacaaatctaatgtcaatgtttgatcctggtctataaatgaaggcaacacccgctgtcaatcaaactgagggtacatcaaagggtatcattctgtaaattggaccagggaatcggtatgtatatatatgctctctatcatttcttcttctcaacatactactgtcagtgccacgcagaagcagatatcagctttctgctcctccagccgagaagcatcgcgccgtccttctcatccaatgtgtatttatcggagtagcaggcgagaagcttccttatcaccgagttgacgtacgagctcaacgggtaaggcctgaagccggccatggtcagcctcgacttccacttgccaagcagctcatgcctctccaccctgtccttcccctcgcaggcgatgatgttgacgatgtccttggcgaggcagtgctgctccacgctgatcctctccttgttgtcccgcggcaggttggcgtcgatcgactcgaacatggcggagtagtactccatggtctccccaaacctcatcaagaaaggcgttgtgttggtgtgtgactcctgctctaccaaagtagtcaccttcggggacagccctttcaccatccggagcagaccatcgcgtgggttgttgacatccacgctctcgtccggggtgtggtgtagctggagtgtgaagtttacagacagtgcttcacctggcctgatctcaagcatctctttcgtgacttgtgtggcatagacagacagaggcgtaaactccagaggtattttgaattcttcagacatgcttttcaacattttccccacaatgtcaagaccttcaccacgagcatactctgacactgggtcatctatcccggtgatccgcacacgaggaggaccaccaggccttgcagctaatgcttgtatcagtgtgatccattgagtcccttgagcaatctgaaaatcaattatgtggatattgttctcagttctcaatgcttctgcaatcgccccattggctgccatatagccaaacttgaagtaagggcagatattgtatagaattctcatgtaggacaggagctccttgctctctggctcacggcacttcagagcacggtagatgtttgtgccagagtttccatgtctagcaaccaaaccctccagtaggtaagcacctagacgttggattggttccccgttgattgagaccactccacgagcctcctgaacaagcttatggaactcctctgtcctgtcctcactcagagcctcagcacacctggttaatagctgcttcacaattatctgagggtcttcccttaactccctttgccgtttctctggacgaaattcatagcttgctgtggggtatccaccagatgcaaactgtgaccgaccaactccaggtaacggctgccgtgattcatgactccatgttctcgaccgctgcctcacaagctgagcaggcttgatttcctcaaactcatgcttggtgctagttgttgcatcatctgtatcaggtgccatcagaacagtctcaatctcccgtaaggcgtgttgcatattatgtcttgatgtagcatacaacggatcagctcccacttgaatgttctcctggagaagaatacccgcctgtctatatgagctgtctgcttccaatggggagattggttgggctgaaatggtttctgtagagctctggttatctggagtgttggtaagagcagacaaattgtcacactcaaattgggaagagagaggggtgtatggggaatcgctgaactcgtacttcagtgggttagcttgccagggagagttttgcaagttgttctctgtaggaatttcgtacacaacgttagcgccagtcaatctgtactttaataactggtgcaagtccataataaatgaacggagattagtcgttcatgacctcctccgatctgcacagccccgacgccgcagcgatgccccgatccacttccactcctctctctctctctctctctctctctctctctctggttctcttttcgtgtgctgcgataattatgcccgagccgcctcgtgccgaattcctgcagcccggggg

SEQ ID NO: 22198 - DNA, 2064 bp, Oryza sativa
  Clone ID: TF_OsC134269_1
ttttttttaatggggatataatttactctttttccatatataagcattagctaccaagaattatgagttgctacaactaattaagctttaccagatcaataccaaactcactcaccaaatggaaaatgaaaaaaatggaaaaagagcgcgaattaattaagtgaccgatttggtgacggcaataatgtcgcggcatcccctggtctaacgccaggcggaggcgacggtgaccacgcgccccatccatccgagccggagcacgccgttctccgccttgacggcgaaccctgccgcgacggggccctgccgggccaacacctggtcagcaatgcccggtccgagcgccaccggccggaatcccgccatgccgaaccgggagcgccacttgccgaacacctcgcaccgctccagccggtcggcgccttccctggccaccgcgttcgccgccctcccgcccagcgccgcctcagcacgcgccctctccgcgctctcccgggggatcgtggcgtccagcgactccaggatggccccgtagtgcgcgcacgcgtcggtgaagcgcgtggtcagcggggccgtgttggagttcagctcctgctccacgagggccaccacctgcgggccgagggcgcgcacccgccggaggatctcgtcgcgcgggttcgccggcgagacgctctcgtcggggacgtgggagagcgcgaacgccaggttgacagccagcgcctccccggcctcgcaccccagcttggatgcttctatctcccctgctctgcagctcaccattttgaaccggtaatctatgcccgctcgctcggcgagcttctggaggtggagtgttgctgttacagactgcgtgaatggtgaggcgggatcggtgacggcggtgaccttcagggaggttccgggcaaccggcgagcagcgaggcacctgatgaggtcggcgtgctgcggggcactgacgtcgaagtccaccaggtgtatggcgcggtggtcgccgacggcgtcgacgatggccacgtttgcagcgtggagggcgaggcggaagcacggggatatgtcgtggaggagttgggacccggcgcgcgtctcgccgccgcagatgtccgggactgaggcggtctgaccaatgcgggaggacaacgccgccaccatcatagcaaccagccgctgctccacgtcgccgcgtgagttcgccgcgcgcttgagggcggtcagatgagtggccgccgtttcattgtgtccgtcggcgatggcagccgccgcctcggagagtagttgccgcgacgtggtggccgaggtcggcggcgaacaggaagccgaggaagacgccgtggaggtggacgagttcgagggcgaccgcgtcatacccacggcgttattgttgttgttcggggtcgtcgccgcagtaagtgggggcgacggcgccgcggtgatggagttgagttgctcctcccactcggacccggtgaccgcggagccggtcccgctcatcgcggcctccacctcatcgtcgtctccgagaagctgcttctcgagctcctgcaggatggacaggtcgctcgtcgccggcgctggaggcagcgccctcgccgttccaaaggcctgaacctgtggcgaggacgccatgtatgtcacctgctgctgccgctgcagctgtggctgcatgagcggcatcgccaccgccctggacgcggtggtgatggacgacagcgtcgacgacggcgatccgaaggcccctcccatgctggacccggatagaaccagaggctgggacggtggcccgcctagaacagccgcgatatccgccgaggtgagcggcgagacggccgccgacgccgcggccgtgcgctgcctcacggttcgcaggtacagctgctgctgcatcgcaatctgtcgctgctgatgctggtgctgctgccacctctccatgtcgccgaggctcctcttgagcaccccgccggccgcggccgcgtcggagcgctgctgcatcggcatctgcaccgccgatccgacgccatacaggtacccctggcgcggatcgcgccacggcgcgcctggctccat

SEQ ID NO: 22199 - DNA, 2525 bp, Oryza sativa
  Clone ID: TF_OsC82607_1
ggcacaccacatccccctcatccacctgtccgtgatgatactcccatagttgagacttgagattgcccttctcctcaatcttgttgatctcttctcccacctcgcgccttcgagctagtcgtgtttaggtttagccccattaatcttggtaagggtggtagtggttgttgctgttgttgttgttgttgccctgaagctttcttcctcaaggaccagaatttgtcttcagctgctaaaggagggcctaccactaaagatttgtgatcaatcccactttgatctattaccattgtggcgctgaatattcagtgataacaacggcaagatcaactccctattaattgttcggaagtgcatcattcctcagcgactccagcatataaataaaatccagaaggttgcaccagagaatatgtcaatgcaggcctctaaccgaccatacagatatccagacaattctcaaataccatactacagccggagttcaatgcatgtggggcaaaatggtacttaccatgtgcaacaaaatcatgaggatctttacgcgtcatctgatgatggttcacagaacggcaattctaaggctcaggggttgcaagcacagtactgcactctagattcatcctcaggcaattttgtgtatccagcacatagctctacatcctcccacataagtgggagccccatttctcagcaagatagccactcagagcacacatctggttcccctgcaagtgcttcatgtgttactgaagttccaggcttgaggtttacaacaattgaggagatagagaatgcaatgtttggacctgaacctgacacagttagctcggactgctccttacttactgattctgctttttaccaagataactggagggagcatctgggaatcaatacaggggacttgaagcaggtaattgcagcatgcggtaaggctgttgatgagaatagttggtatagggacttgctgatatctgagttaaggaacatggtttccatttctggagagccgatgcaacgccttggagcctatatgttggaaggccttgttgccaggctttcttcgactgggcatgccttatataaatccctgaagtgtaaagaacctactagcttcgagctcatgtcttatatgcatctcctctatgagatatgcccgtttttcaagtttggttacatgtctgccaatggagcaattgcagaggctgttaagggcgagaactttgttcacatcatcgacttccaaattgctcaaggtagccagtgggcaactatgatacaggcccttgctgcaaggcctgggggaccaccatacctgaggattactggtatagatgactcgaattctgcccatgcccgaggtggtggactggatatagtcggacggcggttattcaatattgcccagtcatgtggtctgccctttgagttcaatgctgtcccagcagctagtcatgaggttatgcttgaacatcttgatataagatctggggaggttattgttgttaattttgcctaccagctgcatcacactcctgatgagagtgtgggcatagaaaatcaccgggacaggatattgagaatggtcaaggggctctctccaagggtggtaactcttgtagaacaggaagcaaacacaaacactgcacctttcttcaatagatacttggaaactcttgattattacacagctatgtttgaagctatagatgttgcttgcccaagggatgacaagaagcggattagcactgagcaacactgtgttgcaagagatattgttaatttgattgcatgtgaaggtgcagaaagggtggagaggcacgagccttttggaaaatggagggcaaggctttcaatggctggctttaggccgtacccactaagtgcactggtgaacaacactatcaaaaagttgctggatagttaccacagttactacaagctagaggagagagatggtgccctttatcttggatggaagaacagaaagctggttgtatcttctgcatggcggtgaagtgctcaagttaatttggaagaagcttctttaggttctttcgtggcttcttggtggacgcatgaatccaaggtggaacctgatcttcatagagcagagagaactccatagtccagaacaatgtggtcgcttgcttgttggcacccatctctaaaccctcgtatgcttaccatccgtcagatttaatcgccataggcagaatactcttcctgacttcccatagtccagtccagtcgcaatataggtgtacactgtactgttttacctgctcatggtagaatgtccgttttatgtcgatcagtcaagtagagtctggtcaccagaatccccgtcttaatagaacgtctgttttaaaagtcagtcaagaagagagtctggtcaccagagtccgtttcttgatcctgctcgttgtacaatacaatgacgtctcaatgtgaattctggatcctatgctactacaaaaaaaaaaaaatcactgaattctggatcaaaaaaaaaaaaaaaa

SEQ ID NO: 22200 - DNA, 711 bp, Oryza sativa
  Clone ID: TF_OsC364882_1
ttatctctctcttttcttatccccttcggctgcggcggtgacgggcgggatgatgggtgctggagctgtggcggcggcgagcgggcgagggctggagcggtggcaacggcgggcaggttgcaaattcaaccgtgcggcatcttggatgacgatgatgatgctggcaagtagcaacaatctcacagtgaacaacgcaagctgattaatgcagttctccactccaatgatccaatccaaacaaactacgaccgagtgtggtggcggcgcgccgccgccggccgccacgcagagatggcgcaaagcggcctcttgtgccagcagaagaaaaaggcatggccgtacgaccccaccggctccatgccgtccgctttcatccgcgccgcccactgccgcgcccgctcgtgccgctccaccagctccaccccctcgcacgccaccacgccacgaatctcctccccgagcagcacgcgctcctctcttggtgcttgtgctcccctcgtttgcaggatgacccaggtgcggcgccggctccggcggattacccgctcccccgccctcgagtgcggccaaccccgagttcccgacatggtccatggctcgcgcaggcgggattttggggagccaaggaagaggaggggaatcggccgacgccccgctctggccctcgccagctcgccgccgccgccactccagtacacgtcgctgccatag

SEQ ID NO: 22201 - DNA, 3181 bp, Oryza sativa
  Clone ID: TF_OsC56535_1
tcatccggaggaagtgtcttgtgattggcgcacccatgcggagtgagcaaagaggattcgtcccatccatccctgcagcagccactgcccgtcctctcccagcagaaagtccttgtgatggtacttgttcacctcgtccctgattgtatcaacgatatctggtctcagtttcagctgctgcatgcctgcacggtggttcctggcctgccactgtttgtacttctcagggcgctccaccaggtctgcaccctcacaggcgatggcgttgagggcgtaaggccccagaacgttctgctccagcgccagccgcagcccactatcccttggggtggtcgcgtccagcatgtcaaacagagccgagtaatacaagagcgctccacgaaagcgtgacaggaaggaggcaccatagccaccattgatgatgccttggatgaacacgtctggctgcatcttgctgatgttacggagggcaacatccctggggtttggcccatcgcagaagatactctcgtccatcagagcactgaaactccagaggtcattcaccacaagcacctcatcaggctcgatgtgcaggtcctcggcaccaaccgtctcccactttgctgctacaacagcttggaatctgaatggcacgcggaactcattggcacagctgctcaggcaatgccctgcctcctcaatacgctgaaatggacgaaacgccggctgggggatgtcaacgatggtgatcctcacctccggcggcccgtcttccctgcttcccagccggcggagcaggtctggccagtgcagcccacagcgcgggccgtaatcaactatgtgcagcctcttcttcccttgcacagcttgcatgattgtcatggcggcaaacatgagtgccaccttcgtgaagcagcaggctgccatgtagagcttgtacaccttgaggtactccaccaacgacatgcgcatctgattctgatacagatgcttccctctgccagctagccgtgcctcaagccccttggcgaagtagtgagccactcgctgcatggcgtcgcctgttgccaaagcgtgctgcttgatcttcttcagcagctcgcctgcagattgctggttgtctgtcgccatggcctgtgcacactggatcagcagcaaccgtaagtccaccaccttgctactactgcctttcttgcccttcttgttgatcgtcttctctgcctcattgtccatgtcgatgcgcagcttctccatgtctttgatgcatgtctcgtgcgcgtgcagcatcagttcgtccagcaactcgcgagcaccagcctcctccgtccctgcattcgtcatggcagctaatttactgctcctccccagttcctcctccagctgctgctcgtccctgtcatggtttttcttctttcctcccctacaatgaccatcacttgatacttgatccaccgtctccagcgttctgaagctgttgtttctgggcagcaacttgctggcctctcccatgcccttcgagaacgccctaaccacttcactgcccggcaacatattgttggcctcctctgtgctgcccctgttgacacactgcaagttggtgacagcagcagaagaacccatctcatcctccatgagcatacgagtgacgtaggagagaagttggttgtccaacaatgacgagggatctgtactgccatcactgttggcgaggggtgttgcggggaggtcaaagaagacaggtggtggggatggtgcttcgttctccttgaggagggcctcccaaaagaaatcctctgggttggccatgctgataatcattcaatggtggtagcctttgctcttgctcgtcatatcatgagtttatatttgtcccaacatgatagaatcctaagtatttctgagaaaaaagaatcgtcattatatttttcaacattaatttacctaaaagctggtgttgggcaacccgagtacaccaggattagatcaagagtcccttcaaggggatatatccgccgttgtagagggaatgctgacagggggaactggactagtcatgtgctacccatgttgagtgggcacaagaggatgcggcccttccagccctgaagaagccactattgatcctcctccatgacaaactctttgtggtagtggttcttaaccatcataactttctccctgttcaagggcacctgcctcaacccgaattaaatttgaaaatatattgtttcatttattttttccccaaaaccagcccaaacgtaacatccagcaggtcgaactgcgccgcgtagtagtagagagcctcccggaagcgtgtcaggaagtaggtcgcgccgtaggctccgttcatgatgccatggatgaacacgtcggggcgcatcctgcggatgttccccagcacctcgtccctggggctcctgctgctgtcctcctgcaggctctcgtccatcacgttcctgaaatggcacaggctgatcaccaccaccacctcgtcttcctccgcctcgcccagctcctcccgcctcacgctctccttcttcgtcgccgcgatgccgtggaacttgaacggcacgccgagctcgtcggcgtacctgctcagccgccgcccggtctcctcgatgtgttggtcagggcggaatcccggctgaggtaggtcaatgccggtgatcctcacctccggtgggccgcctctccgtgccgcgagctcgcgcagcaacccaggccactggaacccgtagctgaggccgtagtcgacgatatgcagcttgcgcctcccggcgacggcgtcgtagatggtcttgttggagaagacgaaggccaccttcttgcagcagcaggcttccatgtacagccggtacgccttgaggaagtcgaccacggaggtgcgctgcgacatgagcgactggtacacctggctccccgtgccggcgagccgggcctccagcccttgcgcgaagcagtgcgccagcctctgtccggcgtctccccacgccgacgagtgctgcttgatctgcctcagcagctcgtgcgcgctccggcggtcgtccgtggccaccgcctgcgcgcagtggagcagcaggttgtgcaggtccaccggctcggtgtggatcacagtgcgtctcccccgcgccttcttgctgctgctgctcttggacttgaggctcagctgcttcacccccttcatgcaaatctcgtg

SEQ ID NO: 22202 - DNA, 1245 bp, Oryza sativa; identical to SEQ ID NO: 12835
  Clone ID: TF_OsC220696_1

SEQ ID NO: 22203 - DNA, 1575 bp, Oryza sativa; identical to SEQ ID NO: 12828
  Clone ID: TF_OsC98324_1

SEQ ID NO: 22204 - DNA, 1735 bp, Oryza sativa
  Clone ID: TF_OsC1713_5478
tcagatatccaaatatgatatctggagtactagtatgaagaacatgaagaataagtagaatccacagtggctgcaggctgcagctatgcggttaccgtggaaagcaaagcagggacgcttttgaggttggagctcccaactttggcagaagtttggtggaatttggaaacgccacgccaccggctgccgattccgtggaatttccgacaaggtgagctcgatcttggccgcttcttccgacacgttgaaattgctacgcccaaagttgaattcttgaagccgtcgcagccgaggccctgcgccacccgccgcgcctggagcagcgcgtagtagctgagcgggacgcggccgaagccggcgccctccagccgccgcgcccaccggttccagccgctcgtgccgctcccgccgctcgccgccgtcgcacgccacgatgttcttgatctcctccccgagcagccaccgttccacgcgcgcgcgctccaccgacccgcgcgccgcccccacctccaggcagtcgaacagcgccgcgtagtagttgagcgcctccacgaacctctccgtcagccccgccgcgttgtggctcgcctcctgctccgccaccaccatcaccttcggcgacagcccccacagcgcgcccaggaacgcgtccgcgcgcgacgtcgacggcgacagcccggactccgggctccgcctctccttgtcgccgcccgccacggcggcggcgtcgtcgtcggacgccaggaggcagtgcagctggaggctggagcagatggcgagggcctcgccggtcttcacgcggagggactccacgtcgagggcgtcgaggcgggacaccaccgggttgaactggaacggcacgtcgaggcgctctgcttctttcgtgagcgccatggctgtctgggtgaggagttccttgtgctcgtgcaccgacgtgaggcgcaggtgcggcgggccctcggggcgcgcggcgaggaggtggaggagctccagccattgcgtggcgtcggcgccgccgaggtcgatgacgtgcacgatcttctcggactccatggcctccagtatcgactggttggcggcggcgccggcgaggcggaggaacgggcagaggtcgaggaagtggcggcgcgcggcagcgacctcggccggcgtgggcgacgcgcggggcaggagcagcgcgcggcacagcccaggccacgccctcagcgcgcgccgcgccagcgcctccgcgaaggcggccgccacgcgctgcatggcgtccccgtcgggcgccgccagcgacgcgatgtgctcgagcgcggcgttcgcagcatcaagccgcccggccgccgccgccgcggcgcagttgagcaggagatggatgaggcacagcccgcgctcgtcggaacgcagctcccgcaccatccatggcggcgtgggcgacgccgccgcggccgggtggagcggcatgttggagaagttgtggagcggggaggatgtcaccgacgacgacgagccttcgtcctggaccatcagcctcgccagcgctacccccccaaaccttgaaatacaaaaaagctacaacctttgatccaatcgattctacgagcacgggcgcatttgaggttttgtgatgagtggagcccgcgaggtgagggtgcaaaaggctgcgagctctgcctcaaggaggagcagcagcagcgtccctagtccgtcccaagagaagagagaggatttcacaatctttcccggccgg

SEQ ID NO: 22205 - DNA, 2023 bp, Oryza sativa
  Clone ID: TF_OsC1517_1452
atgattggtgacactatgaagagctatgacgtcgcatgcacgcgtcgtagcttggatctctagagcggccgcagcgagatgttcgacgaaataatgttcaacgggtacgaggtgatcatgaaagggatggaggagctgcgcgtcgccatggacagcgaggccgagaagaaggcccggaacggcggcggggccggccggagggcggcgcgcgcaaaggcgggggtggtcgacctacacaccctgctcatccactgcgcgcaggcggtggcgacgagcgaccggcggagcgccaccgagctgctgaagcagatcaagcagaactcgtcggcgagaggggacgcgacgcagaggctggcgtgctgcttcgccgaggggctggaggcgcggctggccggcacggggagccaggtgtacaagtcgctcgttgcgaagtgcacgtcgacggtggacttcctcaaggcgtacaagctgttcgcggggctgctgcatcaagaaggtgagcttcatcttctccaacaagaccatcctggacgccgtggcggggaagcgcaagctgacatcgtggactacggcctcagctacggattccagtggccaggtctgttcaagtgtctgtcggagagggaaggcgggccgccggaggtgaggattacgggcatcgacttcccgcagccggggttccggccagccgaccagatcgaggagacaggccggcggctgagcaactgcgcgcgccaattcggcgtgccattcaggttccaagccattgctgcaaagtgggagacggtccgccgcgaggacctccacctcgaccgagaagaagaagaagaagaagaagaagaggtgctcgtggtgaactgcctccacttcttgaacgccctgcaggacgagagcgtggttgtggacagcccgagccccagagacatggtgctcaacaacatccgcgacatgaggcctcacgtgttcgtccagtgcgtcgtcaatggcgcgtacggcgcgcccttcttcctgacgcgcttcagggagacgctcttcttctactcgtcgcagttcgacatgctggacgccaccatcccgcgcgacaacgacgagcggctgctcatcgagcgagaacttcatttttttttttgctactatagtttaggcctgtgtgctcttctgtttgctgacaatctactatagtgccgaaaccctaaaactcatcgtagccggcttgctcctggaagaactcctcatcagcaggatccgcttcatcttcttcagcaactgagggggggggatatttatatagagcaaggtttgttaacctctgcagagggggtacactttacccacacgacattacaaacccgggtcacccagcccgtggggatcaaccacgtcgggagacctccaagctttcatgacaaggcatttcgaaagccgacacaggtttaccatatgccgacgagaggggtcccagaccaacaacagttttacccaagttgtttttcagattttaagtttgaaggcgtccgtcgatactcgcacagggtgcacgaatatcgagacgcaactagatggttacaaggggacatggctgagctggcgccgacgtggcgcctacgtggctgccacgtgggccggcgggaggtagacgacgacgccggccggaacggacgggcggacaacagcggcgagcggcggagcgaaccacggcgatacaggcgaaagcgagcacaccgggtggttgcacgagacgaggggagacgagccaacggctcggattcgcctgaggaagcttgacggcggcaaatcgcggcggcggcaactggcggggagggaagagggaaacggcgacgaggtcacgaggggccgattcccggcggtgagagcatctacgcggctacgggaatccgatgctagcgtcggattgggcggagctacgccgagcgaggctggcgacgagcgggtgctacggagctcgagcggcgacggcggcgagcacacggcgagcgacggcaacggtcggggcggcgccggc

SEQ ID NO: 22206 - DNA, 3723 bp, Oryza sativa
  unsure (1)..(3723): unsure at all n locations
  Clone ID: TF_OsC1321_1
tttgagtctcaccacacagaggataggagaggagagagggaccgtagcaagaggagtattagtagaggagagcagagagccgaggacttggccaggagagagaaggggtagggggagaccgggagagaggttgcagcagaggcagagccaactgcacaaggcaaggggcacgcagccacgcagtgctcctgcttgccctgcccctgcccacccccacctcctcgctgttctactgctgctctactctggctggcaacgcatcgcgtcgcgcgcccaagcaaaggctccatcaaacacacaccaagaaagaagaagaaaaaaaaatcccccgccacgccgggctgctccagatctctcagccgcgcgcgcgattatgtgggattaggtagatgagggcggcgctgttcggtgccgagaggagcggggtagtggaccacggcggcggcgataaggaggagctgttttggccggcggggaagggggggctggtggtggtggagccgaggtcggtgctggactgcacgcgcagcccgagcccgccgtattccacgtcgacgctgtcgtcgtccctgggcggcggctcggcggactcgaccggtgtggcggcggtttcggagagcagcaccgccgccgccggagccaccaaatggggagccccaggcgagcatggtggcggcgggaaggaggagtggggcggcgggtgcgagttgcccccgatacctggagcactggatgtggggctcgtcgggggcgagggctgggacgccacggccacgctcggcaacgcagccgggccggaccagtcgttcttgaactggatcattggggccgccggcgacctggagcagcctggtccgccgcttccagtgctccagcagccgcttattgacaatgcggggttcgggatcccggccgtggacaccatgggcttctctctggatcaccccctcagcggcgtcgcctccgacctctcgtcctccggtgcgcacactgccaccggcggtggcggcaaggcctcattagggttcggtctcttctcgccggaggccacctccctcgagcagccgccgccttcgatgctgtttcacgaaggtatcgacacgaagccccctcttctgggtgcgcagccgcaatttctcctgaaccactaccaaccccagccacccaaccccgccgcagccttgttcatgcctctcccgcccttccccgagcacaatcaccagtcgccgcatctccagccaccgctcaaacgccaccacgccattccagatgacctctacctcgcccgtaaccagcagcagtcatccgcggtggcgccaggtctcgcctattcaccaccgctacatggcccggctccgttccagctccatccttcgccgccaccgattcgcggggcgatgaagtcgacggcggcggaggcggcgcagcagcagctgctggacgagttggcagcggcggcaaaggcaaccgaggctggcaattccgttggcgcgcgagagatattggcgcggctcaatcaacagcttccccaacttgggaagcccttcctccgctccgcctcctacctcaaggaggccctcctcctcgcactcgccgacagccaccatggctcctccggcgtcacctcgccgctcgacgttgccctcaagcttgcagcatacaagtctttctctgacctgtcacctgtgctccagttcactaactttaccgcaacacaggcgcttcttgatgagattggtggcatggcaacttcctgcatccatgtcattgactttgatctcggtgttggtggtcagtgggcttccttcttgcaggagcttgcccaccgccggggagctggaggtatggccttgccgttgttgaagctcacggctttcatgtcgactgcttctcaccatccactggagctgcaccttacccaggataacctctctcagtttgccgcagagctcagaattcctttcgaattcaatgccgtcagtcttgatgcattcaatcctgcggagatagatttcttcctctggtgatgaagttgttgctgttagcctccctgttggcggttgcggtcgtgcaccagcgctcccagcgattcttcggtttgtcaaacagctttgtcctaaggttgtcgggcctattgttcatggaggtgttcgagcggaccttccagtctcgcagcacttccagtattgtttcgagtcttgcgggttcctggctgactcgcttgatgctgctggtattgatgctgattctgcctgcaagatcgagaggttcctaattcaaccaagagttgaggatgcagtgattgggcggcacaaggcgcagaaagctatagcatggaggagcgtttttgcagcaactgggtttaagcccgttcagctcagcaacctcgccgaggcacaggcagactgcctcctgaagcgggtgcaggtccgaggattccatgtggagaaacgcggagctgctcttacgctctactggcagcgtggggagcttgtatccatatcatcttggcggtgctgatcagccataagcttcactccaccaaggttccaccaccgtttgcaagcatcaaccactccagtaatgtccatttattcttgcaattaaatgttgcaaatgaaattgttgtcttgagctgttgaactcttcatattgcttttcgttgcagcttattagctagcctagtggatttagggtaatagttggttgtcagtctctctagctaatgatgttgctttaggttgttgccatagccatgtcaaggaagtagttttttctcatcgagctcgggtttaagcctgttccccccagcaaccattgccgaggcacaggcagactgcctcctgaagcgagtgcaggtccgaggattccatgtggagaagtgcggagctgctctcacgctctactggcagcgtggtgagcttgtctccatatcatcatggcggtgctgatcagccataagcttcaccccaccaatgttccaccagcgcttgcaagcattgtcaactccagtaatgtgcattttgttttgcaattaaatgttgcaacggaaattgttgtctcaagttgttgaacacctcatattgcttttcatcacagcttattagctaggcctagtggatttagcaatatcggtgtcaatctctgtagttaatgatgctgctttaggttcttaccatgctctgctctattagccattatcatcaaattcaagacactgctgatgagtagagaggataatttgacctatcaaatggttctgtggtacagaattgatatttgcttgctgttgctgtgttatcggagactagaacaccgaggagcgcccgcgggccgagccccggctgcccggggcccgggggtgggggggcggggcagggcgggggggaagggggcggcggtgggtgcgtgaagtgagtatggggcgactgggagccgtcggcgtggccgcccgcgcgtcccccggcgttggtgggtggaggcgtgggggtcgtcgatgcggagagggaaggggtgtcggtgattaggagtgggtggagaagagacgggcgcggcgtgggtgagagagcgtatgggcgaggagntggtcgcgaggtgccgcgggggaggccaaccgggcaagggtggcgggcggcgcgaaggctgggggcgcgttgcttcacgaagggacgtgggcaatggagcgctctaggtctgcgcgtgctgatcgagagctggtgtgag

SEQ ID NO: 22207 - DNA, 2835 bp, Oryza sativa; identical to SEQ ID NO: 12844
  Clone ID: TF_OsC112554_1

SEQ ID NO: 22208 - DNA, 2247 bp, Oryza sativa
  Clone ID: TF_OsC48106_1
gggaacgaatgatgaagcctatacgattatattacaagcttaatcatcggccaaaatactactcacaggaggaagaacgatcgaatgaagtagctagcagaaagaggataatgaatatgaccaagaaaagctgcgacaggtgaatcgacctggctgctactgcgatcatgtgatcaagaatcgtggctttcatggggggtatcgccggcgacggcgacgtcggcgtcggcgtcgccgtctgtcggctcccacgacgaggcggtgagcagggacaggtccttccacccgagcttgaggcagccgtcctcttcgacgagagtgtagcccttccatgggtacatgccaagaagcagcctcgcctgcgcggcggggctgccggccagggtcaccggccggaaccccgctcgccgcagctcgtcgccccaccgctcgacgcgcacctcgccggtgcgcttggggcccccgacggcgacgatgttccgtatctccgcgccgaggagctgacgctccaccgcgtgccgctccgccgcctcctcctcggcggcccccgcgccgtcgcccagcgcgtcgaacagcgccgagtagtagtgcagcgcctccacgaagcggcccaggaagtcgccgctgtggccgaggtcctgctccacgatggtgatcagcttcggccggaggctcttgagcaggcgcaccgtgccggcgtcggagcccgtcacgtcgtagaggcagtggtgcatccagtgcacaacggtggcctccccgtggtggcgcgggccgaggagcgcggcggcgtcggcgacgtgcccgatcttcccctcgatgggccggaactcgaagggcaagccgagcgacgcggcgaagtcggcgaggcggcggccggtggcctcgaggacgtcgagcgacgcgccgaggccggtgatccggagcgagcgcggcttggtggggcgggaggcgaggatgtggaagaggcccggccactgcagcccctgcatgatgtcgaggtcgatcacgtggacgcggtcctcgccgtcgagcgcctggaagatggcctggttggccgtgaagtgcgagaacttgacgagcggcgacagcgcgttgtacgcctggaacgcgccggagatgcggcggctctgcgcggcggcgagcgggcggagcgccagcggcgagtaggcccccaggtaggagctcagcacgcgcgcgcacagcgcgtccccgaagtaggccgcgacgcgctcgggcgacgacccgaacggcgacgccagctcggcgatctccggcagcaggtcccgcgcctccggcagctggtccatcgccaccgcctccgcacacctcagcaacaaactaagcagccgcagcccacgcgtctccgccgccgcctcctcctcctcccccgtacgctggcgcgcgcgggagggggaggccgcctgtgcggtttgtcgggttgctggtagctgctctcgcgtcccgtagcgggcggcgcccaggcagagggaatcaaaggacgggaccggtttttttttctactacacaataacacccgatttttctcacgatcgcgcgatggcgagggacgctaggtcgggtcgggtcggcagcagcaggaggccgtgggggaaagctgcacgcacacgagacgacgggggtgagttgatggacagcatgtgatcatttgatggtggaagagacgagcagagcagcgggcgagcgagcgcgaacagtgcgggggacgaggggacggacaaaacctccccctcggataccagcgatcgatcggtggccgttgcggaccccgctgaggcaaactgccgacgccgacgccgtcagtggagctgtgggcggtcttctccttgtccggcgacggggtgtccggcaccgcgggtggaggcgatgaggcggggttcttggagcagcggaggaggcggtggttgccccagctgaggttggggaacgagaaacgatggagctgcgtgcgcgatggcggcggcgtcctcgctctccccgttccctccccgccaggcccccgcgacggcggtggcgtccttgctccctccgtcccctccccgcggctgcggcggcggctgctgctcggcctcgagcgggctttgcccgagcggttgctcgccgctctcgttggctcgggctgcgcagaacgacggggcgaggcggagcgagtggtggaacgggagcgggaggaggcgggtggaggtggtgaagaggatgaggcggtgggggggggggggggggagtaag

SEQ ID NO: 22209 - DNA, 2278 bp, Oryza sativa
  Clone ID: TF_OsC84233_1
acgaatgcgccccaccaccaccagcaccaccacctgcttcctccgcggctgcgtgcgccgcctccccaacccttcgtcctccccgccggccgccgctgagatccgacgcgccggagcggagctcgctgagattttgttcctgctggatttctgaaattttactggaggactagagatatcaagacaccaacaacaaactagtacaaagttttccttccagttaatctgttcctggatctccttgccatacgcgaagcagtggatactatgcagtaattggttaggaggtctttactgaaccataatggctgatactccaacttcccgaatgattcatcccttcagcaatataccgagccaaaacctgaagcagttccagtattctgataatccacagcacccttgccacccttatagggcaccttcagacacccacgttgtgccacatcattatggcctaaagtcacattcaccggatgctggttatgaaagccaggctactcctaacaagtacacattggactcctctgaaggtgctggttgtatgagacatgattctccttccagtcaaagtttcacaaccagaagtggtagccctctatctcaggaagacagccactctgactcgactgatggatctcctgtaggcgcctcctgtgtcactgaggatcctaatgatctgaagcaaaaactgaaggatctcgaggccgttatgcttgggccagactcggaaatagtcaacagccttgagaattcggtggcaaaccaactttccttggagccggagaagtgggtgcgcatgatgggcattcctagaggcaacttgaaagagctactgattgcctgtgctagagctgtggaagagaagaatagctttgctattgatatgatgattccagagctgagaaaaatagtttcggtatctggtgagccacttgagaggttgggagcctacatggtagaagggcttgttgccaggcttgcctcctctggcatttcaatctacaaagctttgaaatgcaaggaaccaaagagctctgaccttctgtcttacatgcacttcctgtatgaggcctgtccctacttcaagtttgggtatatgtcggcaaatggtgctattgcagaggctgtcaagggagaagacaggattcatatcatcgacttccatatctctcaaggggctcagtggatctctctccttcaggcccttgcagccaggcctggtggaccaccaactgtaaggatcactggtattgatgactcagtgtcagcttacgcacgaggcggcgggctagagctggtcggaaggaggctgtcgcacatcgccagcctgtgcaaggtgccctttgaattccacccacttgctatctccggcagcaaggtggaggcagcacatctcggagtcatccccggggaagccctcgccgtgaacttcaccctggagctgcaccacattccagacgagtcggtgagcacggcgaaccaccgtgaccgcctcctaaggatggtgaagagcctgtcgccgaaggtactcaccctggtggagatggagtccaacacgaacacggcgccattcccgcagaggttcgcggagacgctggactactacaccgccatcttcgagtccatcgacctgacgctgccgagggacgacagggagaggatcaacatggagcagcactgcctcgcgagggagatcgtcaacctcatcgcgtgcgagggggaggagagggcggagcggtacgagcccttcggcaagtggaaggcgcgcctcaccatggccgggttcaggccgtcgccgctcagctcgctggtgaacgccaccatcaggacgctgctgcagagctactcggacaactacaagctcgccgagagggatggggcgctctacctcgggtggaagagcaggcccctggtggtctcgtcggcgtggcactagcgttgtgactttgtgaggtgatctgacgacgaacttcccttgtaaccatcttggctgggggctttagaaagctatagtgatcatggactggtaagggtagctgtaacaatggtgttgtaatggtaaggtagcggctagggtcaaactcgaaaatgggcaaaatgctgatgaggtgtagaagtgtagtacatgtttgagagtatatgtttcagtttttcttttaaaaaaaaaaaaaaaatgttgtggcacactaatgtctatgatcagaattatcatccactataagctaaaatatccattggaatcctgccggggcctcgtgccgaattcctgcagccc

SEQ ID NO: 22210 - DNA, 3069 bp, Oryza sativa
  Clone ID: TF_OsC54001_3
atggagagcgagctaggagcgctgtcgcacgtgcggcaggcagcgggcgcgcccgccgaggcggccgcatccgaggcgactacgtcctcgcccaccatcgggatcatccaccagatcttgaacctgaacagggacaaccacttccaccccctgcgcacccaacaagagaacgaacccatcacaaaatcagcaccaccggcggcggcgcacatcgcagtctctcctatgggattgcctgttatggagcatcttggaagctcaagcattgtgcgtgggagaggcaagaacaagaggatttggacgtactttgaggatgaggagctgatcaaggcattgttcgagattgctttggatccaagctggaaatcagaagggggtttcaaaaatggatactgccaagttctagagaacgtgcttgctaagaagttgccaagttctggccttactgctgttccgcacatagagtcgagagtaagacactttaggaccaagtttggcgcaattgaagtgatgctaaccaaaagtggcttttcttgggatgacaatagaaagatgatacaatgtgagaaacaacaatacgatgatcattgcaggaaaaacaatgaggcaaagggtctatatggtgtagcattccctcactatgatacactagctgcaatttatggtaaagacattgctactggagaaggtgcagagggtcttggtgaggctgttgctaatatggagaaagaaattgttcaagatattcaagatgaagaagatgaggaggatgaagagagagtgtctagagaaacgcctcggcggagcatcgattcagctgcagctcgacggagcatcgattcagctgcagctcgacggagcatcgattcagccacacctcgacggagcattgattcaactgcttcaagctctaagaagaggaagaaagacagcaacaaactgaaaaataccttgtcaagtgacccttttatggatgtctttgccaatgttcaaggtgatctgagggatgttacaaagcatgtgggagcaatggtggcatctatgcaacgtgaagctgagatccaagagaaggcaatggctgaggaggacccactacaaaaaattcagaacgaagctattcttgagtgtcaaaagattggattgactggtactgaagttgtcaatgctgcagctgcttttgtaaaagtgccggctcaaatgagtatgcttctcgctcttccagagtctctcaggagggagtacgtactgaaaatacttgctgaggatctgtctgaatccgccgacgatgcggtcctagcatacatcaatcagtttcttcttgaagatgaggaagatgaatcttgtcctggcaccatcacatcggtggaggactctgccctcctcgccgtcgagaagccattcgttgacatcctcactgctagccaagaggcctgtcaagagaattcttggatagattcttgttgtgatttcacggggaatggaggattgcttgatacgttcacaaccacacatgccgcttgccagccagcgccttgtgaatttgagaaggagaagggggagtgtgctgttcataaaggccggaagaacccgcatgatgattgcctattgttcgaggaagagagcaggaggagcaagcagttggcagtgtctgaggaggagactgtcagagagatgtttgacaaggtgcttctgtgtaatggcgaatgcgagctccgggcaccactgccagctgaagcacggaactgcggggtgtacgtgaaaggatctggaaataagagaggccgaaagaaaggaaaatctggagcatctgcagaggatgatgcggttgatctcactaccctactcattcattgtgcccaggccgctgcaatcgatgatcaccggaactccaatgagttgctgaaacaaattaggcagcgttcttctgcatatggagatgccggtcagaggttagcacattgttttgctaatgcgttggaggctcggctagctggcactggcagcaacatttaccgttcacttgctgccaagcgaacttctgtttatgacatattgaatgcattcaagctgtatgttacagcatgcccgttcaagaaaatatcgaacttcttctcgatcgaagccatcttgaacgcatccaagggtatgacaaggttgcacattgttgactatggtatacagtatggattccagtggccaatcttcttccagcggatctcgaagagacctggtggccctccaagtgttcgaatcaccggtgttgacttaccacagccgggattccgccctgcacaactcattgaggcgacgggccgtcggttgcatgactatgcccgtatgttcaatgttccatttgaataccatgctattgctgccaagtgggacactatccgtgtcgaagatcttaagatagacaaagacaaggatgaacttcttgttgttaactgccttttccggatgagaaacatgatggacgaaatggtgacagatgacagcccaagaatgcaggttctgaagacaataagaaagatgaatccaaatttgttcatccatggcgttgtcaatggcacctacaatgcgcccttcttcgtgacacgattcaaggaggctttgttctactactcttcactttttgatatgcttgaaacaactgcttcacgggtcgacgaaaacaggctgctgatagaaagagatctcttcggccgggaagctcttaatgtggttgcttgtgagggcactgagagagtagaaagaccagagacgtacaagcaatggcaggtgaggaacatcagggcaggcttcaagcagctaccactgaaccaagagacggtgaagaaggcaagatacaaggtgaagaaatcctaccacagggatttcctagttgacgaagataacaaatggatgctgcaaggttggaaggggcgtatcatctttgctctttcagcatgggaaccaaactagactagcaaactgtaaatatgactaactcagctgatttcttctgtggaggtaccactccattagttatgtctgattcctatttcaatgaattttgacctatttctgggc

SEQ ID NO: 22211 - DNA, 2148 bp, Oryza sativa; identical to SEQ ID NO: 12852
  Clone ID: TF_OsC1321_2

SEQ ID NO: 22212 - DNA, 1771 bp, Oryza sativa
  Clone ID: TF_OsC340632_1
ttaagttctctttttttttatcagatcagtagctgtaacggagaagagttcgtcctcgacgccgtccgccgcgaacacctctgaactgatggtagcgcaagccgccaccgccgccgccaccaccaccgccgctgccaccaccgccgccgtgccgatgacgaatttccagctcttcgggtccatggtgccggttccggtggcgtccatggcgacggctactgctccggcagctgtggcagcagccgataatggtggccatggatcgtcgtcggcgtcacagaacgcctctggctcaggcgaaggacaaggcggcagcatgtccttgtccttgcaactgaggccgctcggctcaacgccgacggcggctgtggctgtctcggtgccacccatggctgcggcgccgatgatggctggtccagcagcagcagcgccagcgccggcgccgccgttggcgacgatggccgttgcccagaacgcctcgctcgcggcggtggcgagcgcgctggcggcgcacaggaggaaccaggccacgcaccgctccgccgcgctgcacggccacctccggcgctgcgccgaggcgctggccgcgtcgcggccggcggacgcggacgccgagctcgccagcatcgctcgcatggcgtcctcggacggcgacgccgtgcagcgcgtggccgcggcgttcgccgaggcgatggcccgggtggtgatccggccctggaggggcgtgtccgccgcgctcttcccctccgacgccggcgccgccggcgacgccctcaccgcgtgggaggccgagttcgcgcggcagagcttcctcaacctgtgcccgctgctccacctcgccgccgtcgccgtgaacgagatcatcctcgagacgacgaggaacgacaagttcatccacatcgtcgacctcggcggcatccaccacgcccactgggtggagctcctccagggcctcgccacgcgccgcgccgcggtccgcccatgcctccgcctcaccatcgtccacgagcacaagcacttcctcggccaggcggcgcaggtcctcgccgccgagtccgaccgccacggcgtgccgctcgacctccacatcgtcgagtccagcgtcgaggcgctcaagctggacgccctcggggtgaggagcgaccacgccgtggtcatcgtctccacgctccagctccaccgcctcgtcggcgccggcatcctcagcaccacggcgccgccgtcgccggcggcggcggcggcggccagcatgatcacctccccgctgccgccggcgaacatgtcgtcgaaggtggacaggctcctccgcggcttccacctgctgtcgccgagggccatcatcctgaccgagaacgaggccaaccacttcgtgccgtcgttcacggaccgcttcgcctcggcgctgccctactacgagcagctcttcgccgccatggaggaggcgggcgccgccacggtggagcggaaggcggcggagaggtacctcctcagggaggagatcaaggacgttattgcatgtgatcacgacgggccgcgctgggcgcggcacgagacgctggggaggtgggtcgtccggatgggcgccgccgggttcgcgctcgcgccggcgatcaccgtggtgacggcggcggggcgggtgagggcggtggcggcgcggcttcccggaggaggggatgagaggaggtatggggtgacggagggcggcgggtggctcatcctcaacagggaggagaagccaatgttctgcgtctctgcgtggaggaggcagtga

SEQ ID NO: 22213 - DNA, 2309 bp, Oryza sativa
  Clone ID: TF_OsC4431_1
gaatgatgaaagaatttgattgtaataataatgttgtataataacagccggagacactaatagtgactgtgagagatgctgcccctgctaatctatctactgcttctttgctttctttcttctacatgcagctacattttgcaggggactctctctcaacagccaaaagaatatttataaagaattacaatctaaaaattgaattgaatttgatttaattgaatctttccacctatcaatctataaaacaaaaaactacacctttctttcttctttcttttctctgaatgtataaaagaattgtcatactgtatgaactaatcatcattaacaaaagaagcactgtaaaaaaaggctttgttctttctttctcttcacctaatcaccattcatcgtcagcttagctttgctgagaatgtgatgctgttgtggacgccgacacggtgctgcctcccgcgccgtcgcccgccggcgtccacgccgtcacggtgtacagcggctggtccagccaccggagcgtgagcgcctcgccgccgccgctgccgccgccgccgtgcgcctgcacggtgtacttgtccggcccgaacatcctcgcgatcatgcgcccctgcatcgcctcgcgctcgccgatgccggcgttcttgaacccgccgccgtcctccatgcgccgccgccacccggcgaagctctcgtggcgctcgaaccgctcggggccctcgaacgccaccgcgttgcggatctcccgcgcgaacatctcctccgccttggccctcgcggggctcgcctccggcagccccgccgcgtccaccgcgtcgaacgccgcggcgtagtaccgcagcgcgcgcgcgaaccgcgcctcccacctccccgagttgaggccgccgccctcgtgctcgccgaggaggaggatggtggcgcccgtgctgcgcgctagccccaggaagtcggtcagcgcggcgtcgtcgcggagcaggcggtgcatggcgaggacgcagttcacggccacgcactcgccgcgcttgacgtggagcatccacaggcggacgtcctcgagccggtcgaccacggcgtggaactcgaacgccaggccgagcgcggcggcgacgcgcgccagccgcgctcccgtctcctgcagctcctgcctcgactcgccgactccggtgatccgcacgtgcgccggaggcaccgcccgcgcggccaggctctggagcaagcccggccattggagcccctgcttgatgtcgaagtcgatgacgtggacgcgctcgtgcccctcgaactcgcggaggaggcgctcgttgagcgtgaagtgcaggaacctcgggatgggcgtgatggcgttgagtatccgcagcgccatggcgtcgtcgtcgccgccgccgaaggcgtcgtcggtgagctcccgcggcgggccgatgtcgaacatgtgcggccacatgcgcacgacgcggagcgcgagcgcctcggtgaagtaggcggccacgcggtgcatcggcgtgggccccgccggcgaggccatctcgccgagccgggccaggtagtagttggcggcctcgtggttgccggcggagagggagtcggcgcacgcggtgagcgcgcgcaccagctccagcgcctcccgctccgcctgccccggcgccggcacgccgttcctcgcgtcgaactcgggcggctgcggcggcggcatcatcgccgacgagccgccgtccgtgcccgacgaggacgacgagtcggacggcgacttgctgtactcctccttcttggccgcggccagcgatggccccgcggcggccatgccgtgcgggaacgccgccgcgctcggcaccaagaagaccttctcctcctccgcctcctctccttctcccgccgccgtcgcttgcatcgtccctgcaatggattgatggaaccatacctcatcgccgtcgccgcccatccgcgtccgcttggcgcgaacaatggggccatactcctcgaccgcgtcctcgtcatgcgcccgcttaacggcgcggtgggcgccattgccattgccgccgggctccggcttggcgccccaggacacggactgggtgaccggcggcgcggggtgcgtccggaaggagcaggtggtggcgccgctcctggcgtcgccggcgacccgcggggcggcgccgtcgccgcggctgccgcgcttggagaagccgcaggggaggatgtcgaaacgctgcgcggtgctcatctgatgcctcgacgacgagaacgagcaacccgccaacatcccggagacacgtcactcgccggaacgcgacgtgcacctcagcccggggatccac

SEQ ID NO: 22214 - DNA, 1913 bp, Oryza sativa
  Clone ID: TF_OsC545_35
atggtccgcaagcgccccgcctccgacatggacctgccaccgccgcgccgccatgtcaccggcgacctgtccgatgtcacggccgccgcggcgccgtcgtctgccagcgcgcagctccccgcgctgcccacgcagctcccggcgttccaccacacggacatggacctcgccgcgcccgcgccgccgccgccgcagcagcaggtggcggcgggtgagggtgggccgcctagtacggcttgggtggatggtatcatccgtgacatcatcgccagcagcggcgccgcggtctccgtcgcgcagctcatccacaacgtgcgtgagatcatccgaccttgtaaccccgacctcgcgtccatcctcgagctccgcctccgctctctcctcacctccgaccctgcgccgccgccgccgccgccgccgtcgcatcctgctctcctccctcccgacgccacggcgccaccgccaccccccacgtcggtcgccgcgcttcctccccctccgccgccgcagcccgacaagcggcgccgcgagcctcagtgtcaggagcaggagcccaaccagccgcagtcgccgaagccccccaccgcggaggaaaccgccgccgctgccgcggccgccaaggagcggaaggaggagcagcggcggaagcagcgcgacgaggagggcctccacctgctgacgctgctgctccagtgcgcggagtcggtgaacgcggacaacctcgacgaggcgcaccgcgcgctgctggagatcgcggagcttgccacgccgttcggcacatccacgcagcgcgtcgccgcctacttcgcggaggccatgtcggcgcggctggtgagctcgtgcctggggctgtacgcgccgctccccaacccgtccccggcggcggcgcgtctccacgggcgcgtcgccgcggcgttccaggtgttcaacggcatcagcccgttcgtgaagttctcgcacttcacggcgaaccaggcgatccaggaggcgttcgagagggaggagagggtgcacatcatcgacctggacatcatgcaggggctccaatggccggggctgttccacatcctggcgtcgaggccgggggggccgccgagggtgaggctgaccgggctgggggcgtccatggaggcgctggaggcgacggggaagaggctatcggacttcgcggacacgctgggattgccattcgagttctgcccggtggctgacaaggccgggaatcttgacccggagaagctaggcgtcacgcgccgcgaggccgtcgccgtccactggctgcgccactccctctacgatgtcaccggctccgactccaacacgctctggctcatccagaggttggcgccaaaggttgtaacaatggtggagcaggatctgagccactcaggctccttcctggcacgttttgtggaggccatccactactattcggcactgttcgactcgcttgatgcgagttacagcgaggatagcccggagcggcatgtcgtggagcaacaactcttgtcacgggagatccgcaatgtgctagccgtgggcggtccagcacgcaccggcgatgttaagtttgggagctggcgcgagaagcttgcgcagtcgggcttccgtgtgtcgtcgcttgctggaagtgccgctgctcaggccgtgctgctgcttgggatgttcccttccgatgggtacacgctcattgaggagaatggcgccctgaagcttggatggaaggatctgtgccttctcactgcctctgcttggcgcccaattcaggcttcgggacgttagtactgagggggaatttatagagctgaagtatcacttgatcttacttaggtgcaattacctagtccttttgcttcttttagctgctcaatttggtcaattctgagaaaagaaaaataaaaaaaattctgatc

SEQ ID NO: 22215 - DNA, 1482 bp, Oryza sativa; identical to SEQ ID NO: 12847
  Clone ID: TF_OsC33690_2

SEQ ID NO: 22216 - DNA, 2045 bp, Oryza sativa
  Clone ID: TF_OsC305550_1
tgcaggattcggcacgaggcacaactagctagtttagatcccctttgcatccatcgatgatcagttgttgcatcgatgatcagttgttgcaggacagtgtagtgaggtgagaaagattgttgtagtagctgctgtgctgtatggtggtagccagtgagtagctactacactgcactgcagtttgcaccccggccatatgttggctactactactgcaggtgtcttaggtctagatggataccctcttcaggttggttagcctccaccaccatcaccaccaccagcacgcggcctcaccgtcgccgccggaccagccgcacaagtcgtacccctcctcgcgagggagcaccagctccccctcctcccaccacacccacaaccacacctactaccaccactcccactcccactacaacaataatagcaacaccaactactattaccagggtggtggaggcggcggcggagggtactactacgcggaggagcagcagccggcggcgtacctagaagaatgcggcaacggccaccagttttacatggatgaagacttctcctcctcgtcttcctcccgccagttccactcgggaacgggcgcgccgtcgtcggcgccggtgcctcctcctccgtcggcgacgacgtcgtccgcgggcgggcacgggctgtttgaggcggcggacttctcgttcccgcaggttgatatcagcctcgacttcggcggctctccggccgttccgtcgtcgtccggtgctggcgccggcgccggggcagcgccgtcgtcgtcggggaggtgggcggcgcagctgctgatggagtgcgcgcgcgcggtggcggggcgcgacagccagcgcgtgcagcagctcatgtggatgctcaacgagctggcctcgccgtacggcgacgtcgaccagaagctggcctcctacttcctgcagggcctcttcgcgcggctcaccacctccggcccgcgcacgctgcggacgctcgccaccgcgtcggaccggaacgcgtcgttcgactccacgcgccgcacggcgctcaagttccaggagctcagcccgtggacgccgttcgggcacgtcgccgccaacggcgccatactcgagtcgttcctggaggccgcggcggcgggcgccgccgcctcctcctcctcgtcgtcttcatcgtcgacgccgccgacgcggctgcacatcctcgacctgagcaacacgttctgcacgcagtggccgaccctcctggaggcgctggccacccggtcctcggacgacacgccgcacctgtccatcaccaccgtcgtgcccacggcggcgccgtcggcggccgcgcagcgcgtgatgcgggagatcgggcagcgcctcgagaagttcgcgcggctgatgggcgtcccgttcagcttccgcgccgtgcaccactcgggggacctggccgacctcgacctcgccgcgctggacctccgcgagggcggcgccaccgccgcgctcgccgtcaactgcgtaaacgcgctgcgcggggtcgcgcgggggcgcgacgcgttcgtggcgtcgctccggcgcctggagccgcgcgtggtcaccgtcgtggaggaggaggccgacctggcggcgccggaggcggacgcgtcgtcggaggccgacaccgacgccgcgttcgtcaaggtgttcggcgagggcctccgcttcttctcggcgtacatggactcgctggaggagagcttccccaagacaagcaacgagaggctgtcactggagagggcggtcggccgtgccatcgtcgacctcgtgtcatgcccggcctcccagtccgccgagcgccgggagaccgccgcgtcgtgggcgcggcgcatgcggtcggcggggttctcgccggcggcattcagcgaggacgtcgccgacgacgtgcggtcgcttctccggcggtacaaggagggctggtcgatgcgggacgccggcggtgccacggacgacgccgccggcgccgctgctgccggagcgttccttgcgtggaaggagcagcctgtcgtgtgggcgagcgcgtggaagccatga

SEQ ID NO: 22217 - DNA, 984 bp, Oryza sativa
  Clone ID: TF_OsC138508_1
actatagtttactattttctccacatactagtactccatatcagttctagcagtagtgcagtactttaaaagcgatcaagaaattacctgacgtagcaggctaatgacagctaaggtaaactgaggtgggtatgaacaggttcactactccttaccaaaggagaaaaacgctaaaaatagaagcttatcaatcgatttgatcacggcaataatgctgcatgcgggctcaccttgtggattaacgccaggcggatgcgacagtgacgacgcggcccatccacccgaccccgagccggccaccgtcgggcgtcccgtcgcgccccggccgcgcgggcccggcccgggccctctcgcggccgccgatgtcctccccgatcgccacggcgcggaaccccgccatgccgaaccgggcgcgccacttgccgaacacctcgcaccgctccacccggtccgggccctcccggcccaccgcgttggccaccttgctcgccagggccgcctcggcccgggttctgtccgcgctgtcccggcccagggtcgcgtccagcgactccagcacggcgccgtagtgcgcgctcgcgtcggagaagcgcgccgccatcggcgccgtgttcgtgttcagctcctgctccaccagggtcacgacccgcgggcccagcgcgcgcacgcgccggagtagctcgtcgcgcgggttcgccggcgacacgctctcgtcgggcacgcgcgacagcgtgaaggcgaggttcacggccagcgcctctcccggctcgcaccctagcttggatgcctcgatctccggtgctcggcagctgactgccctgaagcggaagtctatcccggcttgctgcgcgagcttcttgagccgctcgcatgtggccgcgagcgattgtgtcatcgccggggtgaatggcgaggtgggatccgccacgacggtgaccttgagggaagtggcgggcacgcgccggtcggcgagggctttggatg

SEQ ID NO: 22218 - DNA, 1752 bp, Oryza sativa; identical to SEQ ID NO: 12788
  Clone ID: TF_OsC1517_1409

SEQ ID NO: 22219 - DNA, 1482 bp, Oryza sativa; identical to SEQ ID NO: 12785
  Clone ID: TF_OsC180166_1

SEQ ID NO: 22220 - DNA, 2964 bp, Oryza sativa
  unsure (1)..(2964): unsure at all n locations
  Clone ID: TF_OsC545_17
atggcagcgcatacagtgacggacccactggaggagctatggaaccacacgatgtcgatggacaagacgcacctgatgtgcttctacccgagcaagatcaccatgggtggcgtctggacgggcgacaatccgctcgacttctccatacctctcctcctcttccagatcctcctcatcacctccaccacccgcgccgccaccctcctcctntntcctntccgtctccccacctacatctcccagatcctcgccggcttcctccttggcccctccgtccttggccacctccctcacttctccaacctcgtcttccccgtccgtagcctcttcgtccttgagtccatggcccttctcggcctcgtctactacaccttcatcgtcggcgtcgagatcgaggtctccgccatcacccgcgccggcatccgtagcttcggcttcgccattggctgcacgctcccgcccttcctcgtcggcgctctcaccggctacgtcgcgctcagcactgacgacaaacacaagggtgacacgttcctcaacaagctctccttccccatcttcctcggctccaccttctcctccaccgccttcgccgtcctcgcccgcaacatcgccgagctgaagcttgccggcaccgacgtcggccagctcacgctctctgcgtcactcatcaacgacaccttcgcctggaccggcctcaccgtcgccacggtgctcggccactcgcgctgcaccatcacgcagaccacgtggacgctcacgtcgggcgtcgtcatcttcggcgccagctacctcctgctccgccccatgctcctgcggctggcgaggcgcgccgccgagggggaggcggtcggcgaggaccgcgagtgctggattctgatcggcgtcatggtggcggcgctggtggcggacgcggggggcacgcacgccatattcggcgccttcgtgttcgggctcgcggtgcccaacgggccggtcggggtggcgctggtggagaaggtggaggacttcgtgcggcctccgcaccgacaccncaagatcaccaacatgcattctgccgtgttgctcatggtcgctgccatggtcgctgcggtcttgaaggtcgtcgccgcaatcggcgtcgccgaccaccaagaacaacaccacctcgccgcgcccatggtccgcaagcgccccgcctcggacatggacctgccaccgccgcgccgccatgtcaccggcgacctgtccgatgtcacggccgccgcggcgggcgcgccgacgttgtctgccagcgcgcagctccccgcgctgcccacgcagctcccggcgttccaccacacggacatggacctcgccgcgcccgcgccgccggcgccgcagcaggtggcggcgggtgagggtgggccgcccagcacggcttgggtggatggcatcatccgtgacatcatcgccagcagcggcgccgcggtctccgtcgcgcagctcatccacaacgtgcgtgagatcatccggccatgtaaccccgacctcgcgtccatcctcgagctccgcctccgctctctcctcaactccgaccccgcgccgccgccgccgccgccgtcgcatcctgctctcctccctcccgacgccacggcgccaccgccaccacccacgtcggtcgccgcgctccctccccctccgccagcgcagcccgacaagcggcgtcgcgagcctcagtgtcaggagcaggagcccaaccagccgcagtcgccgaagccccccaccgcggaggaaaccgccgccgccgccgcggccgccgcagcggcggctgccgcggccgccaaggagcgtaaggaggagcagcggcggaagcagcgcgacgaggagggcctccacttgctgacgctgctgctccagtgcgcggagtcggtgaacgcggacaacctggacgaggcgcaccgcgcgctgctggagatcgcggagctcgccacgccgttcggcacctcgacgcagcgcgtggcggcctacttcgcggaggccatgtcggcgcggctggtgagctcgtgcctggggctgtacgcgccgctcccgagcccgtccccggcgggcgcgcgggtccacgggcgcgtggcggcggcgttccaggtgttcaacgggatcagcccgttcgtgaagttctcgcacttcacggcgaaccaggcgatccaggaggcgttcgagagggaggagagggtgcacatcatcgacctggacatcatgcaggggctccaatggccggggctgttccacatcctggcgtcgcggccgggggggccgccgagggtgaggctgaccgggctgggggcgtccatggaggcgctggaggcgacggggaagaggctgtcggacttcgcggacacgctgggattgccgttcgagttctgcccggtggctgacaaggccgggaatctggacccggagaagctgggcgtcacgcgccgcgaggccgtcgccgtccactggctgcgccactccctctacgatgtcaccggctccgactccaacacgctctggctcatccagaggttggcgccaaaggttgtaacaatggtggagcaggatctgagccactcaggctccttcctggcacgttttgtggaggccatccactactattcggcactgttcgactcgcttgatgcgagttacagcgaggatagcccggagcggcatgtcgtggagcaacaactcttgtcgcgggagatccgcaatgtgctagccgtgggcggtccagcacgcaccggcgatgttaagtttgggagctggcgcgaaaagcttgcgcagtcgggcttccgtgtgtcgtcgcttgctggaagcgctgctgctcaggctgcactgctgcttgggatgttcccttccgatggatacacgcttattgaggagaatggcgctctgaagctcggatggaaggatctgtgccttctcactgcctctgcttggcgcccaattcaggcttcgggacgttag

SEQ ID NO: 22221 - DNA, 2255 bp, Oryza sativa
  Clone ID: TF_OsC4418_1
ttttccccgcgcttttttttttttttttttttttaggctcccaagatgataaatatggcatattctagcaacacataattttatacatgaagcagagtcgacaagataattctaccccagaatacaacacgatcacgtgccaattctctaatacaacatagttcaactaactcgattattctgacaagcagacatctacgattaggtaagatcagttgacaagttcagtggttcacattttttacagtctctgcatcagatgctcctaaataacagcaagactaatgccaactcattctgtaagctctattgccatgcggaggagacgattagagttttctctccccagccgaagtgaagtcccccatggtcctcctcgaacttgtatctgtcacagtacgacttcagtaacgatcttatcccgctgatgacattgctactaaatgggcatggtgtgaagccagccattgtcattcttgccctccattttccagcaacttcatatctctccacacgatcaggaccttcgcaagccaagatgttgacaatttcacgagcaagacattgccgctccacattcattctatccggactttcccttggaagtgtcgcgtccagtgaatcaaaaagtgcagcataataatcataaacctcacggaaccttgtctgaaatggagcagtattggtattggcatcctgctcaaccagtgtgacgagctttggttgcagacccttcaccattcgaaggagttggtccctttcattcataattgaaacgctctcgtcaggaaggtggtgcagctggaatgcaaaattgacaactagtgcttccccaggacaacaatctagcattgcaggtgtaacatccccaatgttagcaccaactgccctgaactcaaaagatatcccacagtcctctgcaagtttctctagacgttgaccaatgaccttcaaaccgccaacggtcctctgtaccgtttcaggatcatccacaccagttattctcaaatgacgtggcttatttgcattatttttcagaaactgtatcagtgtaatgtactggctgccctgattaatgtcaaagtctataatgtgcactctatcttcacctttgcaggcttcaagtatagcataattagcagccatgaaaccaaatcggaagcacgggcagatttcaaagaggatttgcattgccgaaagctgataaagagtcgggggctctttgcacgacaaggccttgtatatgcctttccctgaagctactattcttgctgcaagaccttccactagataggctgcaatcctctgagaagggtccccttggattgagaccatctgccggaggtccgttatgattgcctgtgcttcatctacattataatcagataatgccattgcacagtcaaagagcaactgctttggggtccgtggttctccattgttgctaccagcacaactgatgcttgattccgattcttttggtgagttagggagtatgacattcttcattggatcagcccattcatcgttaatgctacctgcctgggaaatctcatacaagatgtcatcactatcatcaagtaaagcatgctccagctcctgaagcttcatcctgatatcatcttcatcaaactctacttcaagttcagaactctgattgtctgatatagactgagaattctgctgagatacattggacaccaatggtgagtcttttgccacatctgagcaggaattgtctgcagaagatggagaatggccatcagctgttaccatgtacggcattggtgaggcctgttgattgtaaaaggagttctcaggattgtatggttcaggcccataacggaacagctgtgtgtcggacgcatatcttcgtgcagcgaaatttgaatttggagtgccaaatttatgtatgtaaagattatctgcgtaagtggttgacgggtctgctcgcctgataaaagacattacttttctgtagtgcttctaaacctactaggctaaatactcaaactcaaggcacagcttcctctgattatggatattgaacaaatacaggaggagggggtagcttgcttccggtagcacacacaggagagcggcaggagaggaggaggaggaggagcggagaaggcgaggaggggaagcggagaacggaaatgggaaggagagggagcaggagggaaggaaggaaaaggggaagaagagaagagaggagaagagatgggcctcgtccgaatcctgcagcccgggga

SEQ ID NO: 22222 - DNA, 941 bp, Oryza sativa
  unsure (1)..(941): unsure at all n locations
  Clone ID: TF_OsC152890_1
acggaattctatcagctccagaccaagccggttcgtgagaacctcccgtcgcaatcttcgtcgttcgcgtcttcgaacggcagcagtgttactttctcagaaggattcgagtcgttgctgagcccggctggtgtcttgcctgatgttagcctgaatgattttgttgtgcagaaccaacaggctttgcagttccgccgcgggtttcaagaggcaagcaagtttcttcctgatgagagcaagcttgtgattgatgtggataagctctacagtggagatgaggggagtaggttccttggtgaggttagacaagagaagaagcttgtgaaggtgaagacagaaacctctgatgttgaatcagcaggtcaccgaggaaagaagcatttctatggtgatgacctggatgcggaggaagggaggtgcagcaagcattccgcgcaagggattgacactgaccaccttgtgagggatttgatggacaaggtcttgctatgcaatggtgagacatgctcaaaaggtgttaaggagttgcgtgaggctctgcagcatgatgtggcgaaacattcaggcggaggccatggcaaagggtccagccatggcaagggtcgtggaaagaaacaacccaagaaggaggtggttgacctggagacccttctcatccattgtgctcagtctgtggccactgatgacaggcgcagtgcaactgagctcctgaagcagatcaggcagcatgctcatgccaatggtgatggtgatcagcgtttggcacactgcttcgccaacggcctcgaggcgaggctggcaggtactggtagtcaaatttaccaagaactacacgataactcggcttccatgcactgatgtgctgnaagcgtaccagctttatttggcagcttgcccatttaagaagatctctccattacttttgccnatcaaacaatttt

SEQ ID NO: 22223 - DNA, 2604 bp, Oryza sativa
  Clone ID: TF_OsC6079_1
ggctctctcctcctctcctcgatcgcacgcaccgcatctccgatccgcagcagcagcagcagcagcagccgcgaggccccggagccacgcgcatctcgctcgccgccggcgagaaggccccggtaaccggtgggccgcagagggggaaaaggttttggagggagcgacgccgcgtgcgtccccgtctcggctgggaccgaaccggaggtgtgccatttttggaggctatcgatgggtctggacaacaatttcggggagctatctggcatgttctgtggcttgtcctatgatggctacacggatcacggcagccagagcgattacttcaggttcgccgacccgcagccggcgatcgtgccccagatggacgccggacccagctccgccgcttcctccacggcgtcgagggccgccgtcagctcggggaccgacaacccagaggactgggagttcatctcggacgagtcgctcaactatatcagccgcatgctcatggaggaggacattgatgagaaggtcagcatgtaccaggaggagtccgcggcgctccgcgctgctgcgaagccattctatgacattcttgggcacaagttcccgccctcccctgaccgccagctggtagcttggcccctcgacagcccgagtgagagtagcactagcagctatccacactccttggctagttctgttactagcagcaacattagtggtgcggtcgatagcagccaacgccgttatgttggacacagtgagtatcggagcttgtctggtcattcttctcaaccgccggttggcccatcaagtgatgttcgcaacgctatggagacactagaagatcctttgattagtaatggcaggatccctgagtatttgtttgagagctttccaacatgggatttcaggagaggtgttgacgaggcacagaagtttctcccgggtagcgataaggtagtgattgatttagaggctggtggtgttgcaaaacgtcaagaagcagggaaagctatttctctgaatgtcagcaaggcagaggttttgaaggtaaagaaaaacagacagagtgaagaccttgacgtgatggaaggacggaatagtaaacagtctgcattttgttctgatgaacctgattggattgagatgtttgatgttctgcttcgtcaaactgagaagaaggcaactgatcttcgaaaaatgatgcgttttgaggcttccaagaattcgcccgttgctcagccaaaaggaccaagtgggacccgatcacggggacggaagccaactaagaaggatgtggtggaccttaggacgctactcatccactgtgctcaggcagtggcagctgatgaccgccggactgctaatgagttgttaaagcaaataaggcagcatgccaagccaaatggagatggctcccagagattggcgtattgctttgcagatggtcttgaggctcgcttggctggaacagggagccaactttaccataaacttgtggcaaaacggacaacagcctctgacatgctcaaggcataccatctttaccttgcagcatgcccattcaagaggctctcacattttctttcaaatcaaacaattttgagtttgacaaaaaatgcatcaaaggtgcatatcattgactttggcatttacttcggcttccaatggccgtgcctgattagacgtctcttcaagagggaaggtgggccaccaaagctgcgtatcacagggattgatgtacctcagccaggtttccgcccaactgagcgcatcgaagagacagggcagaggcttgcagaatatgctgagaagattggtgtcccttttgagtaccaaggcattgcatcaaagtgggaaacaatctgtgttgaggatctcaatattaagaaagatgaagtagtgattgttaattgcttgtatcggttcagaaatcttattgatgaaacagttgccatagacagtcctaggaatagggtgctcaataccataaggcaagtgaacccagcaatttttatccatggcattgtgaatgggtcgtacagcgttcccttcttcatcacacggttccgtgaggcattatttcatttctctgcattatttgacatgctcgagacaactgtgccacgggatgatgcccagcgtgcactaattgagagagatctatttggccgggaagcactcaatgtgattgcatgtgaaggctcagacagggtcgagagaccggagacatacaaacagtggcaagtgaggaatctgagagctggatttgtccagtctccattaaaccaagacattgtgctgaaagccaaggacaaagtgaaagacatctatcacaaagactttgtcattgatgaagacagtgaatggctccttcaagggtggaaaggaaggataatctatgccatatctacatggaagcctaataacaattagggtatggtctgtgagctgtgcctggttgcccgttagcactagcaattaacgaagaaaagtaccttggcattgggctacatgcgtatgtacagggctgccttgggccttccactgcactgctgctcggttctctgtggttctactacagtgaaagattgaacagaagccgattgttgc

SEQ ID NO: 22224 - DNA, 1488 bp, Oryza sativa
  Clone ID: TF_OsC382432_1
ttaacagcgccatgcggagacggaggcaagctccccgcgttgccaatggaggaagagcgagccggcgcgcctctccagtcggaatcccctcaccggcagcttcttcaggagagactccgcctgcgcctccgccatgctgctcacttgcaccggcacgaaccccgccgacgccagcgtcgcccgccacgccgacgccgccgtcttgtcgccccccacccccacggcggcgcgcacgcactcttggatctttggctggacccagaaccgctcgatcttggccgccacgtcggagtccgtgcccatggcgtccagcgactccagcagggacacggtggagcgcaatgcctgcagcaggtgcgccgcgaacggcagctcgccgcggtcacagccgcggtccacggagacaaccagcttggcgccaaggcgcctgaccaggtgaagcacggacggcactgcggtggcgtggaccgagccgacgggaaggtggacggcaatggcgtcggtggcggcggcaacggcaagaaggggggtgaggtcggtggcgtcgaggttgaaggcggcgaagcggaaggggacggagaggtcggcggcgaaggtggagagggtgtcgtggatgagctgcagctggagcgggtgatgggaggaggaggaggcggtgacgttgagggcggtgaccttgagggcgacgccggggtggcggtgggcgaggtcatgcatgagggaggcccactgctcgccgacaccgatgtcgaagtcgaggaggtggatgcaggaggcggagggtgcgagctcgtcgaggacggcctggacgcaggtgaagtgggcgaagtggagcagcggggagaggtcggagaaggacttgtaggaggtgagcttgaggaggaggtcgtgcgggtgcggctcgtggaggggcgggggcggtgtagaggaggaggaggagtcgtcgtcggagatgagggctcggcgcagggcgtccttgaaatacaaggcggagcggagtagcggcggggcggcggaggcggggaggcggtagttgatcgccgggcgcgccaagatgtgtcgggcggccaagacgtcgccggcctcggtgagtttggcggcctggaccagctgctccacagtactagtgttgtcgtcggccgtcggctttgggtttgggaaagacgaagaagctgggtggtggtggtgcaggcctcgatcagcgaagaagaaaggtgcaggcttagcgtagtcgaggtcgacgtcatcaagatcaaggagtggatggtggtggtcgttgatgacccagtggaggaaggcgttgtcgtggtggtggtcggcgtcgtcgagccatggcggcggcggcggcgttgaggccgcgtgggtgggcgggcggaggccgggcgaagtcagggtgaatgaagaagaagaagcgttttggccgctagccgaagagccagcttgctggcttgaccgcccaatgtcggttcctccctcccaaaccgacat

SEQ ID NO: 22225 - DNA, 1561 bp, Oryza sativa
  Clone ID: TF_OsC316237_1
aagtgcacagccctctatatatgccttgtacaagcaccaaatccgtgcctcaaaccgctcaaagtgtactagctctgcgtctccgctgttttctaatcgcgtctctgcactgcttgcgccgcgctggtgccaccactacatgatgcagttcacgcacaccgcgccacctccaccgcctctgcaccctaatgggcatggactagggttagggttgtaccttgacgtcggcgcgacgaggggaggaggaggagcgcggccgtggtcgtcgtcgtcgtcgacgacgacgttgggtgggagcggctacttcccgtcgtcggcggcggcgtcgaagatctcgttggggaacctcaacagcacgggctgcatggagcagctgctggtgcactgcgccaacgccatcgaggccaacgacgccacgctgacgcagcagatcctgtgggtgctcaacaacatcgcgccggcggacggggactccaaccagcggctcacagcggcgttcctgtgcgcgctcgtgtcgcgggcgtccaggaccggggcgtgcaaggcggtgaccgcggcggtagcggacgccgtcgagtcggcggcgctccacgtgcaccggttcacggccgtcgagctcgccagcttcatcgacctcacgccgtggcaccggttcgggtacacggcggccaacgccgccatcgtcgaggccgtcgaggggttccccgtcgtgcacatcgtcgacctcagcacgacgcactgcatgcagatcccgacgctcatcgacatgctcgccggccgcgccgaggggcccccgatcctccgcctcaccgtcgccgacgtcgcgcccagcgcgccgccgccggcgctcgacatgccctacgaggagctgggcgcgaagctggtcaacttcgcgcggtcccgcaacatgtccatggacttccgggtggtgcccacctcgccggccgacgcgctcacgtccctcgtcgaccagctccgggtgcagcagctcgtctccgacggcggcgaggcgctggtcgtgaactgccacatgctcctccacaccgtcccggacgagacggccggctcggtcagcctgacgacggcgcagccgccggtgtccctccgtaccatgctcctcaaatctctccgggcgctcgacccgacgctggtggtggtggtggacgaggacgccgacttcaccgcgggcgacgtggtggggcggctgcgtgcggcgttcaacttcctgtggatcccgtacgacgccgtggacacgttcctccccaaggggagcgagcagcggcggtggtatgaggcggaggtggggtggaaggtggagaacgtgctggcgcaggaaggggtggagagggtggagcggcaggaggacaggacgaggtggggccagcggatgcgcgccgccgggttccgcgcggcggcgttcggcgaggaggccgccggcgaggtgaaggcgatgctgaacgaccacgcggccgggtgggggatgaagcgggaggacgacgacctcgtgctcacgtggaaggggcacaacgtcgtgttcgcctcggcatgggcgccgtcctga

SEQ ID NO: 22226 - DNA, 2117 bp, Oryza sativa
  Clone ID: TF_OsC165556_1
aaaagagaactactctgtatattagatcagagatgtgcacaaaagaaagacgtgcggttttgaacagttgaatcacaaggttgggggcttgcactcttgagcactcccaattttgtcattgccatacaaattgtacaagcatgccatggagcatgaattctcccaggcaagaaataattacccaattactactactagtgctaacatatcacaagcagctttggtttgatcaatttacccaaagctgaaaatattcaagatcaatgaacaccaaacatttgtagtacaagtgtaccaggcagaggcagctagcatcgccacgctgacaccgagacgagctccgaccgctgccaccacagcgccagcgccgcctgccgcttctccacatggaacccatggctggccgtgcgcctcagcaggcattccgcctgcgcctccgccgcattgctcacctgcagcgccgcaaaccccgcggacgccaacatggactgcaacggcggaggcagcttgtcgccgccgccgaccgcgaggcgctccacccgtggccgcaggacgaactgctccaccttggacaccacgtccggcgacgcgcccgccgcgtccagagactccagcagcgccgcgcaagactgcaggaggttgagggcgccgcgctcgcacccgtggtcgacgcacaccacaacggcggggcggagctccttcacgacacggaggtgcgcgggcgccggcgagaaggccccggagccggccgtgagatggacggccaccgcttcgtcgggcgcggccgagagtcccaagggcggggacgcgctgctgagggggtcgaacacgagggcggtgaactcgaacgggatgccgagctcggcggcgaagcgcgtgaggctctcgttggtgaggtggagctcgagtgggtggctggaccccggcgacaccaatgcggtcaccttgaggttcggcggcggcccagcagcgcggcgccagtggtgcgcgagctcctgcatgagaggcggccaatgggcaccgaagccgacgtcgaagtcgaggaggtggaggcggcgcgcggagccgagcgcgtcgaggaaggcctgcgtggatgtgaaggtggtgaactgcacggtcggggaggcgtccgccagggccttgtgcgcggcgagcttgagcgggacgtcgaggggagtagaggagacggggagggcggtgggcgggaggagcgcgtcccggaggagggcggcggcgcggaggagcggagggtgggcatggcccggaggcgacggaagagaggggaggcgatgattgagccgcgccaatatctccctagcggaagtggagtccccggcgtcgaggaggcgtgcggcgtcgaggaggtcgtcgacgagcggctgaggaggatggtcagagggcatgggcatggggagttggagcaggtcggagtcgaaggaggggtggtcgggaaaggtgtcggcgtcggcatagccggtatccatgatccagcggaggaaggaggagtcgggggcgggggcgggggcgagcatgtgcatgtgcatgtcgacgacggcgtcccagtcgcagtcgtcgtcggcggcgatggggggaggagggtcctccggtggtttggaggagcaggagccgagggaggtgctcgggctgctgcggttgtagagcacggaggtgggctccggcgacttgctgctgtccggctccggcagcggcagggtggtggggttgtggggatggcaagaggaggaggacatgagggcaatattgatcataggcagcatgtagagtactcctatcctccactccgtcgtcaagccgccggtcgtgcacggcgacgtcaagcccaacaacgtcttgctcgacacgtcgagctcatctagggcggaagcggcagcagctagggaatcgggctgctgccactcccaacatctccaccgctcgagggccgccgcgccacgccctcgtctccgccgctcgccgccgtctccgctgcccgccgccgtctcgaagtcgcgagctcgcaaaggggatccgatcctcgcccgcccgctgtcccaccgccgctggctcccggctcctgcccgccgctggcagcgccgccccagcagcgcgtcctgcat

SEQ ID NO: 22227 - DNA, 2378 bp, Oryza sativa
  Clone ID: TF_OsC33690_1
ccggccgggaatcgcggccggcgcttcgtcgtccaccgtctccctcggtcaccgtcgccgcgcacgactcccatccatggcgatcgagctctgcccatttaagcccggggcgcctctcttcgaggacttgcaaacgcttgctgcaaggattggatcctctggcttctgttgatttggggagcttttcatcgtctcgaccgaacggccagccgccgagatcgaggaaggaggagatcgaagggcagagtgatttggcagcggtggacatggatgtgaggtttgggcccgaggagcagatcgtgtggccggcttctgttcttgctgggatcctcatgtgcgcagcggtatatgatataactcgtgaagttagctcccggtgctacaagggttataatggactgaatgaattgcacaaacttgagtggaacaacaggggattctctaccttccacgcattagttgctgctgtagtctctttttatctgctggtgatatctgacctcttcagtaaggacgtccatggtgccatcataattgatcgaaaatcatggatgtctgatgccatgtttggtgtatccctgggctacttcttgacagatttgttgatgatcctctggcatttcccttctctaggaggaaaggaatatctcttgcatcatggattgtccatgtatgcaatctctcttgctctgttgagtggcaaaggacacgtgtacatcctcatggtcctcatcactgaagcaaccacacccttcgtgaacctcagatggtaccttgatcttgcaggccggaaggactccaagctttacctgtacaacggggtggcactgtttgctggatggctggttgctcgcgtcatactgttcgtatacttcttcgctcatgtgtaccttcacttcgaccaggtgaggacggtgttcccgctagggttctacagtatgatggcggtgccgccggcgatgtcggcgatgaacctcctctggttccggaagatctgcaaggggatggtcaaggccatgtccagcgccaaccgaagtcaatgcgccaagacagatgagggttgcgccggcgaggacgactcgccggagttcgtcgagccgccggcggcggcggcggcggccgggacgttcgagcaacggccggagttaggagcgtgcaaggaggtgtactccgaggaaggcggcgcggcggaggagaggacgggcgtggcgatggcgggggccgacgtcgaacaggtggcggtggaggatgaggaggaggctcacggcgtgcggatgatcgcgctgctgatggagtgcgcggcggcgatgtcggtgggcaacctcgcgggcgccaacggggcgctgctcgagctgtcgcagatggcctcgccgtacgcggcgtcgtgcggcgagcggctcgtggcctacttcgccagggccatggcggcgcggctggtggggtcgtgggtcggcgtcgtggcgcccatggcgccgccgccgtcgtgcggggccatcaacgccgcgttccgggcgctgtacaacgtcgcgccgttcgcgcggctcgcctacctggcgtgcaaccaggccatcctcgaggcgttccacggcaagcgcctcgtccacattgtcgacctcgacgtcgtccccggcggcgcgctgcagtggctctcgctcctcccggcactggcggcgcggccgggaggcccgccggtgatccgcgtcaccggcttcggcatgtcggcgtcggtgctgcacgacaccggcaaccagctcgccgggctggcgaggaagctgtgcatgtttttcgagttctacgccgtcgcgaagcgaccgggagacgccgacgcggtcgccgacatgcccggaaggaggccgggggaggcggtggccgtgcactggctgcgccacgccatgtacgacgcggccggcgacgacggcgcctccatgcggctggtgcggtggctggagccggcgcggttcgtctccgcgctgcaccactactcggcggtgttcgacgccatgggcgcgtcgcggccggacggcgaggacgcgagcaggcatctggcggagcacggcgtgctcggcagggagatcgcgaacgtgctcgccgtcggcgggccggcgcggagcagcggccgggaggggcccgggagctggcgggaggtgctcgcccggcacgggttcgcgcacgccggcggcggcggcggcgggcgcgcgcagctggtggccgcggcgtgtccgggcgggctgggctacacggtggcgggagaccacgacggcacggtgcggctggggtggaagggcacgccgctctacgcgccccaagaaatgaagaacggcctgagttggatagttgcatcaaagacttcaggaaataagatgagctatggatcttga

SEQ ID NO: 22228 - DNA, 1740 bp, Oryza sativa
  Clone ID: TF_OsC68212_1
cgggccgcggggctctttttttttttttttttttttttttattttccaagaactacaaaaggtaggacttggggtcttcagcgccattcacaaaccaaaaggtttctcgaacagtctaactgacaagtagacaagttctaaaataaagcacagattgtagctaatctactacgatattagtttagttcgttccgtgatgcacgcgtgcatcaaccccgtatcttctaccaagtcctttgatcatttcgcagcagctttccctcgtttcctcggatgcctgataccgcggcaatatttgcttccacatagacactgaaatgctttaacaggatctttgccatcaccaaaatcaataccatagtcccatgtgagctcctcaaatgcctccaccttcttggttgtgaaaaatgcaagatgataataatgatgatcaggcgtctccacttcaacaggtatctcaactaaattcgcatcatagcatctatggttgataaatactcccaaattcccataaaatgttgaatccaggggataaagcttcttcatctttcaacacaccttcagaaccccaatcagcatccaagagaacagggtaggtatgcctaccattgttcatgttttgaagtgtcctttcatgcagttctgtactagttagtacttccccaacatattcacaaacaaaggctccttttggcagttcatcaagagtgcgaagaccccaacccttcccttctcctgtgaaaaatacctgcagattgcatgtgatgccacgttgaaccacacggttaccacattgcatgttacaaccacatttactccagcattccttgataaatttcctagcaagatgtcctctgcaaggctctggtgaagcttcattcctagatctctcgagtgggcaggatgatttacagaagaacttgtgacatttttctgggaaacgattcatagaaacacattcatcaaggaatggtgtcctaaccagaccttctggtgtatacacatattcgcccccggtttctcttgtgcaagcacatggtataggtgcagacaagcagttgccaaagcaatcagcacaacaatcttcatcaccaattcttgcaacggagatgttgacataagcattttggaaaacaaggtttcctcgtatataataaaaggaaggaggacatttctcacttgcaaattcattggccaccgatatcctcactctctcttctcccttggatatatcagttacatcatggataggcttcaagttggcaagtgccaaatgagtctgctgtttagcaacacttgaattttctgagtcttccacaataaatgattctcctgcagatttacatttcctatttccaccatcctcgcatgctattggcttcacaaatggaatgctacctgtcattggctcattttgtgagcatctcccattgccagcaacatctgattctgtattatgttctgcaatatgatcactacccagttgtacaacacattggcatatctcattcatgaggctaccaatggaaaactcaggaggcagaatcttgtatgagtgaagatatttatcctccaccatcttgaaaactgcttctaaggaaggcatgcggaactttgggtcaacactgcatttcagtgacattttgacctcacccatagtggatgatgctacatcaatgactgaagatccttcccccgtgttcaccttgctacaaggttgaattgccctttttttaggac

SEQ ID NO: 22229 - DNA, 746 bp, Oryza sativa
  unsure (1)..(746): unsure at all n locations
  Clone ID: TF_OsC38528_1
tcgtacatcccccaaaggctcttcttctgctccgacctcacctcgcctccttcctccgccgactccctcccctccgccattgcagcctcgcctacggccttgagctcgtcgccgatccccgccaccgccgcgacctctgcctgccccccatgcctcggccggcgaaaatcaggaaaaaacatgagaatgtgtttgatcaattgatcaaggcgataaaagctcctgtggactttgatctgccgcctgtattgaaagaatggaagtcaaattactatgtgccaattaagcggaatgcttatattactcggaaacgcgttgaggatgatggcattttttgttcctgtaccccttctggatcatccgcaacttgtgacaaagattgccaatgcgggatgttgttctcttgttgttcgtcgacctgtaaatgtgagaataaatgtgctaacaaaccgttccagcataggactttgaggaaaaccaaattaattaagacagagaaatgtggcaatggggtggtagctgaggaagatattaaaaaaggagaatttgtaatcgaaatngnntggagaagttattgatgacagaacatgtgagcagagactatggaaaatgaagaggcagggtgacactaatttctatctttgtgaggtcagtaataaatatggtgatcgacgcgaccaacaaaggaacatgtcgcgcttcataaatcatagctgtgagccaaacacagagatgcagaaatggac

SEQ ID NO: 22230 - DNA, 2091 bp, Oryza sativa
  Clone ID: TF_OsC103012_1
ttagagtggttcatattccaaatagatgcaaacaggtgcagatctaataaagtcgcttccggcagtacggtgcaccacagaagcaaggcagctgacaatatttccatcaggcccaacaacactgtccaagacatagccataatcatatgaaagctcctgaagaggaagtatagtgtcagcagcaaagagcgtcacctttgccagcttaacatcattatgggagctcaagacacactggacaaaaaggttaggctcgcagctgtggtttataaaccttgcaaagttgccaatagagccagcatcaatgcaatactctggtgcaggtggatctgaatcattctccgcatgaagagacggcagatgcatgtcagagccagcccttttctctcttccatccagacccttcatagtttgaagacaatcaatatcaaatatgtaattgttctgcagcaaaccatctacttcttcagtcctcctcagcacaccagtgtactcacagatgggagccccagggaggatagtatcccaagtcctgacaccccagccttttgaagctgtcttaaatacctccaagcgatactgcagacctttctgagatgttctatttacacagttgttgttgcagctgcaattagcaccacattcaaatacaatagctttgggctccaccaacctgccaatgttcttgtgtgatacataaggtaaatcagaaccattgcgctgcgcgcatgagcagtttttgttgtttgcgcaatctccttcacagtcacagccattacaataagatggaatcttgatgccctttggaatttttagagatttggagtacacaaaaccagttggaggaacaggtgggtcatcaaccaaattagtagcaggaataggaagattctcctgcccaccagatatgtcatcacaaaccaacctagaaagtagcaaggcacaggtcatacaacatgatatcagcgtcactaagaatggcacactataaacaaagcatgaccaaacatagtaatctatctcagaagttgtcagtgatggctgtccctcaagccgctttaatttatatttgaaaacaacgtgcccttgtactccattctgcacccagtcatctacaaccttgtacagcccatcataggtgtagaccttcccagtgtagctattctttgatatatgtcctcggataactcttatgggattgccattatccttactgttcttcaatgccaaatttccacgttgcagttgttgagagccaatttggcgatgattaccgagtaaatcatttcctccttgaccagtataaataatttcatctgccttatcaagatcatcttcatatattcccgacatgacaatacaagttgccagtgggaaagttaggtttgcatactcctcctttccctgatatttcattcccatataatcaatgccattcagccaatgactatgaatgcccaaaacaaccatctcggcacgagaataaaattgatccccaacatcaacaccaggtagttcccctattatcttctctggataaagcacggcattgctttcttgcatctttgtaatggctttcaagtcaggccgctttgatggacgcttctggccttcctgtaacaccgcttgtgctcttttctgctcctcctgaaattccacaagtgcattgtcagataacatacgttcctggacaaggtgaaggtaatggctggtgaatgccctcaaggtttccttcacccgcagtttcgcactcttcccgttgccaaggacatcatcctcggcagcaggtcgtgcgaacccggcacaagaaaccggctccgccgcaattgcgggcatcggcttcccctccgaggagggcttcctctccgaggctgcatcgcccatcctgaccggcttcatggcgtgctgcgccaccggctccttcttctcctcttcccgcttcctcttgccgccgcgccgccggccagcactctccttgggctcctcctgctccacgtaagtgggacggcgcgtcctgttcaagcaccgaacgctgcggcgcagcgcaagcgccgcctccagtggcggcttcggcaccggcgagacctccat

SEQ ID NO: 22231 - DNA, 3320 bp, Oryza sativa
  unsure (1)..(3320): unsure at all n locations
  Clone ID: TF_OsC497_1
aagggggcagatgatttaggtgacactatttaagagctatgacgtcgcatgcacgcgtacgtaagcttggatcctctagagcggcgcgggcggtggcgagggcggggactctcctggcggcccagtcggcngaggacgtagggggcagcgagcagaccaattttttctccttccactcctcttcaaatcaagttggttagctcaagatctgtgatgaacgaccaagcttccctccttatcttcctcttcatatcctgcttaacctaaactatgactggtaaacaaacctagagaagatacaaaggaaataacggcataaacttttgttttgcaaaagattaacagtggcttaccatggctggaactcggcagacaacttcagttccgatggataatgcagcagttgttgatgcaaaacccttgcgcacattgactcccatgttccctgcggcacttggtctgcacactttcactgctaaagaaaactcatcttcgattgtctgtattaccccgtttggaccatatgctgggggcactgaacaggcaatgcctgctagtattccaccaatgtttgcatcaccggctgcccctgcagaccccaaccagaggcagccatatgctgttcacttgaatggagctgctcctgctaacggtacagcaaacaacacaggggtcatccctgatttgcaaatagctgtggcaggtacagtggaatctgctaagaggaagaggggcagacccaagcgtgtgcaagattcttctgttccttcagctcatttggttccttcagctccaggaggtaacatcactgctgtccagacgcctccttcagcaaccacagatgaatctggtaagaagaagaggggacggcccaagcgggtacaagatgtacctgtcctgtcaactccttcagctcctcaggtagatagtacagtttttcagacacctgcttctgctgtaaatgaatctgttacgaggaaaaggggacgacccaggcgtgtacaggatggtgcagatacttcagctcctccaattcaatcaaaatataatgagcctgttttgcagacaccttctgctgtcaccttaccagaagatggtaagaggaagagagggcggccaaagcgtgtgcctgatggtgcactgattcctttaagtcactcaggtgtttcgatagatgatgacagtggtgaaataataacagggaaacgtggacggcctaggaaaattgatgtcaatcttctgaatctgccatctttgttttcagatgatcctagggaatctgttgataatgtactcatgatgtttgatgcactgcggcggaggctcatgcagttggatgaggtgaagcaaggagcaaagcagcaacataacttaaaggccgggagtatcatgatgagtgctgaacttcgtgcaaataagaacaagaggattggagaggttccaggtgtcgaggttggtgatatgttctacttcagaatagagatgtgtctggttggactgaatagtcagagcatgtctgggattgattacatgtctgctaagtttggtaatgaggaggatcctgtggctatcagtatcgtgtcagctggtgtgtatgagaataccgaagatgacccagatgtgctggtttacactggacagggcatgtctggaaaggatgaccaaaagcttgaaagaggtaatcttgcacttgaaaggagtttgcatagaggtaatcaaatcagagttgttcgtagtgtaagagatttgacttgtcctactggtaagatatacatttatgatggcctttataaaataagagaagcatgggtggagaaaggaaaaactggctttaatgtgtttaaacacaagctgctcagagaacctggtcaacctgatggcatagcagtgtggaagaagactgaaaaatggagggagaatccttcctctcgagaccatgttatattgcgtgacatatcatatggtgcagaaagcaagcctgtttgccttgtgaatgaagtggatgatgagaaaggtcctagccacttcaactacacaactaaactgaactacaggaattctctcagctcaatgagaaagatgcaaggctgcaattgcgcaagtgtgtgccttcctggtgataacaactgctcttgcactcatcgaaatgccggtgatcttccatacagtgcttcaggcatacttgttagccggatgcctatgctgtatgagtgtaacgattcctgtacatgctcacataattgccggaaccgagttgtacagaaaggttctcagatccactttgaggtgtttaagacaggagatcgaggttggggacttcgtagttgggatccaattcgggcaggcacatttatttgtgaatatgcaggagaagttattgacagaaacagtatcattggagaagatgattacatctttgagacaccttctgagcagaatttaagatggaactatgcaccagaattactgggtgaacccagtctttctgactcaagtgagacacctaagcaactgccaataattatcagtgcaaaacgaactggaaacatagctcgctttatgaaccacagctgctcaccaaatgttttttggcaaccagttttgtatgatcatggtgacgagggatatccacatatcgcattctttgcaatcaagcatattcctccgatgacagagcttacatatgattatggtcagagccagggtaatgttcaactgggaatcaattctggatgtcggaagtccaaaaactgcttatgttggtctcgcaagtgcagaggttcctttggctaaaatgcgaaccctgcaacaaaaacattaaagcataatctgccattgcaagaagtaggcgattgttgtagaactatgaagcagcagggtgcattcagtgtttcaagatgccatgtaataaggttggccttcgtctggatgagaatgcaaaagagggtatttattgcagaaagcattggcattgtaccaaactttattggaataactagtatttagcgtagcatctgaattccgagaaggttggaaccgtgttactatgttcttgtagtgtagttgtttctcctgtttaagagaactttaccaactgtagaatgccatgcatatggttgcatcgcaagattttcctgggcttcgcatgccagtcgtgcactcgccgtatgtttttctgtaatattaatggctacataatgcatcctgtaataatcatggtagtagctccagtcatctgctgaggttgaaaaaaaaaaaaaaactgttgcataaaaaaatcacgctgttaattgctgcatgcctcagtaaaccagcaggtc

SEQ ID NO: 22232 - DNA, 569 bp, Oryza sativa
  Clone ID: TF_LIB4309-028-R1-N1-B3
agtaatctatttgtattgaaattttaacagagtcttgtacagttccaaaacacagtttaacgttttgaaaacatgattccgctatcttctaccatacaaaacattcatcaagttcattatattcattagacaatacaaatgaaaacaagaaagaatcataatgacacagagataaaagttggaggcgaatcatctatcaatagagcctacgcctacatacggcagcaccacaaaagcaaggtttctgcttgatattacccttagagtcacgtacctgatcgagcgcgtaattgtagtcgtaacagagttcttgaagcggaggtatattgtcctgtgcgaagaacatcacgtgagggattctagagtcttcatgatcatacaaaacgttttgggcgtacagatttggcgagcagctatggtttatgaacctcccaacattacccttacttgctgcatcaatggtgaatccactcgactcatcaccttctgccatagatcggcctgcctgtgtccccagcattagctctgacatcccttgagctaaagagttatcatatctgttaccaata

SEQ ID NO: 22233 - DNA, 1265 bp, Oryza sativa
  Clone ID: TF_OsC250784_1
cccccgggctgcaggaatcggcacgagggaattgtctagctccgcggggctcatatatacgggttctgggaggaaaggccatcgggaataaggcagctggagatcgaaggcttgagcgtggtaatctagctttgaagaattctattgaaactaagactccggtccgagtgattcatggattcaaaggtcatagtaaaggtgaagctagccattctaaatccaagcaaatctcaacatatatttatgatgggctgtgcatggtggtggattattggaaagaaggcccagagggctcgatggtctacaagtacaagttgcaaaggatcccaggtcaacccgagttagcattacacataatcaaggcaacgaggaagtccaaagttcgcgaaggtgtttgtgtgcctgatatatctcaaggaagggagaggattcccatacctgcgatcaacacaattgacgatacgcagccaacagcatttaagtacactacggaagtcatatatccacattcctatgcaaaagaacctctgaaaggctgtgattgcacgaatggttgctcagactctaatagatgtgcctgtgcagtgaagaatggaggtgaaatccctttcaattccaatggtgctattgttgaggcaaaacctctcgtatatgagtgtggcccatcatgcaggtgccctccaacatgccacaacagggtgagtcagcatggtatcaaaattccgctggaaatattcaagacggggaacaaaggttggggtgtaagatctctgagctctatctcttcaggcagtttcgtatgtgagtatgcaggtgaggtgctgcaagaaaatggagatgaacatgtagagactgatgagtacctttttgatattggtcatcactatcatgatgaagtttgggaggatcctaaatttgaaggcattttgggtctagaatcttctacgtccaagacaacggaggatactgaaggcagtaaaacaacggaggatactgaaggcagtactatcgatgcatcaaagtgcagcaatgttggaagattcatcaaccacagctgctcgcctaatctgtatgctcaaaatgttctctgggatcatgatgacatgaagaaaccgcacatcatgttctttgccaccgagaacataccgccgctgcaagagcttacttacgattacaattacggtaaagtcgaggataagaatggcaaggagaaggttaaaccttgcttctgtggttcgcctgattgctctcgcaggctgtactga

SEQ ID NO: 22234 - DNA, 3274 bp, Oryza sativa
  Clone ID: TF_OsC137835_1
gatccagaatcagaaaaatcttttgaagttgaactggcgacaggtgcagcagttacagaattcagggaaaatcaacgaatcgaatcgagggggccaacgaatggcaggaaagttttccttacggcgctaatcaccgtcagagttctcggtccccctcaccaataacgaaagaatcaaccaagacaacaaaagaatcaacggctgatcttcttcttcttcttcttcttcagtgggcgagcttctttgctctcccggtggaaggctgggcgtcgtccttggcaccgggcccctcgggcttgcgagcccacgccggggcccggtcgggctcgtagcggtagtcgtagaacagctcctcgcccgcgctgatccgctctttggcgaagatccccaccctgtgatcgcctgctaccatgatgaccttggcgtagcagtttggatcaggggaatggttggcgaacttcagcttgtcgcccattctgtaggcatcaagaacgtactcattgttcaagttgaaaaggaacgatgaattctcacggtcatatatctttccacgcttgtcagcttctttatgggagataagctccccagtgtactcgccaagatactcgtgcttcccaacactattcttgaggaaagctccccagccagaaacatcagatctcccaagtaagaccctttgttgctgtttaagcagcagtttcatgttccggcattcataattatcacctctttggttagggactcccaatgtaccatcaccgcaccctacccagcagtttctacacacatcaggatcacattccctgtcagcagcaaagcatggacactgccggctgcgacactgactctttgcgcaatggcaacctcggaagcgattcttgcacattttcgggcacccacagtatttctcacagcaggtaccatttgtgagacatggacattgcttcccacatgcagactggcaaccacaaggagtgtattgtcgacaaggctgatccttcctttctgtaatccttttccttataaaatggtagcctgcagttttccaggtgtacttcaaacggcggacccttcctcgccttctcacaaatcttgatcttgtccgtaattcattacccttcatatatcctttaacaagagaatcaacaccactaagagctccagatgcactgctgttttcaatgtaattcatatactgaaaaacatctgtgcatgttttcatcccacccagaaggttccgagcaattaaacaactgttctttccaaaaatctctaatcctttcaatagaagcccttgctcaatcactttccaggacctgccatgagcttcttgcctgcatatactctcatcaacacattcctctttccttgaactatcacaaccatctgttgctgaatgttcattatttgtatcctccattgaatcactctgagcatccacaaaagatgagttattctccatttgaagtgtgcccttctttctaaaactccttgtgcttggagaattacactgtgaggatacaacagaatccttaattccactcctagtatcagatctaagcttcatatccctaggccaatggcatccattaacaatagaattagagtccggtgacatttcctgttgcccctttttcacactcattagaattctctcagcaattcttctgttagtacttttcttgattccaccttttgcgccaagcttattttttgagaggccaggagagtgttgcggggatttattgcttaacagttgtacttcagactcactgctttctgaggaaacccttgcagttgaagaactttcactttgttgagattttgttttctgcccactagaaccaagctttttcttatttgaccctatctgatcctttagattgtccgatgttggctcctcaacatcaacaagcaaatgagaatcaatctccatgatagcatctggtttagagaccagtttgtaacagtgaataccacatggtgtaccctcatccgagctgcacaatggtgcctgcttttcagtcggaaatactaaatcttgagaacacccatgtagcttgcaatcaaaaaccaaacatcggcgacaaaagagattgtcaaaggaatccaatgctgcatccagatctttatcaccgtacacgtcttccattttgacattaagttcagacactttcttggaagaaccctcaggtttctccccttgtaggatctcatacctggcctttatatcatcaggagccctttcgatatctcgagctagagtttcaagcacagcatcagacatgccacattcttgaatggtcatccgaattatgcaatcttcagaatccttgaactcctttttctcttcctcgtcctcaacagcttcatcttcactatcactgcaaattaaagcttcgccacagtttgtatcatagtaaatccttcgacgaccaagtacagattggtcttcttgcatccgctggttcctgtccaaaaatatccaagttgtatatggagggagtgttgccacttctggtagtctaatcggacggacagaattcctcgcggatagatttccacccacaataacagtcgatgaacactcatcttggcaattggcaccttcactttcatcaggagatgactcacgactattcacagcacacagggcatcttctttcctctttgtgagcaaattcgagactaaatctgtactgttggatgtactagtttgcctattttttgacaaattgtgagagtgcagtgtaatcgggctaagcttaatgctattctcctctacccttttctggatgtaaacaaagcggtccgatgtgattttcttcttcagcgaatcaataacacatagaacatagcccgattcactgctcccttcctcgcaaaacatcggctgcggggacagaacaagcttccaggctcctccctcgctggcccacctcctgcatcctcgtccccctgcgccgcctctgctcctcctccgtcccaccccaacggcggtggggacgacatgatgcgcggcgcggcgacaatccaccgtgaggtccagcagcggcggctcgttcgggttccacacggcggtggacgcggcgcagcatgccatcgccaccgggcacgtggagaccgagggcgcagtgaacggcgtcggcctcaccaagctcatgggccggagagccggccgcattgcgctccacgccacgctcatcagccgcgacgtcgactgttggtggcggatgcagcgcctggccaccatgggcaattgcccgggctccat

SEQ ID NO: 22235 - DNA, 2576 bp, Oryza sativa
  Clone ID: TF_OsC3086_1
tgtttttgcaaaaaactacttcctgaaacttttattaggtcaaacagctcgaaactgagcaacagaaatgcaacgtccacttcctacaatctgtaacatatcactggaatttaagattgctactgttttgcatttacacatgaatatccacattgcacattgggaggtgacaattctacgcaacgggaaaaggcgctacattaaatcaatgatggatctatcagttaataatggaacacatctctacaaggtaaggggaggagggggctgtacaaatggggaaggtgagagagactgttgttaccctgccatctaaaagctaaatccccatgattaggtaggaaaggtgtgagtaggaagaaaaaagaatggtgtctgactaaaatctccaaaggaaaaaaaccaataccctctgcctacaattccttggctagcctaggaagacgttggatcttgtcttgagccaatgcaccatctccttgtcaaggggggaattattcaatacggcatccatcattggagtaccaaagaatcttgggtcactcttgaaaacccatatccggtccttgggccatggcctttgtgcctggttctccatgcgcgctaacatgaatctcacagttctgctgccatagactcgctcttgtgttggttttactgacttcacatagaaggaggatacatctggcaatgacatacaaccctttctagctcttgtcaatctagattcaggctccgcattctggctataccaataaatgagttgacctaagcaataattttctgggtatgtcttacagtactcctggaagcctggtcccagtttatctgcatatttgggacctaaatcaagaggactgataagaaccggtggagattttaccgtcttgtaatctcggactctgaaaaaacactttgtgtaagcatacatgtgaatcaaatcagcagcagcatcatgccgacacttgtatgtgcatgaaagagttctcagctcatcacgcaaccataaaagagaacttcggatttctccctcaatgtcctcggaaccagatggatcatgagcacgaattttggctttgaggtcagtaagtacatcttcctcaacatgaggttccattgactcaagaagttcatcaactaacgagccttcccctttccagatggcagaaactagacttctcccagttagcctcaccagtggaggaggagcattcttgggatccccaaatatgcatctcatgacatatcttaccttgtcaagtgtatgagtcaaattctgtaatcttgaattcagaactccctcggcctgaacctcggcatcattcttctcggaatccatgtttatatctgtgaaaaactggcgcttctcgtccacattgtgtttaaagatctcatgaggaagtttctgtctctcaaagaatataaaccgcaccaggtgagcagtgtaagcaacaagccatccaggcaaaccagcaagcaaacaggtaccaagaccagctctccccaagtcaattaagtcttgttgagaaacagagtttgcttcacaagcctgtaacagaagactatgtcgatcgagcacaccatggaattccatcaagaccttttcaaaagctccttccccagaaaaatttaaatagctgcccctgcatatttgacttccacagagacaaactgacgcttcgtgctcttctttactctcagtaacagagttgtaatcaaaagtgatttcctcgccttctgcaattggtcgaacagtgtaaattccaatctgataatgaccatccacagccgttacttttgcttcacagttagggttgcaggagtgacaaattctgctcgcatagttagccttatgcattgcatcaacgaaaaccaagtcatacccatcacggtctccctttggccgttctagcataatgttgtaaaactcaggagcttgatcgtcgctattgttttgtatatgcttaatgccatcttgtttttcataccatctccaagaagggtatacctccccaaagaactcgatgacaaagtcgtctacaccaaatccacccgttttgttacaaacaactccaagacccttcctataggcgacatagttatattctgggtggttcctcatggcctttagcattccaaggcacatctttgaagtccgtctgtcaccactctcctctgcagacttttggatttcttcaattacaggtttaagggggtaaaccatgggagtatttccagaaccagtgaactgcctcacttgcttattcaaggtgttcagaagcaactcttcaacaaaggtatgtttgtcagaggatggccaatcaagttcagtaggcatcatttcaagtaggagattatgtgtatatggatctattccatacacttcttgctcaagaacttcatccccaggtacttttctaggttgataatccttaacctctggtagttccaaattttcagtgccgttcttctgcgagagcagtttctctgaatagtcatcaggtaaagcgacccgcatctttctcagtacttcctcctcacccacgcgtccgcggacgcgtgggcggacgcaaggg

SEQ ID NO: 22236 - DNA, 2135 bp, Oryza sativa
  Clone ID: TF_OsC34869_2
actagttctagatcgcgatctaggagagaaggagagagaaaatcgcagaggagagagaagaagaagaagaagagcggaagagaaggaggagaggagccatggatgcttcagcgctcagcaacccgcggctgcaggccatgctagaggaggagaagaggaaggcaatggcaaacgagttcgtggcgaagctgactgatgtttgctgggacaaatgcatcactgggagcattggaagcagcttcagcaacagcgaagcctcgtgtctgtccaactgcgcaaaacgctttctcgaactgaagatgctcaccatgcaacgacctcaagaagccccagcttcattttctctgcccttaccaaagtcaccagttcctataaaagctacaccaatctcagcggcatttccaacaccgcaacatgaagatgaatcatcagatcaagattacaagcccttttgcaggcagaaaaaaccaacgctgccaaagagagccaagaggccccagcaagctgagaaatctaatgatgccaacatcaagcgcagatcaataaggaggagcctggacaacgagttcaacttgtgttcatcctcatcagacaacccaaaggaatcggtggaaggaatcctgatgatgtttgattcccttcggcgccgtgtactgcagttggatgaaaaggaggatgcaagcaggcgggctgacctgaaagctggcaccctcatgatgcagaacaacctcagaatcaacaatcataagatgatagggcatgtgcctggtgttgaagtcggcgatatcttcttctttaggattgaaatgtgcatcattggtttgcatgcaccagccatgggtggcattgattacatctcttctaagaacaaagatgagactctggctgtctgcatcatttcatctggaggctatgagaatgacgatgatgacactgacattttggtctacacaggacagggaggcaatagtcgtcacaaggagaagcatgatcagaagcttgagagaggtaaccttgctctcatgaacagcaagatcaagaagaatcagatcagggttgtgcgcagcgcacaagaccccttttgtaactcaggcaaaatatatatttatgatgggctttatcgtatcgaagacacttggacagacacggcaaagaacggatttaatgttttcaagtacaagctgagaagggacccaggacagcctgatggaatttcactttggaagatgactgagaagtggaaagcaaatcctgccacaagagaaaaggctatattgttggatttatcatcaaaggttgaacacctacctgtgtgccttgttaatgatgttgatgatgaaaaagggccaagtcacttcaattatgttgctggagtgaagtatttgagacctcttaggaagacaaaaccattacaatgttgcaaatgtcctagtgtttgcttgcctggtgaccctaattgttcgtgtgcgcaacagaatggtggtgatcttccttacagcgcaacgggattgctggcaaagcacactccaatggtttatgagtgctcctctaactgtcagtgttctcataattgtcgaaacaggatcacacagaagggtataaaactgaactttgaggtattctggactggagaccgtggctggggcctgcggtcttgggatcctatccgtgctggcacattcatttgtgagtacgccggtgaagtcattgatgaaactaagatggacatagatgttgaggaagacaaatataccttttgcgcttcatgtcccggcgataaggctttaagctggaatttgggagcagaattacttgaagaaaaaagtacggctgtgacaaccaagaactttaagaagctaccaatcatcataagagcaaacaatgaagggaatgtggctcgttttctgaaccatagctgttctcctaatctcctttggcaagctgtacagtatgaccatggcgatgacagctacccccatatcatgttttttgcaatggaacatatccctcccatgactgaactgacttatgattatggtacaagaggtgctccccctggctttgagggaaaacccttcaaagcttgcaaactcaaatcatgcctctgtggctctaagcattgtcgaggatattaa

SEQ ID NO: 22237 - DNA, 3582 bp, Oryza sativa
  Clone ID: TF_OsC55389_1
atgccgcactcgcgctccgattcggggtcgggttcccacggccctgacccttggcgtgggagtaagggggggaggctgttaatgctagaccagcaggaggaggagaaggggtcggggatcgagggatgcttggtgccagcatctcgcgaaatgaaggggtataacattggatggggttcggacccatctcaaatgacataccggggcaacctacagaatcagtgagccagccgctgtaaggcactgaactagtaaacattatgcaatcgtaacgtcgaggtagtgtatagcggctccgttttaaaagatgcaagttcccagaacgggatccagtgtgttgtggggcctttgctgcagcagaatttgtaatggtacatgtatatgaattggcttgggcagatgtgtggcccttacccacctgaccaactgtaagatgggttatccaaaggattcttgttttgagattgtgctatgactgccgtttttggtggaaaaatcgccatcgctgtgcccgttggttcaccgaaacagtttattccacaatggagttctgagtctgtggtcggcacaggcgacgaaacattggagaatatgaaaatggccgctgttaacaaattgattcttcctgatattctttcaagtgaagaatcaagtaagatgtttgaggacgcagatggcggcatctagaggctcaactctctccctgaattaccacattcacattacactagccgtcgccatggccattcaatgctctcccattctgatggaaagatgcgtgcatgtcgacttgaatcactaatagatcgctggagtggaggcatagagcattcagaatcttcagccaatgattctggggcactgaacgctttaatggatgatgacgttgaagatatcaccaatttgctgcactctgtgattatgaaatctgcccacacagtttttatttacgtcagataaataatgcatgagagtgtaatgaaaggttgggcgcccatctgcgcacggatggtctgcaagggtgccgtcgcatgtgttctgaacgagaatcttggttactagaagactaggttaattatgggcattcgtgaaggatcctctactcgtctaaaaatcattgactcgaataaatataaagtaccggatgatccttccatgggtgtacaatcaactgcaatgcagtatgaatttgctgatatattatcggcagattgggaaacaatttataacaaatccatgaagagtttctgagatgaagtactgtatgatcctgccatggactactgtgatgcatggcttaaaagaaaaaatgagtcgaatcttctctctacagttgttcctggagcctctgataaccaaaagatgcaagacacagatgaaatgtcaccaaaggcaatttgtgattcagatgctcctgaaagtgacatggatttccctccaggatttggaccaaatcaggaatctgctgagcattcccactctgcgtgtgttgagtatgttactgaaaaaacagatgggaggtctggatcaagtatcacgttgttttctggccccttaggacgagttcaggaacgaattcgtacgcctgttcacgcaccagaaccatccagtcctcctggaatatctgtgcatgaaacgcccagtcctgctgaaatgcctcgagatgaaatttcggatatggctgaaatggctcgagatgaaatttcagatatggctgtagatacaataccctgccctgctgatatggcggcatctggaacatcaactgttcctgaagtgacaacagacaaactgatcattccttacgtggaacatcaatcgccctctgcatctcatgcaagtatatttgaaaagttggatgcacatgaagaagctgaattggatgacagttttgatgaggtgcctcctggaacagaggctggcttagcttcattggtgattatggagaaaaacaaataccagccctcaaaatcagtagactcagtgcttgacatttatagatatactagttgggcattcttcaggcaaatactgcatgagagtgtaatgaaagagtgggcatctctcttctcaggtgctctcagcaattgttttgactcatggtatgccaggaaaaatattgtggctaaaaccatggatgatacattgagacccaaagaatatacttactacaggaagaggaaactgaggaaaaactgtgaagcatcatcatcagaaaaaccaatggatgagcagctctccagacctcttcgtgatcttgttgaatgcaaggttaatatgaaaaatatccatcgatcaagcaaggctgggatttcgcagagagtttctgttgtggagaagccctccaaaaagcgtgccaaaccttcacataatgataatattaatctgaatatccagcaggacttgaaactcctttccgacaaggtgccaaagagaaacaggtcttcccatcctaccagtaagcctcttgttagtagcaaagtgcctactgaggatagaactacatcagcaatgcctgcaaagaaaagaaagcagaaaaacttggccactgagtccaacctgaagacaaaagcagtaattttatctccagaatcacatggttgtgaagcgcctactgagaaaagaactacagctataatgcctgtaaacaaaagaaagaaaaacttgtctggtgaatccaaactgaaggcaaaaccgttaacaagtccagaatcgtatgtttgtgaagctcctattgacaatagaactacatctacaatgcctgcgaagaaaagaaagcagaaaaacttgtccaatgagtccaacctgaagaaaaaaccgttggttttatgtcctgaatcatatggttgtgcaagagcttctgtgagtggatgggaatggcgtgattgggcacgcaatgccactccatcagaaagagctcaagtgagaggctaccgagtgaggagtattctctcagctccagaaaataatgtattgaaaagttcacaagttaagggctcatctgcaagaacaaaccgggttaagctacggaatctgttagcagccgctgaaggcactgacctactaaaaattatgcaatcgaagtcaaggaagaagcggctacgttttcaaaggagtaagatccatgaatggggtctggtggctcttgagtctattgatgcagaagattttgtaattgaatatgttggtgagctgatccgccgacaggtctcggacatacgcgaggatcaatacgagaaaagtggaattggaagcagttaccttttccgtttggacgatgactatgtggttgatgctactaagcgtggtgggttagcaagattcatcaaccattcttgtgatgtgccgcggatcaatgaattaggaagtaaagtttataagtcaggaggtaactgcaattgggtgctaccccagtatgtatgtgtcatgcgtgcttgtcgattgtactgggcagaagttcactgcagaaatgttcttggatttactgacaggatggttagatggactaattcgggctatccagaggaaggccaacaacattattacattgactggattgaggatatagagtttacacggtga

SEQ ID NO: 22238 - DNA, 2473 bp, Oryza sativa
  Clone ID: TF_OsC96998_1
atggagatggacacatcgccatcgtcttcggcgccgtcgtcgccggcggcgtcgtcggactccatcgacctcaacttcctgccgttcctcaagagggagcccaagtcggagccggcttcaccggagcgagggcctctgccgctgccggcagcggcaccgccgcctccacctccgccgccgcccccaccaccgccaccgcaggtgcaggcggcgacggtggcaactccggtgccggcgacgcccgacctctcggcggcggcggtgatgacgccgctgcagtcgctgccgccgaaccccgaggaggagacgctcctggcggagtactaccggctcgcgacgctatacctgtcgtcggcgggggcggccggcgtaatcgtgccggcggcggcgccggaggcctccgcgggggcggtggcgcagcccgggtcggggtccggcgcgaagaagcggcggccgcggtcgtcggagctggtgcgggtgtcctcgctgagcgtgcaggaccagatctacttccgggacctggtgcgccgggcgcgcatcacgttcgagtctctccgcgggatcctgctgcgggacgacgagcgcgcggaggtgctcggcctcacgggcgtccccgggttcggcgccgtcgaccgccgccgcgtccgcgccgacctgcgtgccgcggcgctgatgggggaccgagacctgtggctcaaccgcgaccgccgaatcgtggggccgatcccggggatctcggttggggacgccttcttcttccgcatggagctttgcgtgctagggctacacggccaggtgcaggctgggatcgactttgtcacggctgggcagtcttcctcaggggagcccatagccacatctatcatcgtgtccggtgggtatgaagacgatgacgatcgcggcgatgtacttgtgtacacaggacatggtggtcgtgaccccaacctccacaagcattgtgttgatcagaagcttgagggtggcaaccttgccctcgagcgtagcatggcctatggtattgagatccgcgtgatccgtgctgtcaagtccaagcgcagccccgtcggcaaggtatacttctatgatggcctctataaggttgttgactactggcttgaccgtgggaagtctggcttcggtgtttacaagtacaaaatgctgcgcatcgaggggcaggagtcgatgggctctgtaaattttcgactagccgaacagcttaaggtcaatgccctgactttccggccaacagggtatttgggctttgatatttccatgggtcgagagatcatgccggttgcactgtacaatgatgttgatgatgatcgtgacccacttttatttgagtatctggcgcggccaatatttccgtcctctgcagtccaagggaagtttgctgagggtggtggcgggtgtgagtgcactgagaattgctcaattggatgttactgtgcacagaggaatggcggtgagtttgcatatgacaagctcggtgctcttttacggggcaaaccactggtatatgagtgtgggccatattgccggtgcccacctagttgccccaacagggttagtcagaaggggcttaggaatcggcttgaggtattccggtcaagggagactgggtggggtgttcggtctttggatctcattaaggctggaaccttcatctgtgagtttagtgggatagtgctcactcatcaacagtcagagattatggctgcgaatggtgattgcttggtgcggccaagcaggttccctccaaggtggttagattggggtgatgtctctgatgtctatccagagtatgtggcaccaaacaatccagctgttcctgacttgaaattttcaattgatgtgtcaagggcaaggaatgtggcttgttatttcagccatagttgcagtccaaatgtgtttgtccagtttgtgctgtttgaccattacaacgcagcttatcctcacctcatgatctttgccatggagaacattccaccattgagggagctaagcattgactatggaatgattgatgaatggggcgcggcgtttcccagctaggttgtcacgccaaggatgttggcatggcaaggctatgacgtagcacagtctttcagtgtgtcacgttccatcatgccagggcgaataacagaagcttgcatatgggatgatgtttcaagccttcccatgaggaaggcaaagtcacagctcattgtcatccactaggcatcaaccgtccgttgtatatttttgcatggtagctgcagtgccccgtggctgattccctctcacccttgaagcttgatgcttgcttttgtaggaagcttgttttgcgcagcaagcaccgagtttcatacttgacctctgtttttctttttttttcccttcaattgctacgagaactccatatgtacatatatctgtacattacatgacttcaaaatgtgtcccacttctgtctgtaaatgctggttggccc

SEQ ID NO: 22239 - DNA, 455 bp, Oryza sativa
  Clone ID: TF_uC-osflM202124b05b1
tgagattaagggttgggctgttagagccgcagaacctattccacagggcacatttgtatgtgagtacattggagaggttttgaagatgaaggatgatggggccataagacatgtagaaagggaggcaaaaagtggtagcagctacttgtttgaaatcacttctcagattgacagggaaagagttcagactacagggactactgcatacgtgattgatgccacaagatatggcaacgtatcccgttttattaatcatagctgttccccaaatctcagtacgcgtttagtttcggtggagagcaaagactgtcagcttgcgcacattggtttgtttgcaaaccaggatatcttgatgggagaagaattggcctatgactatggacaaaaattgctacctggtgatggatgcccctgccattgtggtgctaagaattgccgaggacgtgtgtattgag

SEQ ID NO: 22240 - DNA, 2180 bp, Oryza sativa
  Clone ID: TF_OsC3937_1
atggcgtctccgccgccgccgcctcgcctcctcactcccaagcccgaccccgacgcccccctacccccgctcccttaccccgaccccaacctcgtccaaagcatgctcttctccgcccagtccccgcaggcgcagccgcaggcgccgccaccccacatccaaccccccgcctccgcctccgccgaggccccctccggcgacgagaagaataagaagaagaagaagcgggcccgcgcctcccaggagatggtgcgcatcaccaaccttagcatcgccgaccacctccactaccgctccctcgtccgccgcgcccgcctcaccttcgaggccctccgcgccatctaccaacgccaggacctcgccaccgccgggggaatccgcaaccgcttcgacctccgggcctccagcaagatgctctccaagggcctctggatgcaccgcgacatccgcaccgtcggctccatccccggcctcctcgtcggggactccttcttctaccgcgccgagctctgcgtcctcggcctccacaccgcccctcaggccggcatcggctacatccccgccagcatcgtcgaccagggccaccccgtcgccaccagcatcgtctcctccgggggatacctcgacgacgaggacagcggcgacgtcctcgtctactccggcagcggcggccgcctgcgcaaccgcctcgaccacagcgccgaccagacgctccagcgcggcaacctcgcgctccactacagctgccactacggcatcgaggtgcgcgtcatccgtggccacgcctgcgaccacagccccagcagcaaggtctacgtctacgacggcctctacagggttgtcacctccaccttcggccctggcaaatccggccgcgacgtctgcaagttcaagctcgtgcgcatccctggccaggacgacctcggcagcaaggcctggcataccgcagcggagctcaaggatgcactggattccaagatccgcccgcccaagtacatctcgctcgacattgccaagggcaaggaaccattccgcgtgcccctctataacaagctcgacgacgacaggtcacccctcttctacgactacattgcctgtcccgacttccccaccacccagcagctgctcaaacgccagacccagaggggctgccactgtgccgagctgtgcggctccaggtgcagctgtgagaggaagaacaggggggccgacggccctgtgtacacctccgatggcatccttctcaggggacgccccttggtgtacgagtgcggacccctgtgtggatgccccatgacctgtcccaacagagtcacacagcaagggatgaagcaccgcctcgaggtgttccgttccaaggagacaggctggggtgtcaggacgcttgacttgatacagccgggtgccttcatatgcgagtacgccggcgacgtgctctccttggacagccactcaggtgacgcccctctgcctccgatggaggacgggagctccatcatcgacccgaccaagttccccgagagatggagggagtggggagatgcatccgtggtttacccggacagggtaccccatttccccctatttgcaggggcgcgctaccgactcgacgtgtcacagaggaggaacgtggcttgctacattagccacagctgcagtccgaatgtgttccttcaatatgtaatccgtggcaatgaggatgaatcctaccctcacatgatggtgtttgccatggagaccatccctccaatgcgggatctgtccatcgactatggcttggactagggtccatgaggggggaggagggatcaatggctggtaactggttttggcgggctgaggcaacgttaggaagctgcaaatggccccacagacagttggctcgtctttttggatattttgtaggtgagcaggtatctctttttgggtacccatagtgctctcattttggggtaactagggtgcaattgatgagtttgttctaggattggcatgaatgaagaactttgctaggtagcaaaaggggcgcatcaatactgcatcactggaaagaactattcaaaaccattagttgaataaactttgtgttagtttgcttatttatgatgatgaaaacatgatatatacattttttaaaaaaaaaaaaaaaaaaaaaaggacggccgctcgcgatatagaac

SEQ ID NO: 22241 - DNA, 606 bp, Oryza sativa
  unsure (1)..(606): unsure at all n locations
  Clone ID: TF_OsC4368_4
tttgttttttttttttttttgtttttttttttttttttgatagggccaacatttaactgatgacaaatggacaaattacatgagaagatctgaatattttgattatgccaccacaaagtaagttccaattttggtaccaataacaaatggaatgccagacctatgtcagaatagatgtacaattacaatggcattcttgggtaaatgggagcaaagaataattagcatttctcacatgaaaaactgaggcaaatttttgcaattttgccactagccccgaaggagcacagttcgcaatccagtaccctggggcaattttaaatacgatccctcagtctgatcattggtgaaataattcacttgtattgacccttattttggctgattgcccctctgattcaacatcgttaacaactccacggcattttgggaatccacaataacaaggaagtcgctgatcactcgaaacaaacctataatcataagtcaactcttcccatggatttatatcccgcttgcaaaaatgatgatatgctcatccccgagaacacttatgacgcgtgaataacaattcggctcacaagaatgattaantaaaatgggcaa

SEQ ID NO: 22242 - DNA, 3462 bp, Oryza sativa; identical to SEQ ID NO: 12874
  Clone ID: TF_OsC38685_3

SEQ ID NO: 22243 - DNA, 6420 bp, Oryza sativa; identical to SEQ ID NO: 12876
  Clone ID: TF_OsC61980_1

SEQ ID NO: 22244 - DNA, 1102 bp, Oryza sativa
  Clone ID: TF_OsC55389_2
gttaagggctcatctgcaagaacaaaccgggttaagctacggaatctgttagcagccgctgaaggcactgacctactaaaaattatgcaatcgaagtcaaggaagaagcggctacgttttcaaaggagtaagatccatgaatggggtctggtggctcttgagtctattgatgcagaagattttgtaattgaatatgttggtgagctgatccgccgacaggtctcggacatacgcgaggatcaatacgagaaaagtggaattggaagcagttaccttttccgtttggacgatgactatgtggttgatgctactaagcgtggtgggttagcaagattcatcaaccattcttgtgatccaaattgctatacaaaagtaattactgtcgagggccagaagaagattgtcatttatgcaaagaggcgtatatatgctggcgaggaactgacttaaaattataaatttccactgaaggaaaaaaagattccatgccattgtggttccacagaggtgccgcgggatcaatgaattagaaagtaaagtttataagtcaggaggtaactgcaattgggtgctaccccagtatgtatgtgtcatgcgtgcttgtcgattgtactgggcaaaagttcactgcagaaatgttcttggatttactgacaggatggtaattgtgtagcaaggtatgggatcgtggaacatactgtactgcaaaaagatcacaaagttgctgagctttctggcgcagaagaatttgaacacgttatttatttaggttagatggactaattcgggctatccagaggaaggtaaagcgctcaagtgtggactgatggacttgttggttgccttagtgtgtctcctgaacgaggttcatgtttacttgctgacaaggttaatactgccccttcttgtacaggccaacaacattattacattgactggattgaggatatagagtttacacggtgatttcttcccgggggtacatttgaatgaacccctggtcattttcaattttttttgaagcatctaattagctgtaaagttaaaataaaccctataacaataacaatgaccataataatatctgtcttcaccttttgag

SEQ ID NO: 22245 - DNA, 3256 bp, Oryza sativa
  Clone ID: TF_OsC1123_2
atggatagggcgtcgaatttcatacctggtccttatcaagaactcgtggatgccaaaccaattagatcgttagctcctatgttccctgcacccttgggaatcaatgtcaaccagtcaagcaccccgcctttggtatgtgtcactccggttggccaatttcctgtcggttttggttctggaatccttcctacctttggttcaactactgccttcactaccacagcaaatggggtttcttatacaagctacaccaataatggagctattgatgccactcctatctcggcatataagaccagaccaggcattgtatcacttgatggcgatgaaccttactcaggttcagcatctggacggaagtccaagagatcatctggttcagctgctgatggttcaaatggagttaagttcaagcgccctaagccagtttacaagaattttgttgctggcaaggagcttgcctttttaccaccttcatccagtgatcccagggaggttgtggaagcagtccacatgacctttgaagcacttaggcgtagacatctgcaactggatgaaatacaagagactagcaaacgggctgacctgaaggctggcgccatcatgatggcaagcaatatcagggctaatgtgggaaaaagggtaggacttgttcctggagttgaaataggggatattttctatttccggatggagctatgtatcatcgggttgcatgctcctagtatgggtggcattgattatatgagtgctaaatttggaagcgatgaggattctgtggcaatatgtattgttgcagcaggtggctatgagaatgtggatgatgacacagatacactggtgtacagtggttcaggtggcaatagtaggaacagtgaggagaggcatgatcaaaagcttgagagaggtaaccttgctctggagaggagcctgcataggaagaacgagatcagggttgtgcggggcttcagggatccattttgcctgactggaaaaatctacatatatgatggcctctataagattcaggagtcctggaaggagagaacaaagtctggtatcaattgcttcaagtacaaactgctgcgtgagcctggacagcctgatggagctgcattgtggaagatgactcaaggatggatagacaatccagcaagcagaggcagggttatattacctgatctatcatctgcggctgaagctctcccagtttgccttgtcaatgaggtagaccatgagaaaggacctgggcatttcacctatgccagtcaagtcaaatacttgaggcccctcagttctatgaaacccttacagggttgcggatgccagagtgtttgcctgcctggtgatcccaactgtgcttgtggacaacataacggaggtgacttaccttacagctcatcaggacttttggcgtgccgcaagccaataatttatgaatgccctgacaagtgaaattctacagggacctcagttctatgaaacccttacagggttgcggatgccagagtgtttgcctgcctggtgatcccaactgtgcttgtggacaacataacggaggtgacttaccttacagctcatcaggacttttggcgtgccgcaagccaataatttatgaatgcggtgatgcttgccattgtactacgaattgccggaacagagtgacccaaaaaggggtcagatttcactttgaggtcttccggactgcaaatcgaggctggggtcttcgctgctgggatcccattcgtgctggtgcatttatctgtgagtatactggtgaggtcattgatgagctcaaagttaatctggatgacagtgaagatgattacatttttcagactgtatgtcctggtgagaagacattaaaattcaactttggtcctgaattgattggtgaggagagtacatatgtatcagctgatgaatttgagccactgcccatcaagattagtgcaaaaaagatgggaaatgtctcacgtttcatgaaccatagttgttccccgaatgttttctggcagccagttcagcatgaccatggagatgacagccacccacatatcatgttctttgcactgaagcacattcctcccatgacagaactgacttttgactatggtgttgctggatctgagtcttcaggttctcgtagaactaagaactgcttttgtggatcatcaaactgccggggagtattttaattgatggatgtatcttcattgtgttggatcaacacacaaacctatttgccagaacttcctgcctgtacccccagattcgagctctggtattattccctgagaatgacgatgggtttcaacatgaactgtgaagagacagtaaattaccgtcgatttgaactgcatagacagttaaattatggttaaactctgttgtgttgatgccgcacttggtaacttggtggcctctgtacaccaccttttgttccatattttgtgggggcatgtatttgatattattgctgcaaatcgtctgtaatccatctgcacccatcctttgtaggctagcgtcagttttaactggaactctagcaattagttgtgacctgtcagatgcagtcatgtacaatgtgccggtttaggatcaccttgcattttcgctctacttcatttctatgtattctgcaacccagttttcagatgcttccatcagtaatatacttgataggagacttgcatcaaaagattatgactccatagaagatcaaagaaaccaaatagaagttgtagcaaaatatgagattccacttcctgtgttgaaaacaacgaacaatgacatatttccatcagcctctatctttgccaaccatggtatttcaaatggcaatctctctgctttgtccacaactgatgctttgcagatggagctccctttaatccaatttgatccaaacaaccagttcgtttactcaagggcttatgcgatgcacctaacaaactttgctttattaaatgatcaatcagaagaattactaaatgatactgatgtattgaactatgtggtgatgaaagaagagctttctggagggagtttgagtcctactattaatatgccatgtgaagcacataactccatggctgcctctaatgagctggtagtgccacaatatgaaggagatgctccacctcttcaagatgatttcacatcatatttctatttgaatgatactaatctatccatattcgaagacacaaatgaattgtttttggaaaacaagttggatactaaaggtaactga

SEQ ID NO: 22246 - DNA, 3007 bp, Oryza sativa
  Clone ID: TF_OsC2056_1
ccacgcgtccgagcagagctcctgacgctggcgccgctcgcgccaccgcaccccgcaccgccatggcgtcgtcctcgtccaaggcctccgattcctcttcccaacgccccaagcggccggatcaagggccgtcgggcaaggacgcggccggcctcgtcgcgctgcacgggaagctggcgcagctgaagcgtcaggtccaatccacccgcctcgccgcgatcaaggagagggtggaggcgaacaggaaggcgctgcaggtgcacacgtgcgctctgttcgacgtcgccgcggcggcggaggtggcgtcgcggggcgccgagggcggcaacgcgctgtcgcggggcgcggcggaggggcaccgcaggttcgtggggtgggactcggcgagcgggccgggggagagggagttggtgcatgtgcaggaggagaatctggtcgccgggacgctcgtgctctcgagctctggtggtagcggcgcctcgcataggaccgtcgtgcagcttgtgaagctgcctgtggtcgacaagattccgccctacaccacgtggatcttcctggacaaaaaccaaagaatggccgatgatcagtcagttggtaggaggagaatttactacgacccaattgtcaatgaggctctgatctgcagtgaaagtgacgatgatgttccagagccagaggaagagaaacatgttttcacagaaggagaagatcagctaatatggaaagctactcaagatcatgggttaagtcgagaggttttaaatgtcctctgccagtttgttgatgcaactccttcagaaattgaggaaagatcagaagttctttttgagaaatatgagaagcagtctcaatcttcttacaagacagatttgcaactttttcttgacaagaccatggatgtggctttagattcttttgataatctcttctgtcggagatgtttggtttttgattgccgtctccatgggtgctcccagaacttggtattccctagcgagaagcaaccatatggtcatgaacttgatgaaaacaagagaccgtgtggcgatcagtgctaccttcgaaggagagaagtatatcaagatacgtgcaatgatgaccgaaatgcttgtacaacatataatatggattcaagatcttcctcactcaaagttagtgctaccatattgtctgaatcagaagattcaaacagagatgaagataacatcaaatccacttctattgttgaaaccagcagatcaaaaataactaattctgaatatgctgacaaaagtgtgacgccacctcctggagatgcttctgaaactgaaaatgtgtcccctgacatgcccctaagaactttaggcaggcgtaagatttcaaagcatgcctccaagtctaacgatcattcacctgataaaaggcagaagatatatagctcaccgtttccttttgcaatgagtgtactgaacaagcaatctgttccagaaattggtgagacatgtccagattccatagaatctgcagttgatcaacttccaagtctggatgaccctaacaagaaaatttctaccaaagatatgtgtgctggaagcacaactaacactactgaaaatacattacgagataataataataatttgttcatctccaacaaggagcactctatttctcattggagtgctttagagagagatttgtacttgaagggaattgagatatttgggaaaaacagttgtctcatagctagaaacctattgtctggcctgaagacctgcatggaagtggccagctacgtgtacaacaatggtgcggcaatggcaaagagacctctatctggtaaatccattttaggtgactttgcagaggctgaacaaggttacatggagcaagatttggtggcaaggacaagaatctgtcgtcgtaagggccgagctcgaaagctcaaatacacttggaagtctgcagggcatccaactgtaagaaaaagaatcggtgatggaaagcaatggtacactcagtataacccatgtgggtgtcagcaaatgtgtggcaaagattgcgcctgtgtggaaaatggaacttgttgcgagaagtactgcgggtgctcaaagagctgcaaaaataggtttagaggatgtcattgcgcaaaaagtcaatgcagaagcagacagtgcccgtgttttgctgccagtcgtgaatgtgatccagatgtttgcagaaactgctgggtgagctgcggagatggctcactaggtgagccactggcaagaggtgatggctatcagtgtggaaacatgaaactcctcttaaaacaacaacaacgtatattgcttggaaaatctgatgttgcgggttggggtgcattcattaagaacccagtaaatagaaatgattaccttggtgaatacactggcgaattgatttctcatagagaagcagataagcgtggcaaaatatatgatcgagcaaattcatcgttcctatttgatttaaatgagcagtatgtactggatgcttatcgcaagggggataaactgaagtttgcaaatcactcgtcgaatcctaactgctatgcgaaggttatgttggtggctggcgatcatcgagttggtatctatgcaaaggaccgcattgaggctagcgaggaactcttttatgattaccgctatggacctgaccaagccccagcttgggctaggagaccggaagggtcaaaaaaggatgaagcatctgtctctcaccaccgagcgcacaaagttgctagatagtccaacagcagctccagatgataatatcaactgtaaattataccgtcattgaaacacatagttcaatcctagtccattatacggccaatcgttggcataataagcatattctatattccttagttccttggtaaataaactgagatatcgagtatgcgaataaaagaaaaataaggcactgtaagtttatttgtacaaagtttggaatttatgctatgtatagttttgcctgtaaaaaaaaaaaaaaaaaagcggcc

SEQ ID NO: 22247 - DNA, 2589 bp, Oryza sativa
  Clone ID: TF_OsC109084_1
atggggatcccggaggtggtggtgccgccgagggcggccggcccgcggaggtacaaggggctcgtgccgtggcgcttccagccgggcttcgtcaggccgcctccggtcaagccccctgccgccgccgccgccgttgccggaggaggggtcgcgggcacgcccggcggcaagggtcgcgggttgggggcgtcgggggaaggcgtcgggtccagtggaggccggggagatcctcaatcgaggagatgcacccgcagcgcgagcgcgaagggctctggtgatgcgcggagcgtggaggagggcggtccccgtgttgccggagacgacggcggttcgggcaaatccggcgtcgcggcggagggctccggatttgagggtttgaggaatggcaggggcggtggcgttggaacggcagctgccgaagattgtggtttggagaagtccaaccccgatggcatcgtcggagatgctgatgtgcatcttgagagcggcagcgatgcaagagatggggaatgcgtttctgagggtttgaagaagccttgtgtaaataatagcaatggttcttctgccgcggattgcgcgccgaaggtgaaaaagggaaatgacagtggcaatggaggtgccgatgagtgtaatgctgcagccaaaagtagcaacttagcatgtcctggcaacaatggcgacgaaacgaatcgtaaggggcggaaggtagtacttccatggaggttccaggttgggttcaagcggtcgttctcgaaagctttctgctccgatagtgaatcttcagggccctctggtactcaattctacagagcccaagactcttcgacaccgtgcactccagcaacaagaagttctgtccggtgttatgcgagtgctcattctggtgttagagtctcggccatgcgtgatttctcagtgaaaggtgagaaggaaacatcaactccatataagaagagcaaaactggcatggatggtcctagtcaagggatgccaaagaatggagttgtcctcgctagggaaaacattatgggatctctgcagaattttcgcttaatttacagggaccttttggatgaagaagaagagaagtcgacagaagcagtgattagacctgatctacaagcttacagaattttcagggagcggttcatcacagactgcgatgagaagaaatatattggcaatgtgcctggaatcaaagttggtgatatcttccacttgagggtagagctttgtgttgttggtcttcatcgcccacaccgggtgggtgtagatcatatcaaacaggaggatgggacttgcatagctgttagcattgtatcatatgcacaatcttccgatattaagaataatttggatgtcttggtgtattctggagcaatgacagctatagccaatcagaagatagagggtaccaacttagcactcaagaagagtatggacactaacacaccagtccgtgttatccatggtttcgtcactcacctcaatggaaactgccagcgaaagaagatccctacttatatatatgggggtttatatatagtcgagaaatactggagggagaaagagggtaatgatcgttatgtttatatgttccgactgagaagaatggcaggtcagaaacacattgacatccaagacattctgaattcaggacaagctgaatcatatggtggtattatcataaaagatatatcccgaggattggagaagatccctgtatctgttgttaattcaatatctgatgagtacccaatgccctatcgctacattgcacacctgcagtacccccgtaactaccagccagcacctccagcaggctgtggttgtgttggtggatgctcagattctaaaaggtgtgcatgtgcagtgaaaaatggtggggagattcctttcaatgataaaggccgcatcttagaagcaaaacctcttgtttatgagtgtggaccttcatgcaagtgccctcctacatgtcataacagagttggtcaacatggccttaggtttcgtttgcaagtcttcaaaaccaaattgatgggctggggagtaagaactcttgacttcataccatctggaagctttgtatgtgaatacattggagaagtgttggaggatgaagaggcacagaaaaggtcgaccgatgaatacttattcgctattggtcataattattatgatgaagccctttgggagggcctatcaagatccataccctcacttcagaagggtcctgataaagatgaggaagctggctttgctgttgatgcttcaaagatgggcaactttgcaaaattcatcaaccatagttgcacccctaacctttatgcacaaaatgtcctatatgatcatgacgacaagagtgtacctcacattatgttctttgcctgtgaggacattccaccccgccaagaactttcataccactacaactatacaatagatcaggttcatgatgccaatggtaacatcaagaagaaaaaatgtctctgtggctctatagagtgtgatggttggttgtattaggcttgagagtgtactatttccagaggcataattgaacttctttcattgggcatgaaaaaaaaa

SEQ ID NO: 22248 - DNA, 1572 bp, Oryza sativa
  Clone ID: TF_OsC380292_1
atggcgggccctcccggcccggcaccgggcacctcctcctcctcctcctccctgcccagccgccgccgccgccgcccccctccgcgcctcggccgacgccgcggcggcgatgatcaacagcccccgcatcctccaaaggcctcgtcggaggctctcccctgcgcggcctccccgcccgcgcggtgccgcggcggtgatcaccagcccccgcatcctcccgaggccgcgttagaggctctccgcggcgcggcctcccctcccgcgcggcgccgcggcggtgatctacatccctcgcatcctcccgaggccgcgtcggaggctctccgcggcgcggcctcccctcccgagcggcgccgcggcggtgatcgacagccctcgcatcctaccgaggccgcgtcggaggctccctccggctcggcctccccgcccgcgcggcgccgcggcggcgatcaacagcctccgcccgctgtggcggtggcggtgactagtgaaggcggcgtgggtccccgccgctcgttccgcatcagcctgcggcaccgcgtgcgtgtggtcccgtgggtgaagccacccgtggcgaggaagcccaaggaccccgcgaagcccccgcgcccgtcgatcgaggcgctcgcggcggaatgggcgaaggagaaggcagcttccggggcccccgaggaggagtgcgtcctgcctttcctccagaaagatgcgcctaagaagctcgacattgtaaaagttcttggactagatggatttggatatatggatacagtgatattgagcttgaagagttacaggaaaaacattcccattacagtaggaaatttcgtgattgtgatgcaaagctgcataaggcttgttctgaaaaaggtgatggatgctgtcctcgacatgatgcaggtccaacagatggaagccttccggcgcttacccctcccacacactttccaagagttcaacattgaccctataaagaaagaggaattggacaatgggacagaaccacctccatataaaattaagataattcctacaggtctctattggttagctgctctcgggcttgtcactgctcagatgagtgcactaacaaaccatttcgccgacagaaaaagattgagatcgttaagtggaatacttctgcagacacaatattgtggatggggatctagagcactggaagccattgagaaagatgattttgtcatagaatttgttggagaagttcttgaggatgagacttgtgaagaaaggcttgaggacatgagaaggcgtggagataagaatttctacatgtgtaaagtcaaaaaggactttgtaattgatgcaacattcaaaggaaatgattgccgcttttttaaccacagttgtgaacctaattgccagttacagaaatggcaagtcaatggcaagacaaggctaggtgtgtttgcttcaaaagctatagaagtgggggaacccttgacctacgactacagattcgagcaacattatggtcctgaaatagaatgtttttgcggggctcaaaactgccaagggaatatgtctactccatatatcctaaactttgagtga

SEQ ID NO: 22249 - DNA, 2847 bp, Oryza sativa; identical to SEQ ID NO: 12929
  Clone ID: TF_OsC361962_1

SEQ ID NO: 22250 - DNA, 260 bp, Oryza sativa
  Clone ID: TF_uC-osflM202075a05b1
cttccttcaattcccttcccacccaaaccctaaaacccaaatggtcatcgcaggacgcctggacagtgagccgttcccgagacacgtcagtgaggaaccaattgcgtgcggccccgagggggacatgatgaagaactgaagagctaaaagaacatctgctgtgaaacaattgaaagcacaacaccgtcttatccctagcggtccttcaatctagaataaagctctggagctctggtcactatttgacctctctaacgccc

SEQ ID NO: 22251 - DNA, 694 bp, Oryza sativa
  Clone ID: TF_jC-osroLIB3475042f07a1
cccacgcgtccgcccacgcgtccgcccacgcgtccgcccacgcgtccgcccacgcgtccgcaataatctcattacccccaaagaccgtctctcttaagacagtggacttcactagtgaagagcgtgctttctataacactctcgaagcagaatcacgagagcagttcaaggagtatgcagctgctggtactgtcaagcaaaactacgtcaatatcctgctgatgcttttacggctcagacaggcatgtgatcaccctcacttagttcgaggtcatgagtctacttctagttggatgtcttcattggagatggcaaagaagctgcctgtagaaaggcagcaatcgttgctggtttgcttgcaatcgtgttctgcgatatgtgctctctgcaatgatgcgccagaagatgccgttgttactatatgtggtcatgttttctgcaaccagtgcatactggagcaacttaccggtgatgacagtgtatgtccagtgtccaattgccgagtccgactaaattcaacttccttattctcccgaggcacccttgaatgtgctctgagtagatcaacctgtgagtttctgtctgatgattcctgtgaagacatggtgcaagggaagcaacctagatttgattcgtcttatgcatcttccaaagtgagagctgccctggatattcttctctcgttgcctaaact

SEQ ID NO: 22252 - DNA, 7168 bp, Oryza sativa
  Clone ID: TF_OsC11239_5
atgcagcccggcgaggcacccccctcctccgggggctcgccggcgacgtcgccgcggccgccgccggcggtggcgctggggctggaacagttagtgtgtggtttggaggcaatgatgcatcaccatgatcagcagcagcagcagcagcaagggtacccatcgggcgcgccgcatggtatgatgggaggtggtggcagcagtagtttccctccgtcctcaggcccaatgcccccgttccagggccagaggaacatgacactacccggtggaaccatgggactggcttgtggctagcagcataaccagacggcgacgcaacaagaatacctggagtacatcatcctgcagcagcagcagaatgcccatcggatggtcctactgcagcaacaggatgccaatatgaacatagcagacacatcgaagagggaccagagaggtgtctaccatctctgcaatagtcctggggcttatgtcccttcaggctcagtccccgtccccagatgttcaagagacaacaatctgagcatcttcaacaggcagagaagcaggcggagcaagggcagccgagcaatagcgagcaaaggagtggtgatatgaggccaccttcgatgccaccacaaggggtccctgggcagcagttgtcatcggcgggtatggtgaggccgatgcagccaatgcaagggcaagctggcatgagcaatgctggagctaacccgatggcaatggcccaacttcaagctatccaggcctgggccaaagagcacaatgttgacctgtccaatcctgcaaatgtgactctcatttctcaaatcctaccaatgttgcagtcaaacagaatggctgccatgcagaagcagaatgaggtaggcatggcgtcacagcagcagtctgtaccctcacagatgaacaatgatgcaccaggacatagtaattttcctagtcagggtgccccatcgaagccccgacagcctcttccaccaagcacctctgtttctggtggggcagagcctaagatgatgaatatgagcaacatgcagatgcaacaacagttagcagctcataacagagatagctcgaatgacagggctgcgaggccagccatgtcaatgggcaatggtggacaaatgatgcatatgccccaaagttctggacatgcaaacaagattcctgagcagcccaatccaaaaaatgcaaattccgaagcaatgcagatgcaatatgcaagacagttgcagcaggctaaccgagctactgccccttcagcaaattctggtgaaacaggaggatcacaggccccaaatcaagctgcccgaccacctatgggtttcaccaaacatcagcttcatgtacttaaagctcagatattagcttttcggcgtctgaagcgtggtgataagaagctaccaccagaagttcttgatttaatcatgtctggaccaccacctgattcacaagcgcagcaggtttctggacctccagtaacaaaccgtgaaagatctgctacaagcagcgctgatgaacatggaagacctgtggagagtggtggtatagctcctgaaagatcttccctgttgaaggcgccctgtttaccaaaggtggaggtttctgctccagaagacaaaactattcctgctagtggtcccatgcaagtgatgaaagcttcacccaaggaacctcttagaattggaccagtttcaatgcctgaacaaaccaacaccaccctgattaaatctgagcaggatccagaaaggggtatccagagaacacctgggagaagtgattacaatggtgaaagggggaaatctttgccagcagaaagtggttcagcagacgctgagcaggcaaaaagagctgcctcatcaagtagcgtgcctactcccaacagagatgtttcaagaaaataccatgggccactatttgactttccatcctttaccaggaaacatgattccatggtgtctgcaaattacaacagtaatctagcactcggttatgacgtgaaggatttgttagctcaggaaggcatgatagttcttggcaagaaacgggaggataatttaaaaaagatcagtggcttgcttgcaattaatctagagaggaaaaggatccaaccagatcttgttttaaggctgcagattgaagaaaagaagctgaaactccttgaatttcaggctcgtatgagggatgaagttgaacaggagcaacaagaaataatggcaatgcctgatagggtgtacagaaagtttgtcagacaatgtgaacgccagcgtgttgagcttacaaggcaagttcagcagatgcagaaagcctcaagagaaaagcagctcaaatccattttccagtggcgcaagaagcttttggaggcacactgggccattcgtgatgcacggattactcgtaaccgaggggtagccaagtaccatgaaaggatgctgagggaattctcaaagaaaaaggatgatgatcgaaacaaaagaatggaggcactgaaaaacaatgacgtggaaagatatcgtcaaatattattggaacaacaaaccagtgttcctggcgatgcagctcaaagatacaatgttctatcttctttcttgacccagactgaggagtatctctataaacttggagggaaaataactgctgccaagaatcatcagcaagttgaagaggcggcaaatgctgctgctgctgctgcccgagcacagggtctttctgaagaagaagtgaaggctgctgcacaatgtgctggtcaggaggttatgataaggaacacattctctgaaatgaatgcgcccagggaaaacacatctgttaataagtactacacattggctcatgctgtgaatgagagagttacaaggcagccctcactgctgcgagcaggaacgttaagggactaccagctggtgggccttcaatggatgctttccttgtacaataataagttgaatggtattttggctgatgagatgggtcttggcaagaccgtacaggttatgtctctgattgcatacttgatggaatttaaagggaattatggaccacatctcataattgtaccgaatgctgtcttggtcaactggaaggaggttctggctgtgaaattcaatgttcttgtaacaacatatgaatttgttatgtatgaccgttccaagctttcaagaattgattggaagtacattattattgatgaggcccaacggatgaaggacagagagtcagtcttggcgcgagatcttgatcgttatcgttgccaacggcgtttgcttctcactggcactcctctacagaatgatcttaaggagctttggtccctcctaaatttgttgctaccagaagtatttgacaaccgtaaggcatttcaagattggttctcaaaaccttttcagagagatgttcctacacatagtgaagaagaagatgattggctggaaactgagaaaaaagtaattattattcataggctgcatcaaattttggaaccttttatgctacgaaggcgtgttgaagatgttgaaggctcacttccaagaaaggtcgattgttctgcccttgtcacactcagtgatgctatttgtcactcagctctttttgtttgctacattgttaactcgtcatgtcatttgcaggagtcaattgttttgaggtgcagaatgtctggtattcaaggtgctatatatgattggataaaatccactggcaccatcagggttgatcctgaagatgagaaagcacgtattcagaggaatgcaatgtaccaggctaagacatataagaatctcaataacaaatgcatggagctgaggaaagtttgcaaccatccattgctgtcatatccttttatgaattactatggaaaagattttataatcagatcttgtgggaagttgtggaatcttgataggattttaattaagcttcataggtcaggtcaccgtgtactccttttcagcactatgacaaaacttcttgacatcctggaagaatatttgcaatggaggcaacttgtttacagaagaattgatggaacaactagcttggaagatcgtgaatcagcaattgttgacttcaacaggcctaattctgattgttttatattcttgcttagtattcgggctgctggcaggggtctgaatcttcagagtgcagacactgttgtaatttatgaccctgatccgaatccacaaaatgaagagcaagcagttgctagggcccatcgtatagggcagactagggatgtaaaagttatttacatggaggctgttgttgataacatctcaagttatcagaaagaggatgagttgaggaatgggggaagtggagatctggaggatgatcttgcgggaaaggacaggtacatgggttcaatagaaagtctcatccgcaataatatccaacagtacaaaattgacatggcagatgaagtcattaatgctggtcgatttgatcaaagaacaacccatgaggaaaggcggatgactttggaaacactcctgcatgatgaagagagatatcaagaaactgttcatgacgttccttcactacagcaagttaaccgcatgattgctcggactgaagaagaagttgagctatttgatcagatggatgaagaatttgattggacaggagatatgatgaaacacaatcaagctcccaagtggctccgtgttagctccacggagcttgatgctgttgttgcgagtttatccaaaaagcccttgagaaatatggcggctgggggaatttctcttgacactaatgaaaaacttgagaaacgaagggggcgacctaaggggtctgggaagtactccatctacagggagattgatgatgacgattttgaggaatctgatgatgattctgaagagaggaatacctcatctctgcctgaagaaggggaaataggagaatttgaagatgaagaggacaatgatgattcagtgcctgataataaggatcaatcagaggaagaagagcctatcaatgatgaagggtatgatttttcacatgggatgggacgcagaaaagcccatagatctgaagaagctggttcaacaggatcttcatctggtggccgtagattgccaccacctgcaccttcctcctcttcaaaaaaattgcggtctttgtctgcattagattcccgcccgggtgctttgtcaaagagaactgcagatgacctagaggaaggagaaattgcattatcaggggattcacatctggatctccagcagtcaggcagctggaatcatgaacgagatgatggtgaggatgaacaggtagtacagccaaaaataaagcgcaagcggagtatccgtattcgtccaagacctaatgcagaaaaactggatgatagatccggtgatgggaccgtccctcaacgtggtgttcatcttgcatttcaaggagatggtgattatgattcacaatttaagtctgagcaagcctttgctgatcctgcttccaggcagcaagacacagttcatcggacagtaaaacaaaagcgtaacatgccatctagaaaggctccccctgccactaaggctgggaaaatgactcagctgtctggatctggtgagggatctgctgaacattctaaggaaaattggagtaacaaggtgatagaatctgctggtccaaattcaagtggaacaaagatgtctgacagtatgcaaagaaaggtaaatctcgactgctatctgcttgcattagcaaaagagccaagtatgacgccgcttatttcatgtggtgttttcacattgttctacaatcataacaactgcaagaacgtgataaacaagctttggaggaggattgacaaagagggtcatcaaatcataccaaatatatcttcttggtggcgtaggaacgagaattcctcattcaaaggtttggctagcagcacccttgatctacagaaaattgaacaacgagttgatggatttgagtatggcggtgtgaatgaattcatagctgacatgcagcagatgctgaaaagtgtggttcaacatttcagctataggcatgaggtccgagtagaagctgagaccctccacaacttatttttcaatataatgaagattgcctttccggactcagacttcagagaagctaagggtgctatgtcattttcgaatcctggaggaggtgcaagtggctctgctgcgcaatcaacaaagcaatctgcttcaggccagaaacgtcgttcaagcaccagtgaagcggagcagcatggttcaagcactagcagacacaatcagcatgcaccagttggtgaggtttcaggccgggcccacacttcaaaatctgagaaggactcccggcattctggaccaggtagcagggaacagttcacggatagcgcagggctgttcaggcaccctacagatatgttcatagttaagaagaagagagatcgaaggccgagcctggggtctccatccagttcaggccgaactggaccgctctccccgaccaacgccgggcggatgggaccggcgccatcacctagaggtgccaggacgcccttccaaagagatccacacccttctcagcagtctatgcattcagctggatggggtgctcattctgtgcagcaatctgatcgtggggggagttcatcacccggcattggagacatccagtgggctaaacctaccaagagatcgaggactgatagtggcaaaagacggccaagccatatgtgaaaaagaaaagagggattgttattcttggcattgcggtgtacattccttagcacccttgaatcttgattgacctctctacccgctgctgattctggagcccattggcctggttttgacacccatttcttcgtcgccattcctgccatccttcaaagaagttatcacgaccgtctgggactgacttgtgttgtcatggacattgtgggaaatgtgggtaggagtaatcgttcttgtatgttggtattttctgtaaagggcaaacacatttaatcttgttctctgttgactgttaagtagcgctccatccaactggagatgtgatggcgatctcatgtcatgatgatgtagtttagtagccatggaatgaaatgaaatgaagctgagccggttataaataaaaaaaaaaaaaaaaaaaaaaaaaaaaaaaaaaaaaaaaaaaaaaaaaaaaaaaaaaaaaaaaaaaa

SEQ ID NO: 22253 - DNA, 2436 bp, Oryza sativa; identical to SEQ ID NO: 12909
  Clone ID: TF_OsC4787_1

SEQ ID NO: 22254 - DNA, 2082 bp, Oryza sativa
  Clone ID: TF_OsC1528_1974
ttaccgcagtatctgcctaagaacattcctgcagtatctagagtaaaaggccacatcaccaaggcaaacatgtaaatcagagtaaaaggccttccagccccatcggatggcctggttttgagaaccccggataacaaaccttcctgtagtgcctgactcactccttggatgtaaatttttgtattttttaatagttgcaccaccactcccgatgaccaaaccaaccttctccataggaacggagatctcctcctcaaccatagaatccatctcttgtaggaattcctttacaagattttccgccttgcttatttgatgcggggtgccagatatcttataaagctgttgtataggaatttcgataaatgtgctccttattgacttcagaatttctgcatctactggcatagatagttcgctgcgcttgcgacttgggccagctgtatatttgtgtttttcatttgtgacagggtcagattccctctgggaaaacagatgcaaatggtttgatacaccaacaacagattcatgtcctctgacttgcctgatttcagattcatcaagtgacggatcaaaagcacctccatgtatagctagaagctcaatcaaagttttggagactccaaaaccttcaggaggcatactcaggaccctccttgtcggctttgttatttcccgcctgctctgattttccttcgttacagctgttgccttctcacctttaatcacctggattaacattggtcgctgtttctgaggtgttttcccatccatgcgaatcattttgcttggatctactatggtggacaatgctctcgccaataaaccttttcggataatgtcagttaaagcatccttcttctcttctgattcacccctctgttcaaagtcagaaccaatcaccattactgggtgattgcagatactcctcgcaacttgagaagctgccaaaggtgtgccaggctcatctcccaaaacattgctcatgataagattggtgtaaagatattcttgagcagcagagatcttcaaccacacagtcaattcatgtttagtaccaagtttagaggcgctattctttaacatctctttcgtccttctcaatacaaaagggctaacaagtttcttcagcctctcagatgcttctattgactcttttatcaattgcgcagatgcgcctctatatctagccctttcaattggcatgctgaagttttcatgaaattgtccggactctccaagtagattaggacaacagaagttcatcagcgcataaaattcagtagctatgctttttagtgcaatgcagtcggttcttctatcataacggaacactttgataaccagcacaccaacaatattaagttctttgcgccaggtttctatcaccgtgactgggcaaatgatcattgcgttgtgtatgacatctgcctggagcaaaccacgaagaaaagcagctactttcctgtagactaaacatctcttgttccaccccctcccaagctcggttgagctcttagccagcagcagcaacagcaccggttgctcctccttcccctttcccttccccctctccacgcagcagccccccggaggtgcgccatgtccgacgctcggtctcggcgttcggtcgcctcgagcactcggcgtcagcaggacgccgagctcgccgcagcagaagagcgcaggcgagcaacggctcagaccgctgcagcagcagcgagggcagccagactggcggcagcggagttggcagcagccagggcggaggcggaggcggaggcggcggaagatgcggcacgtgcggcggaggtagaggttgagaccttgcgcagcaacatcaacggctccatcgccggcgacatcaccgccgacagggagcttgaggagctggcaagaggaagggcacgggagcgagcagagcggtgagcagcagcccacgtccacggcggcggcggcggcccaagggaccgcgcgcccgccgacgggaacccagacgggcgcaggcgtgccggcggcagcccggagcccgcacgcggcccttgcaggcagcacggctctctctcccctgaccggcgccat

SEQ ID NO: 22255 - DNA, 12922 bp, Oryza sativa
  Clone ID: TF_OsC35792_1
atggcctcatcccaacaagttgagcttgaggctgcaaagcttcttcagaaactcattcaagagtcaaaggatgaacctgctaaattagcaacaaaactttatgtgatatgccaacatatgaaactaagtggaaaagagcagtcactgccatatcaggtcatatcaagggccatggagactgttgtaagccaacatggaatagatatggatgcgttgcgatcatcgagaatcccattagctggtggtccacaagcaggagattctagtggtgctatgcctaaggataaggagatcattggcagtcaacctcccatggttggtactgatgcatcccaaagtagtgcgcatgctggattatggaattttccatcaggttcagcagatatggcacgtcacagtgcatctatttcaggcagggtcccagcaggaccaaataggagcgatgttgcaggagctgatattcatcaaggctccatgtcacagaagagtggaagatcctctggaatggaaagccctgccagtctgcaaatagaggatactagatctatgaattcacatgattctttgaagtcagatgaaaaaacaagcaaaaaatcatcttctaagagaaaaagagtggatccaaaagcagcaggggacttgcattctgaagacaactcaaaatcagatgccatgtctaccggacaaaatattagaaagggaaaacagcctggcaaagctggtactcagggtcaactttccaggacagtcgaacacgatccatcacatacattacaagttggtaatgctcaggtgccaccgttacccagtggtgcacctttctttagggctcaccaggaaggaccatcagcttcttctgcaaggactatagacaagactaaaccatcaaatccattcacaatggcacaaatttcaaattttgctgaaggactagcttctggcaacattcctgctgagttgcagaaaagtatattgggaggagcaaatctacttaatgctagttttggctggaaccagaatgcacaaggtccagttatgaagaatactcaagggtctgttcccaacctaatgagacctggtgttaatgtcgaagggaaagttaacttaggatcacaaggaacttttaattctatgtctgcatcacaaatggattaccccacagttcctccttatgtgtcttcttcctttggaggtggtccacagtatcttgacaaagggaaagacttgacttcaggcaatactggcagtgaactaaattcttctaaagctggagctcagctggggatcatgcatatgcattttgacacacaaatgcggtataactttcagggcagtccaatgcaagaaaggcacggaattgtcagagcacctcagagagctggttcatctcaaatgtctcaaacctctcccagcattccattcaaagagcagcagttgaagcagctcagagcgcagtgcttagtatttcttgcatttagaaataatctgcagccccggaaggtacatcttgaaattgctttaggtgttggtccccctgcttcagaaggtggcagtgcaggtcagagaggtagtgagagcagaatggctgatggttctggaaaggaaaatggaaacagccaggaaaaccctgctatttttggtaggcaaagtgatatttctagacttcaatcaacatctacaggcagtgttgcggatgttgattccgcatcaaaggacccagaaattgttaaaaagaagatcaagatagctgaacatgagaaatcatttgaagcagaaaatatccagcaaaccgttcctatacagggaactgattctgaaatgcattctcaagaaacgatatctcccatgccatctgggcaactgcattactttcagggagatacaagaaaaactacccctgagatctacaaggctgatgcagaaaatttgaataggaacttaggctgggtaggaggccagggaccatctcctttgggtggtaataggcatactagtatggaagttggcctcttggccaaagatgaagtgtccaaagaaccatttgcagttttgaggcctcatcatatgcctgttgatggtagcaaccacaatttatctggaaaggatcaaactcctgagacagctggcaatgaaattgataatggtagccacatgggagagatgatatttgagcgatctgcagatgaaggagacgaagatctttctgagcaagatgatttaccattatctcctccgaagtacacaatgactgataaatggattttggatcatcagaagagaagatatgaagaaaacaaaaggaaggcattagagttacagaaggcacacaggagaatttcagcatcctatgagaagctaaaggaaaatgttagttcatcggaggatctttctgcaaaaacaaagagtgtcattgaattgaaaaagcttcaacttctccaacttcaacgtcgtgtgcgcagtgaatttttgcaggactttttcaagcctaatactactgatttggaccgcataaaatcagtaaagaaacatagacatggacgtcgtgttaaacagcttgaaaaaattgaacagaaaatgaaggaagaaaggcaaaagagaattcgtgagagacagaaggaattctttgctgatatagaggcccacagagagaaactggaggatagcttcaaggttaagagagaacgcttgaagggtttcaatcggtacgtaaaagagttccacaagaggaaagagcgaattcatagagagaagttagacaggatccagcgggagaagatcaacctgcttaagaataatgatgttgaaggatatcttaggatggttcaggatgcaaaatctgatcgtgttaagcaacttctgcgagagactgagaaatatctacagaagcttggtgccaaactacagggttccaaatcgatggatggccgtgtttcatatgcttctgatagcacagcaaatgatattgaagatgagagctaccagccgcagcattatctagaaagcaatgaaaaatactatcaattggcccacaggtaccagatgaacggcttgcgttggctggtttcattgtacaataataatttaaatggaattttagctgatgaaatgggtcttggcaaaacagtgcaagtaatctctttgttatgctacctcatggaaacaaaaaatgaccgggggccattccttgtggttgtaccatcttctgttcttcctggatgggaatcggagctcaacttctgggcacctagtataaataaaattgcctatgctggccctccagaagaaaggcgcaaactattcaaagagatgattgtacatcagaaattcaatgttcttttgacaacgtacgagtacttaatgaacaagcatgataggccaaaactaagcaaaatacagtggcattacataattatcgatgaaggacaccgtataaagaatgcatcttgtaagcttaatgctgatttgaagcattatcggagctctcacaggctattgttgacaggaacacctctgcagaacaatcttgaggagctatgggcacttttgaattttctgttgcctaatatatttaactcatcagaagacttctctcagtggtttaacaaaccatttgaaagtaatggtgatagctcaaccgaggaggttgaaaatgaattgccggagaagattgaaagacttgtaagatgttggccatctgcttatcagaaacttctaataaaaagggtggaggaaaaccttggtggaattggagcagttaagattgagggttatttacctagacactacctgccatcaattctgaggctctgtggaaaacttgagatgttggatagattgctgcccaaactcaaagccactggccatagagttctgcttttctctacaatgacaagattgcttgatgtaatggaggattatcttgtatggaagaagtataaatacctccgattggatggtcacacttctggccaggagagaggagctcttatcgacaaatttaataatcctaattctcaagctttcatttttctgcttagtatccgagcaggaggtgttggtgttaatctccaagcagccgatactgtcatcatatttgacactgattggaatcctcaggttgatctgcaagcacaagctagagctcacagaattggtcagaagaaggaagttcttgttttacgtttagaaacagtccaaacagtggaggagcaagtcagggcttcagcagagcataaattaggtgttgctaatcagagtattacagctggattttttgacaacaacacaagtgctgaagatcggagagagtatcttgaatcactgctacgtgggggtaagaaggaggaagcagctccagtgttagatgatgatgctctcaacgatcttcttgctcggagcgaagatgagattgatatatttgaatctattgacaagcaaaggagagaggaagaaatgatatatgagtcatcaaatataaaaagtgtgaaggttgtaaggaggaagggtgagcttgggggtcttgacacacaacattatggaaggggcaaacgtgctcgtgaggttcgctcttatgaggaccaatggactgaagaagaatttgaaaagctttgtcaggttgattcccccgattcacctcaacctggtggtatatcaagggatgcagatgtccctaaagtggttaagttggaagtacctccagagagttcaaaagaaccagagcaagccaaaaaagagccagcttcttctgttggagactccccgcctgctaaacggcgacgaggtcgacccagaaggtctgatgcttccttatctcctgttacagctccaccaaatactggcaaacaagaggcaggaactataattgatggcagttcttctgcaccaactactaccattcattcggttgctccagatgttaccattgattctactgcactatctgctacgggcaatccagatgttggtactgagattaagggtactacaccagatggtaccatcaaaccagtaatttgtactgacaataagggtaccgcatcaattgctgttttggaagggtctaatgcaaaggaggttggtataccagcacacagtgttcatgaacctgtatccagttcagcacctcatccaccaacccctgctacatctagaggtagaaagacccaggcaggagaaacacctcgcaggcgaggccgaaaaccaaagtctcttgctgctagtgcaggagatgttattctaagtcctgtggttgcagttggtagtggagaagcatatgcgagttctgtggtttcatcatatcctcaagggaatgtgtcctcatcacatgcaaatgctatggcaggtttgcagaaggatacaatcatatataaacctgctgcattattgccagaaggagttaaaggcactctaaccccatctggaggagataaagatgaaatggttaagacacctctggcagaagacatatatgctggaactgtaactacctcaggaaatgccaactcacagctgccaatgatagctcataatgaaaatgctggattggttcaagggggcactgatcaaaacttgtccgtagctacacctaccatacctgtggtttcagaagggtcaacaaaaatatcagaggttgtggttgcggataaacctgctgagaagcaaggtgctcgtcgccgcagaaagaaaacatctggtactggtagtgaggacactggggtgagcactaggcaaagagcagctagcaggagattgtacggtattggtaccgctgatattgcaggtactgacatgagcacaggggagaaaataggaatagtgaaggaaatagatggtagttgtcaagatacttctaagggattaccaaatattatctctccatcatatgagaaatctggatatgactctcaaccaagtacgccgatagctgttcctattaacgaggctgcacttcctagtggattcagcgaagcccatgctactcattctgaactacatcctgccagagaatccattagttctgttggccatgagaaactagcaggtgcgcacttggaagcacctccatctgtttcattccaggctccagtgcagcatgagacacggaaggattatgtgggagtacattctgaagtcgcgactactcatccggaaacaattactacccactcatcagtgaatcctgttattgatcataaactagcaaatgtccaatttgaatcacatgcttcacttcatacttcgggcaaggatatcaccacaatgccatccgaggtcgatagtggtgctccgagcaaggcaccaggtaggaggaggaaaggttcagctcgggaaccccgcaccagaagtaattctgcaacagctgcatctgaacgtcgtgctcgacttgctggatcaaagcagccagatgatattaaaatggcagagatgtcaggaaaccccagcactgcagtctgctcttctacacagcaacaggaagacaacactttgaaagctgcgcatgctactggttctgttggtgaagaacagaacaatgctgagaatcgtgtgcgtgaagtgtcaatgccagcaggcatattggaggcaaagttagagctgactaaacaaactgaccaggcaggtcataattcagagcaggaacaagagatggtttcggcagcaaaatcagcatctgcaaatgatgaggagcataaggtgcatgaagtacatcaaataattgctgatcacaatgcacttccatctagtgcacagtacactcttcaggataaaattgatagcagtgcggatgcgggcctggtcccttgtgacaaaattgctagtgtggttattgcagtagatgaccaagaccctagcaatgcctcagataaggatgctcctgcctccacagaagatgatggaaatggtctgcaaagtgaatgtgttcatgttgatttggttctggctaagcaagataatacgaaagttgaagatacgcaaaagtcgaatcaaccagcagaacaaggggaaagcttggagatgactgggtctaaatttagatcggagacgagactggaaaaaacagaagaaaccgtggataagagtggtggtgacaatctaccaactattgagaaaaatgatgattctcccatagaaaggtcatctccttcagcagacaaaattgcccaagtagcatatgggggtgaagcaggaactgaaacaactacggtggaggccgtttctgctatgaattctgatggcttacaggatgttcgcaatgccttgtccacccatggcttatcaaccaatgatattactgttgcttcggaagaacacagggatcctgagagtcatttgtctggtgaagtgtcaatgtcaggtggatcctcagagctcaagttagaatcgctaaaccaatcagaatctgcttgccagtctggtgaagtaactctggaagatacacatgccaccttggacattcagattcctgcattgattgaatcagaagaaaaaaagtcacctggaggcgatgtgcatggtagtgaagaacaacacatgcatgaagtacttcataatactgttgatggctctatctctccatccaatagggagcaggacaagctgcaagttcatattgatactaacactgacgtagacattcctagttctgacaaggaccattctactgatattgttttagcaggttgccaagccccttgcgatgcctcaggtaaggataagctgtccacctgtgatgcctcaggtaaggatatggctgcccctacagacgatgatctcaattgtctgcaaagtgaagatactgtcattcctgtggctgatgctaaggacgagactatgctagtcaaagctattcagaatgacgaaatgtctatgggctcttctcatggcttacctgctaccatacaatcaactgattcagatcgtcttgcagaagaaggggagagtgcagaaattactggctctaaattttcatgcgggatggaacaggagaaaatggaagagcccttggataagagtgtcactgacaatcaaaccagcagtcagataaatgatggttcaaacaacatggattcacaaaaagtggatagttctttgcaagcagccgatggtggtgatcttttggtaagtagaggaaccagtgttgaaaccaccactgctattaatactgatgcgtcagatgaaagtatcagtgtgtccactcagtccgtcaaagaggctagcacagtagaaattggtgcatctactaatgacatagctcctgcttgtgaattaagaaaggattttgagtctcatgtatctggttgtgtgtcaaagccagtaggattgtcggaactcaggttagaagagctgagccaaacaaagtctgtttcgcagtctattgtagcaaatgctgaagaaacaagtaccaggtctgacattgaaactcctgcaatggatgcatcagaaagtaaatcacctgaaagcgatgtgcatgagttgagtgaaagggtggagttcatgggaccaacgccaagtgcaaatgagaagagtaatgaacttcatagtcaagaactagtgaagatgatttcagctgcagaaacagcatcaacagaaggtcatcgcgaaaaagacacgtgtgaagtagatcataagattgattgcactatattttcaccaattggggatcaggacacacgaaacagaattgatggtgacacagattgtggtgtgccctcttgtcaaagaaatgcagcttttgactctgaaaatgaagtctctgctgagattaatttaacaggcagccaagcaccttgtgatgcccccaataaggccactcctgctcccacagaagatgatcacaatggtcaggaaagcgaagatactgtgattggtgctgagcaaggcactgttgaagttgaagctatgcagattgatggtatctccaaaagctattccagtgattcccatgccactttacaatcaagtgactcaaatcagctagtgaacagtgactcaaaatttgaatcatcaaagaaacatgacaaaacagatgaaacttccaatgaaagtagaggtgacaatccaacccacagttgtacaaacgatgattcccatgataagaatttagtaggatgttctccttcagaagacttaaatgaggacaattctgcccagttagctgatggtgatgatttagtgggaagtaaggatactactgctgcacacgccagtggcttaaaggagcttacctctggcaattatgttgcctcatcttctagccatgttgttcaagatgtaacatccatctcgaaaatggagtctgtgcaggctggtagtgaggaaatctatcatggctactctgatgaaaccatccattctgctagaatcaaaccagtggttggtactgaaattacggaaaatgcttctgttgcttctgcaccagttattaccatccaaccagatattgaaactgaagctggtgttactgcgtctttgactgttttggaagggtctatagcagaggaagttgatacacaagtagaaagtggccatgatctggtcactagtacagcccctctttcaccagctcctttacccggtgagagtcatgcgtgcactgatgtatcatgtcctgtggctgtggaggtatcagagacaaagctagagtcagcaaaccacacagctagccagttaggtgcagcttgtacagaaacaccaaatgccttgttgaacactctgatccctgcgttacctgaatcggaggaaacaaaactttctggaagtgatacagatggaaagaccattatggcagagcttgcatcttccagtgatgaacatgataaggtgcatgaagtaggtaatgaaactggtgatgataataaacttccatctagtgtggcagaagatgcagtgcaaggtgaaattgatggcagtgctgacatggacagtcaaataattgctggtagttccgaagcagaaatcaacaattctactgtggctactatagctgacagccaaataccttttgatccctcagataaggacactcttgcagaagatggcaatggtctgcaacgtgaaggtactactgtggatgtgactggttctaaggaagatgatatggaagctgaagagaagcagatggatgatagtcatttgcccgctgctttacaatcaactgagtcaagccagcccacagaacatgctgcccccacacaagatgatggcaatggtctgcaatgtgaaggtactactgttgatgtgtctggttctaaggaagatattatggaagttgaggagaagctgattgatgatatttccggaagcccttctagtcatttgcctgttgctttaaaatcaactgagtcaaatcagcctgcagaacatgctgtccccgcagaagatgatggcgatggtctgcaaagcgaaggtaccgctgttgatgtggttgattccaagaaagatgatatggaagttgaagaaaagcagattgatatctctagaggctcatctagctttctgcctggcgctttagaatcagctgaattaaatcaacctgcagaacatactgcccccacagaagatcatggcaattgtctccaaagtgaaggtactgctgttgatgtgccttgttccaaggaagataatatggaagttgaagaccagtttgacggtatttctagaggcccatctagcttttctcctgacactctagaatcagctgagttaaatcaagctgcagaacatgctgcccccacagaagatgatggcaatggtccgcaaagtgaaggcacttctgttgatgtggctggttctaaggaggacaatatagaagtcgaagagaagattgatgatatctctagaggctcgtctagtcatttgcctgatgttttacagtcgactccaaatcagcgtgcagagcaagagtgtttagataatagtgatgacgtgaacacatctgttgtttcctcccatgccccattaagtggccccaaatttacatgtgtgaaagaacttgaaaaggcagatgagaccttggaaacgagtgatgcccaagtagcagatgaagtctgtttacagacaaatgatggtgctcacaatatggcttcaggaagttgttccactttagaagacaaaaacgaggacagttctgcccaaatagctgattgtgaagatttattgctaaggaaaggaactactgttgatgaccttgatggctgtgtcgaaggtcacagtggcttgtccacccattccaatgatgaagtgcgcaacctggtagaaattgtcaagggtatgaatgatactactgctggcagtgaagtgcatgtggatcctgaaagtcatgtatctgatgaagtgtcaatgccagttgcaccatcagagctcaaggtagaattgaagaaccaatcagaacctgcctgtcagtttggggcagtgatcgtcgaggaatcaaatgtcagcttgggcattcagactcctgcattagctgaatcagaagaaatgacatcaggaggtttcatgcacggtaaagaagtttgtgcttcagaacaaacgaatataggtgcggctgcagaacctgcatctacaaaagatgatcatgatatgcatgaagttgataaagagattgttcattgtacaatatcttcccccataggggatcaggaaaatctgcaaggtaacattgatggcaagatggacgttggcctggcggcttgccagacagagtcagattttgtgagtggaaatgaccattctagggagactgatttagcaggcagccaggcaccttatgatgcctcggataaggaagatactgctgctgatttgattggtcctaagcaagccactctcgagatcgaaaaaatgcagattgatggtattcctgaaggtccttctagcgtgcctgctgttttgcagttaactgactcaaatcagccagcagaacaagagagattagagaatagtgactctaaatttgcatcaacaaaggaccagggcagagtggatggaacttccaatttgagtggaggtgataatgcaaagtgtagtcttaccaatgatgattctcaaactgtgaatctagtaggatattcaccatcagaagactcgaatgatgatgattctgtccaagcagctgatagtgatggcgttctgggaaataaagaaggtactgatgatgttatctctgctgcatgtaccgatgatgtatccatgctgaagactgaatcaatagatcgtcatggttctgacgaagttgatcattccactgccccgtctgctgccatcaaacaagagagtggtactgaagttacgtgtgacgcttctgttcctgtttctgaaagctctatatcaaaggaaatcggtacatcgcctgagtgtgatgatgatcaagtggctacagcagcacctcatccaccaacgccattatctgatgctactgatgtatctgctgatgtgcaaatcccagcaggaatatcggaggcaaagctagagcagccgaacgaaacgactagcccgtcgggtgctgctactgaagaaaataatactgtcgtgagcactcagattccaacattagctgaatcagaagatagaacacccgccgatactgctattcaaggtactgaggttgacagcgctgagccagcatctgtaagtgatgacgaaaacaaggttacagcagctgatgatagtgcactcccgtctactgggccagaggatacagcggacgataaaattgatagcagcgctgatgctagtgagaagtaggttatgacagactgagtatgtaaatgatctctctcaaacctagttgtaaatgttactgctgaactgatacagcccaactactatagtgccttagttataattattattgcatcttttgctaatattatgttaaaaaaaaaaaaaaaaaaaaaaaaaaaaaccacgtgcccccctcgtgccgaat

SEQ ID NO: 22256 - DNA, 723 bp, Oryza sativa
  unsure (1)..(723): unsure at all n locations
  Clone ID: TF_LIB4371-027-R1-K1-E7
gccagttctagatgcacgtgctaacataggaaagggtgcccgcccgtattacaagatttttcaagcatttggccttgtgaggaaggttgagaaaggcataactcgatggtattatccatctatgcttgatgatttggcatttgattcggctgcacttggaattgcccttgaaaagccgctggatttggtgaggctttatttgtctagggcaaccttgatagtggtacctgctaacttaattgatcactggacaacacagatacagcggcatgtttcctcggacacacttaatgtttatgtatggggagatcacaagaaaccatctgctcacaaccttgcatgggactatgacattgtcataaccacatttagtagattaagtgcagaatggggtccaaagaagagaagtgttttaaagcagatccattggtttagggtaatattagatgaaggacacacattaggttccagtctcgccctcacaaacaaattgcagatggctgtttcattggttgcttctaatagatggattctaactggtacccctacgccaaacacaccaactagtcaagttgctcaccttcatcccatgcttaagtttcttcatgaggaagtttacggtcaaaactaccagtcatgggacactggaaatcatangccttntgaggcacanatggaaagacgacgcagtcgtctcctgcagctacttcagaggactatgat

SEQ ID NO: 22257 - DNA, 3825 bp, Oryza sativa
  Clone ID: TF_OsC11525_1
atgggcggcgacgaggaggaggttgccggtgacgtgcgccgcaagttagggggctacctccccgccgtcgtctccgtttcatccgatgtgggcgtggaggcgctcgcgccgctttccccgtgctcgctcttcgcctgcgggggcgtctccctcgcgccgaaccccgacggcagtggcgcgacgcctcggtccaatgggagggcgtgcggcggagggggtgtcgtgcggcagctgagggcgctggtgtcgagccggtgcgtggaggtggaggggagggtgctgagggcggtggcgaggagggggagggagggaggaggaggggatggggaggtggaggcgagggcggtggtgctgttcgacgtgtacctccccgtctccgtctggtcggggtggcagttcccgcggtcccgcgcggccgcggccgccgcggtcttcaaacacgtcagttgcaattgggatgccaggaatgctttgcttgcttttaactggacctctcctgacaatccacactgtgatgaccagtatatttggacctgcaccgattgccacgtccttggttgtgaggtacatcagataccatctgtattgaataatgataagtcgtttgacctgcatgaaatcttcaaaactctacctagtgttatggtggagaagaggatgcagataacaagaataacaccagatgaggcagcatcgggagtgggtatttggtctgtccctgatgatgtcttgtataaggtgctggttcgactgaaacccagagatttgattagagttgcagctgcttgtcatcatctaaggaatctttctgcttctatcatgccttgcatgaaacttaagctttttcctcatcaagaggcagctgttgaatggatgctaaggagggagcagaacttgcaggtcctagaacatcctctatacaagggtttgtgcaccatggatggtttcccttattacataaatgttacctctggtgaaatatccactggtagtgctccaactgtacatgatttttgtggaggtatgttttgtgatgaacctgggttagggaagacagtgactgcactgtctcttattctgaagacacatgggactctggcagtccctccaccagggatgaatgttatgtggtgcatgcataaaccagataaaaaatatggatactacgagcttagtgctagcaactcttctaatggaaacatctttttgtcgggatcaaaaaagttgcgaaaggacgtgattagagaagatacatgttcaagtgagtcactgaataatggtggttcagttgttagtacaaggtcatcaagaaagagaggcaggttagtaaaccctgatttgaatatgatcgctgcacatccgagtgggaagtcgccaatgtcagcaccaactggtgctcattcaactccagctactcatgtgctaaagattaccaaaaacttgaaacatgttaggaaaaacctcatggaggcatatagcgatggttcagttggcaataaaaggaagagagatgccacctctgagttaagtgaaacctgggttcaatgcgatgcttgcagaaagtggcggagattattggacggaactgcacttgattccagtacagcatggttttgcagcatgaaccctgattctgcacgtcagaagtgcagcatcccagaggaatcttgggatttaaagcgaaagataacttatttgcccggatttcacaagaaaggtacaccaccaggaaacgagcaaaatgcatctttttttacaaacatattgaaagagcatgctgctttgatcgattcagaaaccatgaaggctttgttgtggttggcgaaactttctcccaagaaacatatcgagatggaagcagttggtttgacacggccagttctagatgcacgtgctaacataggaaagggtgcccgcccgtattacaagatttttcaagcatttggccttgtgaggaaggttgagaaaggcataactcgatggtattatccatctatgcttgatgatttggcatttgattcggctgcacttggaattgcccttgaaaagccgctggatttgatacagcggcatgtttcctcggacacacttaatgtttatgtatggggagatcacaagaaaccatctgctcacaaccttgcatgggactatgacattgtcataaccacatttagtagattaagtgcagaatggggtccaaagaagagaagtgttttaaagcagatccattggtttagggtaatattagatgaaggacacacattaggttccagtctcgccctcacaaacaaattgcagatggctgtttcattggttgcttctaatagatggattctaactggtacccctacgccaaacacaccaactagtcaagttgctcaccttcatcccatgcttaagtttcttcatgaggaagtttacggtcaaaactaccagtcatgggacactggaattcataggccttttgaggcacaaatggaagacggacgcagtcgtctcctgcagctacttcagaggactatgattagtgcaaggaaacaagacctgaaaaacattcctccttgcataaaaaagataactttcctggacttcagtgaggggcatgcgaaaagttacaatgaactggctgttactatccgcagaaatatattgatggctgattggaatgacccttctcacgtggaatcacttctgaaccccaagcaatggaaattccgtactacaactattaagaatgtgcgcttgtcttgttgtgttgcggggcatatcaaagtagcagaggctggtcaagatatacaggaaacaatggatgcattaatgcagctgggccttgatccttcttcgggggagtatcagtccataagatatgctcttttaaatggtgccagctgtttcaggtgcagagattggtgccgcttgcctgttgtcacgccctgtcggcatctgttgtgccttgattgtgtagctcttgatagtgagaaatgcacgttacctggctgtggcaaccattatgagatgcagactcctgaaactcgtgcacggccagaaaatccaaacccaaaatggccagtgcccaaagacctaattgagttgcagccttcatataagcaggatgactgggatccagactggcagtcgacaacaagcagcaaagttgcttatttggttaataagttgagaagtttgaaggcagaaaacataaaacatgggtactctaggaacatggccaatggtgcttgcctttctagtcaatcttcttgtcaagaccataataatgtggagggcaggttaccacacacaatgcctgacaaagtaataatattctctcagtttctggagcatatccatgtgattgagcagcagctgacgattgggggcataacatatgctggaatgtacagtcccatgccattaggcagtaagagaagttcactgacgaagttcaaagatgatccagcatgcatggccttagtcatggatggaactgcagcactgggccttgatttgagttttgtctcttatgtttttctgatggaaccaatatgggataggagtatggaggagcaagttattagtcgtgcacatcgtatgggtgctactcgtcccatatttgttgagactttggccatgcgtggtaccatcgaagagcaaatgttaaaacttttacaggattccaatgcttgcagacaaatggtgaataaaggaacaagcagcactgataatgaaggtgctcggcctcaccggagcctgcatgattttgcggaaagcagttatctggcgcaactcagctttgtgaaaggatctgacgcggcggaaaaattatag

SEQ ID NO: 22258 - DNA, 3708 bp, Oryza sativa
  Clone ID: TF_OsC3788_1
catcgtatgtataaattgctcgcgcaaaaatgatgaatatttaatgcgatcatccggccgcacagagcgcacaaccatggatatgatccattgcagaaacctagctagattaacaccgatcgctcgatagattaccaataaacaccactcccaaaacacgaccaacagtataattcttcacaccagaaagccactctgccactggatatatcacggcgagacgaacagtacatctactttataccagaaagccaactacgatgttttagttctgatggacacaatttaataccaagaaatccatacaataccactaatcctaaaatttgtaagcttaaatgtaccctaaataccccctgttaatttctatccaggagcactcctttctcaaaggagaggattcaaacaaatgcatcagggcaacaacattcctgaatcccaagattagaatgccgagcgcccttttgaatctgaggaattggagaagtggcttgaccttttccttctaagggtcttccatgtaaaactgcccccctgcaaaacacttgtggtggattcatcttcggcatcgtcttcattctcatccttgctatatgaagaaaccccagcccttactttttctggtgtccacattggaatgctggcatcatctgcaatgttcactagagatttatgccttttcctcctctcactgaaatcgacttcttgtacatcagacgaataagcgctccgctttgctcttggagccatccttggagtctcttcaactacatcatctgctttcatccactgatcaccaaaagagtctgagtagacaacctctttcctgcgtctcttcgtagttagcagaacattctggggttcatctgcaggtatcttctctgttaaagtatcattggcaaacacccagtctggaacctcaattccctccatgagcctcggtttgtagttttctctttgccgcctttcttcatccatcttctcaaccaaccagaattcttcatcattacgagcagccaaacgatttatttcacgctcactagggatatcagttcccagtgagcttgttcctctcctcaggatctcctgcagcaatgctcgcctatcctgagctgtggaggttgtgttgaacagcccagcctggataacttttgcatcaatacccatcttctgttttgcacggtccaagatctcttcttcaattgagccaacactaacaagaacgaatacacgcacttcattcttttgtccaatacggtgggcacggtcttcagcctgctgatccatttgaggattccagtcactgtcaaaaataataacagtgtctgcagtctgcaagttcaacccaaggcctccagctcgggtgctgagaagaaacaagaaatattctgagtccttcttgttaaaatctgccaataatctccctcgctcttcagtcttcgtagatccatcaagcctcatgtacttgaactggtacatttgcaaatatacttctaagatatcaagcagttttgtcatctgagagaaaagcagaaccctgtgaccagctctctgcaattttggaagtagccggtcaagcaattcaaacttccctgatgatctaacaatttcctgccgttgatacatgttataatgctcaacgaatagatagggatgattgcaacattttctaagttgcatcgacagattttgcaaagcctttgatttgagtccagatcctagactaacccttccattgctagtgacttgttcatagtatgctttttgccaagcagacatgtcacacttgagtattacttgtgttttcacaggaagatatttttccacttcatctttcttcctcctcagcaaaaatggacgcagcacttgatgcaaacgatgtataattagcagctgttcctcatcattaaggctgacttcacatgcaaatggtgcattaaaccattcctcaaaattcttcttcaggaacttcagatctttcagtatcaagtcatagtgcgtgagcaaaacattaaactgccgttgtccaaaattcttttcccttagagccttcctatcatctggacgaccatcatacagaattgtcccaatgctaggagcccaagttttgaattcattagaccaatttggtaacacggcctttggtgctattattaagtgtggtcctgtaacctccttcttctccaatagataggcgatcaaagctatggtctgaattgttttccccaaacccatttcatcagccagaataccattcaaattattgttgaataaagaaagcatccattgcaggccctctaattgatatggtcttaactccccaccttcaagagctgatggttgttccgttaccttctcttcaatagagtggacggtagaatcaagcctatggccagcattaaatttactatgatcagcagaactatgatggtctgcatcaacatctgatggggactcttcatcaggggattcaaccttgaggcctgatatttgagaacaatcatcagattctgacccttttggcagttcagatccatcagggcgactaacatgctcagcatctttttgtctctgcacagctttccctattccttcaagaagctcatttgtttttccaaggagcagtttcaggcgctcgttcttgctctcctcaaccatacgcaaataagcttcttggtcaccagccttcaaaacttgtaatctactcttttccatgcgatttatacgttgacgtgcacgaacatgccatgccagaactccatcattgcgctgtttttttcgtttgtaagaagccggtacttgtagctgatactccctagcagcattaagaatttctgaaaaaaatttcctcttcctgatctctgcctggttcttttcctcctcttcaagtcttgagatcctctgttgttcccaaataccaaaaagggagtcctctgagaatctctttttgcggttgatatcatcagcatccattgaaaaactatctccaattccatacatggtaaaaggataccgtatacgcatcatcccccagtcaaacaattgcctatcagggtgtgcacattttttgtgtagccagtattctgcactgatatcagtccttactttcttctgcaagtctaataacttaagcccgtacaattcaagcaaacacttcatttgcaaatcttcacccctagtagatggtaatccttcaagttcagtcagcctatgctgaatggaagtgttgaagcggtcttcttttaaagcagtcaactctgagtatgacatatacggtccttgattcttcaatacagcatcttcaagctcttgaatcaaggtgactccccaatcatcgcagtgacaatatggtgctttgaaactacaaccctcatccgcaccgggagaagcatccgcgcggtcctcctccccctccccgctctcgccgcatccatccccgacagccgccgccgccgccgccacctcctcttcacccccctcctccccttccccctcccacgcgtcgccgccgtggtagatggacgagacggcgtgcaggacggcgggcggcagcgggaggttgcgggagagcaggttgagcgcgccgatgagcgtcctggcctgctccgacgccccgccgccgccgccgccgacgacgacctcgtcaccgcccacggaggcgggcggggccaccaccgccgccgccgccgcctccaccgaggcagccat

SEQ ID NO: 22259 - DNA, 961 bp, Oryza sativa
  Clone ID: TF_OsC12040_1
tttggtcgcaatagttctgctaatcacagcgaatttgctaatggcattgatatgcaaggtcgtctgaacctggaaaataggattatagattctgacgagagagcggtgtaccaggaagcactacagaatattatccaggataaaagggaagatgatctgcctgagggtgttctgtcagtacctctgcttaggcaccagaaaatggcattggcttggatggtttcgaaggagaatagctctcattgtgcaggtggaattcttgcagatgatcagggtcttggcaaaacagtgtctacaattgcccttatacagaaacagaggatccagcagtctaagtttatgtctgttgattcagatcgtttaaaagctgaagcgctaaaccttgatgatgacgatgaggcagcgcctgttgcggataataagggggagcagactaagaatgatgaacccaggaaggatctaggagctggttcgtcatcaacagcagctggtactggtgacgttgaaacatgtgctagcctaatgaatactgctccagataagacggttgaaagaaatgttgaacgtaagaagaagagtaaggcaagcacatcatctactatgcaatccatgacaaggcctgctgcaggtactctagtggtgtgcccagctagtgttcttaagcaatgggcgaacgaattgactgacaaggttggtgaaagtgctaaattgtctgttttggtctatcatggtggctcaaggaccaaagatccaaatgagttggcaaaatatgatgttgttatcactacatacacaattgtggccaatgaagtgcctaaacagaatgccgatgatgacactgatcagaagaatggtgaagaatcttctgctggtaataagagaaaacaaccacccaaagcacagagcaagtcgaagaaaaaaaaaaaaaaactcgagactagttctctccctcgtgccgatt

SEQ ID NO: 22260 - DNA, 532 bp, Oryza sativa
  Clone ID: TF_uC-osflM202005g10b1
tcgatttggtgcgaccttattttcttaggcgcaccaaggaaagtattgaaagccttttacctaataaagctgatcttgtcatctggctgaagctaacgccatatcagatataattatatgaaacatttatgaagagcaatttgattgataagacagtgaagggatcaacatttgttgcaacaatgctgctccaaaagatatgcaaccatcctcagaacttgacagctgtagattcctgtgaggaacaattagcgttgaaagaaaacaggacgttacagggcattgtcaaaaaacttgaagctttgattgcaaagaataccacaaagacatcaaattgtctcaagttcatgcaagcttacatttatactgcaattgttggaaaaacttaaggaagaagggcacaaggtgctaattttctcacagacgcgcctaatgcttgatgaaatagaggaggcactaaccaacaagggagtacattctgctcgtatggatgggactgttacagcttctaaagagaagctattattaaggg

SEQ ID NO: 22261 - DNA, 4301 bp, Oryza sativa
  Clone ID: TF_OsC4554_1
tttttttcattagaacttttgagcaaatttcattccccataaactatcatgtttgatcaactgaaaaaaattgtcgaagacaagttcagcttaatcttttacatggtttatgatgtacaaccatacggctgaaatgcgaagctcaagatgagttaagattgctggtgaaaactatgtacaaatatggcgttagctaatgacgttctcctttgtatcttcatgatcaaaagacaccactgcagctcatcgaaaaattacctgatgagttgccacttgcacggagaaaaaatgaatcgcaccacaatgccacctttaactacaaaatctgagcacctgtacaaactagaaacactagacgcctagagaaatgctatctcctgacagatatttcacctatagatgcaagttacaccatcccacgagcaaaattgtgtccaatctcaggagaaatgctaaaccataaacaaatagttcaagtcttccaccgtcaatctagtttgatgggcaccagatttgtcttccccaaatgcagaagccaccatctcccgttttttctcctggagagccaaaatacgatcttcaacggtatcttttatggttaaccgtgacactgtgacaggtcgagtttggccaatacgatgcgctctgtcaacagcttggtcttctgtagtaggattccaccaaagatcaagcaaaagtacatgacaggccgccaccatattcagaccaagacttgcagctttgagagacataatcataacagaaacctctggatttgtgttgaagtcttttacagctctatcccgagctgcgacggacattgttccatcaagcctccgataagatagatgagaagatttcaaatgaacctctaccaaatccagcattctagtccattgagagaaaacgatggccttctcagttattttggtgccagcatattcagagggagtactattcccgttaattttgtcaggatgcacaattttatttttgtcatcactcatatgggttaaatccagtttaggcaacgagagaagaatatccagggcagctctcactttggaagatgcataagacgaatcaaatctaggttgcttcccttgcaccatgtcttcacaggaatcatcagacagaaactcacaggttgatctactcagagcacattcaagggtgcctcgggagaataaggaagttgaatttagtcggactcggcaattggacactggacatacactgtcatcaccggtaagttgctccagtatgcactggttgcagaaaacatgaccacatatagtaacaacggcatcttctggcgcatcattgcagagagcacatatcgcagaacacgattgcaagcaaaccagcaacgattgctgcctttctacaggcagcttctttgccatctccaatgaagacatccaactagaagtagactcatgacctcgaactaagtgagggtgatcacatgcctgtctgagccgtaaaagcatcagcaggatattgacgtagttttgcttgacagtaccagcagctgcatactccttgaactgctctcgtgattctgcttcgagagtgttatagaaagcacgctcttcactagtgaagtccactgtcttaagagagacggtctttgggggtaatgagattattggttttccatcaagcatcgttgcttttgtcctcctcagcattactgtcttcagaacaacctgaagcttcttgtacccagtaattgggttcctgctgattggtgtttttatcatgaagcaaaattttttgtattcagcatatggatcatatctgagaaatctgaaatagctatagagatcctcaacagcattctgtataggtgtccctgacaagcaccatcttcttttggctcgcagaccccagcatgccctagcaacctgggttcgataatttttaatactttgtgcttcatcaaggataactctaaaccatgcaacttttgcgagaggtttctcaggcaatttactctctggtgtgcttccacttttgttcttcttagaagaggaagtcttccgttttttgctgcctgaggagccaacaggagcaccatacctgtcaggcttccctttctcttcatcatcactatcaggacttgattgttttggtacttccatgcttactatagaatatgtggttaacacgacatcgtatttagtaagatcattaggatcctttgtgcggttgctaccatgatatactaaaaaggtcaagttagctttactggtgactttattcctcagttcatctgcccactgacgtagaacactcgtggggcaaacaaccaaagtcccagcagctggtctagccttaacatttgcaataggattttctgtcttaatggtactacttgtcgcttcaggtttacatgtatctgctagatgtgctagtgccggtttcttcaaatgaggctcagcatcgtcatcctcatcgtcatcgtcaagggttacagcttcgcatggttcttgcttaacagctgaagatggaactggtgacctttctgtcaaaatcagtgatatagtcgacactgttttacccaggccctgatcatctgcaagaattccgccagagcaactcgaaccatttctctccttttgtaccatccatgacaaggcaattttctggtgcctcaataaaggaactgctaaaactccatcaggtggattagcctcagactttggctgagaaatatcaagcaaactggatgcaagaggtgcatcaagtaatggctgtaatgcaagccgcaaagtcattctttcctcatgcggcctgtatctccctccaaaccgaggaagattaggattggcacacacagattgttgaaagttatgctgcaatccttggggtggcaacacatgtccactagcaagacttctactaccctcaagaatacataaatcagaatcacgattgctatctaaactgaagcaattccttgatgagttacccagaatagaagagctgccatttctaggaatgtcatactttttatgaaaagttggatgcattggatcacttgagttcatgaatgagtgttggtgttgggtactgacaggaaacatggaattctgcaaatgttttggtgcatctccaaagtatttatcagcatcctcagtggtggagtttctgcttgagggcaccggagaagagtcagtgctagactcactccggaaacagatatcttctgatcggttctgctcgctggacatcgactctatcgaagatacatcatccatgtaataatccgacagagatgtatcatcacaatattgatctggagagcccacttgcattgaactgctttcacatatattctgtggtaattgttccagctcatatgactgattgttttgtggcaaatcatgcagcactatttcattagccatatcaaacgatccataatctggctgaggatactcctgatactccccctgcagatattctccttgtacagttaggcaactgccatttccattctgcatgcttccaggcacatcaccgatgttcaactcggtgtaaggaatatcaggtataacagcactatggtcaaacataggcactgacgtgaaatggttaccctcctgctcagaattaccaagcatgggacctgtgccctcacatttaacttcacttaaaccagattgctctgcgaacatatcacatcccgaatcatagtataaaccatttgtataatcttcatatggagggacaatttcttcatcaacagttttagcatggtttaatgcatccattggtaaatgcatctcaggattaccattccttgaattttccaaaaaatcattgctaagcaatctataagaggtatcctctgagtgatcaaaagattctccaccattgttaagttccaccattacatccatctgactatgtgaaggatctgtatgcgagtagtttgaccaattttctttattctcaaaaatttcttcatggttttgaaatgcattttcagaacttgtgctgtccactggcatctctaaaccttgattgccctccgtcccaaaatacttgtcgttttgagtttttgtttgtaatgcttgaccattcattaccaagctgcttcctgtttgaccttctccaatcccaacagcctgatggccatttatagcccatcgccactcgtgctgctgctccttccagtcctcgttatcgaggaaggccatgaagtcgccgaggggcatggacaggttgtcctccccggcgccgccgaagccgccatcgaaatccgccgccgccgccgccgcttcctccat

SEQ ID NO: 22262 - DNA, 524 bp, Oryza sativa
  unsure (1)..(524): unsure at all n locations
  Clone ID: TF_LIB3432-034-P2-K1-D8
cggacgcgtgggcggacgcgtgggcggacgcgtgggctaaaataacatctgctgtgaaacaattgaaagcacaacaccgtcttatcctcagcggtactccaattcagaataatgtattggagctctggtctctatttgactttcttatgcctggatttcttgggacagaaaaacagttccaagctacatatggaaaaccattgctagcagcaaaagatccaaaatgttcagcaaaggatgctgaagctggcattcttgctatggaggcactgcataaacaggtcatgccgtttctacttagaagaacaaaggatgaagttttatctgatcttcctgagaagattatccaggatagatattgcaatctcagtctattgcagctcaaactttatgacaaattctccaactccaatgccaaacaagagatttccactatagtaaaagaaaatgaattagatcaatccacttctcaaccaaaggcaactcgtcatgtgtntaggcactgcaatatctattaaaacttt

SEQ ID NO: 22263 - DNA, 3021 bp, Oryza sativa; identical to SEQ ID NO: 12921
  Clone ID: TF_OsC257752_1

SEQ ID NO: 22264 - DNA, 3078 bp, Oryza sativa
  Clone ID: TF_OsC138576_1
ttttctggttttttctttctccgggctttctctttcagccttactcagccgaccaacaaagatacaagcgcccaaatccagagaaccagcaggagaaacagcgatttatgtcaaacccaaaagacaaaccactatgggtctgatcttaccttacaaatgcaataaatgaagaaaaagaaaagaaggaaataagatgatctgaacatgaaatgttcctccccttctgatagcctgtgccaagccagagaaagagtggatggggcagaacaggagaatagaaggaaaacatcggtggagcaggaaagggctatctatatgagggaagcattatccatactccctatggcttactttgcattcctgtagcggtccaatacttcatgtcgttgcaaaggcgagacagacagcaaccacttactaaactcaaggtcgttcatacccatgaaagatgcaattcggctgaattccttctttttctgcaccagtgagtaagattttgccttaattgtatgcattgtttcattcttcttactttgcagctcctctaagtgccttgggacagttttatcttctgcacagttgcttgcttcatttgtcctcgtgtttacaacatcttcatttcggtgagcataaactattccacaatggtacaaattcttgttctcgttatgtattgctgtcattgaggatttcatttgatcttgcgtaccaaatatatttgtatcaactatttctcgaattcctattgtttcagctgtattacccttcccatgttctccatgcatttcaatgatctcactggtgaaaagcttatcagacaagtcgcgaaacagattgcatatcccaaagagctcaccttgaaattttttgtcatcctgcactccttcaaagtaacgtttttctatttttccagagaccgcaatattggaaagctgttgcttatatatttgtcgagaataaataagctcttcaagggaaccagcaccaagtaggcgaaatacagtgacatgccgcctctgtccaaatcgaaatgacctgtcttgcgcttgcaagtcttgcgcagggttccaacttgggtcaaaaatcaccacacgattagcactgaccaggttgacacctaaatttcctgcccgtgtagatataaggaaaacctgtttgcttgggcatctattgaactcatcaattagtaattggcgtgcattcatgggagtcgttccatcaaagcgagaaaagcagtaacccttccgtataagaaatttctctagtatgtcaagcatcctgactgaatagctgaaaagaagaattttgtcaccctgcagagtccataatgacaatagtctttccaacgcacgcatctttccacaatgttctgcatcactgagacccatgaagttttcacttttagcacctccaccaactaattcaatatctgtgtcaaagacagcagctgcaagctcagcatctttcttctgcttctcaatttcgtctttcaggtttggctttatcagctccagatggttactgatctgctgaagcttcccaaggcaaggaagaacaagacagaaggggcacagagaacaaccctctggattgtctctgtgaagataagaccagataatgccatgtggttcagttctcttgcagcattccacctgagtcaaaggacttccacagctacatgggagatccttgtttataaggatttgcacgtcaggctgttgcagcattcttctgtaaacgcgcttttgaacgtcactcattctgcagaaaacaatattatcctcctttccaagcatgagatgcccaatggtctcttcctttgttcttctcaacagaaatttgctaagaactgaaacaaggtgcttcttgcgcttatcagcaacttgtacaaatctctcaggagcactgaacctctggccatgttttaaaggctcgtcataatatactcgaaagtgttctcgatcccccaagcaaccaggtacaatccagtcaaacagattaaataattccattattttattttgcattatggttcctgtgagaccaaaccgctttcgagtagtaatttccaagcaagctgtatataactttgatttttcattcttcagccggtgtgcctcatcaacaaccacaaggtcccacgagatgccacacaaaatcttgccatgaatcctaaaagtgtcaaaactggtaataactatctctagtctttgagtttcaaccttttgaagaaccaggtcacgatttgggccatgatagacagcaacagaacatcttgcccactctgcaaattcattttcccagtttcgaattactgatgtggggcagaggatgagtataggggcaatctttcttccttccactaattgatcaccgtggtcattatcttttccaataacagctgataagaaagcaattgtttggatagtctttcccaaacccatgtcatctccaagcacaccgccatggttgtttctatacagattgtataagaatcttacaccatccctctgatgcacaagtagcctgcaatttatcgaggagggtacctggacgacggggcgctctccgggcggcgagagagcaagcggttcgtagggcccgcgggagtcgagggaggccgctggcggaagggaagcgcgggggcggatgcaggggacctcgtcctcctcctctggcagcggcggcgcatcatccgccgccgcatccgaggtcggggaagtgcgagggggcggtggcggcgagacggaaaaggaggaagaggaggaggaggcatcaaggcggaggagctgctgcgagagggacgtttttgggggcctcctggcgaggagaggaggaggtgatcggggttgggactcggattggggctgtgaaaaggaggaagactggagggtttctttgaggctgtggagcgacatggcgttgcttggcaggggaggaggaaaccggtcggcggggggcaacgccagcactggcgaggaagcgacgttggtagcggcaggtgcagaacccgtctccagtctcccccgccggcgaggaggaggcaccatcgatgctgagctgctagatctgccctga

SEQ ID NO: 22265 - DNA, 7810 bp, Oryza sativa
  Clone ID: TF_OsC43095_1
ggagagaactagtctcgagtttttttttttttttccaggcaatatgtacaaggagctgcagcctttgattaattattataatgagcagatagtatatacaactcctctcaagactagctctatctctctctaaaccctcctaaccaaaagctcaaaagacaaaaatttgagatcaccatctcaagcacctatatgttagccacattgctctagatcttgcgatcttcctttttttttcccttcttccgtatgaaacaacaaaaaaatttctgactcctgatcgccttgccaacaaaatctggcaacctgtacatcacacgccccaattcgctttacactggacaggaccggttagtctttgttcagccgttgagcttcgccaagaactggttgagatcgtactcgtctgcatactgagactgatcccatagctcgtccagaccattcagaatggactcaaaccgttcccaccagatttccccttggaatctttactctgatcaccacccgaactgcttgggagtacagacgcttttctggaagcaggtgtcgaagcaaacagatcaagcagttggtcagtgttcattgtcttcaggctggcgttctcagcattgatgaccgcattggccaccgacaccttgaacctttgaagactcatcaccttctcttccagggtaccgcgcatgatgagacggtgcacgtttaccactttcctttgacccagacggtgtgctctgtccattgcctgaagatccttcattgggttccaatcatgttccataaagaccaatgtgtcagcagatgtcaaattcaatccaagcccaccgacatgagttgttaataggagcacatcaatggttggatctgagttgaatgccttcacaatttcaaatcgcttctctggttcaacagagccgtccaaccgtaaatatgtaacgcttctcatatgggattgaaacaggtccttctcaataatgtcaagcaaagccttgtgttgagcaaaaatcaaaactctgtgttgcccaatagctgcagaagcatcagggcttgatatttctgaccctataccacactcctgaagtatctcttggagagcaacaagtttaggggaatggtgtaggtcatgaagctcatcaccagttcccataccgatttcctttagaaggtccacaagataatcaggtgggctttccccagttacaagtaaaggatggctacaaagttttaatagatattgcagtgcctgaaacacatgacgagttgcctttggttgagaagtggattgatctaattcattttcttttactatagtggaaatctcttgtttggcattggagttggagaatttgtcataaagtttgagctgcaatagactgagattgcaatatctatcctggataatcttctcaggaagatcagataaaacttcatcctttgttcttctaagtagaaacggcatgacctgtttatgcagtgcctccatagcaagaatgccagcttcagcatcctttgctgaacattttggatcttttgctgctagcaatggttttccatatgtagcttggaactgtttttctgtcccaagaaatccaggcataagaaagtcaaatagagaccagagctccaatacattattctgaattggagtaccgctgaggataagacggtgttgtgctttcaattgtttcacagcagatgttattttagatcttgagttctttattatgtgcccctcatccagcacacaatagttccaaaagacattctcaagaaaatcaatatccttgcgtataatatcatatgacgttatgattacgttgaacttatcaaactgagaacggaggataatcctatcttgtgatgaaccgatgtactgaagaggtttcatgatagagctgtctatgtacttctctatttcatattcccagtgtgctactaatgtagaagggcagataatcaaagatttcggatcttgctcatcattccgtgcacgtgactcagcaatatcagctgctacaatagcagacgcctggagtgttttgccaagacccatgtcatcacataaaattccatgtaacttgaaccgtctaaggaatgctagccagttaattccttcttgctggtaccttcgcagttcaacactgagatcaatgctgagcttgtaatcatcaatttgggagttgtcgaggagctgctctagaaactgcgcatcttctgcactgctagataagcgttcactcagtccatccggtaacaaagaaccttttgctaatggcaacaaaggaaccagagcagcaaaactgtgagttacagtctgtctaacagaaccatcaggatcactcatacaccttagaagaggaacaacaaggaaaggagcataaggaaccaactccacagccaaaccctgaacaagaaggctcaaaagcatcccagctccttgccttgcacagacagaagatgaatctgacaacatcggtatgacattttctatcacaattaccattacattagcagtcaatgattttgccattgatgtgatgcaccttgcagcagctaacctgacagcgacatgaggatggcgcacacaaccaagaatacagggaaggagacttagcaattgaggcctcaagggctcagccaaatgaggtgtaaccgaacgaacaacctggatattatttataagggactgcggttccttgtcctcacaagatcttcctaactgcgcaatacttggatcttctttcataagatcatctccagtcttgacgggtttaagaaactccgtaaggcaatcccataacttgggaagcttttcaaataaggatgctccaaatttctcacaaagatgcttaaaagccaactccgatccacgccggcttataaaaccctccgacttcgattcaccaccggaagtcatctggcccctggatttgtgattgctaaaacgcttaccaatcgacagcaagttttggtcctcaataacctgaattgagtttataactgcagcttgaggtgtctcacttgcatcagtgcatgttaacgtgcagaggttctttgttagtttgtcgtttgggccaggtttgcggccaacacaactaaaaatgagctcagcaagtgcatctgcagctttgtcctgaagtatttcctcctgttccctttttacagcagccattaaaggcaaaatgactgggttcaacttactaggcagccctgccatccagactacagcagaggccactaaagaggaaactgtcacatgcaaattattctgaacacatttcaagtagcctgacgtagacaatagaccttgttttgctgactctatattgttcaagacaattttatcactgtccaaactaaaatcaggttcagatggtaacaaaagctttgaagtgaagttaatagcatcatcaacactcagcatgtcagcttcaaagtttaagttgcttgtatactctttaagaagagcacaagattctattgactggaacaaattattggcttcattgcgcatcttcctgtatgttcttgcaagctcagcatatggaagcggagaatcttttgtaggaaatgaagggtcagagcaagccagtaagtccaacatccaccctttcagggaggataagaaagctagcaatgtacccaccgcagcaggatcactttttctgaggtctttaaaccaagaaacaataaccatagaagccacctgtctctggactcctgagagagacatgagatcgcttgctagtggaccaagaacaacttgccacgacccctctggcaacttagaggcaaacagaccaagggccattgacgtcagcactcgcgtatgagtaacagatttgtccgaatcagaccccacaattatttttgaaacactcaaggaagcttcagaatgcttttcctgtgaagtgttctctccggtagaaccaaaagatatcattctcgtattttcatgttctaaccttgcagatttgatctttgcagcagctcttgaacgacttcctcgtggaagtgcaactggcaaaaacatttttgcagaatccaatgctgtgccatatggagtagtggcaagttgcacccaattactaaaatatgaacttgcagcagactcaaggtcctccgtagggcactgaagtaaaagtttccaagccctttcagaagatcgaataatctcatcatttgactccaaaagaagattctggaagacaacttgcagcgcatcacctaatatagatgcaagccatagtttagctgaattcctggtgttcccaacctcgagaagcctctccaatgttcgtacagcagaacgccggactgatgtaatactatgtctcataaaaggccacaatcggggtgtcagagcggctaagacataaggattatcattagaacccattttttcttcaccggcaaccagagttacactgtttagatcaaattcgttgtctccacctatggctgttgtgccaagcatctttggaaccatctctggttgagaatatatctcagctaacaaattcatcacactgcttgtagaagggcttagatcatcaaggtcaagcaatatatcccaaagcaacatcacaattgaatgtagcatttgatcatttagtctaactaaagaagcagcagctgggatcagagcctctgcagccacagcccggacatcatcatctggatcctccagaccagctttacaggcatgaagaacataattaagcaagtctttaagcatttcctgacgaacagcaactaaatacttaattccaaggagactcccatgacgaacttcccactcctgcctgcgctgcatttgcagcaaaatattcagtgtatggcatactagagtcggatgcatgtacttcagaactgcaccaagagcttgagcacaagtttcacgaacaggagcaaccacttgatcagatacataatcaccaaagcggtccaatgaaagtacacaaaggaaacgaattgcacagtcttgaagaaattcccaattttttaccgctgagtagttcgctagtttcatcagctttataaattttgaattttcagggagatgggtagaactcagtttgggcatggagttgagtgtttcgtgaggtggtgtacaatatggatccaccttagatgggttagctgaaccatcaacctggaagggtgattcaacctttgcatgagcaagatttggttcaccactagatacagtaggctcagtactcagacttgcctctgttttggaataatcaccgttacttggctccttatccaactgaatgtccataacctctggattagactcctctttcttttgtcttttcaaaactggctcgagctgtcccgaatcaatgtcttcattaagatcaataccatgtgctcttttcagggagtccaaattgtttttatcatcaaggtcagcgaaaggtgagttcagatcaggaaaatatactccagcacaagcaccttgatgcgtcaaaatttccctcaaagccataatggtgccatggcgaacttcccaaatagggtcaaacatgtcatgaataagttgatctacaaactgttgaaaaggccatctcccattctcactgtactccagattgtcctcatctgtgattgcatcaactgtatcctgaaaaaatgtaagtggggtgattagatcatcacagattgaagacaaagccatcccaacagaatgctccagtgcaattgcactgggaaccatagatgcaaccaagtgctgaatattctgaccagtattaaatgaatagaatccattgttttgcatatttgcaccccaataattcttttgggcaagaaggtcctcgtctttgataacatcattgaaatccatgaactgctcacatacatccagacctaaacgacgccggagattttgcttttggcgagctaaacgctctgctggatttttgccgttatcatttgcaatgtcatattcctgtccacctgatgccaataaaggagatccaaattccaacaccctgtttatatcgaagcttccaaaagcaagctcagatgttgcagtagtatcagcatgccgcaacgttgacccaacatcaccaattccagacaacccagaagcatgtttttctgcttctgcagatgcgaacaagtctttcaccgatgtgtgtttgacgttctctgctatggcaccaatcgcatgggctgctgcgacccttgtgtcccaattcttactacgtaaatatggagaaacccttttccttcttaatataatgataatgcagatatcctttttgagtaagacatttagctcctgggggtgggacttggcaatttctccaatttgccgtgcagcagcgaaccttgtcgcttgcgtggaaccagctagttgtgttaaaggaaactttgcacaatagatagataaaccaaaggggatatcaaatgatatatgttcgaagccgctctgctcataagcattctgtaccactggtggtggctgcaggggaatagcaggtgatctagttttgtcatcagcatcattttctagtaatgcgtctatggattcatgtctgtcctccagttcaatagcttcgttgagatcatcaatagcatgagcagccatgccagtggagggcaaaacatgtctgacgggagaacctttgacctgcaagttaacaaaatatttgcttttttcatcttcccataatttcttcttcaaatataaagacttggttgcctcagtccccttacttgttttatcaaaatctgtaacatctgacctatatttatctgacctagtcattgtatcagagtctcgctctcttctcttcttcacagctttcgcttcttcacttgttgagtatgggattgatctctttttagttgctgcagtattaggactcctttcgtttaggtcttcattgacactggacccctcttcattagcaccacgcttcaaaatatctgaagcaagcaaatcaccaagcctctcgaaacgagcttgtgaccttttcacttcttcttgtgccttcaaaaaccgagcatgagctttaataaacttcttcatctttgaggtcatcctatggcattcatctttctcccttctaagctgcacctcaagatcattaactttgctagagatcttgcgcacttcatctatcttctcatccaaaatgacctccatctgagttttatcgtcacgcaaagcctccatatccagccgtatttgtttcagctgcttttcgtggtcttctttctcatcaccacttgagaatttgtcctttttcttttcatcgttgttatcagagagacttaaactcctagatgagttggtttctccatcgtcagtcttcttttcatgcctcctctcacattctcttcctgctaggagatcgtgaatagctagaatctctttctcgagaagatggccttctatcataaaggggacgatgacccctggactctcttccaggggaatgcctcctccgaggtgaaaacctcctatcaatcctgcctctgaaatcaccggctctataatctcttctccaagttcaccttctggtacagcacaagcattatcgtcaacacaaatcgtcgaaataccaagtgaagaatttatgaaaaaggtcatgctatcctctggcagcagttgagtcaacatatctgcagagtccgggtggtgcgtgaaggcgccgcgggaggacggcgggcggcggatgtcgccgtggccgtgggcgaagctgcaggtgtcgcggttgcagttgccgcgctgccacagcgcgcacagcttcgtcttgtacgccggcccgcggcgaggagggcccagcat

SEQ ID NO: 22266 - DNA, 4780 bp, Oryza sativa
  Clone ID: TF_OsC72210_1
tttagctgaaactagtccgcttattcatattaagattgggtttagttcaacaaatattggaccaccagaaatgaaccaatagcattattatacatcgcatctggagattcattattatacacaagaagatttttcagccggcgaccttgtgccgattctagattggttgatgctttgcacccattatgtaagaactgactagtcctatttgatcatgcgtgacataatgcaacccaagatccattatttgatagagtatagggataccacagcctgctgcatcaggaatttctcagtgcatgccagtcaactagaactatttaactctggaccacggatgccatagcaatagtatgttcttccagtgcgattacacaagggttcaccttataattaatgaatcatcatcttaaagaatgaatccatctgatgccagtcattattaacttaactcaggagcaatctggttgtaagtaaaaacaatgtttgactcagttggtggataatgaatctttaaaaacatgcctttcagctggtcatgggaagtcatttcctccagaaccttatcctcggatatcaacttagaacagtgctccatttcagcttttgaaagcatgttcctaacattactgaactcgtcttctgtagagaagaccaacttggacaagtggtccttttctgcttgcctatcatatttgtcaccttcacctgttccataagttattaaattgtatgtatatacaaatttcttctgtcctatcctaaatgctctgctgatagcttgccttccaacagctggattccagacaacatctagaagaacaactctagaagcccctgttaggctaatcccttcacaacaagctcttgtagatgcaagtaacaccctcgcgtcactatccggattattgaaaacctcaattgaattttgacgatatctcgggaggatcttcccatccatttggagaatctcttttccttctctccatttgaaaatcttacgaagatgttcctttatcaattctaatggctgaataaattgactaaaaatcaataccttttctttcaatgcttcacacaaacgaacaacttccattacaaaccttgtttttactccttcataaggattagaccttaatctttcaagcataggtttatcaataagggaagcttcttcttccgtcatgttaattgcgtttacaagtgaaggatgtgtggaggctaaagaaataacatactcatgttcaaaattgttaccagatccaacattttctacctttctaatgatactcttttgaagcggtagaggtttcagaactatcacacactctctgagccccggaagagttcgaagaatagtcccattatggatatgaacaaatggtttcagtattgatcttaccttttctgcattatcatcagttacattactagttaaggaagcccaaactcctttctcatatttatcagaaaatttatcccgttgcttctttgagacacagtgccttcgacccactcttgttttagtcaaaaacatttcaccaaacctaggcctcaccaaacagagaatattgtaaagctcaagaaaattattttggaaaggagttccagatagaattatacgcttctcggttttaacttttcctagtgtcttccaaataacactgcgctcattcctaggtgtgtgcccttcatcgagaacaagcaaaccagggttctcaagaagaatagttctcactttgttttctccagtgcagccaaccttttcagatgttagtttcatatatagaccataactaattccaagaacaccatgacccctgttccatgaaaacagttttacaagcctagtcaacttttcagtccgatgctctttctttattaatctacatatatctctgtcttccttcccagagtaatcagtagtgttcattatatgaaaaggaacgttgacattccatttcttgaactcttgttcccaagcaaacagcatcccacgaggtgcaataatcaccggtcggcagtctgggaacaccttcatgtatgtctggataaacacaatagccaaacgagtctttcctgtccctggggcatgacagatcacacatcctccaacaacatcaggcttagccccatgctttatttcattaagcctaatatcacccactagatttgtccacataaactcaaatgcctcacgttgatgctgatacatatcagtaatgacgccaggaatgagatcccacacagttccatttatatggaaatcttgagattgtccatcaccagtccctgtttgttcataaagatcaggacacatcaacgcagtcttcaaacaagagctgtttcgccatgcaggtttctctgcaaaattggaggccagcaatggtaaaataaatctgatttccagatttaccaaggagcagtatttgcatctgattcctatttgctcatcaataataaattcatgcttccctctagaacaaggtgtaataggagcaagtgcatgatctagcagactgtcctcttggccctcatcatcataataagtcccaatgttctctgactctaaagtgaagtctaaatcagcccatagcatatcaagtgcagcatcttgctctgacctatcagttggactaggatcatcgtccccaaatgaaaaaaccaacggatgcaaatccttgaaactatactcaatctggggcttctggtcaaaaggagtagacttcccatcatcattgctacacatcttgtccatcagaagcttcataagagactgcctctttaacatgcggctggatttcttaccagattttgataatggattcttccttttcctcccagttctgtgatcaccactcccttgacatccattttttcgattctgactagaatctgatgagttggaatctgattccaggtctcgttcatacaaacgatgattcgtcatcatgccaagcttcagttttttcctcctctcaagctcccatgtaaatcgcgatctcttctgttgctccgtaaaagcctcgctgcccacaggggcctcactgccatctttctgaaaggtaagtggccgagtaaaatcaacctctgggtaatcctcctcccaatcaatgccacaatctacagcatcatcaatcatctcatcatcagatgagtcaatccctttcttttgctttctcctttgagcttcttcctcttcctcctctctttcctcttcttcctcttcatcttcttcatcacagctagcactattgcaatcgtcatcgttttcatcgtcctcctcatcatccaattccacttcagtgtcatcatcatcctcttttggctcatcagacaatacctcgaaatatgtattgtaagaaatcctctcctccttcataccccatgatgaccgagttctccatgcaacacaagatggcacaatcggtagcttcgctggtactaatggcttccttctcaaggcattccctgtgtcattgaccactttgacttcctcgtcagagtcaagaatttcaatataggagctcccttcattaaaactgagagatccttttccctttgactccatctcatccttgatagcctcctcatcctcatgaggcctcacttcactaacattaacattgtggctcaccaaatcttgtgtttccaccttagaaaagtcatgcatttgtacagatttgtcaccttcatccgcatcacccccaaaattatcaccgtcgtcatcagcatcattatcattatcatcatcaaattccatctcatcctcagcttcccagtccactacatttgtatccaaatcagcaaattccatctcatcctcggcttcccagtccactccatttgtatccaaatcagcgccattgctgtaagcacgaatgacatctccgacaagcttttcctccaacatttcatcgtcgtaatcatcctcatcggaagccaactcttcattcactggatccaccactgataactccgtgttcccacgatcctctgtgccctccccagcgatgatctcaccgccatcacgattcgaattggcgacactggcttccacattaccgcagtgctcctcaattcgatccccaccagcgacgctggcttccccattcccgtagtgctcctcctcaattagatccccaccagcgacacttggacgctcctcgcttgcctgatcaatgccatccgcgttacacacgcgagactcgccattaccattgtgcgaagcgtcatcggctcgcccgctgctgccacccccgtcaacctgtgacacctccatcgattctccgcgagcgggagtccccgcctctgcttccgcttcctcctcagcctctgcttccgcttcctcctcatccgcctccgcctccttgcgcttgcgcgcaccacgcccgcccgctgaccccgaggatcgcacgcggcgcttcgacggccctccgccacccgcctccgcactcgccgcccccttcctcttcctcctcctgctcggcgcctcctccgccgcagccggcggcgtgacgggcgcctgctgcgccatcgccatcctccgcgatcgcgtccgcgtcgccacggcccccggaaccaccaccctcctcttcaccgccgccgccgctccacccccaccgccggcggagtcatcagcagcgtcctccccgtcgtcttcgacatcgatgaccaccaccggccccgcgtcgcctccgcggcggcggccccgcaccatgcggtattcagccacggtcacgccgccgccgcggcgggcgaggcgcgcggcgcgatccat

SEQ ID NO: 22267 - DNA, 689 bp, Oryza sativa
  Clone ID: TF_LIB4309-046-R1-K1-A2
gtctttccaaagtatgagcgccgcctcctcgccgccgcctccctcctcctctccgccgatgcgcagggccaaccaccccacgccgccgcccaactcggagtcggagtcacggccgagctcaagccgcaccaggtcgatggcgtcgcgtggctcatccgccgctaccaactcggcgtcaacgtcctgctcggtgattttttgggacttggcaagaccctccaagcaatctctttgttgagctacctcaagatccactccatctcacctggaccatttttggtcttatgtcctctaagtgtcaccgatggctggctctcggaattcaataaattttgtccttctttgagggttatccagtatgttggtgataagttgcaccgtcgtgatctccggagaatgatgtttcaggatgtccaaaaatcttcatcgtcatctcattccactgagttaccgtttgatgtcatgatgacaacctatgacatagccttaatggaccaagaatttctttcacaaattccttggcactatgttgtcattgatgaggcccaacgtcttaaaaacccatccagcgtactgtataatgtccttgagcaacgctttatcatgccaagacgtctgctactaacgggcacccctatccagaataacctttctggactatgggcattgatgcacttttgcatgccctc

SEQ ID NO: 22268 - DNA, 743 bp, Oryza sativa
  unsure (1)..(743): unsure at all n locations
  Clone ID: TF_LIB4309-004-Q1-K1-B9
ggccttacgagtgcctacaggtttgacttttctgcgaaaggaggtgaagaagaacaagaggatagtgaagagaagagaaaagtcgatgttgtttcaaagcttcatgccatattgcgcccgttccttctaaggcggatgaaggaggatgtagagcatatgcttccacgaaagaaagagataatcatttacgctaacatgactgaccatcagaaacaaatccagaatcacttggttgaacaaacatttgatcaatacctgcatgaaaaatcagaaattgttctgcggaaacctggcattaaggcaaagctaaataatctgttaattcagttgaggaaaaattgcaacccatcctgatcttnnctggagtctgcgtatgactcatcagngtctgtatccancctgttgagaagctcttggaacagtgcggcaaatttcagctcttgaacagattgctaagtttgctgcttgcacggaagcacaaggttctaatattttcacagtggacaaaagttttggacattatcgagtactacttggaaacaaaaggccttcaggtttgccgaattgatgggagtgttaagttggaagagaggaggaggcagatagcagaatttaatgacttgaacagcagcatgaatatctttattctaagcacacgggctggcgnggcttggtatcaatcttacttcagcggatacctgtatcctatatgatagtgactggaatcctcagatggatttgca

SEQ ID NO: 22269 - DNA, 4230 bp, Oryza sativa
  Clone ID: TF_OsC1528_2146
atggcgatggcgcgatccatcctcctcctcctcctcctcgccgccgccgcctccgcctccgccgacgcgcccttcctcgtcgcgcacaagaaggtttcgctctcccgccccaagcctggcgtcgagcgcctcgccgtctccctcgacctctacaaccagggatccgcaactgcctatgatgtgagcattaatgatgatacttggccaaaggaggcatttgagcttgtctctggagagatgtcaaagacattggaaaggcttgaccctggtgtcactgcttcgcatgcatttgtcttggagaccaaagtacagggcaggtttcaaggttcacctgcggttattacctatcgtgttcccacaaaggctgcgcttcaggaggcctattcaacccccatccttgcacttgatgttcttgctgagaggcctccagaaaagaagtttgaatgggctaaggtgactagctccatggaggacgatgacgatgaccaacgcttgcttcacagccttggtgtcacgtccgcagacatccacgatattgaaaggagaatcatatcacaggcaacaactgatcctgccgactcatctggaccaaccatcaatggaggtcatcagcctgatgatgctctcgccaaactgcatcacaaactgcgctctgtgcaaattgaaattgatgctgtagcctccaccatcaaaggagctaagcttaagcaaccatccggaaataaaccacatgagcataaaggcaaggaccagccagatcatcatggagcaggacacctccagcaagcccttgctgccgaccgtcttacaagcctcaggaaagctaaagcacagatacagaaagagatactacagtcacatccttctccatctgcctccaatcgaaaagataaaatgctggccatgctggtccaagacgagccgaggcacaaaaagccacccgtagggcctaaaaacatcgtgaaacgcccgatgaaaactgtcacctatgatgatgacaacaacttcgatgcagtgcttgatggagcctctgcgggatttatggaaactgaaagggaagaactgatcaggaagggtttgttgacaccattccataagttgaagggcttcgagaaacgtgtggaactacccgaaccttctcatagacaagatgattctgcaggacaaactgaagaagccatggaagcttccaggattgctagagttgctcagtcgctaaagcagattgcacagaaccgcccagcaaccaaattgcttgattcagagtctttacctaagctagatgcacctgctgccccatttcagagacttggaaaacccctaaagcgtcctgtctctcccagttcagatgagcaggaaaagaagagaccaagaaataagaccaaaagaccactgcctggcaagaaatggaggaaagcaaactcaattaaggaatcatcattggatgacaacgatgttggagaggcagctgtgtcagtttcagatgatgatgaagatcaagttacagaaggctctgatgagttaactgatgttacccttgaaggaggtttgagaattcctggcacactttacacgcaactatttgactaccagaaagtgggagtgcagtggctatgggagttgcattgtcaaagggctggtggaataattggagatgaaatgggcctgggaaagactgtgcaggtcttgtcatttcttggttccttgcataacagtgggctctacaagcctagcattgttgtttgtcctgtaacccttttgcaacagtggcgaagggaggccagtagatggtatccaaagttcaaggttgagatcttacatgactctgcaaacagttcatctaaaaagagcaagaggtctagtgattctgacagtgaagcttcctgggatagtgatcaggaagaagcggttacatgttcaaaacctgcaaagaagtgggatgacttgatttcacgtgttgtgagttcaggatcaggtttgcttctgaccacatatgagcagttaaggatcctaggggagaagttgcttgatatagaatggggatatgctgtattggatgagggtcaccgcattaggaatcctaatgctgagattactcttgtgtgcaagcaattgcagaccgtgcacaggataattatgacaggtgcacctattcaaaacaaactttcggagctttggtctctctttgattttgtgttccctggaaaactaggtgtcctgcctgtgtttgaggctgagttttctgttccaattactgttggtgggtacgctaatgcaacaccattgcaagtgtccacggcgtatcgatgtgctgttgtcctacgtgacctggtcatgccgtaccttcttagaagaatgaaagctgatgtcaatgcacagcttcccaagaaaacagagcatgttcttttctgtagtctaactactgagcaacgtgctacttatcgtgcatttcttgctagttcggaggtggaacaaatctttgatggtaacagaaattccctttatgggatagatgttctaaggaagatatgcaatcatcctgatctacttgagagagaacatgctgctcagaatcctgactatgggaatcctgaaagaagtggaaagatgaaagtggttgagcaagttcttaaagtatggaaagaacaaggtcatcgtgttcttcttttcactcagacacaacaaatgcttgacattatggagaacttcttgacagcttgcgaataccaataccgaagaatggatggacttacacctgcaaagcaaagaatggcacttattgatgaattcaataacacagatgaaatttttattttcattctgaccacgaaagttggtggactgggtacgaatttgactggtgcaaaccggattattatatatgatcctgactggaatccttcaactgacatgcaggctagggaacgtgcatggcgaattgggcaaactagagatgtgacagtttatagactgatcacgcgtgggacaatagaggagaaagtctaccatcgtcagatatacaagcatttcctcacaaacaaagtactgaaagaccctcagcagaggcggttttttaaagccagagacatgaaggatttgtttacgctgcaagatgatgacaataatggctcaactgaaacatcaaatattttcagccaattgtctgaggatgtgaatatcggagttccgagtgacaagcaacaagaccagctatatgcagcctctgctacaccgacaacctctgggactgaaccgagctcatccaggcatggacagggtaaagaagaccattgccctgaccaagcagatgaagaatgcaacattttgaagagcctttttgatgctcaaggcattcatagtgcgatcaatcatgatgccataatgaacgctaatgatgaccagaagctgcgcctagaagcagaagctacacaggtggcacaaagggcagctgaagctttacgccaatcacggatgctcagaagtcatgaaagtttttctgttcctacatggactggaagagctggtgctgcgggggcaccatcctctgtccgcaggaagtttgggtcaacactcaatacccagttggttaattcttctcagccatcagaaacttcaaatggcaggggccaaagtcttcaggtgggtgctctaaatggcaaagcactgtcctccgctgagcttctggccaggatacgtggaacccgagagggagcagcttcagatgcactagaacatcaactcaacctgggatcagcttccaatcacacatcgagttcatcagggaatggccgtgcatcaagctcttctactaggagcatgatcgtacagcctgaagtcctaatccgccaattgtgcaccttcatacagcagcatggtggttccgccagctcaacaagtataactgaacacttcaagaaccggatactgtccaaggatatgctgctgtttaagaatctgctgaaggaaatagctacgttgcaaagaggtgcaaatggtgcaacgtgggtgctgaaacctgactaccagtaatattagctatagctgcaaagttttggctaggtgtagcgaacagcataaattaatttcattcagattggagatgcaaaaatcgatgagggaaatgcctctaatgcctttttgatgaagactgaattctttttgtaggcaatatacaacttttgtagggtagatatacaaatctgaaacaaaaacatgtaggtcacaggttgt

SEQ ID NO: 22270 - DNA, 5156 bp, Oryza sativa
  Clone ID: TF_OsC4180_1
ctcctctcaaacacaagcctaagaggcacccgagatcagcatgtgttccgttccgtggtcgtcacaattagtacaagtagcatgcaaaatgtcacgccttagtgactactagcatgcaagcatggattttaagcaaaagaaacagacatgccctacgctacaaggatagaagacagaagcggcaggctcaatctatccatgtcgcatctctgcttcaacctctccgccatttcaccaaacttggctctcaactcacccacatcagccagctccatgctcttgttcctttccagcatctgctcactctcttcaacttggtcggaatgcacatcgtcggtagagatccttaactgccgcagatggcttctcagccacatgtttgcgtgtagggtccctttgagaggcggcgcctgatggtgtttaaggtcagggttagggcttcgtctatgtgaggagccccgtaggttcgtgcgcgtgtggctcagctgccggttcatgatcctgttgcctgtcggtgtgccgacgtgcttcgaagcaggacaggagcgcttctcttcaatgtcgctcccgatgtcgcggtttggactggggtctattgatctcattcctttcttgttcttgcgcgagagcgggcaatgacgttggaggaatggaattcttttttcttcatagtattggctgtcctaattcaagcagagtcccatgaccctccgctgtactttctctaggtgcttttcgtattgcgagagatggccaacacatcattatcattcaatgttggtaagattgcgttcttagaaaacagaaagctgtgatgtctcaaacccgctatgccttgttgattctgtaattgtctttactacatcaaggagtcatctatcataatttgatgtccatgctcttctggccattgcttttgtgtcagcaaaacatcacacccttgttgagggcgaatttaaagctctagggtcgaccttttgcttagctacgattggattccaagcaggatcaactactataacccgatctgccttggtgagtgtattgccaagtccaccaacatgtgaggtcaacaacaatattggactgtcaagcccctcttgaaagtccttcagaatcttcttcctctcagatatcttggtggtaccatcaatacgcaggaacttatggccctcgatagatacagcatcctgaataaggttaagcattacacgtgtctgtgaaaatatcaaaacatagtggccctcttcaacaaggttcctcagtaagggaaggataaaagctatcttgcaggaggcgccttggacaatctgtagtcttttgtcagcataaaggttatcttcaagaatcctttccaccatgcacatatctcggttattcagcatggcacccatttcttccaggaaatcatcagtatctcttttagtcaaaagtagagggtgatcgcatattttcctcaaaatcgtgctagcttccaaggatgaacccttcaatgctccagtttgtgaacgaactggatctttattcaggaaggcttcatacaatcgcctttttgctgcatttgaagccatttgcttctcttgatcagtagcattcttgtcatttccacaaagaattggcttctcgtacctaagttcgaaccaggacatctttaatttattttgaataggtgttccagtgagtacaatgcgatgagcagaaggtatttgaaacaagctctgtgccctttgcgtctttgtattcttgacaatgtggccctcgtcaagaataacatagtcccacagtggttcttcttcgttgttgtcaacattgttaccgttgccattgcctcttagtaacatgtaattattccggacgatgtggtaggatgttagtagaatgccaccctcctggatggtcttgccgagtcccatgtcatcggcgaggatccctccggtggcggtgcagtgcagcgcccagagccaggcgaggccgtcgcgctggtgcgggtagagcgaccccaatacgcggcgggggatcttcatcttcatcttgatggcgccgacgccggcttccaccaccatgttgactagctcctcatcctcatctacctccacctccacctcctgttgaggttgaggttgggaagtcggggccattggaacgaatcggccgttggcggcggcggcggcgagggctccgcggccggtggtgaaagtggaaggaactttaaagacaacaagggtactactagttgagtttaaacggaacggagttgagtttaattcagatcccttcctgccttcaccccgcgcccgcccgcccgcctcttcttccttcgctttcaaactttcccaatcctttaaagttcgggcttccgttggacccttcctctccaatggctccggagaagactcgatcacggtcagcttttcgtccagctcatttatctgcctccttatcttgtctccacgatctggtagcttcgccacaagcaccgtgtttgcaagggtttgcgaaagccggttgattttggccttgatttcctcaggactttctgtgcttgtgctgttcggggagtatgttcgagcaatgaactcttttggcttcatcgcataggcagcaccattggcaacatagtcagatgaggctcccttgtagtagtgcttggccattggcatagctcgacgactgctgtccaaaccatcattatcattcagtgtaggtaagattgctgtcttagaaaacagaaggctgtgatggctcacgcccgctatgccttgttgctccaggaattgtatatgcttcctcaaggagtcgtccatcacaagttgttgtccatgctcttcttgcaattgcttttgtgtcagcgaaacatcaaaaccttgctcaggcagactgaaaagctcttgaatatccctcttgctgaaataacgagtttgttctttgtgctctgtagctgtcctaaacagagcccccttgaagacctgcaatttgtatatcttttcttcgatggttccagatgtcataaggcggtatacgatgacatctttcatctgcccaattcgataagcacgatcaacactttgattgtccgtacttggattccaagcaggatcaactactatgacacgagctgccttggtgagtgtaagtccaagcccaccaacttgtgtggtcagcaaaaatattggagctccaggaccctcttggaagtccttcacaatcctttccctctcagaaatcttggtggtaccatcaatgcgcaaaaacttatagccttctaatattatagcctcctgaataatgtttagcattttacgagtttgcgagaagattaagacgttgtgtccctcgctaacaagattttggagcaaggacatcataaaagataacttgcacgagacatcctgaccaacttgcaattcaacgtcatcatcatcatgagccatatctgcaaggttcatggccattttctcaaccattcccatttcttgattatttaacatcgcatccatgccttccaaaacaccctcagcagctttcttagtcaacaacagcggatgatcacatattttcttcaatatcgtgattgcggccaagggtgacccttgcattgatgaatgaactagttcactgttaagaaaagcttcatataattgcctctggcaagatgttaatttcagccagataattagctcattcttcttagcaagctttttatcttctcccgtgccgctatcaagaaacacttcattcttcatgcgtcgcaaaaagtatggctttatccgttctcttaattccttgctttgaaccttcaagttattttgtatgggtgttccactgatgacaatacgatgtgcacagggtatttcaaatagactttgagccctctgagtctttggattcttgataatatgcccctcatcaagaataacatagttccataatgtttcttcctcgtcatcaaaatcattggtgaagttgccttttatcatcttgaaattgtttcgaacaatgtcatatgttgttaaaaggattccaccctccttgaaggcatatttaagctcatagttgcgagcatttgcattgggaccagagtagtctctgatcttatctttgaggctcacaactgaaagttccttggtccaatgagtcagaagcgtctttggagctacaactaacactctcttgattaaacgggaatggaacaatccagccaggaatgcagaaacctgcatggtcttgccaaggcccatgtcatctccaaggatccctccagttcccctacaatgcagaacccaaagccacctgagaccctcacgctggtgggggtaaagcatgttgaatatccttcctgggagattgtagggcttgcgcgttacacctgtcccagtgggctccatcttgaagtcctctgtcttctcccaaccaacatcatcagcatggttttccttcccattctctgcatcttggtcgatgtcgtcttcatcgtcatagtccccaaaaaattttgaggccttggattcggttgtggttttccttgacaccgtatcaaaggcataagctcctttggctttcatcttatcatcgttgccgcggcccccaaaagaagaagaggccttgaacaccttcctggtgacctcctctttaacaccaaaaccaccgtaggcacctcccgcatcatcgtcgtcgtcatcacagtccacaaaggatgaagagggtttggtcccatcattaagctgagactgagaggggtcggggtcggcatggagggcgcagggaagtggggacacgtggggtctgggccttgcggtgggcctgtcgactgacagggagtcgaggcgggtggtgagatcgtccagtatgtcgcggatgctgtcgtcgtctccggcggactcatcgccggcggtagagagcttgcagaggcggcggcggccggccagcttgaccttggcgggttcgggctcttgaggaggcggcggcggagggggtttagggttagggttagggttagggtttgggttttgggaggggccccgttggtgcgtgcgggtgaggcggaggaggcgatcgttgaggccgttgggtgtcggagcggcgagcggcgtcggcgcaggaggggtggggtcgtcgtccaggtcgccgcagatgtcgaagggcggaggggacgccat

SEQ ID NO: 22271 - DNA, 664 bp, Oryza sativa
  Clone ID: TF_LIB4309-030-R1-K1-F3
cttcgtttgctgcggcgacctggacgacgaccccacccctcctgcgccgacgccgctcgccgctccgacacccaacggcctcaacgatcgcctcctccgcctcacccgcacgcaccaacggggcccctcccaaaacccaaaccctaaccctaaccctaaccctaaaccccctccgccgccgcctcctcaagagcccgaactgctagtgtaagctggccggccgccgccgcctctgcaagctctctaccgccggcgatgagtccgccggagacgacgacagcatccgcgacatactggacgatctcaccacccgcctcgactccctgtcagtcgacaggcccaccgcaaggcccagaccccacgtgtccccacttccctgcgccctccatgccgaccccgacccctctcagtctcagcttaatgatgggaccaaaccctcttcatcagtggaacacccatacaaaataacttgaaggaaatgtgggctctgttttatttctgttgcccagaagtcttgggtgataaggagcagttcaaagcaaggtatgagcacgctatcattcaaggaaatgacaagaatgctaccaatcgacaaaagcacataggctcaaatgtagcaaaggaattaagagaacggataaagccatactttttgcgacgcatg

SEQ ID NO: 22272 - DNA, 1934 bp, Oryza sativa
  Clone ID: TF_OsC55194_1
atgcagtgcgacggcggcgcctacatgcggtgtgccgacgcccaccgttgtaaatccgctccaattgactctaccaacccacccgtgctctctcctgccgtgctcgtcgacagcaatcagaactcggaagccgaccgggaagtcgccgcgccgccatcgtgctcgccgccggtcgccgtctcggaggaggtaaagatcccgccgccgccctccctcccctccgcgtggtcggcgccgtgctccactaccccggccggcgcagatgatattgtgcacttcttctctccatatggaacagtagttgaccatcagatcactcagaaggatgaaaataaactttctgaaggatcaggcttctggtgtgccaagacaaggcatgattctctagcgcaggtgctaaaggaaggtggtgttctgcttattacgtatgatctggtgaggttgtataatgaagaactaaacggcatgagcagtaaaagctcaaagatgagaagagcttgtccttcatgggactatgtgattcttgatgagggtcacgtgctgaagaacccaaatacgaaaaatgctgctgcgctgaaaagcttatctcgtgggcaaacagttgtcctcacaggaacaccggagttccgcaaaatggtgcgaccttattttcttaggcgcaccaaggaaagtattgaaagccttttacctaataaagctgatcttgtcatctggctgaagctaacgccatatcaggtttgtattgctgtagaagctggcgatgatgtagaatttgtgccagtagaaattgggggcaccacccgccagtctcgcgctggcgcgctgccgcgtgcggggagagggaaaaaaatcggcgactcgcccagtcctccaccaccctcgccgaacgcctgcacttcagcctcggaccccgactccgctcgcctctgcctcggcccccgcctccgcgggttcgcgtcgtccttcgcctgccacttccccgcacaagcccgatcgcagctcttctcccgcatgggctccgccacgtctttcgttccggcgtcgtcaccgcgccgccggccgaggacgaggacttcgccacagctgctgacctccagttcgagccgccgctcaaggtagtgaagtaccccgacccaatcctacgggctcgcaacaagcgcatcaataccttcgatgacaacctccgcagcctcactgatgagatgttcgacgttatgtacaagactgatggaattggtctctctgcaccacaagttggggtgaatgtacagcttatggtatttaatccagctggtgtgaagggagaaggagaggagattgtccttgtcaacccggttgtatacaaaatgtcgaagagattgttagtgtatgaggaaggctgcttatcattccctgggatatatgccaatgtggtgagaccagacaatgtcaaaattgatgctcaggatgttacaggggcaaagattaaagttaaattgtcaggtctgtctgcaagagttttccaacatgaatttgatcatttacaggggattcttttctttgacaggatgtctcttgatgttcttgagagcgtgcgtgagggactgaaggacctagagaagaaatatgaggaaagtacagggctagtaagccctgaaagtattgagaactacaaaggaagaaaggatctcattagtttctcaagatgaatagctttcggttctggcagtttttcaaaacatcctgctgagcttcacattgaagattgtgtattagaacagttgccagtatcacatattcttctgtcattctactttttgccagtcttgctgtatctagttttgtgcaacaccagtgatattacaaccagaaattatgctagtgatgaatgagctgtatttcctaagaaggaatatgtgaacaatattagtgtttgcaaaaaaatgattttttag

SEQ ID NO: 22273 - DNA, 4299 bp, Oryza sativa; identical to SEQ ID NO: 12932
  Clone ID: TF_OsC112724_1

SEQ ID NO: 22274 - DNA, 2039 bp, Oryza sativa
  Clone ID: TF_OsC73310_1
tgaagatctccccttggagggaaccccgcccaagaatggcgggtctcggcggcggatggggcggcgggtacgacgacgacgacgactgggggctgagcgcggagcagctcgaccagctcgagcgggacgcctaccgcaagctcgccgagcgcaaggcctcctcctccgccgcctccaccgccacctcgccgctcccctccgcggcctactcgccggtcaagaacagccaccaccacccggcatccagggtttcccaggagtcttgcttcggcaaggtagaatcactttctccttctcggcttagtcaaccaaatgcatcgggaaatgcagttaataatagtcagggcaatatgtctaaggtatcagtacatcttttccttcattctactggtgtgatcgcagcgaagttccagtaccaccagaaacttgtgaatatacccaaggaagacatcatggtcaggttgccacgaactggaggattaaataaagccggacactgattggtataatcaaataataaaggggtttgtaatctggatggggtagtcaatgtgatatcataagatgttgtgctggttaaacaggaactaactccttctttatattccggagatcttctagatttggatggcaagattccaactgatgttgagtcaaagcttatgccgtttcagcgtgaaggtgtcaggtttgctttacagcatggtgccaggaccctgatagcagatgaaatgggtcttggcaagacattacaggcaattgctgttgcttcttgccttcatgatgcctggccagttcttgtaatctctccatcatccttgcgattacattgggcttctgtggtgctaccacaaactggaggatcaaataaagcaggatacagattggtatattcaaatactaaaggggattttaatctggatggggtgttcaatgtgatatcttatgatgttgttcccaagataaaggacatgcttctggacttggattttaagattgttatagctgatgaatcacactttctgaagaatgcccaagcaaagagaacaatgcattcacttcctgttctgcagaaagctaaatatgtggttttgctaagtggcacccctgcgttatctcgccctatcgagctgtttactcagctccaggcattgtatccaactgtatacaagaatgttaatgagtatggtaatagatattgcaaaggtggcttttttgggctttatcaaggtgctagcaatcatgaggagcttcataatttgatgaaagcaactgtcatgatccgcaggttgaagaaagatgtcctttcacagttgcctgttaaacgcagacaacagttggagactgtgaagatcaaaatccagtcctgtgactcccaggagacgatggactctctcaaatttgctcaaaagaatcttattaacaagatctacaatgattcagctgaagccaaaattccagcagtgctagattacctgggtactataattgaggccgagtgcaaatttttaatatttgcacatcatcaatccatgcttgaagctattcaccaacatctcttgaaaaagaaagttaagtgcataagaattgatggtcaaacacctgtacctgtaagacagactctagtcacagatttccagaataaggatgacatcaaggcagcagtgttatccataaaagctggaggtgttgggttaactttgacagcagcaagtacagtaatctttgctgagttatcatggactccaggtgaccttattcaagccgaagaccgtgcccatcgtattggtcaggtttcttcggtgaacatatattaccttcttgcaaatgacactgtggatgacattatatgggacgttgttcaaggcaaacttgagaatttgggacagatgctggatgggcaggagaaaacgctggatgtgtcccagagcgacactaggcccagcccttccaagcagaagacgctcgacgcctacctcaagcgatgcagcaattccacagaagctgatcagcccaagctcaagaaccctaggttctga

SEQ ID NO: 22275 - DNA, 3663 bp, Oryza sativa
  Clone ID: TF_OsC5164_1
ttcggtttttaggaattaggcacgaggtttttagaaagggtagaggcctttcatgttaagaagagccactatatacaaaatgttcagaccagaatggagatatatccacaaaatcgaatgggcacatagtttcacacccattccatccccattcacaggtccgaacccttaaaacattggatcatttcccctaaaatgctagcaagtctccagggaacaaaatatgaactgtacaacatcctgcaaactcatgatcaagacttctcatgtaaacagcatcttcagttgctcgatacgagcggagcggacttcatcgtcggtcagcgccccagagatcatcctctgcttgcacgcttgcaccttctgcatccgctcctcgaccgtatccttgacgatgaagcgccttacttggaccgctctcttttgcccgatacggtgaattcgcatgatagcttgttcttccactgcaggattccaccatgggtccattaggaacacattggaggcagcagtcaaattaagtccaacacctccagccttgagtgacataagtagcaccagcttgtccttgctttcactgaactccttcagaaccttttctctgtgtttctggctgagcttcccatcaaacctcaagaatttgatccctttctgattgaagggaacctcaagaagatcgaagaaggaagtgaactgactgaacacaatgctcttctccctcttctcctgaaggccctccaggatcttgatgagttttatcaccttacatgagtccttccagttattctcagggtcaacctggaatcgacactgactaggcaatgtgatcagctcagatttggtaatggggcttcggcaaagtgggcatggtcctccagaaggcgtcctccagctagagagcaggcactcacggcacatccggtgcgcgcatggtgtgagcactggatcatcagaagctgattcaaggcagattggacactcagtagttgcgccctggcggatttcttcaacaacctcttctacatacgcctgtgaaggtggcgcactgcgtctcgcggaatcacgttgcaccccatcaaggaacctctgtgctagctcatcgaggtcagtatacttctgagtatcagctcgactgatcactagaaaagggtggtcgcagcactgccttagccgaaggagtaactcaagaatattagcgtagttgttaagaacactgccttgtgctacaaatttatcaaattgaacctttgatctcctgaaaagcgcttcatagaaatcgcgttcatcttcagattgttcgcactccacaatctcaatattagctggtgggaggactagtatgggatttcccattttgtcttttgtttccttcgttctcctcagcatgagtggcctcagaatagctctgacaagtttcaatcccctctcatcaccattctcataaggtctttgaatcagcttattccaccaacttgcgtcaccccatggttctacatgtaggaagcaaagaagactgaaaaggtcctccaaattattctgcaatggtgtacccgtaaggcaccatctgcaatgagaagttaattcataagctgctcgtgctgctttggttctgggagatttgatcgtatgtgcttcatcgagcacaactctataccaatctatcctgtgaaagatactgctgccatcattcttgtgagctgattgaagaacaccataggttgtcaagacaacactatgctgagccatgaatctcaggtcagtggttctgtcgccaccatagtagacaaacacagaaagagctcctggtgttgaatgtgcctccaattcatccttccactggcctagcaatgccattggacagattataagtgtgcctcctcttacagaggatctcgaagtttgtgccttggtgtcacgatctctagtacccctcttatcttgttctaactccccccttgggtttgatagtattagagcaatagtcatgacagttttaccaagacccattgcatccgctagtatccctcctcttgctgactgagttacactttgaaactgggttgttgcctcgccagtgaaaacattgacatacactgcaggagctctcttgtcgacgattttgtaggcactccaacagggatgaagggtttttttggcttgatcaccatcaatacccttctccaattgagacatccagaacagagcttccttctggtatggttttagaacggagacaagagtgcttgggggctctgcttcctccaagtcatatgtttcagcagtgccaacaattttgtttaatgcagcctctgaaatagcttgctcatcagtgccttgctcaggaaatgtttggccagctgtgcgtcggttttccaatccaactatagccatgggttcatcttcatcattgtcatcaccccttagattccgcggtctctttcctgcagcaagctcctcaggagtgatatcagccttggtgaatgcccttagcttgagcaatctgaacagcctgtaaagagggttagtggaataatcaacatttgcaggagcaagcaggtcccatgatgagttgttgccgcttgcggtgaatacagaacggtggatgtagaagctaacatacaacaaaatctcctgcatcaatctcaattccaccgtgggaaacacaatcttcccctgaatcttcaccttggatgagcttaccagtggcacgaggcacttggtccattctgtagatagcttcccaatctctccagctcgattggtggagaagcgcacgatctccgccaaagcagccgccttcttgttcgacaccttgatcccaccataggtcctctccaatgaggggaacgagaaatggacgagctcgccggcgtccagcctccgcctcccgcggttggtggacaggccggtgacgtacgacctgccgacgaggaaccagtcgcgctcctcggggaactcgccgaactcggcatcaggcggcgccaccaccatcctcagatcactcgacggcggaggcggcctggcacgcacacgccgcgactcgagcatctccatggcctccggtggcggcaccgcccggatcggcctcgggttcaggtacggcaccgggtgggtcgccgtgaggtcgatggtgtccgcctcgtcgtgcacgcgagacctcttcttcggcctcggcaccaggcttatgccggcggcgttcgccgtcgccgcgcctcgcttggccgcgacgccgtcttcctccttgacccgatccggcatcggaggcggcgctttgacgagcagctcgtcctcccgctccttcttgaccctcgcggagcagccgttcgattcttggctccccaggggctcgtcgtcgaggacctcaaccttcaccggaggcggcggcggcttcggggcggcgccaccagcgtcgcgttccgccttcaccggaggagcagccgtcttggcacctttacccttcttgggctcgggtttgtcctcgacgccggcggtggcgtcatcgaggagcgcgttgatggcgcgctcggcgttgcctccgcagcgggagattgcggcgacgacgcgggcctcggggaggcccgcgccaagaaccgcgcggacggcggcgatctcgtcggcgtagagcacctcctgggacggcgactccggccagtcgccgtgcat

SEQ ID NO: 22276 - DNA, 599 bp, Oryza sativa
  unsure (1)..(599): unsure at all n locations
  Clone ID: TF_LIB4309-023-R1-K1-C11
gtctatttgaaataccctgtgcacatcgtattgtcatcagtggaacacccatacaaaataacttgaaggaaatgtgggctctgttttatttctgttgcccagaagtcttgggtgataaggagcagttcaaagcaaggtatgagcacgctatcattcaaggaaatgacaagaatgctaccaatcgacaaaagcacataggctcatttgtatcaaaggaattaagagaacggataaagccatactttttgcgacgcatgaagaatgaagtgtttcttgatagcggcacgggagaagataaaaagcttgctaagaagaatgagctaattatctggctgaaattaacatcttgccagaggcaattatatgaagcttttcttaacagtgaactagttcattcatcaatgcaagggtcacccttggccgcaatcacgatattgaagaaaatatgtgatcatccgctgttgttgactaagaaagctgctganggtgttttggaaggcatggatgcgatgttaaataatcaagaaatgggaatggttgagaaaatggccatgaaccttgcagatatggctcatgatgatgatgacgttgaaatgcaa

SEQ ID NO: 22277 - DNA, 1948 bp, Oryza sativa
  Clone ID: TF_OsC86959_1
atatgttacacagaacaacattatatgagatttacagatacaccaccagatggatctcttgataaaacagggagcaatggcagaattctcctacaagctggggtcaaatattcaacacaggctagcgactaagcctactacatttcgtctagcaaatcagagcatgacaaaactggagctgctgcgagccatggaaggacacaaatccgcagtacctcgcaccaaaatactcagcagcggtacacagctgttggagttgcatctaggcaaagatcacaggctactatacaatgtcattgtatcgcaaagatcacgggtgcttccaatcaaaacctaaatagatacttcagatcatccacggtgagccgagtcgcgtggccacccgatttgtcttcgccaaaagcagagctaaccatggctctcttttcctcctgcagagctaaaatgcgatcttccaccgtatctttaatggttaaacgggagacagtaacaggacgagtctgaccaattctgtgtgctctatcaattgcctggtcctcagcataaggattccaccaaagatcaaggagaattacatggcaagcagcaaccatattgagaccaagattacctgctttcagtgacatgatcataaccctgacctctgggtctgtgttaaaatctttcactgctttatctcttgaattgagggacattgttccatctagtctcctgtactgtatgagattgctattcaatgaaagctccagcaaatccagcatgccagtccactgggagaacacaatggctttcactggggccactcggctaggatttgattcgacggtatcactgtcggtaagggcataggtgttaatgatcgaattcagtatatcgattgccgcctgtatctttgaggatatgtaactagtttgactaatagaagatgactcgtcatctaatgatgaactccctgatgcatgagaactggatacaccagacatgcaaatccttaacgctcctgacgaaaatactgaatcggtacttaatgtgtttccacaattaggggagggacacatattctcatcagtagttatccgctcgtatatacattgatagcagaagacatggccacacatcgtcacgacggcatcctcaggtacatcactgcatacagaacaaaactctccaacttccagctttgcaagcaaatttattatcatttctttaggaagttgctttgccatttctatagaaccatcgcctttatactctgactgatgccccttcacaagaagaggatgatcgcaggcctgcctaaggcgcaacagcattagaagaatgttggcatagttctgtttgagtgtaccagcagcagcgtatgccttgaactgttgccgcgagcgttcttccagcgtcaaatagaaagctcgctcctcttttgtaaaatctactttatccagattaattgtctttggaggtagctttatgattggctcaccatcaatcagagtttcttttgtgcggcgcaggagaactatcctcaacacagtctgaagtttcttatacccatgaactgcatttctagcaatcgggtgctttatcattgtacaaaatgaattataagtagaatatggatcgtatttcaagaaatggaaatagctgtagagctcatcaattgcattttgtataggtgttcctgataagcaccatcttctttttgcacgtaatccacaacaggctttagccacttgagttcgaaagttctttattgtctgagcttcatcaaggacaaccctaaaccatcgcactcttgcaactgcgccactggcaaggtaaatgtctgaatccttaagtttctttttctttttcttcgacttgctccgcgcgctgggtggttgttttctcttattaccagcagaagattcttcaccattcttctgcctcgtgccgaattcctgcagcccgg

SEQ ID NO: 22278 - DNA, 3382 bp, Oryza sativa
  Clone ID: TF_OsC1528_2344
atggccgctgccggcagggacccgccggcgacgccatcctccagaatgtattactgcaggcaaaggaaggcttcttctgaggtcaatgccaatgtgtttgtgcctgggggtcagaatggtatttcatttcctgcatcaaatagggctcatgattggggatatggcggtgttcgcgaagaatgggaagctagttatgctcgcaaactccagttgatcaattttctttcttcactgcatcaacgcactgcaaattctttgataaccactagaatggatgctaacatggacactcctttggagcaaaaacaaaaggacagctcagcaataatagttcttgattccgatgatgaggacgaagcagaaagatgtgaacagctcgcatctgagaacaataaacaacaggcaccatctggacccactagtccttgcacaacatggattgtatccagtgcgaaagaccaagtaaatggaaccttgcatgttgatggagtccaaagcactcaaattgttccatatggtcaaaatgcacctttaataaatcagtcccctttgcaaaccagctggcaaccatctatccaatatgaaagggttatattgcagagaagacctgaggagcaacgcgttcaagatcttgtggcagcaagccatgcagagaagatagcagaaacacaagttttccttactctgcctactcttcctaatgagagaaaacgaaggaaatcagaaccgaccaccctggtagatggagatggtggaactaacctagggaaaggaaaaaggaaaaatcatcaaaatcaagcagcagttgattcaatcttggatttgcaacaaactgttgttcctttgcaacaaaatgatgttccttcacaaagctacaggactatgatagaagaggagaaacctgtaaaagaaagtgatggtctcgaggatctttggaaagatttttcattggctgctgaatgtacaaagcttgatacaaatgaagacatgtccaatgaaaaagatgtggatgatgaaaacgagatggatgacgattgcaatcatgacattcggattcatgaagatctaggccatgtatgccgtatttgtggcatgattgttagaaaggctgaaacaataattgattatcagtggaaaaagaaaaacctgctatgggggatcttctctttactgaaatacttcctaaaatgggagagtgttttcattaccaactatattgatattgataccgctttggagtatatagcttcaaggacaagaacaaattactatgaatcacgttcaaaggatgctgatgatattgatactggtgctgttaaagtttctgaagatttcattgtctctgatattgccattcatccaagacatgcgaagcaaatgagaccacatcagttggaaggattcagcttcctggtcaagaatctagttggagacaaacctggaggttgtattctagctcatgctcctggttcagggaagacatttatgctcataagtttcattcaaagcttcttagcaaagtatccttctgcaaggcccctcgtagtgcttccgaaagggattttaggtacttggaagagggagtttcagcggtggcaagtggaggacataccactatatgatttctattctgttaaggctgataaaagaacagagcaactggaagtcctcaaatcttgggaagcccggatgagcatactatttcttggatacaagcagttctcacgaatcatctgtggtgatggagatggaaacattgcagctgcgtgccgggacaggctgcttatggtccccaacctacttatactagacgagggtcatacaccaagaaatcgggaaacagatgtactggcatcactaaaaagagtccaaacaccacgcaaagtggtcctgtctggtacacttttccagaatcatgtttcggaagtgtttaacatcttggacctcgtgcgccctaagtttctcaagatggaatcatcccgtcctatcgctagacgtataatgagtcaggtagcaatatcaggtatcaggagtttaaaaggggttcatgacagtgcattcactgagtcagtagaagacaccctgctgaatgatgacaacttcactagaaagtctcatgttattagaagtcttagagaattaacaaaagatgtgcttcactattacaagggtgatatcttagatgaactacctggcctagtggattttagtgtgttcttgaaactcagtaccaagcagaaagaaattgttcacaagatagaagcctatgaaaagttcaaaagaagtgcggtggggactgcattgtacattcatccctgcctgtcagaaatttcagagggtgatgctgcagatagggcgaccaacttgacagatgccactgttgacagcttgattgagtctatcatcattaaagatggggtgaaagccaagtttttctttaacattctgtctcttgctaactctgcaggagagaagttgcttgccttcagtcaatatatacttcccatgaaatttttggaaaggttgttggttaagaggctgggctggcatgtagggaaggagattttcatgatatctggtgatactagtgcagacgacagagaagtggcgatggatcagtttaacaactctgccgatgcaaaagttttgtttggttccatcaaggcctgtggagagggaatctcccttgttggtgcatcgagagtcatcattctagatgttcatttgaacccatctgtcacccgtcaagcaattggacgtgcattcaggcccggacagcagaagaaagtgtttgtgtacaggcttgttgctgctgattctccagaggtgaagttccatgaaactgcgttcaagaaagaagttataccaaagctatggtttgaatggagtgagctctgcactactgaagacttcaaactgaatcaagttgatattgatgactctgaagatgaactattggaggctaatgctattcgccaggatatcaaggctttgtatagaaggtaacaagctgtatgtggctgctgtataccatgtacataatgcaatgctgatctttctggatgatcattgctgtgaaggtgtggcagtagccccttctagtgccggcgttcccttcatgctaggatttttcgttaacctccgtcatttccctacctgttttgaaccactgtccgatttgtaacatgtgccagcttggtgcagcggttagcgtgctgatcctagtctcatttcttactgaaaatctccaggattaataactatggtttctgccgttcctgcttgcggcaacaacttaaataatgccactgtttcctgaaaaaaaaaaaaaaaaaaaaaaactcgagactagttcttccctgcagcccggggatccactagt

SEQ ID NO: 22279 - DNA, 4911 bp, Oryza sativa
  Clone ID: TF_OsC52680_1
ttaggctgaaggagtccgatcttttgcctcttctgtatcattatcgtcaggagatatgttattctcagctgcttctgccggattgtcaccatcagtcgttggttcctgttctggttccttgtcctcgttcaagttcttcatcagtctcttcgatcttttaggcctaggagctgcaatactatcttcatcctccacttcaccgccttcagcctctgcattcttgtccacactaccattatcctgcaactttggaagcttcttttgggagcttttcttctttttgcttgatgtgttatcatgttctgcagcccctgaagtttgatcatccaagtcttcaagcatcaaatctccttctttgtcaaccttgatgccctttgtacgcctcttttttagtcggtcctttgcctgcattgatatttcttttaatttgtgcgatatctgtgtgtcatcaataagtaatgaaacaacatcctcttgtctcatcagatgatcatcctggacatgttttcctttcatgaccaactcttgcactgcatttttctgctttgccctctgcaatatcttctcttctattgtatctttgcatataagtctatacaccgttacctcctttgtctgaccaagtctgtgtgttctatccattgcttgctggtcttgtgttgggttccaatcaatttcataaaaaataactgtatcagcagcagtcaaattaatacctaggcccccagctcttgtgcttagcaagaaaacaaatatatcgttccggttctggaagtcccggaccatgtcacgtcgatcagatattgccgatgacccatcaagtctgaaatacttgaattttctgaagttcatgtagtcctcaagaatgtctaacattttagtcatctgagcaaataagagcacacggtgattctcagctcggaggcgccgcagcagtatatctaaggtttggagcttcccagaatctgtaagcattttagctgggtcaaagttactcataggtggagatgacccaaatatcctatatggcagttgtagcatcggctcggggaatggcaaatcagtatgtaattcttctatcagagaatgagggctggttggttctctagggccattgaactcagaagttcgagcaaatcccagaaccagtttcttggccaatggatcatgcatctcatcagttaacttgtaggcaaaatttcggtctgcgcaccagacatttatcggtggtgctctagcaggtggaataaaagcatatgttgaacgaagaagtcttatgttagacacaagcctttcatggtgagaaagcactagtgcttcatatgggctatcactcgggcctgtctcaatctttgttcttaggaaactggactctgcttttgtaggtgaaagcaacaagcgaacaacagcacgaactgttgttaaatcattatgagtggactcaagatcagtactttctgagtcaaggaatacatccacaagttcatcggtgtacttcttgttccatcgcactgctgagaatgctagtctgttgaataatgagcaagtggccaggaaagaagcttcaactggggagagatttattaaacgtgtaaaaccgaatgcaccagataacagaacagtattatttggtgagatagcttctggaaaagctgattgatggatgtagcttggcgaaaatatattaaacatcctgttgaaagatccatatagaaatccacaaccacgcacaggcatttccatgttcgagacgattcctttgtagactaactttggaatctcaaacattattggattcctcttccctgcataatgcacatcttgcaattccccaaatgcaggagaaagaagtgagttcgggatgtcagcaaagtaaaagtaagagctcccctcattgcgctcaaacagctctggatgattgcagaccttccggagctgcatcacaatattcatcaggctaagtaatttcttatcatttagattgccacgacttccatcaagcaactcgttaagagatattttattctttatggcttgatagaagacttgctggcgagaactcaatctgcagggcacaatttcttctttctttttggtcatttctgcaatgacatcaatcttaactcgacggagcatgaagggctttaaaatagcatgcagtcgactaagctgatgttcattcagagcacctccatgttcggcatgaccctcaattccttttgagaaccactcattaaactgttcatggctgtcaaacaaagtaggcatgatgaaatgaagaagcgcccataactcagccatgttgttctgtataggtgttccagtgagaagcaagcgatttcgacagttaaaactcagtaatgtcttccatcgctggctgcttgaacttttaatagcctgggcctcatccaaaaccatgtattgccacttaacacgtctcaaaagcttctcttcattcacaagtatctcttcagcccaattattcacaacagatgcgggagccacaacaagaaagggaccccatatgtttttgtcctcagccaaatgtgctaagaatgccatagcctggacggttttgccaagacccatctcatcagcaagaataccatttaatccctgctcgtagcaattaaccaaccactgtaaaccttttaactgatattcttttagtgcacctttaaacaattctggtgtctgcacagacgacttctcaggcattgttgaggggtgtaatagatcaatcttgttaggctccatactagctaaatcatcagttggaataccagagtcagatgattgacgaagcctcccagtttcactatcaaacgcatttgtcatccttttctgttgggagacagcatgttgcgcagctctcaaggcctctctctttaattcagcttcctcaggatcttcctcatcctcttcagggacagatgcctcatctgatggtgctgattcaccagccttattctgcataaagtgactataaagctcagtttgggataggagaaagttgagcctctgttgctgtctttttgcttcacgtagctcctcttcacgcttcaaagcttcagccgcctccttttcttctcttttcctcaattcatactgctccttgtcaactcgcttccaaaatatcaacatatccctagccagcctccgtgtacgtatggcggcactcctcatcaatttcagtgacctgcttactttgaactttacctcccgttggcaattctcagaaaaacgcttagcatctacttgccgtttcttcagcaaagccatgaaattcctgtggtgcctaggaatgcctttaacagcaatagcatgccaaagtttaatagtcttttctgactcttctcttgcaatttcagaaggatcctttcttattatttgcttctttggcaaactacgctcgataatctcatatgtatctcctttttccaagactttaacgtaatgaacatgcaaactgccggattccgaaataataaatctccgtatcctcccagctgctccttctggaattgcgaagggatcctcagttacttgaagagaaaatttctgcacctttaccctttcctggagtgattcatattgtggctgaggttcagctaatccaccacgattggttgtctcaaatttttggtccgtactgagcattgccgctagagtgcgtaaatctagtgtgccattcaagaaagtttcctcgacacgtatgtcagaaaaaacaggtagattaagggatagtgccaacttatcatacccttctgggattttgtagcttacattatctcccatatctaaataggaagaatccagtgaagctacaaccttattgaaaccaccatatgcattagtagattttgtcccattatactcagctgtggcttctaccccacccaacattgcaacattccttgtatcacttctgtactttgtaactcttgcactaccatttttgtgtttctgaggaactatcacctgaggaggatcagaactaaaaacatcctccttaaactttgaccttctgtacttctgaacgtgttcactcagcattgtacggtagtgctcctcagttatttggttactgtaggcatctacctcatcatcatcgctagcaccatccagattccttttgcgcttccgatgtagcccatgggaagcatcattaattccattatactggtctgacaaggacccttgaccttggctactcatactcccatttgggctactacgcctatagcgatcaagatcttccggcaaggggaccttaaagttcagcaaaggctcgaggttgaagagggtggagtaggagagcccgccgccgttggcggcggcgcccccgcgcgacggagggctccttcagtctaactgaccaattaatcggataacaaacacagggtgctaaatggcaaggctagtgtgatctatcctgcccgatttatgacatgggcacgacagattgcatggttcattgtcaagaggaatagtcgttggatcttcctgaaggtgtcacacagttcaataagtgtttatgtgcacatctttttcggaagcctgggaactgggttagttgtatattcgattgtgttagaaggcatcagtgcagtggcatcggttgctgttaatcgtgacatgggcgaatcctctagctgttgctgcggatgttggaattgtggagacctgaccgctgatatctgtgatgctggctgtggccattatgtaaataatcatgaaaaatattgcatcacatatagaaataattttgccgtgtaaagagagtaggtgactatattaaccataagttttgtattgatagctgaaagagaacatagcaggaaagctgctgtgcttccaaattggaaacattttcgaccatttatgaacgtctatgctaatccctatgct

SEQ ID NO: 22280 - DNA, 2406 bp, Oryza sativa; identical to SEQ ID NO: 12901
  Clone ID: TF_OsC303753_1

SEQ ID NO: 22281 - DNA, 5878 bp, Oryza sativa
  Clone ID: TF_OsC10987_1
ccccctgaattcccgacgatgagatcgatgaagaggccgggaattcacctccagatttgaggggatcgatggtggaatctccttctccctttcccaccaccactaccacttctgctgctgctcctcctcctcctcgtcggcggcaaccaccacctcccgccgctagcctgccttcccccggctaacctcgccctcactcactccactactacttttcctcttccgccccgccccctacatcctagatccatccatgctcatgctcatggacccccccgcccgcagccgcaggtgcactctcctcacgcgggccctcctcctcgccgtcgccgccctcgccctccgcctcatctacgccgccttcctcgccggcatggcgctctacccgcccctccccgccgccgccgtccttggctccaagacctacctccactccgccgtcgccacccccgacgcctggcgcacccgcgactggcggaaggccgtcgactaccacgccaccctcctcgccccccacctcgccgacggcatcctctccccgacctcccgcgccgtctgcctcggcgccgtgcaggaggccctcgccatgcgcgagctcggcgtctccaccgccgtcgccgtcgccaggaagcgctcccccccgctcgccgtcgccgggaacgaccgccgcctccccttccaggactcctccgtcgacttcgtcttcgccgcccgcgccctcgactcctccaagcgcccggctgacctcgccgccgagtccgcgcggatcttgaagccagatggacatctcgtcgtcctcactaccagcgccgccgacgcattcagcctccgcgcgctccaggcactcctcccctctctccgcttgctccgatctcgccagatcaaaggccccgacgactccaccctgcgggagctcgtcttccagaagatccaggactccactgacgatcctgtaaacaagtgcacaattggggatcacaagctccaactcctcacacatgcggagccactcatccaagaggagccgcgcaagccatggatcacgctaaagcggaacatcaagaacataaagtatctcccaactctcgcagacatcagcttcaagcgcaactatgtgtatgttgatgttggcgcccgtagctatggctccagtatcggcagctggttccggaagcactaccccaagcagaaccatacattccaggtgtttgccattgaggccgacccggccttccactctgagtacgccgcaaagaaggctgtcacgttgcttccatatgctgcttgggtcaagaatgagaccctcaattttgagatcaatgctgatcccgggaaggaggatgaggccaaggctaatggccgcggcatgggccgcatccgccccatggctggcaagaagatgtccggtgaggtgcggagtgtcccggcattcgactttgccgagtggctcaagcgcacggtgtcggagcaggactatgtggtgatgaagatggatgtggaggggacagaattcgacttgatcccaaggctgtttgatacaggcgcaatctgcttgatcgatgagctgttcctcgagtgccattacaaccgatggcagaaatgctgccctgatagagctgaagcatttgagatggcaaaaggggtctcatgcttctactggagtattcagtttccaaatttcaaagaccacctctgtttcagaaactgcagcaatgctagtagtacaaggcacttcagttacaggtctcttttgatccgaacagaaaagccagttactactagaaaccatgcatatgcagaagtagttgtatttgtcttggatcagaatcctatgtttttcctattcctccgttttttctaccctgcgattcaaaggggccctaactgctggtcatctgctaactccacagtgatgaggcaagcatttgaggtgttttatgatggatcatggcatggggtaaattgtataaggataaggaacggcaacctgtttgttaaatttatctactctggatcaacagtcgagcataatgttgatggggattgtctacgcttacggtcgagaagggcgacttgttctgattgttcaaatgttctcaagccaggtgttgatgtctgtgtgcagtcatctcatacacccgaagcaagttcacaaggaggaacaaacgcttctgtgttactgcgtcatgatgcaaggcttatcacaatcaagaagaatcatcaagaagataagtgtctctgcttgtttgttgttatactctacaagaaccagtgtcctggcaatgcagaaaaagtgataactgatagaagagcagaggtagtaaccataaacgatattttcctcctgcaaaagcttcaacctgaggtccatgaaggaagcatgaaatggagtttttcaaaggatcgcctctctcttaataaaggcaggctaataagtgctagattctcctcagaaattacacatctgatagtcttgtcgatcttgaggggaatggaattcaacatcaaattggtagaaggccagatcgtttatcaaataatcaaaggagatcaagcacaatggaatcttgattccatggccatccctccaggcttcgggaatacaatggagataatatcattccaattgcgtgatgaggccttgcgcccaacaatcacaaatatccctatcactcatgtgaaaaagaacaatatcacagaagacatgagattcactgtgaagagtgaaatggatagtgaactggatagggcattagatgttgagatcttgtatgagcatgtggatctgaggcgttcaaagcgcttgaagactcagccagatcgctttacaagttacgatacacctaggttccttagtggctacaagaagaaagaagcaagttcatcacccaccaagcatgtaaggggagctgtgcattgtgattcaccggtagacgattccaaaaaagaagtagaatcatgctgtgtagagattccagggaatgttacacagaagcaaacaggtgtacactctcccatggtcgatgaaaagtcaaactctccagaaggacagcataagaacacaactaagagaactacatgctctcttgtgaaggaaaaagcaagctctccagaaggacagcatgagaaaacaacaaagagaactacatgcgctttgcctgtgaaggaaaaagcaagctctccagaaggacagcataagaacacaataaagagaactacgtgctctttgcctgtgaaggaagagccaagctcagtggaaatagaggagaaaagctcaaaagagcaaagtgcaccggagtttcacattccacggacacctgcacagaataaagagaagcataatcgtcctcctttctcatgtaagccgaagctatttacttcatcaggcacccttggtgttaactgtgaaccagcattctgccaaaaggtgggcgggaaaagaaagaggcacatgtgcgagagagaatacaaacaaatgattgaccaatgcataggaaacattgagagtgaaatggagagggactctatgtttaacttcgatgccaatatgatgaattacgttcagcattcttatcgagaagaggattttacatggccaccttctgctgataaccaagaggtggaggaggatgagcttgaagaactgtggaaagaaatggattattcactgacgacattagcacttcttgagcaaaagcaggtgatggctcaaagtaggataaacatgctggtggataattttgatgggttgaggctggattgtttaactttgacggatgattacagatgctattatcaaaaaaaagaaaagtttgcagagtcaggatcagttaatgagagcaccgattattttggaaaagttggaggaataccatgccatcatgaatgcatactggatgaggagcttggactagcatgcagattatgcaatgttgtatgcactgaggcaaaggatatatttccagaaatgttcaatggaaatgactacaaggacagacctggatgcagcaatatttgccttgatgatgatatacttgatccttctcttcttgcaaacttggcaccagagttgtcagaattgaagaactcagggagcgtgtggagtgcaatatctgatcttgatccaaagctgcttcctcaccagagaaaagcactagattttctgtggaaaaatttggcggggtcgatacaggttgaaggaatggataactcaaatgtcagtacaggtggctgtgtgatagcacacactcctggatctgggaaaacactgctgcttatctcatttctggtgagttacatgaaagctcacccaagaagccggccattggtccttactccaaaagctgcaattcatacatggaagagagaatttgagaaatggggcatttcacttcctttacatgtgttccaccatgctaacagaagtggcaagccgttgggggcaatggattctaaactgcggtcgttattaaataattttcacagaccaacctggacaaatatgcgccttatggattctttggacaaactattcaagtggcatgcacatccaagcgtcctcctcatgacatactcatctttcttagggatgacgaaacaagactcaaaagtgcgaaaccgataccgagaatttatcgcagaggtcctgatgaacaaccctggactcttgattcttgacgaggggcacaacccaagaagcaacaagtccaagttgaggaagctgctgatgaaggtgaagactgagttcagaatcctcttatctggcacggccttccagaacaactttgaagagtacttcaacaccctatgtttggccagacctcggtttatcggtgatatcatgagtgaactagtgccagagaggaaaagagaaacagttggcaggagagccaaacatcaagaagcagtggcacgccgcgcctttgtggagaaagtgggccagaagattgagtctgacaacaaacatatcagaagtgatggtatcagtttgctaaacaagcttactcgtggattcatagattcattcgagggagcgaagctgatcaaccttccagggatacatgtgtataccgtgttcatgaagcccacggacattcaggaggagatgctggcaaaggtaacaatgcccaagctcgggtcgtcccggttccctctagaggttgagctgctcatcacgattggctccatccatccttggctcataaaaacgacgaaggccgtcagcaccttcttcagtccagccgaagtgaagaaggttgagaggtacaagcgagacttcgcggcggggtgcaaggccaaatttgtgatcgatctgctgcacaagtcgtcgttcagaggggagagggtgctgatattctgccacaacgtgtccccgatcacgttcctggtgaagctgatagagatggtgtttgggtggcggctcggggaggaggtgctggtgcttcagggtgatcaggagctgcctgtccggtccgatgtgatggacaagttcaacggcgacagcgcggggaagaggaaggtgctgatcgcgtcgacaacggcatgcgcggaggggatcagcttgacaggcgcgtcgaggctggtgatgctggactcggagtggaaccactccaagacgaggcaggcgatcgcgcgggcgttccggcgtgggcaggagaggacggtgtacgtctacctcctggtggcatctgggacatgggaggaggagaagtacaacagcaacaggaggaaagcttggatgtccaaaatggtgttcctgggacgctatgttgatgattcctcgcaaaaccgtgtcactgacatcgatgatgaggtcttgaaggagcttgccgatgaagatcacaccggcaccttccatatgattgtcaagcaagactga

SEQ ID NO: 22282 - DNA, 3447 bp, Oryza sativa
  Clone ID: TF_OsC108092_1
ctacaagtaaataaatccactacaatgctccacttgccactgctggaattccctcttccatgtccctaagggccttgcagtggaatgtcttgtcatgaagccttgaatgaaactgataagcataaatatttcccctgaaccacattcatggcatacacgacccaaatcttcataaacatgaatatcgtggttgtaattgttcaactgttttttattattcacttccgatgtgtcgagctgtgtgctctccacagccacatagaaagcaccccaacgatccttaagacaatctgctgctggatctacctctcctttttgttttctctccctagggatggccatagtgctatcactgaaatgaaagtcctggtcagatttctgatgtttttcttccatcttctccatgttgccactggccaaaattattgtttctctttcttctgctttctccacggaacaattgcaaattcttcctagaacttctgtagtgttgtatccccatccacaaatcttgttttcaacagaaacttgttgcagccaattcttaagcgtatgcaccacctttcttcccttcccaaagtagtatagcagagcaaaaggcacagcagagcagagagaaggaagaggtaatggtcctgcgactgccaatagatggggaggggttgcagctgtcactgccagtaccactgcttcagttagccatggatggatacttggatacctccagcttttgcaagcttcttgcttatccttgatgctgcccttgcttgcaagcaaggcaatctgccccttttcgtcgtacaaaatacgaaagatacgtataagggtgatttttcccatccacgaggaaataccaaattttacactagaaaatggtacttcccgggtaccaatcaagaaccataagatttctctacatattgagagagaacatgttgtatttacagggacacagacgaaggagaacacatgaacaaagtggactaacatagtttcagaggcaatgcttaagtaccggtttttttcagaatcttggtcaccttggcctataacattaccgccagtatcatggacactgagtcctgagctggacacattattaaaacaaactgttgcttcactgactaaacccatgtcaatactttgatacaaagccttgatatcctgacgaataacatcagtctccaacaattcatctctggagccatcgatacagacttgattcagcttgaagtcttcagttgtgcagcgcccgctccattggaaccatagctttggtatgacttccttgttgaatgcagtttcatgggccttctcctctggagaatcagcagctacaagtctatacacaaacactttcttcttctgtccaggcctgaatgtgctcccgatggcttggcgcgtaacagacgggttcaggtgaacatctaggatgacaattcttgatgcacccacaagggagatgccctccccaaatgccttgatggaaccaaacagaacttttgcatcggcagagccgttgaactgatccattgccaattgtccatcttccatgctagtatcaccatttatcacaaaaatttccttccctacatgccagcccatctccttaaccagcagcctttccaaaaatttcatggggagtgtatactgactaaaagcaactaatttctctcctgcagagttggcaagcgcaaggatgttcagaaaaaacctggccttcaccccatctcccaggttgatgctgttgaccaaactatcaactctgtcatccctatcaacatcattagcttcagaaatttctgaaaggcaagggtgaacatagagtgcagcccctacagcgcttgttttgagcatcccatggtcttcttctaacttgcaaagaatgtctttctgcttgggactgagttccaagaacacactgaagtctagtaagacaggaaattcattcaagtcctcacccttacagtagtgaagcacatctttggttagttctccaagacttctgataacattaacttttcttgtgaagttatcatcattcagcagggtatcttccattgactcagagatctctgttatactcctggcacttgatatttctagttgacccatcatacgtgtaacaatgggccagaatgtctccgtcttgagaaaacctgggcgtacaagatccaaggtgttaaacacttccttgacatgattatggaagagtgtaccagacatgaccactttgcatggcgtttgcactttgcgcgcagattgtagcatatcagtctcatcaatgctaggtgtatggccctcatcaagtatcaacaagctggggaccataagaagcgtgtccctgcattcagctacagcattttcatccctatcatcgcagacaatttgggtgaaatgcttggatccaacaaagagtatgctcctcttagagctccaagattttaggacttccagttgctctactctattgtcagccttaatagaatcgaaatcatacagtggtatgtcctccacttgccactgctggaattctctcttccatgtacctaatatcccttcaggaagcacaacaaggggccttgcagtgaaatgtcttgccatgaagccttgaatgaaactgataagcataaatatttcccctgaacctggggcatgaacaagaatgcagcctccaggttcatcagtgaccaagttattaaccaggaatttgaatccttccaactgatgaggccggatattcttggcatgtcttggatgaatggcaatatctgaaaatatgaaatcttcagagagactaatagcatcagagcctaccttcttcaagcaaacctcattcacatttgttcttttccttgaagcctttttccactgatagtgaaataatgagtcagctttcctcacgaccaaaccacattcatggcatacatggcccagatcttcataaacatgaatatcgtggttgcaattgtccaactgttttttattattcacttctgatgtgtcgagatgtgtgctttccgcagtcacatagaaagcatcccaaagatccttaacataatctgctgctggatctagctcgccttttctttttctgtccctagggattgatttctgttgtttttctcccatcttctccgtgttgctaatggccggaattactgtttctctttcttctgctttctccacagaagaattgcaaattcttcctagaacttctgtagtgccaagagcacaacctcccccatctctctgccttgcaccattcctgcccctcccaggaaccaccacctcctgtgcttctttgcaccacaccggacaaagacaacaccacctttcacgaatcagatcgcaacgccttcgtttccttcccacgatgccactgctgtcgctgcctccgcctacgatgagggcaacagtgtctaaactgttgccagaaccagacat

SEQ ID NO: 22283 - DNA, 3743 bp, Oryza sativa
  Clone ID: TF_OsC3901_1
gcactgggagagctccagaattgggctcgagtttttttttttttattaggtaatagcaacattggtttttgtttgtttgatgtctccaaaagagagatcaagtacttaaaatggtagcttcgatgagatcacttctacgttgagttggatattccatagtacatctgattcctaatgcatagggtagccagggcggtcatcaaatccccgcagagaaaacatatagtattatttatcagtacactagcatactgaataagatctgggtgaagatgtaagtgcgccttgggtttctagacatcccatagagcggccctctcaatgcatttgcggagagccaccaagctttaatcagatcagcaggccacgtccgctcaacctcgcttacgccttcccgagcccacatagtcatccataagggactggcgtcgcctcttgaaagaattcgatggagtagtttcaccttctgaaacccttaacgcagatcgctttgtcggtgtcatgttcttagccatccttttgtccttccttgcctgcctttcttgctcatcatattcctgattctctttctcaactagacggataagggtatcacatctcctagccaactcctgggtggttctggacttgacaaaccaatcaaatcggaacaaaggcgacatgcggaaggcagctttcagttcatcccagtttccataaccaagcttatgcaccatgcaaagcataaaacggtcgcattcctcattatagaacttccctttgttctgtccatactggattttcaactctaaccatggattcttatagcggtctaacttcttcccgatggctctcataatttcatccttccgtgatatcctggcctctcccctttcaatattcttgataattctatcataatcactcagttccttgtatctctccttgaaaactttagcatatcgttgaacttcctcctctgtcttcccctccatttcagcggcaatactcctaatatcatttcgaccatacttctcacatgcacgaataaatgtgttgaagtctctcctcgtccatgttgcaaaaccctcttctaacaactgctctttctcttcctgctcctccgcagtcaaaggctccagctgatcttcatcttcaccatcaatagtatctttcttctggtttgcttgcataaggtaccggacttccttttcatacaattcattgagcctttggttgttgaagaactggaaatcatgtaggtgcggcattcttggaattcgtggttccctaggttttgcaggtgcaccttggcgaagtgcttgcttaaagtattcagactcagagtagtttctcttcctttctcttctaggtggctctatccagttatcactgaccagtttcttaaaatcaagcttgttttcctccttcaagaaatcaagaatgtaaatggaattaagtaaacttccaaacttatcatcatcaaaatcatacaattccgcagtgtcatccattttaaatttaatagcatcctctgtgaactttttcatttttgcatcaagctcagctgttgtttcctctcctttagctatgatacggtcaatatcctcatctgtaattgtgctgtccttggaactgaataccatttccgcaccaaatcttaccatttgcaacagatcatccttattgacagtcttctgctctgccagtcggccttgttgaatgaccaaagcatccaatgcaagcttcttgtatgccctctcaatcactttctcctcgatggtatactcagtgcaaaatcggaaaacttgaacttctttcttctgacctatcctatgtgcacggtcttgagcttgcagatcagcttgtggattccaatcactatcataaagaaccacaacatcagcagtagcaaggttgatgccaaggccaccagccctggttgaaagcaaaaaaacaaacttttcactgcctggtttgttgaaagcttcaatggatgcatcacgatcttctccaccagtatttccatctatccggcaatactgatagcctctgtacataagataatcttccaatatatccaaaagcctggtcatctgtgagaaaatgagcaccctagaatcacgatccttcagtttgggcagcaatttatctaacagaaccatttttccagcattctcaactagatgttcaccagttgtgtaaggtggaccaggttctgctccttggaataaatatggatggttgcagcacttgcgcaactgcatggctatgttaagcaatcttttgcgttcaccaccagcattaataacctccaaatctttctgaagcagggcacgatagtactgcttttgcatctgagacattccaaccttaaggatagtttcctttttggggggtaatcccttttcaacatcagatttaagccttcgaagaagaaatgggcgaagaaccttatgaagctgttgaacaacctcctgctgatcattttcaccagaaatttgaaaccattcatcaaatgtttcagcagagctaaatatttcaggcaacaagaagttgaggagagaccaaagctcatggagattattctggagtggtgtgcctgtgataaggagacgataattagtattataaatcctcattgtcttggacagaagagaattctcattttttatgcgatgtgcttcatcaataataatgtaacgccagctgaaacgcttcagtgtagttttttctttgattgccatttcaaaactagtgacacacacatcaaattttcctggctgcaataggttctcccttatatggttcctctcttctggattccctaagaatttcacagcacgtagaatagggcaaaaccgttgaatttcctttatccagttgccaagagtagactttggtgcaacaaccatgtgcggaccagttattcccctgaattcatgcagatagcccagcagcgaaatagtttgaagagttttcccaagacccatttcatcagccaatataccattgataccattctcgtacaaccgtatgagccaattaagcccagctagttggtagtctcgcatcttcccctttatacatgaaggctgtgaaagcaagcgtgttccccctgaaccagcaagggcatcttcctcttctttaaggtattcttcatcttcctcctcttctgtcatctttgaggcatggcgtccccttccacgcggtttcttctcttttgattggttccctttggcaaaatgtgcaaatatttcagtttgctgcagtaggtacttcaatcgtcctttccctttattgttcatgtcagcatcaactgcagcattctgtgtatccaatatttcttgtattttctgcttcttcaatttctgcatttccttgagcctggctttctcacgtttccctactactgcacctccttcagcctcatctgcgtcgtcgtcctcccccacgacggcctcgtcgtcctcagtggactgcgactcctcatcgccctccccgggggcggcggcggccgcaccgctttcctcctcttcctcgtcggcgccggcaccggtggtgacggcttcgatctcctcctcatccacctcctcctcttccccaccagccgcctcgccggccgccgccgcgggcgcctcctcctcctcctcatcctcctcctcgccagatccggacccggcgccgtccgactgctcctcctcctcctcgccggaggacgagacctcctcctcctcctcgtcgtacttcaccggcttcgccat

SEQ ID NO: 22284 - DNA, 3594 bp, Oryza sativa
  Clone ID: TF_OsC3901_3
gagctaaagctactgctagacaattgggatgtatctggggtttccccttgggtttcatgtcaacctccaaatgagctccctaaatgcatatggggggaggaacgaacaataatcagatcaccctcgccttctccttcccgagcctgcattggcttcagtgtaggactggcgcctcctcttcgaagagctttgtggaggggtatcgagcgaccttgatgaagaacgctttgctggcgacatattcttcttatctttcctggccaatctctcacgctcatcatattcttggttctccttctccactagacgaatgagggtctcgcacctcctagctagctcttgggttgttctagacttcacaaaccaatcaaatcggaacaagggcgacatgcgaaaggctgctttcagttcatcccagtttccgtatccgagtttgtgcaccatgcataacataaaacgatcacattcttcgttgtataacttccctttattctggccatactgaattttcaactctaaccaagggttcttatagcggtctagctttttcccaatagctttcataatctcatccttccggtatatccttgcttctcctttctcaatgttcttaataactcggtcataatcatttaattccttgtatctttcctggaaaactttagcgtaccgctgcacctcctcttctgttttcccctccatttcagaggatatgttctttatgtcattacgaccgtacttctcacaagcacggatgaatgtattgaagtccctccttgtccatgtcgaaaagccctcttccaatagctgctctttctcttcttgctcctccacagtcaacggttccagttgatcttcgtcatcaccctcaccaaccgtatcctttttctgatttgcttgcacaaggtatttgacttccttctcatataattcattgagtctctgagtgttgaagaactggaaatcatgcaagtgtggcattcgaggaattctcggttccctaggttttgctggtgcaccttggcgaagtgcttgcttgaaataatcagactcagagtagtttcgcttcctttctcttctgctggttggctctatccagttgtcagtgaccaacttcttaaaatcaagtttgttttcatccttatcatcatcaaaatcatacagttcagcagtgtcatccattttgaacttaatagcatcttctgtgaacttcttcatttttgcatcaagttgtgctgttgcttcttctcccttagcgatgatgcggtcaatatcttcatctgttattgtgctatccttggagctgaataccatttcagcaccaaatctgaccatctgcaatagctcatccttattgacagctttctgctctgccaatcgaccctgttgtatgaccaaagcatccagggcaagcttcttataagctctctcaatcaccttttcctcaattgtatactcagtgcagaaacgaaaaacttgaacttctttcttttgaccaattctatgtgcacgatcttgcgcttgcagatccacttgaggattccagtcactgtcataaagaataacaacatcagcagtagcaagatttatcccaagaccacctgccctagtcgaaagcaagaaaacaaatttttcactccctggcttgttgaaagcttcaatcgaagcatcacgatcttcaccaccagtattcccatcaattcggcaatattgataccccttgtacatcagataatcttccaagatgtccaagagcctagtcatctgtgagaaaataagtactctggaatcacgttcctttagcttgggaagtaatttatctaacagaaccatttttcctgcattctcaattagatggtctccagtggtatagggtggaccaggctcagcaccttggaataaatatggatggttgcagcacttccgcaattgcatggctatgttaagaaggcgtttgcgttcaccaccggcattgacaacctccagatctttctgaagcagagcacgataatattgtttttgcatctcagacattccaactttaagtatagtttccttttttggtggtaaacctttctcaacatcagatttaagcctccgaagcagaaatggacgaagaaccttatgaagctgctgaacaacttcatgttgatcattttcccctgagatttggaaccaatcatcaaaagtctcagcagagctaaatatttcaggcaacaagaagttgagaagagaccaaagttcatgaagattattctgtagtggagtgcccgtaatgaggagacgataattagtattgtaaatcctcatagtcttagagagaagggaattttcattttttatccggtgggcttcatcaataataatataacgccagctgaaacgcttcaatgcagttttttctttaattgccatttcaaaactagtaacacagacgtcaaacttccctgggactaacaaattttcccggatatggttcctttcttcggggtttcctaagaacttgatagcacgcagaacaggacaaaaccgttgtatttccttcatccagttcccaagagtggactttggtgcaacaaccatgtggggaccggttattcctctaaactcatgcaaatatccaagcagtgatatagtttgaagggtttttccaagacccatctcatcagccaatattccattgatgccattctcatacaagcgtatgagccaattaagtccagctagttggtaatctctcatctttccttttatgcatgatggttgtgaaaccagacgggtccctcctgcaccatcaagggcatcttcctcctccttgagatactcctcatcttcttcctcctctgtcatctttgatgcatgacgtccccttccacgtgatttcttctctgtcgattggtttcctttcgcaaaatgagcaaatatttcagtttgctgcaggagatacttcagacgtcccttccccttgttgttcatgtcagcatcaatggccttattttgggcatccagtatttcctggattttgtgcttcttcagcttttgcatctccctgagctttgctcgctcccgcttcccgatctctgcgtttccagtagcatcttccaacttgtcgccatcttcaccgccgccatccttcccggcggcgacctcgtcgtcctccgtggactgcgactcctcctccgcgcccccgtcatcgcccacttcttcgtcgtcgtcgtcccctccggcgccggtggtgaccgcctcgatctcctcctcatcaacctcctcctcttcctcttccccagccccctgctcctcctccacctcctcttcctcctcctcaccctccgcctctgcttcctcctccccgacactagactcctcctcttcctcctcctccacttgctccccatccgcctcaccctccacctcctgctcctcctcgtccccgctaaacccctcctcctcctccccctgctcctcctgctgctcctccccctcttcctcttctacctcctcctcctcctcctcgccggcggaagacgaaggggagagctgctcctcctccgagtcgtcgtcgtcgccgtcgccatacttccccggcttccccat

SEQ ID NO: 22285 - DNA, 2877 bp, Oryza sativa; identical to SEQ ID NO: 12904
  Clone ID: TF_OsC1528_2264

SEQ ID NO: 22286 - DNA, 167 bp, Oryza sativa
  unsure (1)..(167): unsure at all n locations
  Clone ID: TF_LIB4506-028-R1-K1-C10
ccacgcgtccgggagtagtcgacactacacaagctttgagaacaagtaaggacacagagaactaattgcgttaacgtggactctccattgcagaataatttgatggaatattactgtatggttgattttgttagggaaggttatcttggaagtngccctgngttccg

SEQ ID NO: 22287 - DNA, 403 bp, Oryza sativa
  Clone ID: TF_LIB3431-031-P1-K1-H7
tcggagccctcttgtcttgttaagcaagaggggggctggtctgttcaaaaaggcggcggagctggctctgcttttcttcttttatatgtagcttctggtaatgtcatttcactgttaactctacaagttcttttcctccagcatggaacgctccattgatcggtattaggatcatctatggagccaggaaagttcctaacaattttatgtcattcagcaacaatgatgaaaattcctttttatactgcaggcttaaggacattacgggttagtatctgcagaacactttttactacgtcgtgtgctcttcagttaaataaactcattaaacttgtgccaattgctgtgtggtaaacgtcatccaggaatatgtggctttaacataatggtgaacggagttcga

SEQ ID NO: 22288 - DNA, 487 bp, Oryza sativa
  Clone ID: TF_jC-osflLIB3477P006e01b1
cccacgcgtccgcccacgcgtccgctctttcgcttcgcgagattggttgattcatctcgcgattgatcgagctcgagcggcggtgaggtgaggtggaggaggaggaggaggaggagatcgggatggggagagggagggtggagctgctgaggctcgtcaacaagatcacctggcgggcgccgttcgcagaatgcggtgattgggctgctcaagaaggcgtaccagctctgcgcgctctgcgacgccgaggtcgccctcatcatctcttacaaccgcggtcagctctacgagtcctgtagcggtcaaagcatgaccagaactttggagagacacccgaaagcccgttatggtgggccagattctgctatacacaacaaggaaaatgaatcagtgcaaagcagccgcaatgagtacctcacactgaaagctcaggtggttatttacataggaccctacggaatcttcttggcgaagatcctgagacact

SEQ ID NO: 22289 - DNA, 542 bp, Oryza sativa
  Clone ID: TF_OsC39886_2
atggctcgcaagaagatgaagcttctgcggatcgtcattgatgtgaagcggcgggtgacatttaggaagcatctgaagggcttgatgaagaaggttagtgagttcgcaacactgttcctcatggtgtacggtgaggttgaggtgcaagcaacgaaggtttggccgtcggtgtgggaggcgaccagagttctcgagcacttcaaggccatgccgcagctgggcagatacaagaagatgatagacctagagggcatcctcaacaagcagatcgacaagctcaaggagaagttgcacaagctgggacgcgaagctgatgaaagcgagaccaagctactcctcattgaagccatcaatggccgccacccaagcctcgatggtctcaccatcgagcagattatcagcctcggaaggatggcaaattcacgcctcaagattgtcaacgaccgcctcaagaagctccgtgccccctcctccttcgccagcgtgttgccctgcccgccgccgccgccgccgccccgccgcccagcgtcgccgccgccgcc

SEQ ID NO: 22290 - DNA, 2658 bp, Oryza sativa
  Clone ID: TF_OsC1664_1
atggagtgggcgccggtggccgaccacaagatgaggaagaaggtgtggggcacctgtggacaagctggtgcgggaccccatacgcacaacacatttgcacgctctactacctatacatagcaaaagatgggcgtctggttagttgatcaatcgagagagcgaagatgggccgacggaaaaggcaggtcaaggagatagggaaccccagaaaccgacaagtgaccttcgccgagcgaagagatggcctgctgctataaggacgttcgagctctccggcctctcgagccgcagagatggctcttttggatcagtcgccggaaggctaccaaaatgagagcgaaggagataaaactgcgcaaggacaaggaagcgttacgagaaaggcgaaaaccaaacgaacggaaggagtccgtccggccccacctcccgccgccgcgagccgtctcgaaccggtggcgttcgacagtggcctccaccggacctgtcgaacaatcggcgtgctgggtgaagagttggatggaggtcctatagaagccctgcgtaacctggaggtcgagctggagcgacggctcataagcatacatggaaatgaagacaatgttgcatgacgaggaggacttcaaagttgcggtgaagaggtggaaatttgtccagaaccgtgaggtcaaggccaaaaactcgagcaaacacatggccatgtttgatgaggtgaatgtccgtggcgagaatgttcaccgtcacgctttctggacatttgcgaacgtgaacgtggcctttaaaaattacatacctatggtctgtgttgatagaactctcatgagaggcaagtatggagaaacaattctagcggcgctccatttctacgtggaaagccaggaattaagctttatctttgcgttggtgaaaagagataatgcttggcatgcgctgacaccaaaccatcctaaaaacagaccccgctgtatattttacttacccgtattgtcgtccatggatgcgaaatgctagacgcatatgcacccacccattcagcaccaccaggcagaaacccttcgatcggcagactccactacccatctaaatctaaatcgagagatctcaagtgtacaaaggcagagagcagctaggttgttgacgtttgcacggttggtcgagccttcacgtgcaaggtccgaacgaatccacattgacgcggcgcttatgagtgctcttgtcgatagatggaggcctgagacccacactttccacctcacagttggagagatggtgcccactctgcaggatgtgtcttatttgttggggctgccgatagctgggccagcagttggcccaacaatggtgaatgctggatgggcggatgaccttctggccagttttggtggtgtgctgcctgttgcactggaggatctcacagatgggcacgggcctacgaaaagttggttgaatcagtttcgacaggatgtcttccctgatgaccaggaggagtggatcgtgcagcggcacttagtcgcttacctgttgtggttgtttggatgggtgatgttcacgggaactcacgctgactccgtggacaagcacttcatccactttgcggagcagattgcagagttacctatcgcggagattccacagtacagttgggggtcggcggtacttgcggcgacatatgccggactgtgtgatgcttgcgtgaggaacagcaagcaaagttcactccctggatgcccgttgctacttatgttgtgggcgcacgagcgcttcgacattgggaggcctcagcttgactcgtacgcaaactacggtttgcgagagatgtacaggtctggtgttgatgacatcgacgatcgtcccactatgggatccttgtggacacaccgtgagccgcagtgggttagcgggacgacacgtcgtgtctacactcagtttgtagctgactttgatcagcttacgcctgaccgtgttcggtggactccctacactcagcacgatgtcaatgatcgtgcaccgcacggtctcgcggatctttgcacgcgagatatgcaactctggaggacgacttgtcacctcgtgctggacgtgcacgtcgagccacacaatgtccacagggttctcaaacagttgggcatgtatcaggacttccctccgagagatggtcgtcctttggcagatagtcttcataggtacttcagaaaggggctcgggctttcctacgagctagttattgtgaccacggttcagccgacggtacaagagtgggagcacgcagctgataacttggcacttcagacacctccagacgatgggagttattatggagcttaccttcgttggtaccgcagtgttacacgatggaggtgttttcctccacaaagagatagcaccgtcccccaccaggcagcgattactgacacgtttgcccctcagcctagatcagcttacaagtcaatggcggaatttgttgagcacgttcacgtggagtccgacaccctgctgcaaagactagaggcgagacctccagtcgtcaggtctgacgacgtggcgagtgtccttcgcaacttccgtgcacgtgctgccgcactactacgtcgtgtctcctgtcggagcgcggcagatgtggtgcagacgtcgggccgacggctgtcgcgcccagaaatttag

SEQ ID NO: 22291 - DNA, 1424 bp, Oryza sativa
  Clone ID: TF_OsC76961_1
atcttttcttggttcgacccagctcccagatgatttcatcctgaatcatcgtcgtcgtcgtcgtcgtcacaggcaagaagaggagaaggaattacacctgggattatcgattggttgttcggattttcttttggatctattcatgctcgctctgtgcgccggggattcgatcgttgggcagggcagtgatctctgcgtcgagggtttcgacgaattggactgcagattcgtcgccatctcttcgcagaggggattctgcctccgccatggggagggtcaagctcaagataaagaagctggagaacagcagcggccgacatgtcacgtactcgaaacggaggtccgggatcctcaagaaagccaaggagctctccattttgtgcgacatccctctcatcctgctgatgttttcacccaacgacaagcccacgatttgcgttggcgatcacagcagcatagaggatgtcataacaaagtatgcacagcaaactcctcaggaaagggctaaaaggaagttggagagcttagaagccctaaagaagacattcaagaaactagatcatgatgtcaatattcaggactttttaggctcagggggtcagactgttgagatgctgattaagtcaattgtttggcaggaattatcgagccatcttggtgctttgcaatgtcaaatggcagatgtcgaaaagcgcctcagttattggagcgatcccgagaaggttgagaatattgaccatataagagcgatggagcaatctctcaaagaatctctgaatcgcatccggattcataaggagaactttgcaaagcagcatctgatgagcctacagtgtgcagctgctcagttccagaacgacatgaagctcccactaggactaacaggtgacccgaacacttcatcgtggttccatggcggcggcggcgcagaggcgcagcagccaatgatgctacctgaagaccccagcttgctccatcagagagacatcgggtgctcagcgagcacgtcgttgcagagctacccgggctacttcagcatgggcaagcagtccaccgacaacgccggcggcggcgagcagcaccaccacgcggcggtgcagcagcagccggagttcagccaggccgactgcctgacgtcgctgcagctcggcgcgcagttcccgtacccgtcggcgttcgacaacgccgggctgctcagcgaccggctgttcgacaacgcggcggcggcggcggcggcgatggacttcggcggccactacgacctgccgaggcccggcgacgaggccagcttccagaactgggcgtcggcggcctgcggcgccaccatgtatgatcatcagcagcagcagcagcaacagcagcagcctgcccaaattatgactgaatctctgacccccatcagctccctgcagcagcaactgtag

SEQ ID NO: 22292 - DNA, 1487 bp, Oryza sativa
  Clone ID: TF_OsC12322_1
gataaataactcgatcttactggataatatcttattacatgctagtacgtaacattatcttacattgtgcatggtgtattatatggatcatataacattaattgtggcacacccagcccatcatgatcaaagaaaaaaaattccaaactaaaaatccttagcttcaattcctggcacactagtaacatgacaacactatatattccataaatttctagtacaaaagcatctaattaaccaacgttaaccggagcaatgtcctcagctgcgtataacccgttgccatcgttagccggcgcttgcgagcagcccgccgtcgccatatcctccaccggcggctgctggtcatggatgccgggcatcaatagcggtgatgacgccaacatcgggcccatcgtatcctcgtcgtcgagagggaacggcgtgggcgggattagcgcgttgaggaactccgccgacgtgtacgcctgccagtcgtcactctggttctgctggtccacatggcacatccccatctccgggaccactgtctgatccacacatgcatcttgtctcatcgtgtcgtacaccgcttgatctctaaaagacatcatggaatctgaagttccggcgaatatcgacgccaccgacgaggttgtcggcggcatcccctcagagacccacgaggccacctcatcgcttccaaacccattatcagtgatgtccccgtgctgatgctgctgcggtagatacagatgctgcatggcagatgttgacgccgtcacgtcgaacgagcccatgctgcacagcaaatacctcttcctctcctcgacgcggctgaggatgccggcgatgaacttctcgctggcctcgacgtcctccatggatgcagacctggccgggtccggctcaaacatcctcaatgttggagttaaccggcgccttactgctcctggatcagcaagagcaccgagattaagaacaaacacgaggaagagtgctaggttcaggttaaaatctcgttgtgaaacttttccgtcgaagaagtttacgtaccctcctctgtcactttctgggagattgatgtaccttgtgagcacgtcctcgatcctgcggcggccggagaagtggctgaggcggccggagggggagaacatgaggagggcgatgtcgatgtcgcagaggacggacagctcgtaggccttcttgatcagcccgtttcgccgcttggagaacgtcacctgcctgttcgggatgttctcgatcctcttgatctgcagcttcacccgtcccatggccgccgccggcgattcagctcgatctacagctatgttccggccgtcgtccgtcgatcgatcggcgaggcgaggcgatgggggaggatatggttttgtacggtttatgtagcgtggctggcaaatcgatgtagcgagtgaaaggcgaggaggttttgtcgggttggggggccactcgcgatcggctggctggagtggacggaccgcgtccat

SEQ ID NO: 22293 - DNA, 482 bp, Oryza sativa
  Clone ID: TF_uC-osflM202089a01b1
gtgtctgaatcgccggcggcggccatgggacgggtgaagctgcagatcaagaggatcgagaacatcccgaacaggcaggtgacgttctccaagcggcgaaacgggctgatcaagaaggcctacgagctgtccgtcctctgcgacatcgacatcgccctcctcatgttctccccctccggccggctcagccacttctccggacgacgcaggatcgaggacgtgctcacaaggtacatcaatctcccagaaagtgacagaggaggaactatccaaaacagagagtatttgatcaacatgctcacccagctcaaatgcgagagcgacgtcaccgaggatctcactaacacgagcagtaaggcgccggttaactccaacattgaggagcttcagcatgagatcaggagatgccagcaccagatgcagctcacagaggagcaattgaggatgtttgagccggacaccgccaggtctgcatccatgga

SEQ ID NO: 22294 - DNA, 1293 bp, Oryza sativa
  Clone ID: TF_OsC1638_1
aactagtggatccccgggctgcacgccgcctcctcctcccccacttctccccaccaccacaccaccacacacacgcacgcacgcacgcacgcctccgttttcccccaccgacgagaggcggagagggaggggagctagggtttttcggggcggggatggcgcggagggggagagtgcagctgaggcggatcgaggacaaggcgagccggcaggtgcggttctccaagaggagggcggggctgttcaagaaggcgttcgagctcgccctgctctgcgacgtggaggtggcgctcctcgtcttctcccccgtcggcaagctctacgagtactcctcctccagcattgaaggtacctatgatcgctatcagcaattcgctggagccaggagagacctgaacgaaggaagtacaagcatcaacagtgatgaaaatgcaagtatacactccaggcttagggacataacggcctggtctctccaaaacaatgctgacgagtcggatgctaatcagctagagaaactggagaaactgctgacaaatgctttgagggatacgaaatcaaagaagatgttggcaaaacaaaatggtgaagggagtaggagcagagcaaactccagtggctctagggggcaggaggaaggaagtgcatgagcaggaagcacaggtgtcctgtgcataagtttggcagtgcatgcacctcccaaattaaaaagctaataaaaaaaagagaaaatggtgcatgctctgtttgctgccagtttctcccactgattgatcccaggtagagaaaagagttgccatggcctctggctctgcttgttagatcaagggggggagatggaataaaaggatggggaagtattcaggttcttgtaatgaagacctatgctgtggtgttttagcaatgtttgatatgtgtgctacctgtgtttgactggttgtgttgcttgatgtgtcatctgaccatgatactgaaagcctgataattgcactgacttgtgtatggagtttgtttcaacctattggtatgaatctgtttgattctgtaggaactgtggtttgctgtttgccagatctgattattacgcagtgatacaatctgtccttattatgtctagggacccttatgtctatgtgtgttgtttattcgaatctggcagtgaacaatctgacgaggaactgaaaataactgatagatggttacgttgctgtatctgtaagtgtgagtgagtggatgcttatacaatcttatttttaaataattataagttgtgcctgcgtcgggagtattcat

SEQ ID NO: 22295 - DNA, 828 bp, Oryza sativa; identical to SEQ ID NO: 12958
  Clone ID: TF_OsC330374_1

SEQ ID NO: 22296 - DNA, 439 bp, Oryza sativa
  Clone ID: TF_uC-osflcyp126b06b1
aattttgagtcgtggtaaagaagacggatggacggggggatgggcatgggcggggagcgatggacacgacgcgacccatcctggtttcccgaaacgcgctacgctgccgagcatctagggtttcccacccgctggagatcgatcgggatggggaggggtcgggtggagctgaagaggatcgagaacaagatcaaccggcaggtgacgttcgccaagcgcaggaatggcctgctcaagaaggcgtacgagctctccgtcctctgcgacgccgaggtcgccctcatcatcttctccaaccgcggcaagctctacgagttctgcagcacccagagcatgactaaaacgcttgagaagtatcagaaatgcagttacgcaggacccgaaacagctgtccaaaatagagaaagtgagcaattgaaagctagccgcaatgaatacc

SEQ ID NO: 22297 - DNA, 1173 bp, Oryza sativa
  Clone ID: TF_OsC49770_1
gatgtgaactttatgaccagataatttattcatcagttctgctgtctacacaatgccgacatgcgtgtgcgttgccacgtgtcctcaagcttgctagacttttgacgccgcgattatatgggattaattggtagcgatcgtcggcggccagggataaggatggggagggtgaagctgccgatcaagaggatcgagaacacgacgaacaggcaggtgacgttctcgaagcggcggaacgggctgatcaagaaggcgtacgagctgtccgtgctctgcgacatcgacgtcgccctcctcatgttctccccctccggccgcctcagccacttctccggccgccgcggggtggaggacgtgattctccggtacatgaacctctcggagcacgacaggggagaagccatccagaatcgggaggagattcagcaagagatatattcttcccagcaacagctgcaaatcaccgaggaccgccttaggatgttcgagccagatcctgcggcgttcggcacatccagcgaggtcgacggatgcgagaagtatctcatggaattgctgacccgagtcgtcgaaaggaagaacaacttgttgagcagtcacatggcgccgttcgatgcaacgacagctgcgatgcagggtgcagatgggacgcagatgtacgtgagccaggcggacgggttggccacgttcggtggtgacgctgccatgtggggcccagatggaggcgcggatcctggccatccgatgttcagtgcatctgatccgttgatctacctcagggaccacgacgtgtacgacgccaactcacaggtggccgggctgcacggcggcgacccgtgcgcggccggcggcgccgcggcggcggcggccgcggtggggtgcgtcgacgacgacgtcgccggaggccacgccgccgccgccgacgcgtggaggcaggcgtacacctgcaccgagttgctctccacgctcatccccaccacgccgttccccctcatgccgcattgcctggggccggaggaccagtacctgtcgatggagcatggcatggtggcggcggcgcaggagccggtggaggcgtcgacggcgagctgctcctacgttcccagcgacgagaactccggcacgccggtcatggcgtacgacagcaacccgccgccggcgaacatcgcctga

SEQ ID NO: 22298 - DNA, 828 bp, Oryza sativa
  unsure (1)..(828): unsure at all n locations
  Clone ID: TF_OsC39886_1
actcctatgggcgattgggatcctcgaggccggccgggacatcaatctaaccatctctcctcaatctacaggtgcattcttgctagaaagtagtgaactgcgtaggccatggctcgcaagaaggtgaagcttcaggggatcgtcattgatgtgaagcagcgggtgacattcatgaagagtctcaagggcttgacgaagaaggttagtgagttcgcaacactattcctcatggtgtacggtgaggttgaggtgcaagcaacgaaggtttggccgtcggtgtgggaggcgaccagagttctcgagcacttcaaggccatgccgcatctggtcagatacaagaagatgacagacctagaggacatcctcaacgagcaggtcaacaagctcaaagagcagttgcacaaggtgggacgtgatgctgatgaaagcgagaccaagctactcctcattgaagccatcaatggccaccgcccgagcctcgagggtctcaccatcgagcaaattaccagcctcggatggatggcaaatgcacacctcaagattgtcaacgaccgcctcaagaagctccgtgaggaaggcctcatacctgcatccgtgtcattgtcgagcacggaagtaccaatccagagggagggattgctggtggatgttgcaaggggcattggctcaatggggtacaatcggttcggaggtagcagtggaagcggcactgctggatccaatggtgacatggcttagcctttcacagtngtacaggattctcacaggccaaatcagaattttcatttgccaccccagtatgcgagactcattatcacttgattgcct

SEQ ID NO: 22299 - DNA, 1754 bp, Oryza sativa
  Clone ID: TF_OsC8260_1
atggcggcggcggctgcaggcatgggcggcggaggaggggtgcagcatcaggagacgacgacgacagtggtgcaggtagcggcggaggcgagtcggaagaaggtggaggtgagatctgcagggcggcgcgggcggcgggagatgcggcggatcgaggacgcgacgagcaggcaggtgacgttctcgaagcgccggagtgggctgctgaagaaggcgttcgagctgaagaaaaaaatccccaaatcgaatcgatcggaatttgcttctccgttgaggcgaggcgaggggcgaagggggaacgaagtggaaggagatttggattgattggttggacgccggcggcgcagatccccaattcgatctcctcctcttcgatcttcatcctaccctgcctgccagtgccagtataagattcttatgagctggtcggctgtggttttccctcaattctggtgctactaagatgggtcaggagctcaccacaaacaagcctctcacaaccctcttaccaacggatgaaatagcaaccgcctaccatttctccctcctcctctcacctgtcgtctccttttgggactgcatcttccgcaagataagatactcattcagacctgagtgggtgtagcatcctgcactgcctgtttctttttagcgctagccagtgctttgctttctggcctggatcactccaaacaatgaactttgaagcttttgctttcccgtaattacaattacagtcactagtggagtttagctgaaaatagtacatagttgtcatggaaaaggccgcggccaatcaggcgggcaaagtcttgaagaaaggtaagaagaaacaagccaaggatgaattagatcgccagaagcaggctgagaagaagagacggcggctggagaaagcgcttgcaaactccgctgccattatatctgagctggaaaagaagaagcagaagaagagggaagaacagcaaaggctggatgaggaaggtgctgcgatagctgaagcagttgctcttcatgtcctcattggtgaggactccgatgaaccctgccatttgatgctaaacaagcacagaagatgcaaccattgggatcactcagctggttttgatttcgccgtggatgcacaaggcgctgatatttatcctcctgatggactgatacagtgcgctgatcatgtttatgctcccaaagggaggtgtattgattgggggattggccagccattgccatcttggggagaggtgaaggacttgcagttgcaggcaccgtgctaccaaggaatgttccaccagtcagttgcatgcccaggtttcatagcagctcaagcggtctcctccttgcaaatcggaggagattcgtcagatattacctctccaagccaaggagcgactgtcgttaataggatgcttggtgccaccaacaggctcaacctttacagagagatataaaaacatacacttcacgatattattattgtatatagtcatcaaacttgtgttgactactttgcctgcagtatatctcataaccaaagaagaattggatagaacaccttgtttactgtttctgtgagtctaaaaggatatcttatatcagtcaaattggtattgtaatgaacatattgttttgattccctgttgattttcttggaatgtatcctgtgtcgacttgatgttcaaaaaaaaaaaattgtgctttcttttacaactattactatatctaacttgagatgtcaaaaaaaaaaaaaaaaaaaa

SEQ ID NO: 22300 - DNA, 427 bp, Oryza sativa
  unsure (1)..(427): unsure at all n locations
  Clone ID: TF_OsC354917_1
atggccgtcgagcttggccctgagctccttggcgccctggcgaactctggcaactcggcctccccgacctcgcccacgtcgacgtcccaccagaaccgcccctcggccttcgcctgcaagatcttcgccgtgatgccgcgcatccgcgccttctccgccgcgacctccgccctggtctcccccaccgcctacctcagcatctcgaggtcgacgtccttgcctaacccgccgctgtggacgggtgcgggctcagcatcctccccggggacggggccgtaggagaggaggacggcgtcgacggatgggtcaccgaaggcgtaggcaaggttggtctcggagaagacgacgacggcgatgctcgcgccggcgagcagggcgagctccgacgccttcttgannnnnngccccgccgcttggtgaaggtgac

SEQ ID NO: 22301 - DNA, 307 bp, Oryza sativa
  Clone ID: TF_uC-osflcyp174g12b1
ttgtatctgaggccatttgtttggctgaacaggaggaaagatgcaccaacctgatcaatgggtcgtgggagagtagagctcaaaaagattgaaaatccgacaaaccgccaagttaccttctccaagaggaggatggggctgctcaagaaagcaaatgagctggccattctttgtgatgcacaaattggggcgattgtgttctgaagctctggggagatgttctagtgccccacgcccccttggaggattgcaaatatctttgatagatacctgaaagcccccagcacccgttttgaggagatggatg

SEQ ID NO: 22302 - DNA, 1815 bp, Oryza sativa; identical to SEQ ID NO: 12974
  Clone ID: TF_OsC341899_1

SEQ ID NO: 22303 - DNA, 234 bp, Oryza sativa; identical to SEQ ID NO: 12975
  Clone ID: TF_OsC392063_1

SEQ ID NO: 22304 - DNA, 781 bp, Oryza sativa
  Clone ID: TF_LIB4506-004-R1-K1-A10
ggtccggattccgcgtcgacccacgcgtccggccgtttctagctgtatatcgagctgagtcgccggcggcggtcatgggacgggtgaagctgcactatcatgaggatcgtgaacatgctgaacaggctggtgacgttttccatgcggcgaaacgggctggtcaagaaggcctacgagctgtccgtcctctgcgacatcgtcatgggcctcctgatgttctgcccctccgaccgactcagccacttctccggccgccgcaggatcgaggacgtgctgacaaggctcatcaactctcccaggaaagtgacatgaggaatgaactatgtcaaatacatgagagtctttagatcacacatgctcacccagctgaaatgctagagcgacacttaccgaggatctcactaacaccagcagtaaggcgccggttaactccaacattgaggagcttgaacaagagatcaggagatgccagcaccagatgcagcttacagaggagcaattgatgatgtttgagcctgacccggccaggtgtgcatccatggaggacgtgcaggccagtgataagttcatcgccggtatcctcagccgcgtccaggagatgaagaggtatttgctgtgcaacatgggctcgttcgacgtgactgcgtcaacatctgccatgcagcatctgtatctaccgcagcagcatcagcacggtgacatcactgatgatgggtttggaagcgatgaggtggcctcttgggtctctgaggggagccgcctacaacctcgtcggtggcgt

SEQ ID NO: 22305 - DNA, 375 bp, Oryza sativa
  Clone ID: TF_OsC345886_1
atggttcatccgcgcgggaggccgagcaaggggcggcaggcgatcgggatccgccgcatcgaggacaagcccggcggcacgtcaccttcaccaagaggcgggccgggctgttcaggaaggcctcggagctctccatcctcaccgccgctgctacgcgcccgcccccgtgtccacgactgcgagcccgaggcgttgaggcgggcggcggacgaggccaaggtggaggtggcgcggctgcgcgacgtcgcggggaggcggttctggtggtggtgggaggccaccaacgtcgaggcgctcggggaggcggagctgccggagttcgccagggcgcttgggagggtcagggccgccgtcgtgcgccgccacgcgctctga

SEQ ID NO: 22306 - DNA, 1353 bp, Oryza sativa
  Clone ID: TF_OsC91_2112
tcacgttgatggggaggggagggtttcggtggtgattgggtctgggggagcaatggctaaggtgcggtgcgagacgacgaagctattggtggcgtggcgcagcgaggggtggtcaggagtggcgcccaacagcggccggaggcggtagagttggtggcggcttgggttcatagtggagagggcggctagggggatggaatggaggagcagtgtggtggccgagcttgcctgcggggcggcgaagctggggatggcggtggattggcgcgacggcggcccattcttggcagaatcatccgtgacatacctcgctttgaggttgtaccggacatcccatataattttcttcttcgagctggttgggactggtgtcgccaggagaccattcccacggagcttcttgaggcgttcctctaccatcgagttgaggctagtaatctgcttgaccgtgaggcccacaaggctagggaggcagcagtcaaggctgttgaggaggaggagctttgtctcgagctcatcgttctcatgctttgccttatccaccttctcttggagattggcgatgcgctgcttgaggaagccctccaggttagtcgtgttctcgtattggtccttctgcggcaaggccctgaagcgctcgatcacacgccttgcctctggtaccgatggccacaccatcataggttgcgcctcgccttcagcatacatcacaacgcatgcatccacgccatatagcgtcgagagctcgcttgccttcttcattaggctcttttgccgcttcttgaacatcgcccgacgaattgtgtagttggcgagccgctgtaggttcaccttctgacgagctatggccagcacgattctccgttcatatccactgcctccaccgtcctcctcttcgccgcttgctgcctccatagtcctcctcagcacggcccactggccgccgtgccctccctgcgccgtcgcctccctcggcttcgcaagggtgagagccgacgctttcggtctttgccacgcctccagcaaccatccatcgtcgactccgtggtcgccggacctcgccgtatccactgttggcatcgcagcagtgaggagaagcccggcagccacctccgcgaagacgcaagccatcggagcaccgtcgtcaccgtgaagccgatttgttccatcttcagccgcgccgttcgtcgccgtccatcgccgccttcgttcaccgtcgccaccctcgggatcgcaggagcgaggtgaagaccgtccgcccctcggttgcgtggttcgctggtaactgccgttcccgtgcttgcgggcgtcgatcttgcgtggcagccatgtcatcgctgacatgagcgtcat

SEQ ID NO: 22307 - DNA, 1651 bp, Oryza sativa
  Clone ID: TF_OsC256615_1
ctataaatttccatcgatagtgtccaattcagcaagccagtcgatgtcagccaaaaactggtcatcaataggaggagaacacaatggttcagcagtagcaatgccatcatcgctgacatcagccaacaactccaaaaggaaactgtcgctgaaggttggggtatggactgcattgtcattctgaggttgctctacgggagtgcatgcttgcacttcagcgggtggctgatccccaaaacgcatttgccattgcgtcagcaggggaaccgccgatgattgattagtaagtggctgttgcaccaatggagcatgcattggaggaggtgccactgtgttctgcggcggtgatactggtggtaattgttgggatggcactaactctggagaaggaaacagtggtggccgtagcggaaatatctgagaccatggtgagcccggcactggaggcggaggtatcatcggaactcctgatgtccctccaggaagtaatggagtgaatggacggtgtgaggccaagaagcgagaacacgagggctgctgatgtgcccacgcacttgatccaccaatttgcagcttgctgccacgacgtaggggaggcagccgcttcttgaaatcttgctggagcggcaagagtacatctaaaagttcacgcatatcatcgtggctgagatcctctagcctggagaatagatgcttggccatacccatacctaagctctcttcttgggcctccttgaagcgctggattgattcttcagtcttcttgtccttctcttcttcttcattctctagctggaccagctcactttgcattgacgtaagcttggccttcagttgttcatcggcaaatggctctgcctcagatacaaaagcatcgacaacaggtttcaccgatggtgccccaaagaattgtgccttattgctgtcatgtaggcaaattgcgacgcttgcatcagtgagaagggagaggtcatttgcaagcttgaacagcccatcacgcctcttgctgagggtgaggctgcgatctctatcctcttcgatgtacctcacgcctttccttctacccctcctcaccatacttgacaggaaatgtgctccaatgattgaaaaagaagtttcaatccttggaaattgatgcctaaattctgtctcataaatgtcaggtggtacatccttcacattggcatggtgagctccattgtaagtaccagttacgaagttggtctcactgagattgtgttcaaatgtgctattgtattgagttttggcttcccttgcagaaagaagaacgtcgtgtggaacttcaagtgggattacggtgagcgagcgggaagccactcctgggaggcagtctgtgcatttaactggaatggtttttccttttggagttgctgaatgctgattgttgacttctagaaaggtaccaaattggcaaatttggctctccatctctccacagaattccctctccatattccagtgcactccaacagtctctccatatcccaacggctagttcgctctccatattctaacacactccaacagactctccatattccactctccatatcccaacggctagttcgctctccatattccaacacactccaacagactccatattacaacagctagttcccaacagcta

SEQ ID NO: 22308 - DNA, 301 bp, Oryza sativa
  Clone ID: TF_uC-osflM202096e01b1
atgattcttctcttcttcttcttccactagctagtaagctttactccttcagcttgcttgttgcatgtatggcatgggaagatctggactcgcatcgtacgtcgtttagcatcgagcggccaggatggggcggaggaaggtgcagctgaagcggatagagcacaacatgaacagggcggtgagcgagtccaagaggaggcacggctgtgataaaaactgccacgagatcgtcgctcgtgtgaagggcatggtggtcctgatgcgcctcgcggagacgggggagctctacgagctctccatt

SEQ ID NO: 22309 - DNA, 325 bp, Oryza sativa
  Clone ID: TF_uC-osflcyp139b07b1
ttgaataattcgcttcgcgagattggttgattcatctcgcgattgatcgagctcgagcggcggtgaggtgaggtggaggaggaggaggaggaggagatcgggatggggagagggagggaggagctgaagaggatcgagaacaagaacaacaggctggtgacgttcgagaagcggaggaatggtctgcacaagaaggcgaacgagttttacgtgctatgcgacgccgaagtctgcctaatcatctacagcaactagtggtaaagctatacgagattttagatacggccaaagcatggatccagtaactttggaaagattccaaaaa

SEQ ID NO: 22310 - DNA, 807 bp, Oryza sativa; identical to SEQ ID NO: 12943
  Clone ID: TF_OsC383105_1

SEQ ID NO: 22311 - DNA, 1045 bp, Oryza sativa
  Clone ID: TF_OsC136517_1
aatccgaagatgtaaacagttgatcagaagattgacacaatatcacttaaattgaagatgacggcatatatgttatttaacttacataatcttagtttttagcccaatgcttgaagtcaacttgatcatttaataagagttgtgactgcataaaactatttgacaacagcagaccatgcaaacagctttaacatgatctattattcatgaatgtcattattagccaacagcaggttgtataaggtccaaaacaaaagggaaagagatccagagaaattgtttcagtacagagagccaggaggattaacctgtagcattatcacagcaacatggcacggaccactccaagctgatcagaaactattgactgcatcactggaagccggtaagcaaaagggggttgattatagagcttgcctgtagggcttaggtcctcccaaccgtagctgccaccagggctcccttgagctgggatcctatcccatctctcctggattggattgttgcctccctgtgcgacggcgcccctgagcttatggagcgccctttcgaacaccggcagctccgcctccccgagcgcctcgacgttggcggcgtcccaccagaaccgccgcctccccgccgccatggcctccgtgatctttccctcgacgccgctctgccgcgcgtcctccgccgccacctccgccgcggcctcgtccgtcgcccgcttcagcgcgttcagcacctcggggttgtcgccgccgtcgtccgcgaagacgtcgccgccggcgtgggcgtgggaggtggaggtggaaggcccggccacgacgtggcggcggaggacggcgtcgacgctcggcgagccgaaggcgaagacgttgccggccttggagaaggagacgatggcgatggacgcgccggagagcgtggatatctcggacgccttcttgaagaggccccggcggcgcttggagaaggtgacctgccgtttctccttgccgtcgatgcagcacatctcgatcttctgcttccccttgctagtcccccctcgcggccgacccat

SEQ ID NO: 22312 - DNA, 468 bp, Oryza sativa
  Clone ID: TF_jC-osleLIB3474029f03b1
cggcacccgtgggcggtattgggaggaggatggggaggcgggggcgggaggagctgcggcggatcgaggaccgggtgcggcgcgggatctgcttccggaagaggctcgccgggctggagaagaaggtggaggagctcgccgtgctctgcgacgcccacgtcggcttcgtcgacctctcctgctccggcgacgacgccaacccccaccacttcgccgcgcccgccactattgaaaacattgtggaacgttatgagcactctcaagcagcacaaaaaggagtacatggcaggtgcattctgcaaaagaggaagagcaaggattttcaagttctcaaggaaacaatagataaaggaccaatcaatgatgacatgcgacctattgatgaaaaagacatatccacattaaacatggaccagattagccaaaatgaaatataattggaagatgaactgaggtggacaagggcaa

SEQ ID NO: 22313 - DNA, 1452 bp, Oryza sativa; identical to SEQ ID NO: 12945
  Clone ID: TF_OsC373794_1

SEQ ID NO: 22314 - DNA, 625 bp, Oryza sativa
  Clone ID: TF_OsC42645_1
atcccaaactcatctatagcctctagttgtagcagtagtcagatcgaagagaggtgttggatcgatcatggtggcgagtaggcggaagatggagagcgaggaggcacggaaggtgtgcttctccaagcgccgtgcggacctcttcaagatggcgagcgagctgtccgttcatttcaacgccgacgtggcggctgtcgtcttctcccccgccggcaacagggcctactccatcggcgacccgtcggtcatggaccgcttcctgtcgtcgttgccggcgccggcgccgccggcggagaccgagccagagccagaggtggattggtcggtgatggaggagctgagcaggctgtgtggccagctgcaggccatggtggacgcgcacaaggcgcgcctggagaaggcggaggagaagcttcgcgagagcggcgcggcggcgtggatgatggatctggaggcggaggtgggtcgcatggcgccggaggatgtgctggccctggtgactaagctggcggtgctgcgggacggcgtggcggagcgcgcccacgagatgctgcgcgaggcgctgctcgctgtcgctgccccgaccccgaccacccccaccaccccgccgcccgcgggcttctga

SEQ ID NO: 22315 - DNA, 446 bp, Oryza sativa
  Clone ID: TF_LIB4309-018-R1-K1-C9
cccacgctcccgaccatgtttgctttaatagtactacattttggaaggaaccgacgtaacgcacactggggttatgaacatatctatctagtctcttagattgattgacactatgtcagtggcgcactatataatttcatactcatttgctgcaatttatgttgtagtttgcttcctcctttcgtaaacagcgttatgctgcttttatcatgagactaagagaaccaaaaactacagctctgatatttgcatcgggtaaaatggcatggttcaacttcttgcaccgtgactgcaaatgttctgttttgttcatctgcttattgacttgtgaattggtttgctatctgtccaatggccagctgttgatcttgtagctattatcctgcatattgattcatgaactgcttttgctggtgtgcaactgcttttgctattagcatactatc

SEQ ID NO: 22316 - DNA, 726 bp, Oryza sativa; identical to SEQ ID NO: 12980
  Clone ID: TF_OsC714_2

SEQ ID NO: 22317 - DNA, 1197 bp, Oryza sativa
  Clone ID: TF_OsC714_1
gcgccgccaggcacgcctcctctctcgtcgagagcgcatagataaccctagcctcccccttcctcttcctctcctccttctctcgatctctataaaagacctcggatttcgaattcctccgccccgcgcgcgcgcgccacctcccccacgcccgtcgcgcccttttttttgggggtgggattcgcctggtcaagtgccatcgtcggatcatggcggcggaggcggcagcggcgctggaggggagcgagcccgtggacctggccaagcacccctccggcatcatccccacgctccaaaacatcgtatcgacggtcaatttggattgcaaattagacctcaaagctatagctttgcaagctcgcaatgcagaatataatccaaagcgttttgctgcggttatcatgagaataagagaaccaaaaactacagctctgatatttgcatcgggtaaaatggtctgtactggggcaaagagtgaacaacaatccaagcttgcagcaagaaagtacgctcgtattatccagaagcttggctttcctgctaaattcaaggatttcaagattcagaacattgttggctcttgtgatgttaaatttccaatcaggctggagggacttgcatattctcatggtgctttctcaagttatgagccagaactctttcctggtctgatatatcggatgaagcaaccaaagattgttcttctgatttttgtttcaggcaagattgttttgaccggagcaaaggtgagggatgagacgtataccgcctttgagaacatataccctgtgctaacggagttcagaaaagtccagcagtgaaaacttatggaatacacaagtacaagcttccttgagattttgctgcctagtgactgctaatcttaactgtacatatggtctggaggagcgtatagcatcttgtaatttatgtgagcccctcgatgcacgagtgttgtagacttgttgtagtaggcttgtagcttgggtgactgagagacttgagtatcgcgttcagtcgaacgaggtggagacgtggagttatcgtactttagcccgtgctgatttttttcccttcacaaatagatctgtagcgaaacattttattacagaaatgggcggctaacttttaacaaacagaacaaaaaaactgtggatgcgttgcgttttacagtagaatgtcatggactgtttggat

SEQ ID NO: 22318 - DNA, 520 bp, Oryza sativa
  Clone ID: TF_uC-osroM202023b12b1
tccgatttccgatctctatataaaagacctaggatttcgaaatttgtgggtccccctcccccttcgcgcgcgcgctctcttcccgccctttttttttccttcttcttcaccggtgggattgattcgtggggtgcggatctggtttttgggggtgtgtatggcggcggcggaggcggcggcggaggcggcggcggcgctggaggggagcgagcccgtggacctggtcaagcacccctccggcatcatccccacgctccaaaacatcgtgtcgacggtcaatttggattgcaaattagacctcaaagctatagctttgcaagcacgcaatgcagaatataatccaaagcgttttgctgcagttatcatgagaataagagaaccgaaaactacagctctgatatttgcatcgggtaaaatggtatgtactggggcaaagagcgaacaacaatcaaagcttgcagcaagaaagtatgctcgtattatccaaaagcttggctttgctgctaagttaaggacttca

SEQ ID NO: 22319 - DNA, 942 bp, Oryza sativa
  unsure (1)..(942): unsure at all n locations
  Clone ID: TF_OsC104933_1
cctaacccgcgatccnnctccgccgccgccaccaccaccacccacccggatccccacctccctccccgatctcaccacntccgtataaaggcggctcggtttgaaaaatctttgcctccggaggangngngggggatggctgccgcggcggtggatccgatggcgctggggctggggacgagcggaggaggaggaggaggcgagtcggcggtggggggtgatggggcggagccggtggatctcgtcgagcacccctccgggatcgtccccaccctccagaacattgtttcgacagtaaatctggactgcaggttggatctgaaaaaaatcgctctacaggctcgtaatgcagagtacaacccaaagcgttttgctgcagttatcatgaggataagggacccaaagacaacagccctgatatttgcttcgggaaagatggtttgcactggagcaaagagcgaagaccattcaaagcttgctgcgaggaagtatgcgcgaatcgtccaaaagcttggcttcccagcaaagttcaaggatttcaagatccagaacattgttggttcatgtgatgtcaaattcgcaaagagatttacgctccctttgagaacatgttcccggtgctcactgaatacaggaaaactcagcagcgctgagggaatgatttgtcgacagaatggggagttcgctcccgctgtacataccatcttaaggacctgccctggcccagattttgagacatgcacctggcgtcattcctttttctttcctttgttcttcgtagcagtagggtaggagagcaactgcgtaaaggagagtatgtaaacaagttgatcaaagtattcttttgataaactaatgctgacatgcaagaaatgcatcctgacttgagatcaaaaaaaaaaaaaaaaaaaaaaaaacctgcagcccgggggatccactagt

SEQ ID NO: 22320 - DNA, 511 bp, Oryza sativa
  unsure (1)..(511): unsure at all n locations
  Clone ID: TF_LIB3434-047-P1-K1-E1
gcaggttggatctgaaaaaaatcgctctacaggctcgtaatgcagagtacaacccaaagcgttttgctgcagttatcatgaggataagggacccaaagacaacagccctgatatttgcttcgggaaagatggtttgcactggagcaaagagcgaagaccattcaaagcttgctgcgaggaaggtaatagccaatagtcatattgtttcatcactatttatgcttaggaacgcttgttgtttacatcatgcagggagaaattgttcactgatcctattttcggcttttgctgaattgctctataacaatttttatctgattatttgttagcgcagtatgcgcgaatcgtccaaaagcttggcttcccagcaaagttcaaggatttcaagatccagaacattgttggttcatgtgatgtcaaatttcctattcgcctggagggccttgcttattctcatggcgcattctctagttatgagccagagctcttncctgggctgatttaccggatg

SEQ ID NO: 22321 - DNA, 1462 bp, Oryza sativa
  Clone ID: TF_OsC12862_1
ctactgcccggactcctcatcggactcgccgtcatcgcggtcatcctccccgtcctcctgctgctgttgatggtgttggtgatggtggtgcgggtgtggcagttgaccagtggcactggcgccgccgacctggtggtagaactggctgagcgaccgggcgaagagcacgccaatgtggccgtcctgtgagtgtcctagctctagccccggcatggccgccgccacgtgggcggcgaacatggtcgcgaacccgatgtggcaccggcgaacgccgcggcggcagcccacatgtggtggtggtggtggtgcaacctggagagggcgcagtttggggaagggagggagggtgcgacggatgtcagcgccgacacccgtccccatggcagtgacgattgccggctccgcctgctggagcagccactggacggtttcaccgtcggacttgtggccgagctcccgcgttagctgggggcccccggctgctctcttcgccggttttcgatgactaggatgccacgtcagcaaaaccatttttttttttttttttttttttaaaacaaatgagcagtgatatctctgaactttcgcttacacatagatagcaagcagtctagtagtggaccaatccggccttctgcacgcatacagtcactcacacgctactacgctatctttacatggagaacatatacatatattgcgacatagaagtgcatatgacatataattagtgtgcacatgtgtgcatgctgctgctgcatgcagcgctagattattcgttcgcagcaggtagcgaagttgtgtgatcagttttgtcaggcgtggtccggctcaccaggaagagcagcgagaacatcaggaggagcagcgaatacatggcggtctatgtcgtcaggtggactagcgaacacttggtccggatcatggtctacgtcatcatgggggctagagaacacgtagcggtggtccggatcatggtctacgtcatcagggggactagagagcacgtagtggccggcgcggagaggcctcggcagtctggccgccgccgtggtcttgcagccgtcgtagcactgcccgaagcaggcctccacggcgcccttgccgtccggaaggaggcggtggcaggagcccaaggcgcaggagagttggcactccatgtcgccggcgaggcgggacgacgacgacgacgagtacagcgtgggcttgtccggctggcacgtcttgtcgcaggcgtagctgcagtagtcgaccatgttgttctccctggccatgcagtccttgaagcagaagtcgtagcagtcggcgtccgcgccgccggcgaggaatgtcagcgccaccaccacggccaccgcgccgagtgcaacaactcgtcccgtcgtagtagccgccatcgatcgcttccaactccggacttccctgcggacgcgtgggcgtggttcggtaccggcaggtgcagcag

SEQ ID NO: 22322 - DNA, 816 bp, Oryza sativa
  Clone ID: TF_OsC420086_1
atgcggcagcggcgacacgggagaagaggagggaaggcggcggcaggagcacgaggtgctaaagcagcctccattaaaatcgagcagacgaagccgaggcggatttcgcaagagctagcgcaagcgtcggccatggaggaggtcgtcgtcggcaaggagcgcaagcgcccgcgctgcgcgctcgtcggcgtcggcggccacgacagcgacgtggcggatgagcccggtggcgtgcgggcgagaaggacaagcacagcaagactgtcggtgccaacgtccatcgcgttctacgacatccaggaccgcctcggcgtcaaccgaccaagcaagtccatcgagtggctcatctgcgccgctctcgtcgctcgactcctccttcgtcctccccaacgccgcccagctcctcacccgcggaggccgtcgagcgggcagccttcggaggaacaggcgcgcacgaggaaggctacggtggcggtgtcacctgggaagtcgggggagaagaggcggaagacgaggtcggggtgtgcagcgcggaaggcggagcgcatcgcgaagttgagagtgtggagggaggggtggatgccgaggcgcgaggcgagcacctcggcgacgtcgggcggccagagctggatcaggaagccgtcgacgccagggagcggcgactcgtgctcgtgctccgatgcgaagccggggaagcggcggtgggcggagaaggccggggaggtggtggcgcgggaagccgatggcgcggagcggggtggtggcggacgacgacgatgacgatgatggcagcccgcgcgcgcagctcctcccccg

SEQ ID NO: 22323 - DNA, 1671 bp, Oryza sativa
  Clone ID: TF_OsC45299_1
tccgtgcttttttccataccctagatcgagcgccgctttttttatttttttttgaaaggttcaaaattcagaacttattaattattacacaagccaatacatcaattacttctttgcatataaaaagaagtaacaaatccgtattgcacacaggcatatgcagcaaagccctgcatatttcattgccctatgtttcagagcaaaagaaattagcagccagctagctggcagtatcttccttcttaaatcttaacccacaagcttaattgttcccttgaaagaaattaatacatagatcaaagcaatgcacacacttgcactagctagcttagatttgttcttttggtagagctcatcgatccttaccttgtcgacgatcgaagagtgttgttccagtgtgtgtactgtgtagatggagcttgcttagcttcctgtctgatcatggaaagctctcgccgagctcagggacaagccctgcgagccaaggttgtctactgtgaactgctcggcctcggaggagtagaacaccagctgatgatgcggccctggagccaaggaaagcagtgaagggaacggcgaggtgtggtgagccgcggcggcggccacctgcggcgagccggcgccgctgtcttgcacgctgccattattccatgactcaccggcgtagtggaacggcatggcggcgccggcggcgctgttgaccatccccagcgggttgttcagccccatgaaccggtggtagccaccggcggggaacctccccactatgtgcgccgctccgccgccgcccccgccgtcgacgtcgtctccccctcctcctcctccgccgccggccgccgccgcctccttctccgcggccagcgcggccgccgccgccgcgacgtggtacttatcgtcgtcggcgtggtggtggtggccgtggtggtgcatcagcggcatggccgacggcaggtggtggtggtgtcccatgcagaggtggtcctgcggcgggaactgcagcggcggcagcttgtcgatctcgtggcgcgccgcgttgagcagccagtccaccaccttgctgggctggttgagccccagccggtcctgcaggtcgtacagctggatcgccgtcggcaccgacagccgcacccgccggtcgcgcagccccttcaccgtcttcaccttgctgtgccggtccttgccgccgaacacccgcgacacgcgcacgatccgcgactccgtctgcgccgaccattgccgcgacgtcgccaccgccgccgtgtgcttcctcgctagctccgccgcctcctcctccgccgcagctgccgcagccgcggcggcggccgcttggttgcttcctagtatcattcgtgctgttattgcttgtcatcttgagctgctcatgattagacaagcatgagcaagagggcgcttctccctcctctctctccccggagatatagatcacctcaattagcctcctgcaagcttggaattaatcaagccggccgattttcagctaggtgatgatgagcccaacagcctcgccgtcgccgtcgccgtcgccggccgggagagagggagcagcaagagggaattgaaccctagctctcagctagctgatggtgaggatcctcgtgccgggtccgcggcccgggggtccgctagtggagctcagagtgtgcctcgtgc

SEQ ID NO: 22324 - DNA, 1784 bp, Oryza sativa
  Clone ID: TF_OsC903_2
gagctgtggggttcccatggccactgtatcttttttccctctcataggatggcgagctgagctgagctgtgctgggctttactaaccccatgcgcgggcagaatttagcttcttgttttaattttcgctcttctcctttccggttaactgtgggtgagagggagctcaagctggaggaagacaagaaccagttgtccaagggcttagacccttggacgagcaaccctaccgccagcgcgagcaccttgcactacctgctccaggagaaggagagggcgcagcaagcgcatgagcagcttcagatctaccagcagcagcagggattcggcagcttcctgcaacaccggatcaggcagccggcgagccgggggccgggaggtggaggcggcggcggcgatggcggcggcagcagcggcgagtcgacgcccgtcgaagcgctggccactgcattcggggcaggccgcatcgtgcggtccgcggccgggcgcaaggaccggcacagcaaggtgtgcacggcgcgcgggctgcgggaccggcgcgtccgcctcgccgcgcacaccgccatccggttctacgacgtgcaggaccgcctcggctacgaccggcccagcaaggccgtcgactggctcatgcgcaacgccaaggccgccatcgacgagctccccgaccgcgccgaggccccgccgccgcccgccgcggcgtcgacggagcagcccgaggccaccgagcaggcgacctcgacgtcctacgggttcggcaacactaccggcggcaccatgaccagcgccgcgtcggccgctgctggctccttccttccacattcgctgggggcagatcgagtctccgacagcgtcaagtccctgttcccctcctcgtccacagccagcggcgccgcctccgccggacacgacgagtacaggggatccccgccggacctcctgtcgcgcacgacaagcaaccagcagccgcaggagctgtgcctcaccctacagtcgaaccagcaccagatcttcagccatgtctcgtcgaaccaccacggtatgatctcgagtgcaggcgttccaggttggcccgaccacagccagagaatgcaggcatggcatgccccggagaacagcacaggagacggccgcggcggcggcaatggcgacggctacatgttcgccatgccgtcgcggcaagggctggaccagagccagctcttctcgcatggggaaccccttcagtccagcggtcgcgggtgggcgtcagcccgcgcatggctagaccccctcgcagtcgcagccatccaccaccagccgtcgacaatggctgccggacaggtcggcttcggccatctcgttggcggcgccggtggcggcggcgggtttatggggtttctcgcgccggcggcgcagcggcttgagggcgaggaggagcacggaagtgaggtgatcaggtgatgagaagagactgaagaattgatgcatggcgcgcatgcaggaggtgtgtgctttctattaattaacacacttcactgatctgcttaagggtacgtgtatgtcatttcatgtaggattttggctgatgaaatttccctcattattatctgctgtcttcatgcatgtgtaaccaaggcttaattaattattaagagtacgttcccttggaactaggcagctgttgctgttgcattagttgctattgctgttttcccctttattctcggcatggacaagatgtgatgatgaagagatgatatggtctatgatcttgaaaaattaaaaaaaaaaaaaaaaaaaaaa

SEQ ID NO: 22325 - DNA, 1198 bp, Oryza sativa
  Clone ID: TF_OsC12862_2
ttagatgagatggtaaaggttctccctaacactacacttaactggcatctcctcacaacttctgttgatataccagtagtggctagagacctgaatatctacacaacgacctgcaataacaaataaagcactcactcgacagcgatgatccagtccatccagctctcggctattatacacctggtggtagaactggctgagcgactgcgcggcgagcacgccgatgtggccgtcctgcgagagccctagctctagccccggcatggccgccgccgccgccgcgtggctggcgaacatgggcgcgaacccgatgtggccaccgccgccgccacccccaccccccaacccccccgctcccccgccctggagctcgatcccggcggggatccccatccgctgcatgatcccgccgatcaccccggagtcggcgccggagaaccctgcaccggcgaacccggcggacgccgtgggcggcgctgccgcccacatgtggtggtggtggtggtgcgacctggagagggcggagttgggggaagggagggagggggcgacggaggcgagcgcggacgccgggatggtcccggtccccgtggcggcgacgatggccggctccgcctgctggagcagccactggacggtctcgccgtcggacttgtggccgagctcccgcgtgagctggaagatccgggcggcgcacagcgccggcatccggatccgccgcccccgcccgtccaccttggtgtggcggtccttgttcgagctccgcttcggccctagcccctgcatcctcctctcccccgccgccgccgcaaccaccacctgcatctgctgctgctgctgctgatccttccctccgcctccacctccatcctgctgctcctgctgctgaggatgaacttgaatctggaggcgatgctgctgctgctgctcatcgtggtgatgctgctggttggtggtggtggtggtgggctccgttttgtttagcggtgggggtggggggaatttggggtccattagctgcagtagtcgaccatgttgttctctctgaccatgcagtccttgaagcagccgtcgtagcagtgggcgtccgtgctgggcttgacatcctccaccgccactgtgaaggctttcttcgtccccccctccatcggccaaagtgtcccccagagaagccagggagctcttatgtcgagttgag

SEQ ID NO: 22326 - DNA, 177 bp, Oryza sativa
  unsure (1)..(177): unsure at all n locations
  Clone ID: TF_5003300
gggaaggaccgccacagcaaggtgtacacggccaagggcatccncgaccgncgcgtccgnntctccgtctccaccgccatccagttctacgacctcnaggatcgtntcgggtatgaccagccgagcaaggccatcgagtggctcattaaggccgccgcgncgncatcggcaagctcc

SEQ ID NO: 22327 - DNA, 969 bp, Oryza sativa
  Clone ID: TF_OsC12862_5
agaaaacaaatgagcagtgatatctctgaactttcgcttacacatagatagcaagcagtctagtagtggaccaatccggccttctgcacgcatacagtcactcacacgctactagcctctaaaaatgtatatgcatcatatttgcgttgcagaaacagcccgtgggtgaggatcagtttgacggacatcgtatttgtcgcacataagcggatcatcactctcgtaaaaaggaaaaaaagaagacctctctaactgcaaaaatacctgaatatctacacaacgacctgcaataacaaataaagcactcactcgacagcgatgatccagtccatccagctctcggctattatacacctgcaaaaatgaacacaaacacagatacataagctcatcaagcaacctttcgaagagcatgtcatgtgctgactgtggagtgaaaaagattgagctttcacctaaacacttggagggggataaaccggcgaccatccatggagcagcaggagtaacaacggcggcactagcgtcgccgacctggtggtagaactggctgagcgaccgggcggagagcacgccgatgtggccgtcctgtgagagtccggcgaacgccgcggacgcggcgggcggtgccgcggcggcagcccacatgtggtggtggtggtggtgcgacctggagagggcgcagtttggggaagggagggagggcccctgtatgtcagtgccgacacccgtccccatggcggtgacgattgccggctccacctgctggagcagccactggacggtctcgctgttggacttgtggtcgagctcccgcgttagctggaagatccaggcggcgcacaacgccggcatccgaatccgtcgtccccggccatccaccttggtgtgccggtccttgttcgagctccgcttcggccctagcccctgcatcctcctattccccgtcaccgccgccaccacctgcat

SEQ ID NO: 22328 - DNA, 1675 bp, Oryza sativa
  Clone ID: TF_OsC2035_1
acttctctctcccacacaagctgagcgcccaggtaggctgcctgctaggtctcgtgcatggccggacacatctgatcatagcccactacggcactattccccccttccgcctcgcacgctgagaggtggccggagagggagggaggccagcgagcagcagtagcagcagcaacgcggctaggagtaaggagtcccatcagtaaagcatgcttcctttcttcgattccccaagccccatggacataccgctttaccaacagcttcagctcacccctccctctccaaagcccgaccaccaccaccaccaccattccaccttcttctactaccaccaccacccaccttcctccccttccttcccctccttcccctcccccgccgccgccacgatcgcctcgccgtcgccggccatgcaccccttcatggacttggagttggagccgcatgggcagcagctggcggcggcggaggaggacggggcaggcgggcaaggcgtcgacgccggggtgcccttcggcgtcgacggagcggcggcggccgcggcggcgaggaaggaccggcacagcaagataagcaccgccggcgggatgagggaccggcggatgcggctgtccctcgacgtcgcccgcaagttcttcgcgctccaggacatgctcggcttcgacaaggccagcaagacggtgcaatggctcctcaacatgtccaaggccgccatccgggagatcatgagcgacgacgcctcctccgtctgcgaggaggacggctccagcagcctctccgtcgacggcaagcagcagcagcacagcaacccggcggatcggggcggcggcgccggggaccacaagggcgccgctcacggccacagcgacgggaagaagccggccaagccgagaagggcagcggccaacccgaagccaccgcggcggctggccaatgcgcaccccgtccccgacaaggagtcgcgcgccaaggcgagggagcgggcgcgggagcggaccaaggagaagaaccggatgcggtgggtcaccctcgcctcggcaatcagcgtcgaggcggccaccgcggcggcggccgcgggggaggacaagtcgccgacgagccccagcaacaacctgaaccactcatcgtccaccaatcttgtgagcaccgaattggaggacggctcctcgtcaacgcgccacaacggcgtcggcgtcagcggcggccggatgcaagaaatctcggcggctagcgaggcgagcgacgtgatcatggcgttcgccaacggcggcgcgtacggcgacagcggcagctactacctgcagcagcagcatcagcaggatcagtgggagctcggcggcgtcgtctacgccaattcgcggcactactgctgatgtgatcatccatccacacacgaacgaacgaacgaacggtacggcactaagatcgaactcctgcagctacataattatcctttgcttctcaagagtaataattcttgacgtgttaattaatccgggtgtgtattaattccctctttattattttttctcgcgtttatccggagttgactgtggtgaagactaactttggtttggtcatcgcatggtgtgcattgcatatatagctagcactatcgtctgatcgatgattcatcatcaatggagtcgtctagtattaaaaaaaaaaaaaaaaa

SEQ ID NO: 22329 - DNA, 1635 bp, Oryza sativa
  Clone ID: TF_OsC1117_1
tgcgggctgcaggaactcggcacgacgcacacctctcccccccaccctttcccgcaacacgcgaaaagagaggcgaggcggaaacaagcccgggcttttccgtctcgtctcgtctccctcccaaaccgaaccaatccaatctcttctcatccatccccatggaggcgcaggcgcaggacaaggcggaggagggggaggaggagggcacgcggcagcaacacgcgcaggctgggccggtcggtgcggctggtggtggtggtggggggggcgcggcggctgtggcgatgagcgccatccccatgaacagctggctcgtgcccaagcccgaaccggtggagttcttcggcgggatggccatggtgcgcaagccgccgccgaggaaccgggaccggcacaccaaggtggaggggcgcgggaggcggatccgcatgccggcggcgtgcgcggccaggatcttccagctcacgcgggagctagggcacaagtccgacggcgagaccatccggtggttgctgcagcagtcggagccggcaatcatcgcggccaccggaaccggcaccgtcccggcgatcgcgaccaccgtcgatggcgtgctccgcatccccacccagtcgtcgtcgtcctctggcccggcgtcctccgcggtggtcgacggtgaggagtcctcggccaagcgacgccgcaagctgcagcccacgcgcgcggtggctggcgcgtctccgctggccacggcggcgcccgcggcgtactacccggtcatcgctgaccctctcctgcaaggtagcggcggcgcggcgatttcagtcccgagcggcctcgctcccatcaccgccaccggcgctccccaaggcctcgtgcccgtcttcgccgtcccggccactggcagccccgcggtcgccggcggcaaccgcatgatcccgcaagccaccgccgtatggatggtcccgcagcccgcaggcgccgcgggcgcgggcaaccaacccacgcaattctgggccatccaatccgcgccccagctcgtgaacttcgccggcgcgcagttcccgacggcgattaacgtcgccgacttccagcagcagcaacaacagcagccggtgtcaacaaccatcgtccagaacagcaactcgggcgagcacatgcacttctccggcgccgactcccacgagcagcagcggcgcgggcggaaggaaggcaacagcggcggcgtggtggaccacccggaggaggacgaagacgacgacgacgacgagccggtctccgactccagcccggaagagtagcaaacacacacagcacaacacaaaaaaagcaagcgaggcgagcactccactgcacgccaaaaagtccacaagtcccccccacacacaaagcttaggttcctttttgctccgattcaatttctcgatcgtttctttcccgcaatattcctcatccttgtcatgatgaactagtaattactcccgcgtgttgtgctgtgctgtgctggtactactccttactttcccgtccttagctcagtgtttagtcttagagaagaagaagatgatgatgatttagcatgcaaatgagcagttgacaatttgacataaaaaaaaaaaaaaaccagtactacttgctgtgacaaaaaaaaaaaaa

SEQ ID NO: 22330 - DNA, 1322 bp, Oryza sativa
  Clone ID: TF_OsC900_3
atggatgtcaccggagacggcggaggaggagggcaacggcccaatttccccctgcagctcctcgggaagaaggaggagcagacgtgctcgacgtcgcagactgccggggcgggcggcggcggcgtcgtgggcgcgaatgggtcggcggcggcggcgccgccgaagcggacgtcgacgaaggaccggcacacgaaggtggacgggcgggggcggcgcatccggatgccggcgatctgcgccgcgcgggtgttccagctgacgcgggagctcgggcacaagaccgacggcgagaccatcgagtggctgctgcagcaggcggagccggcggtgatcgcggcgaccgggacgggcaccatcccggccaacttcacctccctcaacatctccctccgctcctccggctcgtcgctctccatcccttctcacctccgccttgccggcttggctggccctcgcttcggcggcggcgcgcgggcggcggacgcgtgggaccgcgtcgtcggcctcgggttcggcggtgcggccgacgccccgtcctccgccacctcctcctcctcgtcgccgcttctgctgagcttccactccggtagcgtcggccttgacgtgtcgccgccgtcggcgtcgacctccccggccgccgccgacctctcccggaagcggcggtgggagcaagaaatgcagcagcagcagcagtaccagcagcagatggccgggtacacgcagagccaaattcctgcgggcacggtgtggatggtgccgagcagcaacgcgcaggccgccggtggcggcgctccgccgggaggcggcggcgagtcgatttggacgttcccgcagtcagggagcggcggcggcggcggcgcggcgacagtgtaccgtggcgtgccaagcggactacatttcatgaacttcccggcgacaccaatggcgctgctccccggcgggcagcagctcggcctcgccggcgccggcgggggtggcgaggggcacccggggatcctcgccgcgctcaatgcctaccgcgcacaggccgcgcagccggacgccggcgcggcggcgcagaatggagcgcaaggctcaagtcagcatcgtcagcatcagcatcacggcggcggcggcggcggcggcgacgagcggcatgagagcatgagcgccagcgactcgtagggcttccgttccgtccggtgtgtgccccgcattttctctggttttgatctgttcttctttaattttctccgtttttgtttgagttgttgtctactaatgtctatggctttcttcctcgacccatcatatattcatgcaaggatcatacagttgcattc

SEQ ID NO: 22331 - DNA, 1997 bp, Oryza sativa
  unsure (1)..(1997): unsure at all n locations
  Clone ID: TF_OsC900_1
aacaccataaaatagtgtgtgatctccccacacgcacacagaagctagcagcaacaagcttcattcgcctcaccctctcccatcatatcatatgaggaagcaggattctttccaacctacaatatatcttttccctgatggctagctagctctttctcggactttctttctttctctctctctatccgtctctaccacatcgcaccacctaaccttctcgagctagacccacccacaacgagagggaggcaggcaggccgcccggagacatcaaattcattctcctcttctcttccaaacaaccacctcacttaccagcctaaaaaatccaatcaaagagaggtatagttggtttatatctgtgtatatataccatggcctaattgatgaccatggacggtcgccggagacgccggaggtggcccgccgcccaaacttccccttgcagcttcttgagaagaaggaggagcagccgtgctccagctcggctgctggaggtggtactgggccatcatcggcgggtggcaacgggaacaatggatcgggaccgggcggtgccggaggggagatgcagcagctgcggaaggcggcgccgaagcggagctccaccaaggaccggcacaccaaggtggaagggagggggcggcgcatccggatgccggcgctgtgcgcggcgagggtgttccagctgacgcgggagctggggcacaagacggacggcgagaacgagtggctgctgcagcaggcggagccggcggtgatcgcggccaccggcaccggcaatcccggcaacttcacctcgctcaatatctccctccgctcctccggatctcgctgtccgccccggcgcacctcgcgcgttacctagccccgccgccgccgcctcggatcccgtgcggacgcgtgggaccgggttgtcagcctcgggttcccgtccgagggccccgcctcgtcgtcctctcgccgtccccgcttctgttgaacttccactcgggcagcgtcggtctcgatgtgcaaccttcgccttccgccgctgccgccgccgccgacctctccaggaagcggcgctgggagcaggaaatgcagcagcagcaacagcaacaacagcagcagcagcagcagcagcagcaacagtaccagcagcagatggccgggtacacgcagagccaaatgccgggcaccgtgtggatggtgccgagcaacagcacgcaaggaggtgggccgtccggtggtggcggtggcggcggaggaggcagcggggagtccatttggacgttcccgcagatgagcagcgccgccgcggccgccgccgtgtaccgggggagcgttccgagcgggctacatttcatgaacttccctgcaccgatggcgctcctaccgggacagcagctggggctcggcccagttggaggcggcggtggcggtggaggaggcggggaggggcacatggggatccttgccgccctcaatgcttaccggacacaggcggcgacggatgccgccggtcagcaaggcggaggaggaggtggaggaggatctagccagcagcaacacggaggcggcggcggcggcggcgagcggcatcagagcataagcaccagcgactcgtaggccccccccggcggagatggatcatcagcgccgcgccaacggcggcggcggcgaggctggcggcgcggcgagctcgcagtgagctgagctaagctaagctaagctagctaagctgtgatgatgggttaatgggaggtagctgtgcaaatgcgaatgcaaatggcatatgatgatttgattagagagagtacagattagggtgtttggaactgcttgctgctgctctcgttaattaatcatctcaattcatcaatcaatggattgtttgcttctttagtttaccccccttattttttacctgggattattttagtttgctcttttggattaattaattaatcaatgtaaggtgtttgtnataaaaaaaaaaaaaaaaaaaaaaaaaa

SEQ ID NO: 22332 - DNA, 1874 bp, Oryza sativa
  Clone ID: TF_OsC219434_1
cctcgccgccttaacccccacccccgatctccttcctcaccgacgacgcgcgccccactccccccacctcaatgcgcgcttcctagggcatatgaccggtactacgacaaccatcacctctcgccgtcaccgtcatcgtcgggatggagctcgccggcagcaacaacaagcgggggagggtgagggggcccaacgacgacgacgacgacgccggggagccggacgccaagcgccatcaccaccagctgctgttgccgtggccgcagcagcagcagcagcagcatccggcgtcgcggatctaccgggtgtcgcgggcctccggcgggaaggaccgccacagcaaggtgtacacggccaagggcatccgcgaccgccgcgtccgcctctccgtctccaccgccatccagttctacgacctccaggatcgtctcgggtatgaccagccgagcaaggccatcgagtggctcattaaggccgccgccgccgccatcgacaagctcccttcgcttgataccgcttccttccccaccaaccccgcctcctccgccgctgttgctgctgctgctgctcctcctcttccccatgccgaacgcgagcagcagcagcagctcaccaagtccggatgcagtagcacgtcggagaccagcaagggctccgtcctctccctctcccgctccgagagccgcgtcaaggccagggagcgcgccagggagcggagcagcgcggccgccgccgcggcatccaaggacgccggggacgacgccgccacccccaccgcgcccaccgccgcgcccgcctcctcgcaggcggcttccttcaccgagctactcaccgggatggccgcagccaacgcctcacccgctgaccacaagcagcagcaggcgtggcagccgatgaccgtcgccgcggccaccgccgactacatcggcttcgccgccgccgccgcgccgcatacgcagccgcggaaatccgccgcgggccatcactccgcgatgccgcacaccttcgcatcacccgctccccacctcgccaacatcacccccatcgccatggcgcccgcgcagcacttcaccctcacacccgccgccgccgagcaccacgcggagatgacgcactactcgttcgaccacttcatgcccgtccacgcggcagcagcggcggcggcggcggcctccaccccggccggcggcgactacaacctcaacttctccatgtcctcgggtcttgtgggtgtccacagtagggggacccttcagtccaattcgcagtctcacctctccagccatcaccaccaccatcaccagcaacagcagcagcagcagcagctgcagaggctgtctgctccgctggatgcgcccaacattccgttcctcttcagcccggccgccgcgcccaccgccgcggacacccagttcgccgccgcattgcagctctgggacgggttccggcacgccgacatcaaggagaagggcaagcactgatcagatcagcagccgcgggcatcgacggcgacgtctcttcttggatggaagtgaaaacatcaaaacgttgcaagccattcctgtgagcaacatccacagcttgaagctgccataagtgaatgctggatgcattctcggaagtagagcatcaactgcacatctaccttggtcacgggaggacctcatcatcgctattcagatgatcttgtgcttttctctgcctgttgttgtattcattttgttgagttgagaatttgggagcattactcgccggagtgccctgaggaggggacgcccttgtaatcctttctgttgtaaactatgtcaatggatgcatgcggctctggactggattggttctttgcctcttttgacactgtgaaaaaaaaaaaa

SEQ ID NO: 22333 - DNA, 1132 bp, Oryza sativa
  Clone ID: TF_OsC6287_1
gcacgaggcaaaacctctcaaaccccacaggcaccggaccaccaccaccattggcaccacctcgcatcacactctctcgctcgccatgagctcccgcgacgccgccgccacgttccatgtctaccagcccgtgcagatcccgacggccacggtggcgcccgctgcggcagtgtcggcggcgccggcagaggccgtcgcccagctggtcccggcgccgagcaagaaggcggccggcgcggcgggtgggaaggaccggcacagcaaggtgaacgggcgcgggcggcgcgtgcggatgccgatcgtgtgcgcggcgcgggtgttccagctcacgcgggagctggggctcaagtccgacggccagaccatcgagtggctgctccgccaggccgagccgtccatcctcgccgccacggggaccggcaccaccccggccgccttcgtctcctcctccgcgccgtccacctcctcctcgcaccagcacaccctcctcggcaagcgccagcgccaggagtccgccgccgccgacgccgtctccgtcgccggcgccgcgtccgcgttctgggcggcgctgcccgcaccaggccggcccgacgcctggggcttctccccgctggacgcgcagccgacgtacgtgccgatggcgcaggcgcaccaccaccacctcaacctcctcgccgcgctctccggcgccgccaggcgcgccgaggaggagtcccggtgaatcacgcacagcagcatgcatcttccgagctctgacacgtctttcgctcaattcaccgacgcgtactgcactggcgtccgtacgccttgttcttgggacagttcttgattggagtgtgcttcttctctctaccccgtggatcgatcgttttgccttcttcctgtgcggttcatcaattgctcaagatgaaattaattgttgctgtggtgtttaagctcaaaactgtaaatacgagtccttagatctcatcttactcctacaaattccagcgccgcatgtgtttgtgtgtttgccacttgtttccagctcttgtgctatgattccatggaacttgtttcagtttagcttcatctacatcgttgtcagaccaaatcatttgacagttacagaaacatgttgcattgagctgct

SEQ ID NO: 22334 - DNA, 1219 bp, Oryza sativa
  Clone ID: TF_OsC1116_2
atgagggtctctaccgttggtggagagggatccggtaggtccgaaggtgggatcgtcgccgatgaacggtgggggggaagggaagggaaggggcgacggcggggcgaggagtttcatcggcggtgggggaaagggaaggggcgacggcggggtgaggagattcgtcggcggcgacacactggagatggggcagtgcgagagaaagagacggggagagggatgtgcgtgtgggatgaggatctggaaggcgagaaagagagggggggaccgccacgtagaccaaaactggggtcaaaaccaccaaaggacctcggccaccccaccccgaccgacgccgaccccacctctcagaatccccccaccccaccaccaccaccaccaatgatggcttcttcctccgacctcatcctctacaacctcgtccccgcccaacccctaaaccctagcgccatccccaaccctaaccccgacctctccatcgccgccgccgagcccccctcctccgacggcgccacccctcgccgcgtcaggcccaggaagtccccctcctcctccgaccgccactccaaggtcgccggccgcggccgccgcgtccgcatcccggccatggtggccgcccgcgtcttccagctcacccgcgagctcggccaccgcaccgacggggagaccatcgagtggctactccgccaggccgagccctccatcatcgccgccaccgggacgggcgtcaccccggaggaggcgccccccgccgccgtcgccatcggctcttcctcggtcgccgccgccgccgccgccggcgggcatgggggcgcgttcgtccatgtgccttactacaccgcgctcctcatgcagccgcctaacgcggacgagccccccatggcatccgctgcctccgcctcgggcaccaccgccgccgacgagaacaataattaatttagaactgccgctgttaggtttaggagcttggagcgtgttagggttagggttccccggcgtatttaggagaggtctccccctcctcaataatttaacctcattgtccttgtggcggttgcggcggcggcatggatttaggttatttagatgccttattcaggcaagcaaatgagggggtgattcagatggtttcttagagaggagggcagaaaaatggagagctctctgtaagtggtgggtgaggactggagtgagtggtactgatgctctgatgaaaaaa

SEQ ID NO: 22335 - DNA, 1427 bp, Oryza sativa
  Clone ID: TF_OsC934_1
agctgcagcttgcagggcgcccagctcacagcatcagagagattcagagtagctcagagtgagcttttgctcgttggtccctcgaattctggagctagttcgcccgggtcctcggtttcgatcgatccccttcagacgaagcggaggcggatttcgcatgaggtagcgcaagcgtcagccatggaggaggtcgtcgtcggcggcaaggagcgcaagcgcccgcgcggcgcgctcgtcggcgtcggcggcgggggcgcgtcggcggcgacggcggcggcctggcggacgagccgggtggcgcgggcggcggcgggggggaaggacaggcacagcaaggtggtgacgtcgcgggggctccgcgaccgccgggtgaggctgtcggtgccgacggccatcgcgttctacgacatccaggaccgcctcggcgtcgaccagccgagcaaggccatcgagtggctcatccgcgccgccgcggccgccatcgacgcgctcccgtcgctcgactgctccttagccctccccgccgccgcctcctcgccgccgccgccggccgccgacgacgccgaggtcagcacatccgagaccagcaagagctccgtgctctccctcgccaacgccccctgcgacaacggcggcggcgcgttcgccgagctcctccactgctcgaacaccaacggcagcaagccattgcagcaacagcagcaggcgacgcttgcgtactacgcggcggcgcagagcgcgcacatggcggcgcccatgtcgttcgaggtgatggcgatgccgccccacctcgcgttctcgcaggagcagcagcagcacgccacggtggccgccttcgatcggggcacacttcagtccaatgcgtcgctgtggccgccgccgccgcagccgccgccgtcgcagcacccgttcctgctgcagaggttcgccgccgctccggctgaggtcgccggcctcccgttcttccttgcaggcggcgtcggcggcgctgctgctgctgctccggcggcgacgaccaatggtggggagcggaggctgcagctctgggacttcaaggaggagaggaagacatgactaaaattgcctggtgttatgtctggtgttgtgccacaagtcaaagccgatcagcatgaagaaaaattcagaacaagaaaaagtattcaggaactgaagatgatgtcagcgccaggaaaaaaacttaaacaccagaaaaatggatgtaattccagatctatgattcttccggctcatgatttccatttctctattctctaacaatgtacgatttaattgtaaccttgactgtgttgtgattcagaaaccatgtcattctgttgcctgtacttcgataattttgtcacatactgcttaatcagagatgcctgacattttcctaaaaaaaaaaaaaaaaaaaaaaaaaaaaaaaa

SEQ ID NO: 22336 - DNA, 1649 bp, Oryza sativa
  Clone ID: TF_OsC900_2
ggcacgagtggtgggttgagggcggcggcggcggcggcggagggtgggatggagcagcaggcggcgccgtcgagcagcacgagcacgagcaccaacagcagccggagcacgtccgaccaccacgccgccgccgccgccgccgccgcggcggcggcggcgcaggtggcgcatcagcaccacccgttctactacgccgccgctcagggtggcgcgaataccatgccggcgccggcgtcgttcatggggtcgctggccatagtgcccgctgctgctgctccgggtggtggtggtgggcaggtgcaggcggcggcggctccggtggcgtcgtcggagaagaaagcggtggtggcggcgggggcgggggcgaagcggccgaccaaggaccggcacaccaaggtggaggggcgcgggcggcggatacggatgccggcgctgtgcgcggcgcgggtgttccagctcacgcgggagctcggccacaagacggacggcgagaccatcgagtggctgctgcagcaggcggagccggccatcgtcgccgccaccggcacgggcaccatcccggccaacttctcctccctcgccgtctccctccgctccgccgcctcccactcctcctccccgcgcgccgcgccgttccaccacctccagcagcagcagcagcacgacgtcgccgccatgctcggcttccaccaccaccaccaccagctgctccctcctccgccaccgcaccagcacccggagccgacgccccaagatcccggcgccggcgagttcatgcgtaagcgctacagggaagccgacgacctgttcaaggacacctcacgccaagaccccgtcgatggcgccaccggcgaggccgagcagaaggcccgtgcggccgcagcagcggcggcgccgccgccaaccgccccgtcagcaatgtgggccgtggggccgaacaccaccggagccaccgccgccttctggatgcagccggcatgggcattcccccacggcgccggcgccggcgccgccggtaacacggtgcaggcgccactccagttcatgtcgcgcagcagctttcccacggcgatgaacgtcaccatggcggacaacaacaacagcagcaacaacaacctcggcatgctcgccgcgctcaacgccggcggcggcggccgctccggcgagcaccagcaccagcatgaggggcagtcgccggcggagatggatcatcagcgccgcgccaacggcggcggcggcgaggctggcggcgcggcgagctcgcagtgagctgagctaagctaagctaagctagctaagctgtgatgatgggttaatgggaggtagctgtgcaaatgcaaatgcaaatggcatatgatgatttgattagagagagtacagattagggtgtttggaactgcttgcagctgctctcgttaattaatcatctcaattcatcaatcaatggattgtttgcttctttagtttaccccccttattttttacctgggattattttagtttgctcttttggattaattaattaatcaatgtaaggtgtttgtgatgatgatgatgattagtagtgggtccaattggatcgatcttgagaagcctagctgagtgattaatttaatatgtttcttgttgtcaaaaaaaaaaaaaaaaaa

SEQ ID NO: 22337 - DNA, 2527 bp, Oryza sativa
  Clone ID: TF_OsC901_1
ctgaggaattcggacgagtctctctctcctcactaaagcacagctcctgcccctttcctcccggcctcctgcccgcccttctgcccgagcggccgcccgggcaggtcacaaacccaacaagagagtgagagaggagcaaaagctttggctggccgtcccccctgttaaaatgtgatgtccaatccatgggattgcgtctagtttagtcccccactcctctcctggttatgggatccggcgaggtggatggacgcgcattggagcagcaacagtagcggcggggaagaaggcggcgggggatctggatccgaggcaccaccaccaccgggtcacccacggcggcgacggcggcggcgtaggaggaggaggaagcgggggacaggaggaggcagatgagcagcagcagcagcagcacgaccaccaccggcttctccagctccaccaccaccagggtgtgcagcaggaccaagaaccgccgcctgttcccgtcttccacctccagccggcgtccgtgaggcagctgtcgggctcctccgccgagtatgcccttctctcgcccatgggcgacgccggcggccactcccaccaccaccaacacggcttccagcctcagctcctctccttcggtggcgtcggccaccaccaccacctgcatcagttcacggcgcagccacagccccccgccgcgtcccacactcggggtcgtggaggtggaggtgagattgtccccgcgacgacaactccacggtcgaggggcggaggcggcggcggcggcggggagatcgtggcggtgcagggcgggcacattgtgcggtcgacagggcggaaggaccggcacagcaaggtctgcacggcgcgcgggccgcgcgaccgccgcgtgcggctgtcggcgcacaccgccatccagttctacgacgtgcaggaccggctgggctacgaccgcccgagcaaggcggtggactggctcatcaagaacgccaaggacgccatcgacaagctcgacgtgctgccggcgtggcagcccactgccggcggcgcaggcgcgggcaatgccgccgcgccgccgtcctcctcgacccaccccgactccgccgagaactccgacgaccaggcgcaggccatcaccgtcgcgcacaccgccttcgacttcgccggcgggggcagcggcgggaccagcttcctcccgccgtcgctcgactcggacgccatagccgacacgatcaagtccttcttccccatgggtggcaccgcaggcggggaggcatcgtcgtccaccacggcggcgcagtcgtcggccatgggtttccagagctacacgcctgacctcctgtcccgcaccggcagccagagccaggagctccggctgtcgctgcagtccttaccagaccccatgttccaccaccagcaacatcgccatggcggcggcggcggcggcggcaatggcaccacgcagcaggcgctcttctccggcgccgccaattactcgttcggcggcggagccatgtgggccaccgagcagcaggcgcagaaccagcgcatgctgccgtggaacgtgcccgaccccggcggcggcggcggcgccgcctacctgttcaacgtgtcgcagcaagcggcgcatatgcaggcggcggctgcggcgctgggtggccaccagagccagttcttcttccagaggggaccccttcagtccagtaaccagccctccgagcgaggatggccggagaccgtcgaagccgacaaccagatgagccaccaccaaggagggctgagcccctccgtgtcggcggccatcggttttgccgctcccggcatcggcttctccggcttccgcctccccgcgaggatacagggcgacgaggagcacaacggcggcggcggcggcaatggcgacaagccgccgccgccgtcgtctgtctcctcggcttctcaccactgaccgcagcagtggcgagcagatgacttcaccaccaccaatccaccatgagcaaacaccacaccatgtaccagactatcagctagctcctccacttccatcacggaattgtcgattgcattcgggaggagcaaagtttggaggtagcacaagtgcactactactgatgctactacatatcggttggttggttggttggttttccatcgatctcttctgctgctgcgcatgtcattggtttttgtttcaagaattcactcggagcttcttagaattaggcttgtgagaatgcagcaacacgatggcaagctttagcttagcttagcaagcctctgtgtctgttggctgttgcgttgcgctaggtgtagttgatcgatgtaggttcgagcttgctttgctttgttttgatttttactcttttgttgctgatgcatggacatgcttttgcttcctcctgtgggttcaggagcagttgctactagaccgatgttgttctcaaaactgataagtgggatggtgatggattgggagaggagcctatctttcatcttttccaaaaaaaaaaaaaaaaaaaaaaaaaaaaaaaaaaaaaaa

SEQ ID NO: 22338 - DNA, 1363 bp, Oryza sativa
  Clone ID: TF_OsC902_1
ggcacgagcagggtgagggcgacgggggggaaggacaggcacagcaaggtgtacacggcgaagggaatccgcgaccgccgcgtccgcctctccgtcgccaccgccatccagttctacgacctccaggaccgcctcggcttcgaccagccgagcaaggccatcgagtggctcatcaacgccgcctcccccgccatcgacaccctcccgtccctcgaccccgccgccttcgccgccattccccacgccgccgccgacgccgcgcccacgcggcggcgttcgcagcagcagcagcagcagctcagcaacaagtccggatgcagtagcacgtcggagaccagcaaggggtcggacaaggaggtcaccgtggcgagcgccccggcgcaggccgcgtcgttcactgagctgctcattgctggggtggcggcgtcgtcggcggggggtggcgccattggcaacggcgccgactgcgtgggcatcgcgcaccccgggaaaggaggcgcggagggggcgtccacgtacggcttctccgccgcctcgagcttcggcgacgcgccaccgatcggcatggtgccggcgccgccgttcaacttctccgcccccggcgccgacatggcggcgcactactcgctcgcccaggaccagctggcggcgcctccgcctcctgccggaggcgactacaacctcaacttctccatgtcctcgggtttcttgggtgccaatagggggacccttcagtccaattcgccgtcgaacatgtccggccaccaccaccaccaccatcagcagcagctccagaggctggacggctccaccatttccttcctgcttggccacgccgccgcggcggcgcacccggcggcgtccgagggccagatcaccagcaccgccgcgttgcagctgtgggatggattccgccactccggcatgaaggagaagagcaagaactgatcgatcccagcaacgcatcctccaaaggaactgaagatatcatcatcagattaattgttgtcacctttccagcaagagctcaccgtggggagctgctacaagtttattgcgatgactgcccgtgttcttttagctgggtcatcgttctgctatgctgttttttggccatcatgaacaccctgccgctgctgctacctgccattgccatcactcagacaatcttgtgaatttccttctttttcctagatgaagctgctgtacaaatttttgtgggagacgtgagtttcgaacaagaataagcgtgtcccgtagccagcgttaaacctttcccttccagaaatatttttcgagtgaattgaaattcatatgtgcctctggttattggagtggcaaaaaaaaaaaaaaaaaaaaaaaa

SEQ ID NO: 22339 - DNA, 699 bp, Oryza sativa
  Clone ID: TF_OsC934_2
atggcagcagcatggcggacgagccgggtggcgtgcgtggcggcgggcgagaaggacaagcacagcaaggtggtgacgtcgcgggggctccccgaccgccgcgtcaggctgtcggtgccgacggccatcgcgttctacgacatccaggaccgcctcggcgtcgaccaaccaagcaaggccatcgagtggctcatccgcgccgccgccgccgccatcgacgcgctcccgtcgctcgactgctccctcgtcctccccaacgccgcccagctcctcacccgccggaggcggaggccgtcgagcgggcggccttcggcggagcaggcgcgcacgaggaaggctacggtggcggcgtcgcctaggaagtcgggggagaagaggcggaagacgaggtcggggtgcgcggcacggagggcggagcgcatcgcgaagttgagggcacggagggaggggtggatgccgaggcgcgaggcgagcacctcggcggcgtcgggcggccaaagctggatcaggaagccgtcgacgccgaggagcggcggcttgtgctccggcacgggagaaggagaggaaggtggcggcaggagcatgggggagataaaagaggacgagctcaagcatggcggcgagaggagtggggcgacggcgggcggagaaggccggcaaggcggtggcgcggagcgaggtggtggcggacgacgatga

SEQ ID NO: 22340 - DNA, 1703 bp, Oryza sativa
  Clone ID: TF_OsC1116_1
tgacatatgtgctttagccgctgattaggttaggtctctgcttctctcatccatccatccatccatccatccatcccctgctgtgcaccgtgactccaccaccaccatcaacaagatgaaaaacaaactcttcttccttttcttgccttgccttgcttgctttgcagtaatcaggggaactgctctctcgtgcgtgtgatttctagtcagtcagtgtggacatctctaaattcatttgtgatttccttcctcatttcgttgcatcggtgtgctatgctgctccaagaaacaagacaaagaaaagaaggcgggcttgcttgcttgcttgtctgctgcacgagtcatagttggcgtcaatcacatgtacagctgcaaatgctgtgccaagaaatgaacaaaagaaatttacagcaggcccatgtgccgtccagcccgtgtgtctggcgtggccgtgcaccggctcgatccgcccctccgtctcgtcgttgcacgtgcaggtgcagcccagccgagtcgtctctctcgcctcctcctcctccccccctcaatgattgcattgggcattggcgtctcctcctcttctctccagtggcagtgcaaccaatcccccacacaccacaccactaccccacttgcccttgcccaaccccccctctccgctcctctcctctcctcatgacgaccaggccagacggcggcggtggcggtggcggcgctccggacaagcagctcgtcccggcctccaacgccaatggcaccgccctcgccgttcgcaagcctccctccaaggaccgccacagcaaggtcgacggccgcggccgccgcatccgcatgcccatcatctgcgccgcccgcgtcttccagctcacccgcgagctcggccacaagtccgacggccagaccatcgagtggctcctccgccaggccgagccctccatcatcgccgccaccggcaccggcaccaccccggcctccttctccacctcctccccttcctccctccgctccaactccacctccaactccaacgacctcctcctcccccgcgccgcccccttcatcctcggcaagcgcctccgtgccgccgacgaccacaccacttcgcccgcgcccgctcccgacgccaccgcccccacccaggccttctgggcgctcccggccagggctgacttcggccagctctggagcttcgccgccgcgccggagatgatggtcgccgccgccgccgcacccgccatgcctggggaggcgtccgccgccagggtcggcaactacctccccatggcgcagggcaacctcaaccttctcgcctccttctccggcggcccaggaggcgccggggccacggcggcgaccggccgacccgaggaggagagcgcccgctgagttactgacccaaaagaaggccatgtaagtcgtctcacttgttcctctgtttctgtctgcttgctgctctagctctttaggccttttgtccagaattcttcttcttcttcttcttcttgttgctcttgtgttcatctctggattggattagtgcttggggagaataatagtaataataagtaattgttggtaggctggtagctcagctcctctgtacgtatgccatgtatgtatgtatgtatgtatggattgtttcatgtgttaaattatccccatgaatgattgagaatgaatgaatggccaaaataagcaaggag

SEQ ID NO: 22341 - DNA, 981 bp, Oryza sativa
  Clone ID: TF_OsC45299_2
tcatccctggcttccagagtgaaggaagcttcttgctgagctcagtgtgagctgcccttgcgagtggtcgaggctatctacaggaaactgctcggctgcagcctctttcacggcgaatccgccgccttccggcgagtagaagacgaactgatgatgagagcccggtgccaaggacagcagcgacgggaacggcgagttgtgagccgaaggcgagacgccatggctgacatcatggtggtggccaccattgccgccgttgccccaagattcggcggcggcgtagtacgccgcggcgtgatgatggtggtggtggtgagcggccaacgtcgccggcatggtggcggcgttgagcaggccgagggagttgctcaggctcatgaacgccttcatgccgccgccgccggcggccttgtcgccgtcctccagcatcgacgacgcggaggcgccgtggtggccgtcgcctccgttcgcgaacggcggcggcgccatggacgaggcggcggcggcgacgaggtcgtggtcgtgcggcgggaactggagcggcggaagcttgtcgatctcggcctgggcggcgttgatcagccagtcgaccaccttgctcggctggctgagccccagccggtcctgcaggtcgtagagctggatcgccgtcggcaccgacagccgcacccgccggtcgcggagccccttcaccgtcctcaccttgctgtgacggtccttgccgccgaacaccctcgacacgcgcacgatccgcgactccgtcgacgccgaccagtgccgcgagctcgccacggcggcggcggcgccgccgccgccgctcggcttgtcggccgccttcctgccgccgccgccgagctcctcattcgtgctgttattgcttgtcatcttgagctgctcatgattagacctggctgccgccagcccgcgcccggccgcctccatcccgccaccgccggccggccactgccagcccgcgcccat

SEQ ID NO: 22342 - DNA, 877 bp, Oryza sativa
  Clone ID: TF_OsC201546_1
tggatccccgggcggccggggtcggctggagaggaggaggaagccatcgatggccatgagcgccctcaagttctgcggcgaatgcagcaacatgctctacccgcgggaggacaaggagacgcacaccctgctctacgcctgcaattcctgcgagcaccaggagcctgccactgacacttgtgtgtacaaaagggttctccgtaaacctgctggggaacccaaagatatcctaaaagatgcagcaactgatcccaccctgcctcgcaccagaagtattaaatgttacaactgtggccatccagaggctgctttttttcaggctccaactaagggggagaaaggcctgacactgtacttcatctgctgcaacccaagctgtggtcacaggtggagggattgacggcaaggttcatggtgctgaatcttggccgttcttgtgttcatgctcatacccggtgttatctgaaggaaggcggccggcgacgcggcggcgaggaaggggcggcgcgcgggcggctgggggaggcgcgacgcgctgacatccgggggcggagcggtgatgcggcggcgggggaggggcggcgcgcggtcggcgggagaggaggagggcggcgcctcgatggcggcagccagcggcggcggcggcgatggggaagcacgacggccacccgcggagaggaggtccatgcggaggaggaccatgaggtgctcccgctgaaaccgaaggtggcgccggcggcacggggggcatgagcctataggggagagcgtcgagctggcacatgaccttctcgatgtcgaggacgaggcgctcagcgagagtgcggctgaactcctcccggtcgccgctccgcccccggccgcccgcgcgccgcat

SEQ ID NO: 22343 - DNA, 769 bp, Oryza sativa
  Clone ID: TF_OsC138347_1
aggaaggaatagaccacagaatgtttttatcctagtagtcttgatccttttccttcagaagttacacaaaataccgatgcctgaatgtgtttttaaaaatttaaacatacaatcagtctatgcttctatggaatgtctcttggatgaaatcaaaatcatatgtctctctgatcatttgcatcaatgactttcttcacttggttgactacaaattgatctcattctctccatctgtgaccgcagctcgggttgcagcagacgaagaacagggtcatcccttcctcccctctggcagtggcctggaagaacacggcctcgccgtggccacagaccgcgcaccggaccgccttggtgcgagggagagtcggatcgccggcgacatcctggagcacttgggtgaactctccggcgctgtggtgcaccacattccggtagacgcagttgttgtctgcaacctcctggtggtcacagttcctgcaggcatagagcagaatcttctggtccctatcctccttgggatacagtatgttgttgcattcgcggcaaaatttcatggtactcatggctgctagcttctcctctgacctgacctgacctgaccttgtctgcttgcctctttcagatctttatattctctgcagtgatggagctgacctgagctgaatcctattcttgttcctttctcctttgcaagaaaggggaatatggaggaggtgagcggacgcgtgggtagtgaagaagaagaagaagggatgttttactaatggcc

SEQ ID NO: 22344 - DNA, 694 bp, Oryza sativa
  unsure (1)..(694): unsure at all n locations
  Clone ID: TF_OsC6358_1
ctccgggccggcggcccgggccacccacccgtcctcatcaaccctagaaaccaaagggagcaggagcaggagcggcagcggctgcggaatcggaggaaggggatcggccgccgccatgagcaccatgaagttttgccgcgagtgcaacaacatcctgtaccctaaggaggagaaggaccggcggctgctgctgttcgcgtgccggaactgcgagcaccaggaggtatcggagagcaagtgcgtgtatcggaacgaggtggcgcacgcggccggggagcggacgcaggtgctgcaggacgtggcgtcggacccgacactgccgcgcacaaagacggtgaggtgcgccgcctgcgggcacggcgaggccgtcttcttccaggccaccgcccgcggcgaggagggcatgaccctcttcttcgtctgctgcaacctcacctgcgcccaccgatggagggaatgattttacttctttctcttcttctccacaactacaacttgatcgatcatgatgatcaactttcccggtttgcttaaacaagacaattgagtactagtttgtaaatggatggaggtttagcaataggtagggttctctgccttcatcgggctcatgttttatctacttgtcttgtttaactcgtactccttcgatgctagatcaatgttaacttgggatgctaaaaaaaaaanaaaa

SEQ ID NO: 22345 - DNA, 936 bp, Oryza sativa
  unsure (1)..(936): unsure at all n locations
  Clone ID: TF_OsC11113_2
ttaaagtacttaattaataaagcactaataagccacncgtttttccatgcacggggaagaggttcttaaaacccttctcccgaacnacaccatttactngtcataattcaagcaaaggcataaaaaaaatatttcaaaatcacttgtcatgtcaaagcatggccattttttagaccacaatcgtagaagtgatcaaaaagctcattctaaggtgactactggttctcattgaactcatgcctgcagtttgcgcacttatagaaaacagtttgcccctcatctgctgaccgtaactgcttggtgtaatactgaagttcaggatttttgcatttttcacactctttatttactgtagctctttcgacaattacgtcttcctccttcagtgttgtttcaagaatcacatatggatcaagttttagctctcttctaatatcctcagccgtgaccgtgtaccgcgtctccttcccttcgatatctttggccttgcgcttgaagccgcagagggggcaggaggcggagcggacggagtcgaatttgaggagggtgccgcacacgccgcagaagaggaagtcccgcgcctgccagaaggccatgccgccgccgccgccgtcgccggcgaagtgttccttctcctctagtctgtggttggctggcgatggtggtcttctctccgacggccgacgatgcagcacgggagaaggggagggtggcggaagggcgaggcggcggcggcgggtgaacgcggtggcgggctcgtcctccccgatcacactctccggcatggggaaaggatggcgcaggcggcggaccgcgcgggagaccagcggcaggcggtcgtggatgcggcgctcacgcggggctgggctggccgcgcggtcgtggttggcggcgggtgaggtgttggcggcgagtgcacccgggaatcgatggagc

SEQ ID NO: 22346 - DNA, 471 bp, Oryza sativa
  Clone ID: TF_OsC11113_3
ctactggttctcattgaactcatgcctgcagtttgcgcacttatagaaaacagtttgcccctcatctgctgaccgtaactgcttggtgtaatactgaagttcaggatttttgcatttttcacactctttatttactgtagctctttcgacaattacgtcttcctccttcagtgttgtttcaagaatcacatatggatcaagttttagctctcttctaatatcctcagccgtgaccgtgtaccgcgtctccttcccttcgatatctgcgccgtaaaaaaagagaacgaaggcatcagccgcaagaagaacacagcccagggctttgcagggagagagatggggaagacgacgacctttggccttgcgcttgaagccgcagagggggcaggaggcggagcggacggagtcgaatttgaggagggtgccgcacacgccgcagaagaggaagtcccgcgcctgccagaaggccat

SEQ ID NO: 22347 - DNA, 1424 bp, Oryza sativa
  Clone ID: TF_OsC110921_1
atggagagggagctcctggaggcgttcgaggcggcgaggaaggcggcggacgcggtcggggaggcggcggcggcggccggggccggggaaggggagtcgccggaggccgcgcgctgcgtcgacgcgctgcggaggctgcgcggggctcgcgtcaccaccgccgccctcgtctccactcagatcggcagacgtattcgctatctcaccaagcatcctcactcaagcataaaagcaacagcttcagacctgttaggacactggaaaaaggttgtcattgaagaagacaagaaaaatggggcactgcagaatggaaaatcgagttctactgtggtaaaggttgagaaggtggagcctatgaaagttgaaaaggcatcaccaagggctactgtcaataataataatatggataccagagttgtgaaccacaaaggtggaaaggttgagaagttttctaatgctgagctgagaacccaatctatcaaggttgagaaagtacaaaaggtagttcacaaagtatcttctgttgagaagccgtctcctgtccaaggtggtcctccaagactgacatccgttgttaaatgtggtgatgctagtcgagacagaattcgggcgatacttggtgatgccttctccagagtttctgaagagactagaaaggatgacagggaggaagtgaggaacatcatagaagaagtaaaagcatgtgacccattcaggattgctgtgatggtagagtgtgccttgtttcagaagctggggaattttaatggacctaataagcaaaggtacagatcattgatgttcaatctgaaggatgatcacaacacagacttccggagaagggttcttctaggacaagtgcagcctgagagaattgctgacctaaccccgacagaaatggctagcgacaccaggaagcttgagaacaagaagatcgaggagaaggctctgttcgagtgcgagcgtggaggagcaccgaaggccaccactgatcagttcaagtgtggcaggtgcggccagcgcaagactacctactaccagctccagactcggagcgccgacgagccgatgacgacgttcgtgacctgcgtgaactgcaacaatcactggaagttctgctaagctaggcacatcctactgagaagtgttagtgtagttgaccctggagtttgacaggcaggttagtttcgggccctgcttatctgggcccgtttcatcttttttccccttaagttagcttgttccgaattcgatttgttctagtgccatttgactgcataatggccggccgttgggcttgcattgtcaggctactgctgttgtacttatcagtcttgtttattgtaccattggatgcaataatgccataatggtcatgctcaaaagaaaaattgcactggcccgacctgcccaacttgaactga

SEQ ID NO: 22348 - DNA, 1626 bp, Oryza sativa
  Clone ID: TF_OsC44273_1
gatgcaaagagaactccttggttatattgctcaccatgattgcactccatctgtccatgttcatcactccatctacatatgagcaacatcgcttttccagcattatttccactcttcatggctaccatgaaagaatcacacaacctccttatacacagaactacattgccatccacgactttaaagaggtacaacaggtaatggtaatatagtcaacaacagttgcggtcaactagtacaatctgaataaatcaggttccgaaagagaaaagaaaggtaaaataaaaaggaaacaggctcctagtttatggaaaattgaagccaacctgcctgtcaaattcaaatgacaccgctagccgggagaacattttcagcagattggcgctcagcagaacttccagtggttgttgcagttcacgcatgtcacaaatgttgtcattggctcatcagcactccgagtctgcagctggtagtaagtcgtcttccgctggccacacctgccacacttgaactgatcagtagtcgcctttggggctcctccacgctcacaatcgaacaaagccttctccttgatctgcttattctcaagcttcctcgcgtcactagccatctcttctggagatatgtcaacaagcctctcaggcctcacttggccaaggagaacccttcttcggaaatcagtgttgttgtcagctctaagattgaacattattgacctgtattttgccttgtgagccccagttgaacgtcccagcctctcaaataacgcagattcaacggtcacagcaactctgaatggatctcgtgcatccacttcatctaagatgtttctcacttcctccctgtcatctttgctagtctctccatgaaccctggagaaggcatctgcaagtagttcccggattttatctctagtgggatcattgcatttgacaagagatgtcagctttggggggccatttggaacagaagatggcttctttgtatcaggagttctagtggcttcctttggagccctctctaccttgacttgttggtttttggaatcattattggtgatcttctcaaccttgatgctctcaggcttctggcccctaacattgacttctcttttctcaggcttcacacttcctgatgcagaactcttatcaaccttcatgggctgagccttttcagctctggcggctgagttggttgatccaacattttctgtggtaccatttttctttccttcttcgataacaacctttttccagtaccccagaagatctgtagccatggattgtatgtctgagtgagggtgcttagtaaggtaacgaagacgttttccaacctgcgtggagacgaggacgtcggtggtgacgcggagaccgcgcagccgccgcatcgcgtcgaggcagcggtcggcctccggggagtcgtccgccccggccgccgcgtcggccgccttcttggcggcctcgaacgtctccagcagctccctctccatggcgggcggcgcgtcgccggcgacaaatcaatcaaaaccctagccgccgcgggctccccgccgccgtcttctcccgtgtggcgtacgggcgggcgcgtgggcggacgcgtgggcggacgcgtgggcggacgcgtggg

SEQ ID NO: 22349 - DNA, 522 bp, Oryza sativa
  Clone ID: TF_uC-osflcyp081e09b1
gttatgtctactagagctggaccttgcttcacggtgctgttacatgctccaaggagcgtcatcctgcaagacccaaaaatgcgaatgtagagcttcaggttcacattgcgggggtgattgtggatgtattccctctaagcgtataatggggtggatgtgaacagaggaaaagatgggttgtggccggggtgcgggatgctgctgcagatccagccggccaccggcgggaaccgcctgcgcttctactgccccacctgcccctacgtctgccccgtcaaaaacaagatcgtgaagaaggcgagactagtgaagaaggaggtggagcccatcttcagcgacagcgacgccatgaagaatgcccctaagaccaccactacatgcccaaggtgccaaaatggagatgcatactacaggcagatgcagattcgatcagctgatgagccaatgtctacattttacaagtgttgcagagaagaatgccaatttgatttgagggaggactgactttagtaatattttttg

SEQ ID NO: 22350 - DNA, 2918 bp, Oryza sativa
  Clone ID: TF_OsC42013_1
ctagccccccccgctccctccccgactcgtgccgcctacccgccagacgtgccagtcttcccaccccccgtcccccctgccccctagccgcaccccgtatggaggcgcaggcggacgccggcggcgacgacctcgccgccatgcgggagcagtgccggagcctggaggaggccatcggcttccgccgggagacgcagatgggcctcgtcgcatcgctccagcgcctcgtccccgacctcgtcccctccctcgaccgctcgctccgcatcatcgccgccttcaacgaccgccccttcgtccccaccccgaaccccgacggcggccacggtaagagccccgccgccctcaagccccaccaccgccgcgccctccctgacccggcgcggtccacccgccgcaagacctcgcccggatcctcccctgcctccgtcgccgctgcccccggcggcctcgacgccgtgcgcaccatggtcgccgtgtgcctcctggagctcgtccccttcgccgagatcgacgccgccgcgctcgcccgccgcatgcaggcggagagctcatccgccagcgaggccgagcggactgctctcgctgacctagccgccgaactcggcggctcggcggcctccgctgtagtcctcgccctccgccgcatagccgaggacaccggcggagtgcagatcgaggaggccatgattgggggcaagtcgatgacgatggtctgggccatcgaccggaacaagctcctcaaggagctgccagaatccgctactttgccgctactccaacctcctccagccccccagatgcccccctctgagaccgatgccggcagcgcaatgataccaagaacaccgcagcagcagcagccgcagccggatatgtggccgcattcgatgcctccgatattcccacggccaaggggcatgacgatgcaggggatgcagagggtgcccggcgtgccaccagggttgatgccgctgcagcggccattcatgggaccagctggagttatcacaatgggtgggggtgtggggcctagccctaaccagcagaagcagaagagcgaggaggacgaacttaaggatcttgagttgctgctgaacaaaaagacatatagagagaagcagaacaccaagaccggggaggaacttttagatctcattcaccggcccacggcgaaggagacggctgtggcagcgaagtctcacactgttagtcctgtagtagtaaatgagctggcagtggcggacctaggatttgaacccaggggactaaatgtaaagaccattgcatacaaggagatgggggacaccaggtccaaatcatccaaaatttacagcatgtttaaaacaaaaggtggttcccagctgaaggaatattgtaccaacttaactaaagaagattgccgacgccaaagtggatcttttgttgcctgtgataaggtccatttccgccgtattattgctcctcatactgatacaaacctaggagattgttcttttctcgacacttgccgtcacacaaagacctgcaagtatgtccactacgagcttgaccaaacaccagatatacctccaatgatggctggtgctcttgcacccccaaggcaaataaggctccagagagctgaatattgttcagaagtagagcttggagaagctcaatggataaactgtgacatccgaaacttcagaatggatatcttaggacagtttggagtaattatggccgatcccccttgggatattcatatggaattgccatatggcacaatggctgatgatgaaatgaggacccttaatgtccctgctttacaaactgatggattaattttcttatgggtcactggtcgtgcaatggaacttggtcgggagtgtttggagctctggggttacaaacgtgtggaggaaattatttgggtgaagaccaatcaacttcaacgtattattcgaactggacgcactggtcattggttgaatcatagtaaagagcattgccttgttggaataaaaggaaaccctttagtcaacaggaacattgacactgatgttattgttgctgaagtccgtgaaacaagcagaaaacctgatgagatgtaccccatgctagaaagaataagcccaaggacaaggaagctggaactgtttgcaagaatgcataatgcacatgctggatggctttctctgggtaaccagttaaatggagtaaggcttgttgatgaagggttgagagcacggtacaaggctgcctatcctgattcagaggaactcctagaaggcgcgcacacgggaagcccaatgcgaccacgaggaggcgaaggtgtggcagtgtcgcttcccggtgagacccacacaacggtggggtttcccggtagaattagggctccaaatccgatgggattgtcaggtgctattgggctgcaccttgggccgtgccagctattctccaagttgagcccaaggatgacaatttcccccgcggggccgggtcccctgcggggacccgaccctacgggggcaggggccatttctgacccgtggatcgtgaagaaggcgagactagtgaagaaggaggtggagcccatcttcagcgacagcgacgccatgaagaatgcccctaagaccaccactacatgcccaaggtgccaaaatggagaagcatactacaggcagatgcagattcgatcagctgatgagccaatgtctacattttacaagtgttgcagagaagaatgccaatttgattggagggaggactgaactttagtaatatttcttgtttaatgtgtgtggatatttttcctgctaaaactatgtaatcatatgaaaccttttgtaatcagctcatgccgcagcaaagagccaaagaaaacttacacatgggaaaccaacgtaccacaaaatatcgtgatattttggtct

SEQ ID NO: 22351 - DNA, 1689 bp, Oryza sativa
  Clone ID: TF_OsC298014_1
ctaattaatcacagaatattttgtaccggtgtaacactcaacatgacatgatactgatacaccaggatggcaagaggagccaaatttaactaggaaacatctcccctccttatcaccaccatctccagtatttctttttccacgtgacagaaggtccaggccgtacggcatactatgatacgaggacccagctgatggtgctccttgcttaagctgccatggtgcaggctgcctactgggagaagggatcacctttgattcatttagccacctctcagcaaagggtgacttcacaggcatgtctggtctgtcagtatccattgtgcaggatgcctcgttaaggtttatcccacggacgcttgtttccgtcttgtcatgatccaatttcggtgatgaagagaatggtgttgaagagacatttggcgtccaaattgcttgattcaagtcatgggtctcggtttttgcactcggtcgactaaatggaccaattttcttgtcttcctcctcttttacaatgaccatgtgatcaggctctgcagcttctgagctctttagcttagcactgtctaactgcttatcttgataaagatctttaccagacgatgagcgcgatgaataaatggtggtcattgggaaagctttctctggtggtgtagctggtgtatagttagggggtagcaaatcatcccaattctccaacagttctttatacactttacgcagagtaacctctgtaaggcctgttaccttacagatctctgcctgagttttccgcttgtcttcaagctgacacgcaagatagatagctgcagctgatatgcttatgggattcctccgtgtgcagaagcatttattaacaacaacctcaccaatatgggctgcaagttcctgagcagatttattgagctggagtaggctgcaaaaccgaggcatatgaactgctattgagttgctgttaagaggttggctcagtttcagtgattcaccaagtattttgatgtattttccaatttctttctggggaagattgctagcagtagagatttcctgcaaggtcctgggctcctgcgcctcgcggatggcctgcacgagtgcggccgtggcaagcgcctcgacgctgcggttcctgaggcacgtagcggaggagcagtccttgaagagctcgaaggcgtggtcggctatgtcccggtccagcctcaggatggaggcgacgtccacgatctggacgtaggcgcggaggctgtcgacggagaccataggccccgcggggtccggagtggaggaggccgcggattcgacggcgagcgcgcgctcgagctcggcgagttggccggagaaggcggacgcggagcgggcgaggacggggtggcgctcgagggagaaggccgagaaggcggagacgaagccggccgggaggaaggggtcgtcgtcgtcgtcgtcgtcgccggaggcggaggcggccgagggggacggcgacggcgcggcgtcggcgaggtcgggggtgacgagggggagcgggtggagcgaggggaggagggggaagaaggggtgggtgtggaggtggcgctcgaggacgaggcgggcgcaggaggagcactcggagacggcgcgggagagcggcggctgcgtcgtgacgcagcgcgccgggccggaggcgcggcagtaggggcactgcgtcggctgcgacat

SEQ ID NO: 22352 - DNA, 1899 bp, Oryza sativa
  unsure (1)..(1899): unsure at all n locations
  Clone ID: TF_OsC167645_1
atgtattgttctcactgtcaagataactgccccgtcgtaaaggaccctgacaaaaactacacatgttgtggtttgtgtgggaaggttcttgatgatcaggtttacgatggtgagccaactttccaaaagggcgccgacgggcaggcccggttggctggtagtattctatcaagcattgagagtggtaattcagtatcccatgaaagaactataaataaaggaagagaggagattaggcagattgtcagcagcttacatgtggctggtggagatactattattagcatggctcatcgctattatacactagctgttgacaagaattttacaaggggccgtcgaacaactcatgttgctgctgcttgcctttatattgcctgccggcaaagtaaaaaggcatatcttcttattgatttctcggaccatttgcagataagtgtctttgccaagttttgctacttgcggaacatccagttatccaaaagctcatcgaccccagccttttcatacatcgttttacagaacactgggaggaaaccaagtggattgtgtggtgcagcactatatatcgctgctctctctcatggatatgattataccaaggcagatattgttgctgttgtgcatgtttgcgaggcaacactaactaagcgcttgatagagtttgaaaatacagattcgggtagcttaacgattgaagaatttttggcaaaggctgatgaacaagtgcttgttactaaaatttcaccaaagtctggagaagtactttgcaagcacaaggataaagctgagcattttgctcatggactctgtgaaaaatgctacaacaaatttatgaaactgtctggtggactggagggtggctctgatcctccagctttccaacgagctgaaaaacaaaggttggaggctgctaaaaatgctaaaggaactgctgcatctaaagaggcagcactggaatcagtttgtgaggcacgcgaatctgatgttgagaataacattacgacaccgccaaagaatataattggagataagcattcgacaattccttctgtgaaagttgctggtgattctgtagctacagaagatcctgaaggggaaggtaaaaatgataaagcagatgaaggtcctgaaagtctctctgatattgatgatgcggaggttgatgggtaccttcacaacgaggaagaaacacagtacaaaaaaattatctgggaggaaatgaataaagagtaccttgaggaacaagcagcaaaagcagcattagcagctgagctggcagctagaggagtggttgtggaagaggggaagaggaaaagaagaagacataatgaagatggcaagaacgcaacacccgctcaaacaccagcagaagcaacacagaacatgttgaagcggaagagacttggatcgaagatcaatgatgaagctgttaacaaactgtacaataccaaagatgaagatggcaaagcagataaagagatggacttcaacgatgagtatggacaggacacaggtgatggtgaaacattcgaaggtggttatgattatcctgattacaactatgatggctatggtgatggagcctacggcgattatgatggtgttgatttttaatacccgatatatcaatgctgggtagaattgttacaattttatttgtgtgtgtatggcaacaattatcaattttacatgaatagttctgattagttgacgaaaacggagttaatcagtactcagtagacagtatagcagtgtagctcgttgatttctctggtgatatgttgagaagctgttgtagtaactgtattatttcattcagcgacctatacttgcaagttgtatattaaaaaaaatataaaaggttacaagtgggcgncgccccntggtggtgtccag

SEQ ID NO: 22353 - DNA, 1329 bp, Oryza sativa
  unsure (1)..(1329): unsure at all n locations
  Clone ID: TF_OsC715_1
gcacgaggttcctcttcctcctcctcctccacccccaaatcgcctcgacgagcggcgcggcggcgagggcaggagagaggcggcggcggcggcggcggcgggggcgagatgagcgactcgttctgcccggactgcaagaagcacacggaggtggcgttcgaccactcggcgggggacacagtgtgcacggagtgcggcctcgtcctggaggcgcactccgtcgacgagacctccgagtggcggacgttcgccaacgagtccagcgacaacgaccccgtccgtgtcggcggcccgaccaacccgctcctcaccgacggcggcctctccaccgtcatcgccaagcccaacggcgcccagggggagttcctctcctcctccctcggcaggtggcagaaccgcggctccaaccccgaccgctccctcatcctcgccttccgcaccatcgccaacatggccgacaggttaggtcttgtggctacaatcaaggaccgagccaatgaaatatataagaaggtggaagatctcaagtctatcaggggaagaaatcaagatgccatattagctgcctgtttgtatattgcttgtagacaagaggatcggcctagaactgtaaaagaaatatgttcggtcgctaatggagcaacaaagaaagagataggccgagcaaaggaatttatcgtgaagcaactggaagttgaaatgggtcaatctatggagatgggaaccatccatgctggagatttcctgaggcgtttctgttcaactcttgggatgaacaatcaagctgttaaagcagcccaggaagcagttcagcgttcagaggaacttgatataaggaggagtcctatttccattgcggctgctgtcatttacatgataacccaactctcagatgataagaagcctctgaaagacatatccttggctactggtgtggcagaaggtaccatcagaaattcatacaaggatctgtatccctatgcttcaaggctcatcccaaacacctatgccaaggaggaagacctgaagaatctgtgcacaccataggaaatttttttcttttcttttttgtcacataacatggaaattagatttgccagagaggagtaatgttgtccttggatgtgagttttactggcccatgtatcactgcacctaattttatgtgcatggacctgttagaacaaagttatctcgaatcgaagctaagttatatgcaaagcttatttaggaatggcaaaaaaaaaaaaaaaaaaaaaaaaaaaaaaaaagggcggccccntgggtngacctcaagggggggcccggtncccaattgggccctatagc

SEQ ID NO: 22354 - DNA, 277 bp, Oryza sativa
  Clone ID: TF_LIB3599-014-Q6-K1-A11
acgcccacgcgttcgcgctgatgctgatgcggacattgctgaaggataagtagcaggatccaccgctgaggggcccgctgtaggaggaggaaatcgcgcgcatggaagtcgccgtctaccagctgcacgcgtaaaggtgcaaggagaagagggagaacatccacacgtacttccgcaagggcaaggaaagcggcaagaatcggacggagcacgccaagacgtgccgctactgtgacgagctcaaccgcctctacttccgatacgtctactgcagctg

SEQ ID NO: 22355 - DNA, 247 bp, Oryza sativa
  unsure (1)..(247): unsure at all n locations
  Clone ID: TF_8857106
cgcttggcgctccggttgtagccgatcctctgcatgccggcggcgatctcctcccacagcgggcccttgggtcccatgtcgttgtactgctcctccttctccatgcgcaggtcgatgagcgcctgcacctcctccttgggccaccgcgacggcgccgtcgtcccgctgccgtctcctcctgctgccgcccaggcgtcctncgccttcgctctcggcgccggcacgggcaccagctgcanccccgccg

SEQ ID NO: 22356 - DNA, 1541 bp, Oryza sativa
  Clone ID: TF_OsC14298_1
tttttttttttttttgaagaaaaaagactcagaggtcaatagcaacacacaaacaactgcagaaagttttctgctggcttgtacaaggacggcttaaacatttatcatttgaaaggccaactagtaccaagtttaaacacttaacaactggaatagccattcacttgaccgattgcagttagctaaggtaaaattcaaacaggggcacagatcaatgtatatataagaccctaaatctgcaagctcctgcaaaagacaaaaggatcaccagcaactctaaccatttctagttctatcattccaaggcttcaatcactaaaaatcttctttggtttgatacccatctctatttctttaagcttcagctccaattccaaccgctcattctccagtttcatcttttcattctccagtctcatcttctccaattccctgtccttctccttgctgaacctcagccacttgaaatgcttctgctcaattttcagcatctgagctttgatcttcaggcggcgtttttcaagtcgaatatcacgcataccaggggtagagggactcttttcagcagttggaccaccagatccctcagagagcattttgttcatgtcaataacagcaacttctgacagattagacccaaaatgcgtctcctcctgatcatgcttcagcctcttggcaccatgaattccatggtgatgatcttcagcgctgacctccagatcatcgaattcttcatcttcgtcgtcatcgtcagaaaaatcctcatcatcatacccaaacgggttcttctttgcatgctcctctccactcctaagcgccaaacgcaatgacttctgaagggcgggatcatcaaacagacacattttgttcctgttatggtacgagcacatctcctcatagtgcagatgctttgagttcaggtgcttcctagcctcctctttgagctttcccgagagccgcatcccttcaagaagctcggggtgctcgacgacctggcacgccgttccccggccaaggatctcggtcatcctcttgtacctcttgttgagatcgttgaacttgtcctcgcactgctgcggcgacaccgggaagcccctctcggtcatcgccgcggagacgagcctccacttccccttcctcttcagcatggcgtgcttcctcctcgcggcgctgcccgtgccgtagtccatgtcgacgtcctcgtcgatgtaggccacggcggacaccagcagcttgaccatgccactgatccacttcacccggtgccactgggaggcctccttaccgctgccgccgccgccaccatggtggtggccgtcatccacgtcctcctcgtcgctcggcgaggtcttgaccacattgcccaaatccagcatcgggttcccgcggacggggaccatgccctggtggtggtggaggtgcggatcctgggcgaagtggaacggcggcggcggctgcatcgtcgcctccagatcgaaggcgccgacgccgccgccatggccatggacaagggctcctctcggcggcaaattcccctccat

SEQ ID NO: 22357 - DNA, 490 bp, Oryza sativa
  Clone ID: TF_OsC46205_1
tttttgtgttgacatgagtattttattaatactattaagccctgggccgggatgtcacactaggtcccctagcggttttgactctggttttctccgacccggttttctccgacatgacagctaactcagcgtgggacccacacgtcagcctcttcttctcctctcctatccacctttcttcctctttcccctcctctctcaccccctctcttctctgtattatccgcgtcacgaagccggcgggatggagcggggcggcgatgggcggagtggggcgaccggcgacggcgaggcggagtggcggatgcgcaacgccgagagacccgcaggggtggccaacgggcgccatggccacaggcgccggcgcgagggacaccggcggcggggggcgcgcggaggcggcggcgccgtggagggcctcgagctcggtgaagaagcgctaggtcttgccgtcgccgtggccggcgcggccgtccttggtgctcctctt

SEQ ID NO: 22358 - DNA, 1644 bp, Oryza sativa; identical to SEQ ID NO: 13027
  Clone ID: TF_OsC198059_1

SEQ ID NO: 22359 - DNA, 1856 bp, Oryza sativa
  Clone ID: TF_OsC88912_1
aaatctcccgtctcgttgtctcctccgctccttgcgccgccgccaagaggagtcgcggctgaacaggggaggggcggcgatcgagcagagcaggggagggaatcctggtgatgtaacaaaagtggtcaccagtgcctgcgcaaaatctcgtctgtttgtatatggtattaataagcagcttcagtgcctggctgatccttggggtgaatggaaggcaacaacctaccctctggaagcttgatgcgttctaactctgggcaaatgcatgctccaaatcctggaaagcagggctttgaccatactcagatgcctggcaatttatcgatgcatgtaaaccagtctacagattctgatcacttgtcagaatttcaattcggagagcttggaaaggttgaccaccaccaccaccatcaccatcgtcaacacgccaagaacggcatgagtgatgatgaggaacatggtgtcaacgaggatgccactgatagccagagcggcaagggaaagaagggcgctgcatggcagcggatgaagtggactgattcaatggtcaagcttttaattactgcagtatcttacactggggaggatccaggagctgattcaggagctgggaagagaaactctgcaataatgcagaaaaagggcaagtggaaggcaatatcaaaggtcatgggtgagcgaggctgcagtgtatcaccgcagcaatgtgaagataaattcaatgatctcaataagagatacaaaagacttacagatatccttggccggggtacagcttgcaagattgtggagaatcatgctctgctggattgcatgagtaatctgtctgacaagatgaaagatgatgcgaggaagatactgagttcaaagcacttgttctacgaggagatgtgctcctaccataataacaatcgagtgagtttgcctgaagatcctgcccttcagcgttcactgcagcttgcccttagatgtaaagatgagcatgatctgaggaggggaacaagcggagatgccgatgaagatgatcaaagtgtagactctgattccgaggaggagaatgatgaggaaaattacacattacaaggtgataagagtgccctgcccatgcataaaagattgaggcttatgacagatcaggaggatgtgggttttggcaactcttccagctcacatggatgtagcaggaggtctgattcccatggcatatcactggatatcaacaaagcatttcctgatggaaccaacttggctttggcgcaaaaggatttggctacacaatctgcagatcttgaggaacaaaggttgcagattgaagtccaggcagtctatcttgcaaaacaacggctcaaatgggagcgcttcagtaaaaataaggatagagaactggaacagatgaggttagagaatgaaaaaatgaggcttgagaataagcgcttggagctggaggtaaggcacaaagagttagagcttgaactcaagcaaaaaggcagtggcaatcatgcatgacatatttttaaccaatcaaggctgacttgtaagatggtcgctgatggcttctgttgttcgagtagactgacgcaagaaggttaaggttcagcatactttttttgttctgctttttttccctacattatttgtgctagtgagcttgatttgtaccataactcttattcttcagtgagcttgctaaccacacatactcagaagatcatgttatatgctgttaatgttgtcaattgtcatcattgtcgacctactgtttatgtataatgacaatgtctgattgcatccataatctgaggtgacattttcttcaaaaatcacaaaaaaaaaaaaaaagcggacgtccgctcgtc

SEQ ID NO: 22360 - DNA, 1708 bp, Oryza sativa
  Clone ID: TF_OsC26571_3
atcgccgccgtgccaccgccgccgctgcagcccacgccggtggcttccgctgcaccaccaccaccgattcaggttcagccgcaccacataatgccgatgacgccgcagccccagctgcaaccaccgcagccgcagagcaaggaggccaacaccgtcgtccgggcggcgccgccgccgcaagagcagcacgacacggcggcgtccggcggcggcggcggcgcgtcgtcgtcgaggtggccgaaggcggaggtgcacgcgctgatccagctgcgcacagagctggagacgaggtaccaggactcggggcccaaggggcctctctgggaggacatctcggcggggatgcggcggctggggtacagccggagctccaagagatgcaaggagaagtgggagaacatcaacaagtacttcaagaaggtgaaggagagcaacaagaagcgccccgaggactccaagacatgcccctactaccaccagctcgacgcgctctaccgcaccaaggcggccaacgccgccgccgccgcctcagcctcgccggctccggcgaccaccaccgtgcttgccccggtgccgctctcccagacgccgccgcacgtcgaccacggcggcagcaacggcaatgggaatgggtgggcgagtgccaacaacggcggcggcggcagcagctccgggggcatgcaaacgaaggctagcaacaatggcacggcgacggccggcgggctgcccgtcgtttcggtcgccggcggcaacggcaacggcaacggcgtggcggcgacgacggataacaagggatcgaagcaggtgcccgtcgcgaaggagacggcggggcagaggcagccacagccgttggccatgaaccacaactacggcaacgacagaatggccgacgacatggacagcgacagcatggacgacgacgacgacgacgacgaatttgacgacgacgaaaacgacgacgacatcggcggtggcaagatgcaggtgcagtacgagacgtcgtcccatttccaacggccgcagctgcagaaccagaacgtcgtcgtcggccggccaaacgcgagcggcggcggcggcggtggcgctccgacgacaccggcgggccctccgccgcctgcggcaacaagtgggacgtcattcttggcctgcgtccagtgacgacgacgacgacgacacgacgacatatatacaccaagagaaatatgctcaggtggtggcgatctcgatctcgatctactatctcctgtaccatatggacctagctagctagccatccacttgcattctttaactcctacaactacactatatcgatccctagttagcataagctcgttaaaacctgaaggccaaaatttactgttccttgcctagattccaagttccaacaacctgatcttttccgtatatttcttctcctttcctgcacataacattatttatcgtcgtatacaccttgtacatgtcacacactcaccatgtccatacaaacataaatggtattgggggacctcctggagggagagatctagctagagagaagataaaaaggaggtgagatatctttgtacatgtgaagggttttgcgtacgtaggtacatgtctgtttttctctttagtgctgtattaacagtccagtgctcaagtactacaagctacggcaaccgagagaaaggcatgcatgatcatgcttcttttttttgggtat

SEQ ID NO: 22361 - DNA, 3629 bp, Oryza sativa
  Clone ID: TF_OsC26571_1
atggccatttattacctggaaagggagggattaacccacaacatgccaatgcatggccatttttatactcctctgcccctgaaccattggcacgcggataccaccaacgcggctgacatgacacgtgggcccatgcgcatgtgggccccacatgtcagtggcatgaattttatatttttcatctcaaaagaaaaggtattgatgagagtagaaatggtgagctctcctgatgtactgatcattccatcacctccattccccagtggtaacactcgtgggggaggaggaggaggaggaggtagtagcccggcacgcgggccgcagcccgcaccgccgcacccggcaccgggccagcaccccccactactacaaccagctcgacgcgcgcgaccgcaagcggccggcggcccccccggcgtgctcgcaccccagccagctagaagtgcccccccgccggcagccccgctcccccgcttgccgcgccggcgcctccgcggccactgcaaccgcgccgcccagcgggcggcagacaccgaaccggcccgggcgcccggggccgagcataccgcgcgccggcggcagccacacccgcggccgctgcgccgccacggcggccacgaccaagcggccgacgccacggaccgcgcccatgcagcagcagcagggggaggggtgccagttcggcgcggtggcgccggagatgtcgccattctcgccggcgctccatgcgtcggcggaggccgcgtcgcccatcagcagccggccgccgccggcggccagctcgccgtcaccggccgcccagcagcagcagcacaggacaaggaccaacttcgacgagctggcgggcggcgaccccgcggcggcggaggcgggtttcccgacgccgaggcgctggcggcggcggcggtcggcgaggagggagccagcggcggcgcgggggggaaccggtggccgcggcaggagacgctggcgctgctcaagatccggtcggacatggacgccgcgttccgggacgccaccctcaagggcccgctctgggaggaggtctccaggaagctggcggaggagggttaccggaggagcgcgaagaagtgcaaggagaagttcgagaacgtgcacaagtattacaagcgcaccaaggagagccgcgcggggcgcaacgacggcaagacgtaccgcttcttcacgcagctcgaggcgctgcacggcaccgccgccggcgtcgtggcagcgccatcgccggtgacgtcgctggccccgccgccggcgacggctgtgggggtgtccggcggggtgcgcgcccccgccgagccgccgcccgcggtggtgatggggaacgtgatgagcttctcgacgtcgaacacggaggagtattccgacgaggaggactccgacgacgaggggaccgaggacatgggcggcggcggcggtgatgagagggggaagaggaagaggttgtcggagggtggcgccgccgcgggcgtcggtggcggcggcggaggaggaggagggagcgggaagatgatgaggttcttcgaggggttgatgaagcaggtgatggagcggcaggaggcgatgcagcagcggtttctggaggccatcgagaagcgggagcaggaccggatgatccgcgaggaggcgtggcgccggcaggagatggcccgcctcgcccgcgagcaggagatcctcgcccaggagcgcgccatggcggcctcccgcgacgccgccgtcgtgtccttcatacagaagatcaccgggcagaccatcccaatgccgcccatcatcgccgcccccgccatcaccgtcatgcccccaccggcgccatcccagaccctccgccggtcccccagcccaagaggcgtggccagccacagccgccgccgccgccgcctcagccgccgcccatcacgtccgcgccccaccaacagcagcagcagcagccgcagctcaagggacacaaagtcgccattgccggtgacgccgcgcaaagcagcatgcgacatgtgggctcatgacgcgacggcaggccgccgaggggcacgacgacaactgcggggtacgaggcggcggcggggggcagccgtcgtcgtcgcggtggcccaaggcggaggtgcacgcgctgatccagctgcggagcaacctggacaaccggtaccaggaggccgggcctaagggcccgctgtgggaggagatctccgccggcatgcggcggctgggctacagccggagctccaagaggtgcaaggagaagtgggagaacatcaacaagtacttcaagaaggtcaaggagagcaacaagaagcgccccgaggactccaagacctgcccctacttccaccagctcgacgccctctaccgcaacaaggcggctctcaactcctcctcctcctccgccgccgccgccgcaccggccctcccgccgccggagcacgcggagccggcggtgacagtcgccgcgccgatctcgcagacaccgccgccgccgccgccacagcccgtgacgacgaccaagaacggcaacggcaccagcagtacaaacggcgcgaacggcgaaggaggaggaggcggctccgggggcatgcaaatgcaggcgagcaacggcagcgtcgtcgccggcaacaagttcttcaccggcgcggcggcgaatggcgaaggcggaggacattgtgaaggagatgatggagcagacgccgcagcagttcacaacggacgggaccgacagcgacaacatggacgatgactacaacgacgatgacgacgaagacgacgacgacgtcaagatgcagtacgggatccagttccagaatcagaacccggccgccgccagcaccgcaccaccgccggcggcaaccccggcacccgcggcccccaccacggcgccgacgagcaccccccaacgacgggctccggatctttcttggcaatggtccagtgatccatccatccatccggtgactctctctccttcctacacatgcatatctccatgcgcgtcaatggcttcttcttcttcttcctccccctgcatgcatcagctatcagcaaccactctccttcgagttgggatctctcctgcaatgcatgtgcggtaagtgccacatgacatgtgggcccggaataggtgggacccacatgccagtgacaccagtacagcagtggattttgatccctctccttcaccttgtaattctcccgtgccattccattatttattgatttctctgtgtaataagagcatcgatcgatcttccctgaatcttcctagcaagaaaaagctagtagcatcgatccatttcttgattcgttcttgtgttaattacagtggtctctcccatctcgcgtctcctcttagctagtgttaaaagcaaaaaaaaaggaattggtggcgtggtaatttattgatttgttgtggtaaatttaataaggaccctccattcgtgagggttcacggagagggtttaaaacttggtgcggtgaaaaacggcacagaggagcggtaataacacctcgctctcgcggttaaaaaaaaaacggacgcgtgggttttaacccgttttttttgcagtggtataaaacgttgttactgtgcacattgtgtggttactcttcgtatactttgcatttttgct

SEQ ID NO: 22362 - DNA, 606 bp, Oryza sativa
  Clone ID: TF_OsC331190_2
atggatcccttccaccacctcaactcctccttctccaacccctaccacccactcctcgcctccccgccccaccacttcgcccccgacccactccccccacctcctcctccgccgccgccgccgctgctccccgccgacccgccgtcgctcgagcgggagcgcctcccgcagtggtcccacgccgagaccgccgccttcctcgccatccgcgccgacctcgaccactccttcctctccaccaagcgcaacaaggcgctctgggaggccgcctcggcgcgcctccacgccctcggcttcgccaggacccccgatcagtgcaagtccaagtggaagaatctcgtcacccggttcaagggcaccgagggcgccgccgccgtcgccgccgcggggacggatcagatgcagggggggcagggcggtggtgccgcggcgaggggggcctcgtcgtcgttcccgttccatgatgagttgaggaggattttcgacgccagggttgagagggcgcgcgcattggagaggaagaaggttaaggggaaggatcctgatgatgaccacgacggtggtggtgatggggatgaggatgatgaggaggaggcggatcaccac

SEQ ID NO: 22363 - DNA, 2896 bp, Oryza sativa
  unsure (1)..(2896): unsure at all n locations
  Clone ID: TF_OsC19996_1
aggctgatggcttcttggttatcgttttctgtctaagccagaaagcactactcactaattaacctgtaagggttgaggcctgatggcttttgctaagcgcgaccaccagaagcaacaaaagaagaaaaatgctgtgacttgtgagcccagccaagctatcactatctctctctctctctctctgtgcagatgagaatgagaggagacgatgagacgagagagagagacctattaagcagcagaagaagctcgattgcgtgcctaatcgctgcaccgtcgcggcgatagctcccgcccctaaagtcgatgcttaatggccgtcatggctctcatccacttggtcgtcatgatcatcggtcgctctcccaacgccaacgccaacgtcttcctcgtcgccgtcgccgtcgccatcatggtgcgcctcgtcgccgtcgtccttcgtcctcccttcctcgttctgctccccgtcgaacgggaaacccggcggcgcgcaccgcacgtctgggtacttcaccaccgcgtccagcagctccgagctgcccttcgcctcctccccgccattgccgcccgccgaggacgacccaccaccgccgccggagccggagcgggagtagaggcggtcgagctcgtcgaagtaggggcacgtcttggcgtgcgccggccgcttcttgccgctctccttggccttgcggaagtacttgttgatgttctcccacttctccttgcaccgcttcgcgttccgccggtagcccgccgccgccatgcgcgcgctcacctcctcccacagggggcccttcagccctggctcctggaacctatcctccagccccgtccgcacccggatcagcgcctccacctcgtgcttcggccaccgcgacgagctcagctgcagcgacccctcgccgtcgtacgccaccacctccttccccacgccgtcctgctcgtcggcgcccggagcggggttggcggcggggggtgggagcgtgatggtctcgccggagatcttttccaggtaggcgatgatggcggactcgcgtgcagcggcgctggcgcggtcctgcgcgcgcgcggcggcctcgcgcgcgaacttgtcggcctcctggcggcgccacgcctcgtcgcgggcggcgcgctcccgctcccggcgctccatggtgtcgaggaactgacggtggaggctctcctggtgctccatgaggcgctgcaccaggcgctcgaagaaggaggccgacgcgctgagctgctcctggcgccgccgcttgcgcttgcggcgcgccgcgtccgcccccgacggctgctgcgtctgcggctgcggctgcaccacggcgtgcgcgtcctccccggcagacgtctcggacgtgttgaggtgcggcgggttggcggcggcggcgtcggggaggtcagccatgggcggcgcgagcatggcattgtcgtccccggtgaggccggagccggagcccgtctgggggcctccgctgccgggcttgtagatggcctccagctcgctgaagagcttgtagttgacggcgccagcggaggcggcggatgcggcggcggcattgtcgtcgggcttattcttgaagtaatacgctgggggcggcggcgcaggggagtcgggagtggcgggtttgtccttgggcggcgccctcttgctgctgctgctgctgtgtatgtagtcgatgtcgagtggccgccaggtcggttctttgatggaagtttcctcgtcccccggccaccgccggagcctgctctccgtggccgcctcgtcatccccgccaccacctcctcctcctcctccatgaagcatcatgccgctgcccgcgccgcccccgtcgttcagcgcgtcgtccgttccgccggtggcgccgctgccgccgccgccgtcgacccccagcttgaagctcatggcggcggccaggaacggagggacgcccggaggggcggcggcgccggaggcagcgctcccggcgccggcaccggagctctccggaacggccgcctcgacgtcgaggccgagatggtggtgcgggtggtggtggtggtggtgctgcggggcccacctagccgggggcggtggctgctgctggtgcttctggtggtggtgctgctcgtggaagagctggaggtgggggtggtggccggcggcggccgcctggtggagcagctgctgcgtgaagggaatcccaccggcgccgccgaagtgcgccaagtggggaggcatctgaggcggcgggtggtggtggtggtggtgctgaggcagggcgtggtggtgcagcggctggtacctgaacggcgcgcccagctcctggccaccggccgccgccgccgcggcagcagcagcggcagcggccgcctgggcgggctgcggcggcgcggacatggcgaaggcgccggggtccatgatgtactgctggaactcagagacgccgccgtagccggactgcatggcgcctgcctgcagcttgctactccactatcttcacctagcttgctaccgagtagagagtgtcactcaccttcacttcacctagttcgctgcatcaagtggtttacatgccggtcgggtaattaagaaggtttgacctgagctaaggaagaaaatgcagccagccaaaaatctcactcacccctcacaacggtctgagctggagctggagctggaggtggaagaagaggatgaggcagggcagtgcagagtgcaggggtgaagagaggaggaaggaagaagggagagggtagcacaggcacagggaagctagtcacgtttggtttccattttgcatctctggtggggtgctcggctntatctcctgccctctttcgaaaggggaccctgctaatatccatatttgtatctccacccatccaggccagcccagggtgctcattattattc

SEQ ID NO: 22364 - DNA, 1907 bp, Oryza sativa
  Clone ID: TF_OsC10945_1
ctcgtgctcggcgaggcccaatatttcggcggaggctgaggcggaggcggaggcggctcgtcgccgcggaaacctcgtgctcggcgaggcccaatatttcggcggaggctgaggcggaggcggaggcggaggcggattgtctcctcgccggcgttcagttcagtcgccggataccgtcgttatattcatgtgcatcctcgtgcactcctgtgtccatcttatatggtaccaacaagaagttgaagtgtttgggtgatcgctttggggaaatggaaggcagcaacccacctggtaatatgacacagggaccttcctatgggagtttagatttgcatggtatctccaagcaaatgcatcctccaaactcaggaaatcagggcttcaaccagcctcagataccagggaattttaccattcctatggatagggttacagagcctgataacatctctgatggagttcagttaggacaacatgggaagattgcccatcatcaccatcaccacagacaccactcaaagaaccatgggagtgatgaggaggagcacgatatgaatgaggatgctgctgatggcaaagacaagaagggctctccatggcatcggatgaagtggacagattcaatggtgaagcttttgattactgcagtatcctacacaggggaggatcctggagctgatttaggcggtgggaggaggaactattcaatgatgcaaaagaagggaaaatggaaagcaatatcaaaggtcatgggcgagagaggttgccatgtgtcgccacagcagtgtgaggataagttcaatgaccttaataagagatacaaaagactaacagatatccttggaaggggtactgcttgtaatgttgtggagaatcactcacttcttgatcacatggatatttctgagaagatgaaagaggatgcaaggaagatactgaactccaaacacttgttctatgaagagatgtgttcctaccataataataaccgtataagtctgcctgaagatcccgcacttcagcagtcactacagcttgctcttagatgtaaagaggataatgatttcatgaggcatgcaagtggagatgctgaactagatgatgatcagagtgaagattcagattatgaggagaatgaggaagaacatcgagcagttgataccaatataaggggcccctcaatgcataaaaggatgtggcatgttgtagatcatggtgatgtaggttttgtcacctcatgctcgaatgatggtagtgggaggtctgatccctatgacgtgttggatatcaacaaaccctttccagatggatgtgatttggctttggtgcaaaaagacttggctctgaaagcagcagagattcaaaaacatcgtttgcagattgaaaccaaggctgtgcaactcgcaaagcaacgtctcaagtgggagatgttcaggaagaacaaggacttggaattggaaaagttggcgttggagaatgaacaaatgatgcttcagaataagcggtttgagcttgacctaagacacaaggagctagaacttgagattaagataaagggcaatgctaatcatccatgatctttgttctgttagcacttcatttcgcaatatggttgcagatcaattcaattcaggaccgtgtttatgcaagatggtagaggtggcagattgtttatgcaagatggtagaggtggcagattatctgtgactactgacaagtgacaacaatttcaatgctttatagctagctcagtgatcctctcctcttgttgtttatatatcattatatctcctgattctctctacttgtaaaatttccatgtgatactgggctccatctgtattctaaagttttcatcatttttttctatccaactttgttttactcaaaaaaaaaaaaaaaaaaaa

SEQ ID NO: 22365 - DNA, 1827 bp, Oryza sativa; identical to SEQ ID NO: 13041
  Clone ID: TF_OsC26571_4

SEQ ID NO: 22366 - DNA, 1803 bp, Oryza sativa
  Clone ID: TF_OsC78604_1
gggccccccctcgagttttttttttttttttttttttttttttctgctgaatgaatttattccagcttcggaacttccaaggctgtttgcaacaatccatcagaaatcttacattttgccagacaaccttcgttgtccggacaaattacacttctgatgaatgtatttgtttccagcttccaagactatttgtgacaaatgtaaaacccagtatcagcatgggtaacaaacacattggaaactaactaacaccaagatgctacagagctacatttacatttacatataaaccagaggaaccccaggacctgttggcagcaactaacaggtcctcatttaggctgtaatctttgtactcagccaaagcaccttggatcttcagagagcttgaatgatcatatttccaactttcaagttccaacttccaaggctatttacttcgggtaaccaatgtatatccagtataacttttccccttcggctgcatggacatttaaaattagcttaggtcaagatgccaaaagctaaatttacaataaccaggaacccatgatttgcttggcttcaaattgcattcaaaggtaggagtatgctccatatctactttggatatattatatgccttggtcaggcaatgtcaccaaatcaatcaccaagtgatcgcatcccttcataaatcacaccaggacgaaggtcatccagagtatcggcgattctgtagcctgaatactccctgaggagtgtccaaccacgccgcgagagaaagtctcggaagtcctcttcagtgtagaatgtcttgtcttctgtccggacctcatcattttcgaacatatatagtttgatggtcattccggtatcgagatgaagggtgtatgttccaaccggcatatccctgtctaaggaacggacaacctcatcctcatcttcaagccaaaaggcccgtcttgttcttagaccaaatgccgatttgatggcttctttaattgcgtctgcagtaccatcaatgcctattcttttagtgtaatcaccccacttgactaaaatgactctcccaccaaaagtaacctgattatctccaccattggtagaggtgtctctccagttccatggatttacaccattggttgcaactgcatcagctgttaatgcaagtggatgactatcaggttctagtcgatcttcgacacttagcaatgatctaccacttgcttcaacagggccgaacggaatgctagcatcttcaaaacccttgtcgaactgcaggtaggagtcgatcttggaggtgaccgtggggctcttgacggcgccactccccacggcggcgccgccaccgcccgtcggcttcccgcggcgcttgagcaggtcgtcgatctccttgtagcacgccatcttggcggggcaattcccgccgccggtgcccgcgccgccgccgcccacgccaccaccgcccccgccccgcgcgtggctgcgcgccttcttgaactccttgaggaggttcctccacttgtcggtgcacatggtcggggagcggtcgaacccttgctcccgcatcctggccgagatggcctcccagaggtgcttattggacttggaggtgttgaagtgggagtccatctcccggcgcagcgcgatgaggcagagggtctcgtcctggacccacgtctccgcgcgcttcttggggccgccgccgccgcccgacgccgccgcgcgggaggaggagtcgtggccgccgtcctcgccgctgctctccgggaggagcagcggcggggtgggctgctgcggcgacggcccggagaggagcat

SEQ ID NO: 22367 - DNA, 386 bp, Oryza sativa
  Clone ID: TF_OsC1713_3539
atggctatacaactttatcgctgggcaccttcatcttcattgatggctgacctgactgttgccgactggttgcttcgcctccacggctgtgcaacttcatcacttttgattgtcatggcgctgtttgggtttatcaagcaattgattgaatacaacatcattgctttttgccacccctccacagtcttcatatttggtaaaagtactcgggagatcatggcgaggatgattgaagcacacggctttggaggtgacgagaatggctcgtcggctgacaacaggtggcttcggcaggatacactggagctgctcacgatccgacccgagatggacacggtgttgcaggaagcgaccctcaacggggccatttgggaggaaatctccag

SEQ ID NO: 22368 - DNA, 3082 bp, Oryza sativa
  Clone ID: TF_OsC57118_1
ggagtagagagagagagagagaggggatgcaggtgcgggccactccctctccctactgtctccgccgccgacgccgccgtgcgccatggtggcgctcgcctccctctcgtccctctccccctgcgggctcgcgcgccgccgctcggcctcctcagccgcctctatctcatgctgcgcggccccgcccccgccctccgcgaaaggatctcaagaatccagaactccacgtagaagggtgaggaaaactgagggtgccaccaagagcctggaagattcagtcaagcgaaagatggagcagttttatgaaggattggatggtccacctctccgagtccttccaataggtggccttggagaaatcggcatgaattgcatgctcgtagggaactatgaccgttacatattgatagatgcaggggtcatgtttccagactttgatgagttcggtgtgcaaaagattatcccagacacaacattcatcaagaaatggagtcacaaaatcgaagctgttattataacgcatggccatgaagatcacatcggtgcgttgccctgggtaatcccagcgctggattcaagcacaccgattttcgcatcatcttttaccatggagctaataaagaggcgtttgaaggagtttggaatttttctctcgtccaggcttaaggtttttagagtaaggaagagatttcaggctgggccatttgaggtggagcccctccgtgtaactcattcaattccggactgctgtggcttagtgcttcgttgtgctgatggcataattttccatactggtgactggaaaattgacgaatcaccagtggatggaaaaatatttgatcggcaagcattggaagagctctccaaagaaggcgttacacttatgatgagtgattctacaaatgttctatcccctggaaggtccatcagcgaatctgttgttgctggttcattgttgcgacatatttcagaagcaaaaggaagagtaattaccacacagtttgcttccaatatacatcgtattgggagcatcaaagctgctgcagacttaactggtcgaaagctggtatttgttggaatgtcactcaggacttaccttgatgctgctttcagggatggaaagtcaccgattgatccatcaaccttggtgcacttaatagaatctaggttcttgctgaaggttaaggtagaggacatggatgcctatgccccaaatgatcttctagttgttactacaggttcacaagcagagccacgtgcagctctaaatcttgcatcttttggaggaagtcatgcccttaactatccaaagaggatgtccttctgtattctgctaaggttatccctggaaatgagtcacgtgtaatgaagatgttaaatcgccttactgagcttggtccaaaaattgtgatgggaaaggatgctggtctccatacctctgggcatgcctatcacgatgaacttgaggaagtcctacagattgtcaaaccacagcatttcttgcctgttcatggagaactcctgtttcttaaagaacatgaattacttggaagatctactggcataaggcacaccactgtaattaaaaatggagagatgcttggcgtgtcacatttaagaaacagaagagttttgtctaatgggtttgttgcattagggaaggaagatttgcggctaatgtatagtgatggcgataaagcttttggaacatccactgatctctgcattgatgagagattaaggattgcatctgatggcgttatttttgtcagcatggaaatcttccgacctcagaaggaacttgcttcatcacagtcaggattgaaagggaagttcaaaataacaacaagatgcctatggcttgataatggaagactattagatgcactttacaaagctgcatatgctgcattatcaagttgtccagtgaattgtccacttagtcacatggagaggatggtatctgaaatcttgaggaaaatggtaaggaagtatagtgggaagaggcctgatgtcattgcggttgctacagagaacacaacagtgagttttgtagaagactcagaaactaaatcatctggaaagtttggatctttctcagctcctaggcattcgagcaggagttcaggtaggagtcttgaagaaagtgataaatcatgcccagagaatacagagggagaggctaaagaaaatcttcctgatgtcctgagaacaacacgtgatgatgcaaccacaagctccaatggcgaagcatttttctcctcagatttgcataagcctaaaacactagagcatttttgggactcattcaaatcccctacagctgtaaaaattgcaagaattgtcaatggttcagctcaagggagtaaatcaaagattggcaagatcagcatagtgggtaaggactctagcgatccttcttctgctccagttaaatcttcaaaaaagaacaagtggaagcctgaggaaattaagagcttaattcagatgcgtggcgaaatgaatgagcaatttcagactgtgaaagggagaatggttctgtgggaagagatatcttctagcatgttgagccaggggataagtcgtacaccagcacagtgcaagtctctatggacatcattggttcagaaatatgaggagagcaagaaagatgaggaaagcgtaaagacgtggccgtatttcttggacatggacagggttttatcaagccaaggggaaatggcaacccaatgatcccaaggccgtagtttagtggttgtaattttggagagtgatggcataatcaatcaagtggcaggatgagatggctgcagcgtgttcttctccagagaatatacatgccataattcattccacgaaaagggaggcaggcacttggaatgactaagctgctacgtattcaccatgagtgtgctacagggctagggatagctgatattatttgatcaactatactagattaagtaattgaatagctaagttttgttgtgctattatttttggtgtaagaagacaccaaatgctaatccgaaggctttcaattgagctacccacataactataaaagaaaacctgcagcccg

SEQ ID NO: 22369 - DNA, 570 bp, Oryza sativa
  Clone ID: TF_OsC1326_7
ctctgcaggccgccggcgggtggggaggaggccggcggggagctcctcctgcgtgatcgcgagctccgcggtcggacacgtcgccgaggtcgccgcgtaccgcctcatcttctcaactcaccactcgttctacgacgggctctacgtcggcggcgtcgccgacgcccgcatccgcccggcgctccgcacgttgaagcagaacatgtcgctgctcctctccgtgctcatcgaccgcgtgcagccggtggcggtgcaggaggcgagcgaagcagccaggcggagtggggggcgccgtcgccgatcagcagccgctcgtcgccggagtaggcgacggcaaaggagcagctcaacgggagctactggagcacaacgggctgctgggtggcgaggagggcgaccggagcgggtcgcgggcaggcaaccggtggccacggcaggagacgctggcgctgctcaagatccggtcggagatggacgtcgcctttcgggaagccattctttaagggccccctttaggaggaagtctccaggaagcttgcggagatgggggttcaagatgagcaccaatgt

SEQ ID NO: 22370 - DNA, 369 bp, Oryza sativa
  Clone ID: TF_OsC1713_4560
atggcgctgtttgggtttatcaagcaattgattggatacaacatcattgctttttgccacccctccacagtcttcatatttggtaaaagtctcaggggctactgtggagattatgggtaccccatacccacacggcatgctcggtggagccacgggagctccctcaaccacgataggctggccagcgtgaagggtgacgagaatggctcgtcggctgacaacaggtggcttcggcaggatacactggagctgctcacgatccgacccgagatggacacggtgttgcaggaagcgaccctcaacggggccatttgggaggaaatctccaggatctgtgatgtattttttgttggagattttgtgatgtga

SEQ ID NO: 22371 - DNA, 1141 bp, Oryza sativa
  Clone ID: TF_OsC248026_1
atggagcccgggtgcggggaaggaggaggaggaggaggagggagggatgagcgggtgccgcagtggggcgcgcaggagacgcgggagctgatcgcggcgcgcggggagatggagcgggagtccgccgccgcggccgccgcgcgccgcagcgccaagacgctgtgggaggcggtgtccgcgcgcctccgtgagcgcggctaccgccgcactgccgagcaatgcaagtgcaagtggaagaacctcgtcaaccgatacaagggaaaagaaacatctgatccagaaaatggtagacagtgtcctttctttgatgagttgcatgcagtcttcactgaacgagctagaactatgcaacaacaactccttgagtctgaatctggaccatctgttaaaaagaaactaaagcgaccaagtggtgacctgtcatcggaggactctgatgatgaggaagatggcagtggagatagtggcgatgagaaacccataagaagcagaaagaggaaaattgctgacaagaggcaacaatcgcaacgaatggcagaaaagtcgaggactagcatttcaagcatccatgaattgttgcaggatttcctggtgcagcagcagcgcatggatattcagtggcatgagatgatggagaggcgttcccaggagcggattgtttttgaacaagaatggcgtcagtcaatgcaaaagctagagcaggagagactgatgctggagcacacatggatggagcgagaggagcaacgaaggatgagagaagaagcacgagctgagaaaagggatgccctcctgaccacactcttgaacaaagtcttacaggaagatttatagacactgatgcttcgcctacaactgatagatactttagttgatatttctggcatgttccattcaattctttgtagctcctgcagatgttgttcttggagagaatatttcttgtagcatttctattagattcctaggattctttaccagttttttagtgtactaattttgatgcaatattttattgtggatgtaagtatcagaccaccatcttgatacagtgacccatttatgtttgatgataacaacatttcagcaagctttcaaccttgtacaaaatttatgtaagcaataaggtatgtttggttgg

SEQ ID NO: 22372 - DNA, 508 bp, Oryza sativa
  Clone ID: TF_LIB4309-015-Q1-N1-E2
aataacccaccggctacaggaaaacagaactccataatattactcggatacgtacaacaagcgctatacataagtcacatagtgaccagcgctaactaactaacataactatgatgacggagacaaattaaacaacacgacaacagcgaacaagcttcttaagtattacacacacaagcgtgggacatacgaaatgcagccgtcggggggaatatgaccaggtcgctgagcatcacctggcggatcggaggcggggaaggcgaatgacgaccaccacgacgaccacgggagagctagggagaggaagcaagctaccagatgaaggtcatgtcagccgaggcacgggcggggccatcttcttcgcgggagggggagtggacgtggcggccctcggaggagcgagcaccatgcgggggtcctgcgccagtcgctgcacacgtttattaacccggcagttgtgctgcgtgcaccggtaatagctcctagggtgctgggtgttcctgacgac

SEQ ID NO: 22373 - DNA, 456 bp, Oryza sativa
  Clone ID: TF_LIB3433-042-P1-K1-H2
cccacgcgtccggcatgaggaaggtggatacctttgcgccgcacaacgacggccaccagtggaggaagtacggcgagaagaagataaacaactgtaatttccccaggttcggatgaaagatgatatatttgcagtatatttcctcatttctggtatctgcatctgtatatcttctggaaagagtgggcatctgttcattcttgtcaaccttgtcctctcctgcaaacaataagaaatttatcagttagacacctttctgtgatgatacttagatgctcttctcattctacccacccaaatcgaccacaaagagatgtgttgcaacaaatagtcgtagaaaactgaacccttttcttgttcatttcactcaaactgttgtctcgcctgtctcaatgcagatactactacagatgcacctataaagataacatgaattgccagcaacgaagcagattc

SEQ ID NO: 22374 - DNA, 441 bp, Oryza sativa
  Clone ID: TF_uC-osflcyp011c08b1
ttgtctcaaccaggggtggcagagagggaggtggcgcatgtgtacgtgctgatcaagacacaccagcctgtgctaggtggacaccagcagccgcagcagctggcgcatggtccactcatccactccatgcgagccctcaacgtggccctctccgtcatgaaccaaccacatgcttcttcttcttctgctgctgctgctgctgctgctgggcatcattacccggcgatgacaatgatcagagcagagtctactccggcgaacagacctgctgcagatgcttcatacaaccacggcgatggacggcaagaagatcatcacccgccaaacgaagaaggattaactgtgaggacaagtgattgtgggtttaccacacagatggcccttcatgaagatggctaccaatggaggacatatggacagaagaagatccagggcactcac

SEQ ID NO: 22375 - DNA, 488 bp, Oryza sativa
  unsure (1)..(488): unsure at all n locations
  Clone ID: TF_OsC143436_1
ggaattatgcacaaatcatcacgattttatagctaaaacaatacgggcgtacctccgtttagaaaaaaattaattctaacgacgaatctgaagttctaaacatatgattgtctagatttatagttaagatttaactcttttttttttaagtagtaagtctagtgcatacaagaaccgatcgatcgatcacgaacggcggtacaactaacaagcaaccaagaaaaacaaaaacagaagtaaattcagcgttcagaacgacgattccgacgagtgcgccgccgcggcggcgtgcagcggcgccccccacgcctgctcctgcgcgggaggcggcgaggccgccgccgccggaacgctccacggcggcgcagcggaagtagggtacgggaggtggccgccgccgccgacgcagccgggggtcccgtggttgtggaccccgtcgtaggtggtgacgacgtancgcgggtcgtngccgtctcgctccacccggt

SEQ ID NO: 22376 - DNA, 953 bp, Oryza sativa
  Clone ID: TF_OsC547_384
gaccatatctgatgggagatgtgctgcgagctcaggccaccgcgtcggcggaggaggtggccggcggcgtctggccctgcgagctcgacgaccacctcataggcgagctcctcggtgacgacggcctgttcgtcccggccgccgaacaccccaccctctactactcgttcggcgcggggtcatcagcagccgccgccgccgcgccgtgcaacgggggcggcagcgctgatcacgagcggcggccgcggccggcaccggcggtgagcagggatctgtgctcggtgtactcaggcccgacgatccgcgacatcgagaaggcgctgtcgtcgtcggcgtcgccccggccgccgtacccctccggccgccgctacagctctctgtatttggtggaagcggagagcaagtacacgagcaaggtgaggagctgcggcggcaagatgccggccgacgggtacaagtggaggaagtacgggcagaagtcgatcaagaacaacccacatcccagaagtaacttactgttaacagtgaaatttggtaagcccggagtagtcatcggcttagagtcagcatcggcttcgaagtcctgagattagccgatgagagttgtcaagtcgtcagttgtcggattcttgctatattcgcctgcttcttgattgccaattagggtttcatcggggtttcagccgatttcatgaaatcggacctccagccgatgtgtgctttaaccttcggatcgatgcttatttatcatatcattatttgccgattggtttatactggattatattgttattttattacatcatcatcagccggttgcctttatatcattatctacattggacatatagctgatagcacaaaaccctatcgctatcggctggtatcggcattggctattatcggctatcggctggaactactccatcggcttgtcagccgatcggctgttt

SEQ ID NO: 22377 - DNA, 666 bp, Oryza sativa
  unsure (1)..(666): unsure at all n locations
  Clone ID: TF_LIB4371-040-R1-N1-F8
ggccgttctgcggcggctttggggtggctgtgcgcgcccttgtagacgatctcggtgacctggccgtccggcgaactgctccaccttcttcttggtcgggcagccagggaaggtgcacttgtagtagctgcgcgggttctcgcttccccttcatctgcttctgcccgtacttgcgccagttgtagccgtcgtccgacgaaccgccggctctgctgacggaagccgccggccgccgccggcgccgccacctggctgtagctgccgttcccggccacgtcacccgccgccgccgacgaggtgaattccgctggcctagtgtcagcgtccatggtcggttcttggtagctccatggctgctgctgctcgccattgtacgggtcccctccctacaatattgcaaacacaacaatatcaatgatacatgcatcttttttttggagtgcatcacatgcagggtaattattttttcaagggagttttgataattgatctagtttagaactgtagcaagcttgactaatggtatgtgcttaggttttcatggagaacgtgaaaatgaagtttgcttttgcaaatctaagcctgagtgtcccttatcattaaaaaaacatgttgattaagatatctntgccgcgagatattaatgcatttcatcatatatgtatg

SEQ ID NO: 22378 - DNA, 654 bp, Oryza sativa; identical to SEQ ID NO: 13053
  Clone ID: TF_OsC352149_1

SEQ ID NO: 22379 - DNA, 463 bp, Oryza sativa
  Clone ID: TF_OsC46056_2
catgcaacaaacaggtggtcctatgatcctatctgaatttctgacaggtggagtccaagcatttgagaccagaggaaaggctgcagctgctttcaccatgataaagaaaagacagccacaaacaaccaaaccaagcaggaaagcaaagcagatatatctttgatgatgccacagcacaaagcttatgaaaaacgcatgtgcagattaggctatgaaaaaggtggaaacaaacaccttttttgtactgaaatattggggggaaaaagtagagggaaatcagaaaaataccaaccttgggtgcttggctccaagaatctctttctgcccatactttctccagctatggccatcatctaccggtggattctccacccctcccgtcgagctcaccctaatctgatgcctcttcttctccgtcgacgtcttcctgcaaaaatcaatcaaaaaaattcggacgcgtggg

SEQ ID NO: 22380 - DNA, 180 bp, Oryza sativa; identical to SEQ ID NO: 13076
  Clone ID: TF_OsC352156_1

SEQ ID NO: 22381 - DNA, 2253 bp, Oryza sativa
  Clone ID: TF_OsC1528_2199
atgtcggatgagtttgacaattccatagacccagccgagatttacactacagatatgttcatggcagagcatagtgtccttaactcttttgccgggcggatcgacaaaaggattaaggccagattggaaggaggtacatctaggcgtacaagtggtccaaggaagtacatcaataggaaccatgaaggagcccatgatcaactatttgctgattattttgctgaagatcctctctactctgctgcaacatttcgtagaaggttccggatgagaaggcatgtgttcctacacattgtggatgaactaggcaagtggtcttcctattttacacatagagtagattgtactggacgccttgggcactcaccattgcagaagtgcactgcagcgatccgtatgcttgcatatgggactgctgctgacgctcttgatgagtacttgaaggttccccagagtactgctctagagtgcttagaaaattttgtggaaggtgtcgtcgaggtatttagtagtaggtacctgcgtcgccccacggctgaggatctcgagcgtttgctccaagttggagagtctcgtggattccctgggatgttgggaagcattgactgcatgcactggcgatggaaaaattgcccaaacgcatggaagggacaatatacccgaggtgaccaaaagtatccaactattatccttgaggctatagcttcatatgaccttcatatttggcatgcattctttggtattcctgggtccaacaatgacattaatgtgctcaatcagtcccctctgtttattgaagcaataaaaggtgaagctccccaaatccaatttgctgtcaatgggacataatacaacacgggatattatcttgctgatggaatttatccggaatgggcaacctttgtaaagtctataagatctcctcaactagagaagcacaagctgtttgcaagggaacaagaagggaaacagaaagatattgagtgtgcttttggggtgttgcaagctcgcttcaacatcgtgcatcgtccagcacgatcatggagccaaaaagttcttcgaaaaatcatgcaagcttgtgtaattctccacaacatgatagtggaagacgagggagaaatggcagaagatcctattgacttgaatgctgccccaggaacatcaattgttcttccaccagaagttcatgcagggagtaatgatcacccaagcttcagcgatatgtgtacgatttatgagctagcagttgtcttcaaaggacctttgaaggaggcctaacatggggaagccgaacgttgactgatcgtactggccgaaacagtagtccatgtcggcaatctgcgccgccgccgcctcgtccgccacgctctcgtccgcggcgctcgccgagtgtcccgccgcgaacgccacgaacgccgcctctggggccgatgtcggccagatcaacggcggcggagcggctgcggcgcctcctccgctgatgaccgccgcgaggcacgtgacgatggcggcctcctcttcggcggcgctgccgccgccgccgacggcgtggggtaaaagaagacggctaaagaggccggcgccgttcatcgtcaggtccaacatttccgccggcggggaggaggacgactgtcgttgccggctcgtcgtcgtcggcgagctacctgcagtgttgggcgtgccgggaacagcttgcggctgctggcacgtgtgctcgttgaggtaggtgacaaggaacatgggcggctcgccggcgtcccgctgctgcacttgcttcttcgccgcgcaactccgctcgcggctgaacgtgcacttgaagtacaaccttagataattgctgtcctgaatgttcttttgcccgtattttctccactggtagccatccttgtacggggaaggtgtaataatctccgtcctcgtaaccacctcttctctgccatttctgacaagaacctcttcactcctaacgcgtttaaccctcgccggagtgtgcaagcaaatgctatcgtcagtcctcgtctccggcgccgtcctggtcactccttccggtcgtctgctgctgttgctgcaaggcttcagcatgtagagagacaccatgaacactcgcccgagctctctgctaacatcgacggcctccttctggccgcggctatcgagggggccttcgagcagcgcctggagcttggcgctgaggcggcggccgccggcgagctcccggtacagctgctctatggtatcttgaccaaatgccat

SEQ ID NO: 22382 - DNA, 1643 bp, Oryza sativa
  Clone ID: TF_OsC46056_1
ttttacaatcaaactaatgacaaggatttattctttggatgctcagaacatgatcaagatcttattttccttgacacaaatcaataataataatactaataataatacaaagaaacactctcatttggggaaaaaaaagagagaaaaattaagtactagtactactatttctcatctctattgacctaggaagaaagcttctgctcttcttccctcctctgttctttcatggcaacagctaaagaacagagggtggtcaccatgaactgcttctctagtgttcatcagctatgtgaggatcggatcgggttggattggattggattggattgggttgagtttggtcaccattgatctggttctgttcataatctcatgcgaagaagctggtgatatcaatggtgaatccggggtcgaactcgaaggcgtcgagggcggagaggtcggcgtcgaccatggcggtggcgggcgccggctgcgcggtcgccgtcgtcgtcgtcgcggcgacgagcgcggacaccacctcctggagctcggcgtcccgccacgcctcatcgccgccgccggccgccgcctggtggaacggcgcggcggccatcgagtcggaggtcgccggcgaggccgccgacgacgcggcggcggcgaggcggttctccggcgtcgacggcgcggagaacgggttgtgctgatccggcggcgccaggccgctcaccggcgacgacaggcagaacggcggcatggcgttccagccgccgccgccctgctgttgctgcggcggcgccgtcagcccctcgatcttcaccgtcaggccggagctcaggtcgtggaggcggctctcggcggcggcgttcgtgtccgtctccgtctccggcttgccggcgccggcggccaccgccttgtggacgcacgtgtgctcgccgtggtagatcacgtcgaacaccgtcgcgtcctcgtcggtgcgctgcacctgcttcgtcgccatgcatccctgcgagtggcggtgggtgcaacggtagtaaccccttgggtgcttggctccaagaatctctttctgcccatactttctccagctatggccatcatctaccggtggattctccacccctcccgtcgagctcaccctaatctgatgcctcttcttctccgtcgacgtcttcctcttcttggtggccttgaaaggcaagtcggagacgtcgctgagggggctgggagtcgccgagtcgaggtcaccggcggcgacagcggcggcggagcgcttgcggtggccgtcgaagtggccggacctgatcatgccgatggagcgctcggtgacggagaagatctgcgaggccaggtgcttgcagaggtcgggggagccggagccacccaggtgtccctccagctgcctcacgagctccttgatgtggctcagctccgtcaccaccagccgccctcctccattgccctccatgctctccatcacccctcaacccttgatcgatctcttcctgctctcaccaacctagataaattgctagctagctagctcgatcttgcaggttgcagctaagctcgcttcgcggtacaagaatggcaagaacgaccaagaagagtgatcaagaattgggtaaaaagatcgagatggcgagagtgcatcctcgtgc

SEQ ID NO: 22383 - DNA, 712 bp, Oryza sativa
  Clone ID: TF_OsC143437_1
cccacgcgtccggcagcagcagctagcttagctaacgcacagtgacgcgagcatggcggcttcgctgggactctgccacgagacgtcgtacgcctactcgtacccggcgtcgaacacctcctcctccttgtgcttccctcctctcatggcggaccacatcgtcgacggcggcggcggcggcggctgttcctttggtgaattcctggagctcggccattccgtgtactcgctgccgcttccgccgccgccgtcgcagccggtggtggtcgccggcgggaacaatgatcagtatggcgtgtcgtcgtcgtcgtcggcggcggcgacgacgagcaggatcgggttcaggacgaggtcggaggtggaggtgctggacgacgggttcaagtggcgaaagtacgggaagaaggcggtgaagagcagcccgaacccgcggaactactaccggtgctcggcggcggggtgcggcgtcaagaagcgggtggagcgcgacggcgacgacccgcgctacgtcgtcaccacctacgacggcgtccacaaccacgcgacccccggctgcgtcggcggcggcggccacctcccgtaccctacttccgctgcgccgccgtggagcgttccggcggcggcggcctcgccgcctcccgcgcacgcgcaggcgtggggggcgccgctgcacgccgccgcggcggcgcactcgtcggaatcgtcgttctga

SEQ ID NO: 22384 - DNA, 2113 bp, Oryza sativa
  Clone ID: TF_OsC116595_1
atgtccgcgcgccccccgccgccgccgcgcccgaggctcgcgctgccgccgcgctcggccgccgagtcgctcttcacgggcgccggcgacgccagtccgggccccctcaccctcgcctccgcgctcttcccctccgaccccgacggcggcggcggcggcggcggcgtcatgacgtcgtcctcctcctccgccgcgggggccacgagcttcacgcagctgctcatcggcaacctctccgcgcctcctcctcctcctcctcctccgcagcagcagcagcagcgtgaggcggcgcgaggaggcggggtcgcgagggccgggccggcgctgtcggtggcgccgccgccgacggcggggtcggtgttcaccgtgccgcccgggctcagcccctccggccttctcgactcccccgggttgctcttctcgccggccatgtttgatgcttttgatgtccttgatatgttcatacctgataagatccttccaaaacgcgctactcggattaagttggacatctactttgtaaagacaagtcctgaagggggttttgggatgtcgcatcgggaggctcttgcccaagtcacagcccaagcaagccattctccactcagaatgttcgatcacactgaacaaccatcattctcagcagctccaacatcatctgaagctatgcagcatatgaatgcagcagttaatatgacaggaatttcagacatggtcatgggtccaacaaacaatgagaatgtagcctttcaacctgctgaggcgtctcagaggtatcaagtcaatgcccctgttgataagcctgccgatgatggctataattggcggaagtatggtcagaaggtggtgaaaggcagtgattgcccaagaagctattacaaatgtactcaccccaattgtccggtcaagaaaaaggtagagcatgcagaagatggtcagatatctgagatcatatacaaaggcaaacacaatcaccaacgtccaccaaacaagcgggcaaaagatggcagctcttcagcagctgatcaaaacgagcaatctaatgataccgtgtctggtctgtcaggtattaagagagatcaggaagctatatatggaatgtctgagcaactatctggtttaagtgaaggagatgatatggatgatggtgaatcaaggccacatgaagcagatgacaaagagagcgacagcaagaaaaggaatatacaaatttcttcacagaggacttcagcggaagctaagattattgtgcaaacaaccagtgaggttgatcttttggatgatggttatagatggcgcaagtatgggcagaaggtggttaaaggaaaccctcatccaaggagttactacaagtgcacctatgctggatgtaatgttaggaaacacattgagagggcttcgtcagaccctaaggctgtcataacaacttatgaaggaaaacataaccatgaaccaccggttggtaggggaaacaaccagaatgcgggaaatgcggccccttcaagcagtgcacaacagaatatgcagaatttgtctagtaatcaagcttcacttacaatggcagacttcaacaacattaaccagaggccaattggggtcttacagttcaaaagcgaagaataacaccgtcaactgactttcttgggaccccggttgctgaagtggcacactggtatttggttgatttcttcaggcaaatattggatgcctgcaattctaatagtcacactgttccaaacgttcaagaagtaatacaacaatatcattgtctgcaattttcctaccgatacacagaattactgaaacgacacctagcctttctagcttgtacatgctgttactttgaagcataaactcaatataacaccagctaggtggatgtgcagatggacgggtcgtaatcatatacatgtttactttgtaatttgtttatcaatcaagctcctgcattgtaataagattgaatagagaagtgaaatgtacagatgctttcccgtatttctgtatatgttgtaatttgtagaagagtaaatcaacaaaagaaggtatactgtggacaatatattaagattctttctcaaactttaatccaaattgcttgtgctaggtatcc

SEQ ID NO: 22385 - DNA, 814 bp, Oryza sativa
  Clone ID: TF_OsC175690_1
catgccactagaggaatgtccactagcttatcattcattgctaacgaaatttgattgatcctcttgattatgatagaaagaatgcagaacacacaggttcaactgtggctcaagcacctcacaatgatggacatcaatggaggaagtatggtcagaaatggatctctagagcaaaacattccaggagctactataggtgtgccaatagtaaagtgcaaggctgtcctgctacaaagacagtgcaacaaatggattccagtggaaatggaacacctgagttgttcaaccttgtctactatcgcctactctcatgcaggggggagggctttccccggccacatcttgtcgtcacagcccatcacagtatgggaacctatcaatcaaaacgaatgcaatagccctacacttgaacacgaagcccatggaagttcaagatgaaagatttgaaaacttgtgtatggtacaaaatatgccagagtatttgatagattttgaattggagagagccttcgagtttattgtgaactcaccattgggttctgagcattggacgttcgatgattcaataagatgtgagcacagtccaatatgcatatggggatgatgacttgatgttagctataagctagcttggagtttcttccaggatgtgctgtaatgataagttgtgacctggtaaaaatacatagcattttgctcatgactaagaagtaaacctgaaattaagaagcatgtgtataagctattactaccattataaaaattgaagatgtttccgcggtccaaaaaaagaaaaaaaaaaaagaaaagaaaa

SEQ ID NO: 22386 - DNA, 998 bp, Oryza sativa
  Clone ID: TF_OsC4053_2
aagcttcctactacattttcattcataattagactgaatatcatgcaacgtgttgatcgatcggctagctgattgaccaggaaattaaatagcatccataagagttctaaaagctttcctagaacatttttattttacatcgatccctgctttttcgatttcccaattgcccccatcagatcagaaaacaataatccatcaccgatccatgtacataagcatgcgttcgtcaaaaggaggggaaggcccacctggcggggtggtccccggcggcgcccgggggggcgtcctcccttcaggggggggggggggggcggccctcgtagggggggatcaccatgcgggaattctccgacaggcggtccacccgcttttttacgcggcagttgttgggggtgcacctgtagtaactccttggggggaggctgttgctgcagccctctcgcccatacttcctccactcgcagccggggtgtccgcatccacggagcccaagtgcgcgaagccggcgggcggctcgccgtcgcagctcctcacgccgcagccgccctcgaccggcccctggatccatgggagcagcgggtacaaacagccatggtccgacgagaacatcacgccatggttcgtcccggtggcggcggcgtggtcgtggaccagctgcggcagctggggaagcttgtgctgcaggctcggcaatggcgcaagaaaggaaggaggggaaggcggcgtgtacgggcagagcggcgcgtagagcgcggcagggaggcaagccgtctccaactggctcccttccatgcacgcatacatgcagcaactaattaactagctactagtagtatgctctacaagagatcatgcagcttggattgccggtgaggtatagctagctagagagagatcgaagacgatcgagatgccaagaaagatctctttctttaggttaaaagggaagcgatgaccatagagagagagagagagagagagagcataaaagaaag

SEQ ID NO: 22387 - DNA, 2550 bp, Oryza sativa
  Clone ID: TF_OsC17758_1
atggcgctggagctgagcctggtgtccgcttcgccccctggtgggctggcggcgagcccgcccccgcccgccgccatcccggggaaggagcagcaggtggccggggtggggatcctgctgcagatctccatgctcgtgctctccttcgtgctcggccacgtcctccgccgccaccggttctactacctccccgaggccagcgcgtctctcctcatcggtctagttgtcggtgggcttgctaatatttcaaatacagagaccaacactagaacccaatcaggattcagtctatccccaaaaccattctttgcaaattttggggctattgtaacttttgccatccttgggacattcattgcttctgttgtaacaggagttctcgtctatcttggtgggttgacatttctaatgtacaaacttccatttgttgagtgcctcatgttcggtgctcttatatctgcaactgatcctgtcactgtgttatcaatattccaggagctgggcactgatgttaacttgtatgctcttgtgtttggagaatctgttctaaatgatgcgatggcgatttcgctttacaggacaatgtcattggtcagaagtcaagcagcagctggggagaacttctttatgatggttttccagttccttgagacctttgttggttcattgtcatcaggttgcatcacagctcagaatattctcaactatttcaaagggacctttggcattgtggtgttggagttggatttatctctgctcttatatccttttcctaagttctacatggaaactctgtttgcaaaacatgaaagactatgcatgcttagtattgaccatgttaaattgcaatatttatgtattactatttaccatttactcattgcttgttttacggtaaattattttatttactacttgatcttgtgcaaccttgaccactctgtgtacctgtttaagtatgctggactggatattgacaagtatatgttagcagaaggacttgggttgtcaggaattgtttccatactattcacaggaatggttatgaagcactatacattttccaatctctcaaacaactctcagcgcttcgtttctgccttctttcacttgctgtcatctttagcagaaacatttgtggcagtaaatgtcttttcttgtgcatatttggttaacatgtcacggccagaacatcgacgcatacctctaaagcatcagaaagcactttggtttagtgggcttagaggggccatggcttttgcacttgctctccaatctgccaatgaacttcctggaggacatggaaaaacaatattcacaaccaccacagctattgttgttttaacggtacttcttatcggaggatcgacgggcaccatgctggaagctttggatgtaattggtgatgaaaacagatcaatagaaaattatgacgacaacaatggttacatccccccaacgtatgaggaaggttcatcatctggaggaggattaagaatgaaactgaaggaattccacaaaagcacgacatcgttcactgcccttgacaggaactatctgactccatttttcaccagtcaaactgatgaggatgatgatgtcttcgaaattggccattatgccactcccaagagtgggtttcgccaaaatgccattctgccgaatggattcgttaaaatgccatgtacaagagataccaaacatttgttttgccatttgcgccaattctctccatttttacctaattttgcatctgggctgaccaaaataccccttcgggctggttcaagaccagtactccgcaacacctcctccggctgtgccgccgccgccgcctgcgcggaccagtactccgccgcgacgagcccgaagccaagtgctggaaggaggatgctgacaatgagggtagctccggcggcatgggcggcggcgctggcgggaagccggtgcgcaagccgaggcttgtggtgcacacgctgagcgacatcgacatcctcgacgccggcttccggtggaggaagtacggccagaaggtcgtcaagggcaaccccaacccaaggagctactacaagtgcacgacggtgggttgcccggtgcggtagaggtgaacaaccccaaaaccagagacgcggattctatgaccaatagcttggatgagttgccacctgacagccacatacacgatacttagcatggtagcatgtgatgagattggaagcgatcgtaagtatacaacttctcatagttgaatagcatatgaaagagcataccgtaggatagatatcataacacaacttgattcgtcggcgatgacgaaagcatgctgcttcatgtatatattttaggcctcgattagtacgtggtggagctgtaatgagacaaaaatgattgtaagggaaaaaaaactgagcccaagcccatgtcatgagttagaatgattgcaataacccagagctgatcattggcagcttactgtcaagttggaaaagcatgttaaccaaatcaccagctgtgtcattggctggtcttgaagttactaaaaaacacaaa

SEQ ID NO: 22388 - DNA, 960 bp, Oryza sativa; identical to SEQ ID NO: 13089
  Clone ID: TF_OsC346291_1

SEQ ID NO: 22389 - DNA, 1900 bp, Oryza sativa
  Clone ID: TF_OsC277_1
gcacgacccgccgctgaggcccccctccaccgctgcggtcgacgccgaccgccccgccggcaccttcgccggtccctgcctgccgctccctagggcctcacagcccaagcgctccgcccgccgctctatacgtggcacccccccgcccctccgcttggccccgcccgccgggcgctcgcttctctccttggctcagcttgacatcgtcggagcagcagaaaagtttgctcgatcgagctagctaactaggtcgtcggatcagtgataaatcgttcgccgatggatccgtggattagcacccagccttcgctgagcctggacctccgcgtcgggctgccggcgacggcggccgtcgccatggttaagcccaaggtgctcgtcgaggaggacttctttcaccagcagcctctcaagaaagacccagaggttgcggcgctggaggcggagctgaagcggatgggcgcggagaaccggcagctgagcgagatgctggcggcggtggcggccaagtacgaggcgctgcagagccagttcagcgacatggtcaccgccagcgccaacaacggcggcggcggcggcaacaacccgtcgtccacctccgagggcggctccgtctcgccgtcgaggaagcgcaagagcgagagcctcgacgactccccgccgccgccgccgccgccgcacccacacgcggcgccgcaccacatgcacgtcatgcccggcgccgccgccgccggctacgccgaccagaccgagtgcacctccggcgagccctgcaagcgcatccgcgaggagtgcaagcccaagatctccaagctctacgtccacgccgacccatccgacctcagcctggtggtgaaagatgggtaccaatggaggaagtatggtcagaaggtcaccaaggacaacccctgcccaagagcctacttcagatgctcatttgctcccgcctgccctgtcaagaagaaggttcagagaagcgcggaggacaacacgatcctcgtggcgacgtacgagggggagcacaaccacggccagccgccgccgccgctgcagtcggcggcgcagaacagcgacggctccggcaagagcgccgggaagccaccccatgcgccggcggcggcgccgccggcgccggtggtgccgcaccgtcagcacgaaccggtcgtcgtcaacggcgagcagcaggccgcggcggcgtcggagatgatcaggcggaacctggccgagcagatggcgatgacgctgacgcgtgacccaagcttcaaggcggcgctcgtcaccgccctctccggccgcatcctcgagctctcgccgaccaaggattgacgattgctactgatcgacgcggcggattcgatcgcttcttcttgcaactgcgggcatggccattgccatcctctcctgtctctgcctctctgttcttggtggcgccagcaagaacacgatcgacgcggtgtccatccatggcggagttcgatcgatcgattgatcggctagggaggaattgatgattcgctgtatataacctagaatttttacacgattactcgagggatagatcgacgagcaacattttcggccggcgcccatggctgatcaaccaacgatcatcggcggcggccggacgtgagcaagacgattcagaaaaaaattcagatatttgcgtcggcaaaagacgcttgtaacatgtagagtagggaggaaaattatttgaagtgtacgtagtgcagtccttttgagcaaaattaatcccaaatttgcttcggtcccgaacaattcaacgaaaaaaaaaaaaaaaaaaaaacagactgtacatctcactctctcacttggggtgaagccccaagagtgaactgaaattcaacgaggagagacgctgacataaaaaaaaaaaaaaaaa

SEQ ID NO: 22390 - DNA, 1089 bp, Oryza sativa
  unsure (1)..(1089): unsure at all n locations
  Clone ID: TF_OsC104544_1
atgaagaacaagggcagcagctgcaggtatcttcctcactcttctgcaccatgcgccaccgacggcgccagatgtttccgctgcgaccaccggccggcgatcgacgagatcgtcagggagcagtcgctggtgacccagctgcgcgccgtcgtgctgccggcgctggagacgaaggccgacgacgggcgggcggagatcgtggcgcagctgttcgggagcatactggattgctccaggaaggtgatctctgctctgaattctcgctacgtcggagaatcacctcctgacgatgatgagatcgtcgacaaaaggagggcgaagaggaagaacagtgagggcaagaagggtgatgatcaggtgaaagtgaagccacatgagcacaagagaagcaggagatacactaactcaacatcacaaatcacagctgttccacattatgacggtcatcaatggagaaaatacggacagaagaatattaacaactcaaaccaccaaaggagctactacagatgcagctacaagcatgaacaaaactgcaaagcaaccaagacagtgcaacaactggacagtgccggcgaaaccatcatgtacaccgtggtctactacggacaacacacctgcaagactaacatgagcaatgctcctctccatgttgttgaaacaagtaccactcaaagcatctcaacaacatgctgctctgatgatcttggcgattatagccaaaagatggagaacatgcacacaccagagttggcagaagtgtgctctgatgagcttggttcttaccatgcaataataggggcagagcacagtgcactagggttggaggatgaacacatgcacaagctgctcgacacatttgcatgtggagcattagatctggacagctgggagattgatgcaattgtgagatctggtttctgctaggtgaattttgatgcatgttgctgtgatcagttttggtgcttaagatggagtttttttgtattataatgggttatatggtgcttactgaactttggtgaatgcaaaataaataggttagtgcttgctagatagcanggtaagttaaaaaatataagtacttat

SEQ ID NO: 22391 - DNA, 1009 bp, Oryza sativa
  Clone ID: TF_OsC89344_1
gcgcgacgacccaaaccgagcgcagcgcacggaccgagatctgcgcccggcagcggcggcgaactccggtgaaccaaccatggccgtggacctgatgggctgctacgccccgcgccgcgcagacgaccagctcgccatccaggaggcggccaccgccggcctccgcagcctggagatgctcgtgtcgtccctctcctcctcctctcaggccgccggggctcacaaggcctcgccgcagcagcagccgttcggcgagatcgccgaccaggccgtctccaagttccgcaaggtcatctccatcctcgaccgcaccggccacgcccgcttccgccgcggcccggtcgagtcgtctgctcccgccgcccccgtcgctgctgctccccctcctcctcctccaccaccggcgccggtcgctgccgccctcgcgccgacttcctcgcagccgcagaccctgacgctggacttcacgaagccgaacctgaccatgtcggccgcgacgtccgtgacatccacgtcgttcttctcgtcggtgacggccggcgagggaagcgtttccaagggccggagcctgctctcctccggcaagccgccgctgtctgggcacaagcggaagccctgcgccggcggccactccgaggccaccgccaacggcggccgctgccactgctccaagagaaggaagaaccgggtgaagaggacgatccgagtgccggcaatcagctcgaagatcgccgacatcccgccggacgaatactcgtggaggaagtacggccagaaacccatcaagggctccccttacccacggggctactacaagtgcagcacagtgagaggatgccccgcgcggaagcacgtggagcgcgccaccgacgacccggcgatgctggtcgtgacctacgagggcgagcaccgccacacgccggggcccctcccggcgccacccgccgccgccgccgtcgccgcgatgccggtgtccgtcgccgtgtccaccggcaacggacatgtctaa

SEQ ID NO: 22392 - DNA, 1391 bp, Oryza sativa
  Clone ID: TF_OsC7069_1
ccgcacgagggagagagagcggggcagccactccctctcctcctcgtcgtcgtcgtctccaccggtggaggtctcagccctggctccagcgaggtagggtgggaggggagtgattcatggaggggatggaggaagcaaacagggaggcagtgcagagctgtcacagggtgctcaccctcctctccagcccccatagccagcttgtccctaacaaggatctcgcggcggctacgggagaggctgttgcaaagttctgctccgtggcatccaggctgaacaatggcaatggcctccagggccatgcccgggttagaaagatcaagaagcccttgcctatctttgatagcaacctctttttggagagccctgcactggctgtggcgatggcagccaagacacctaactcgagtccgatcactagcctccagctgtttccgaggtaccatcagatggagggctcttcttcaaaggatcctgttaggatccctgcccaattccccaaaaggttgcttctagataaccctgcggttgattcggatgggccatcacgggggccaccgctccagctcatccagccggtgtctgttgcgcccccagctggaacgcctcacccggcattgccttcggcgcatcttcatttcatccagcagcatcagagctaccagaggtttcagctcatgcagcagatgaagatgcagagtgagatgataaagaggagtggccttggtgaacagggtggtagcaatggtggtggtaagggtgttaatctcaagtttgacagttctaattgcacggcatcatcctcccgttcattcttgtcgtctctgagtatggaggggagcattgcgagtttggacggtagccgctccagtcgtccattccagctagttagtgggtcacagacgtcaagcactccagagttaggcctcatgcagaggaggaggtgcactggtagggaggatggtagtggacgatgcacaactgggagccgatgtcactgtgcgaagaaaaggaagctgaggataaggaggtctatcaaagtccctgcaatcagtaataaggttgctgacattccagctgatgagttctcatggaggaagtatggacagaagccaataaaaggatccccacatcctaggggttactataagtgtagcagtgtaagaggatgcccagccaggaagcatgttgagagaagtggcctccagggtgaatgtggcaaggctactgacaagcgcagtgacaggcaaccattcgtatccgttctactctgtccaaagtccaaaccgtgcaagtctgaaatggcctgtttccttgtagccactagcccactaggcaagcttgaactaatgccagatactcaaggcccaactgccccaagtactccataa

SEQ ID NO: 22393 - DNA, 1802 bp, Oryza sativa
  Clone ID: TF_OsC47923_1
atggggggcgagccgcgcgcgcgcgcggaggcggcctgggcggctgcgttgcctgccgcgttggttgcgctggtgcgcgacacggctacatacacacgaatgatgcaccgtctccgaatggaaacgccacggggccccacctgccagcttgacccctgctgctgctgctgcactgcacatgttattccccctccgcctccggtgtcacgcacgcacgcgacgcgacgcgatgccgaggcgtccgtaccaccaccgccagcatcagcggccgtcagctcgagatcggacggcacgggacagatggcagcaggcgtcacgctggcgtgtgccgcccccccgccgctaagggccccacgtgccagcgatggaggcaggcgccgtggggtggtcaaagggggcgcggggacggacacgtgtcggtcgccgcaacgtctgaatgttcgaccgcgcgagagagagagggtgcgtgcgtgcgtgcgtgctagagccaagaaccacgagcacggccagcgtcggcgagaggcggcggtggatccggctatgtcgggcgagtaccagttccaggacgagctggcgccgctgttcgcgcggccggggggcggcgcgggggagatgcagatgctgccgtcgtcgtggttcgccgactacctgcaggcggggacgccgatgcagatggactacgacctgatgtgccgcgcgctggagctgccggtcggggaggacgtcaagagggaggtcggggtggtggacgtcgtcgcggccggcggcggcggggcgccgccgctgacgccgaacacgacgtcgtcgatgtcgacgtcgtcgagcgagggggttggtggaggaggtggaggcggcgccggcgccggcgccggggaggaggagtcgccggcaaggtgcaagaaggaggaggatgagaacaaagaggaaggcaagggagaagaagatgaaggacacaagaacaagaaagggtcggcggcgaagggagggaaggcggggaagggggagaagcgggcgaggcagccgcggttcgcgttcatgaccaagagcgaggtcgaccacctcgaggacggctaccggtggcgcaagtacggccagaaggccgtcaagaacagcccataccccaggagctactacaggtgcacgacgcagaagtgcccggtgaagaagcgggtggagcggtcgtaccaggacccggcggtggtgatcaccacgtacgagggcaagcacacgcaccccatcccggccacgctccgcggcagcacgcacctgctcgccgcgcacgcgcaggcggccgcggcggcggcggccgcgcaccagctgcaccaccaccacggccaccacggacaccacggcatggcgccgccgttgccgctgggctccggcgccgccgcgcagttcggccggtcgtccggcatcgacgtgctgagcagcttcctgccgcgcgccgccgccgcccaccacggcatgactacgatgggcggcgccgcggcgacgacgacgacgagccatggccttaacagtgcaatcagcggcggaggcggcgtctcgagcgagacgacgagcgcggtcaccgtcgccgcctcggctcagccgtcgtcaccggcggcgctccagatgcagcacttcatggcgcaagacttgggcctcctgcaggacatgctgctgccgtccttcatccacggcaccaaccagccttgacgcgacgaccaccatcaatctgaagctgaattaatcatcagactagctagacaagaggtcatttggctctcgatcgatcatgctgtttaattaattaacatctc

SEQ ID NO: 22394 - DNA, 2142 bp, Oryza sativa
  Clone ID: TF_OsC2081_1
atggaggactggatgccaccacccacacccagcccgagaacactcatgtcaagcttcttgaatgaagattttgtctctggttcattttccaatattttcagtgatcatgagagcaacaaaccccaggatcagtttgagagaaacagagagcttgtggatttgagtaaggaagtgccttcccaattcgcaagacccgcattccagagggatgcttccctggatcatagcttggtcagtcctacacagagatcaaactcgcatggtggtttggcagagcgcagggctgcgagggctggtttcagtgtcccgaaaatcgatacatcccgtggtggttcgtccacagtaattcgatcgcccgtggcaattccaccaggtcttagtccaacaacacttctcgagtcaccggttttcctttacaacgcaatggcacagccttctccaaccactggcacactgccatttttgatggcttcaaatgctaagtcaacaataccgtcagctaccaagatggacgaagattgcacatttggcaatgacactttctccttccaaccgcatgtagggtcgagacggccaaatttctccgctgcagaaaagggtcccaatgcttgtcaccaaaaccaatcgctgtcgaatatccatcagcgggaatccagtcttcagtcaagctttactgcagtcaaagatatcactgatgaaaaaaacattaaaacaaagacatctgactccatgtttggtgataaccactcttctgatgaacaagatgatgagactaaccaaaatggagaaaactctatgccacctccgaaccaccgttcaggtgtccctctgtcacataccaatgatccagaagtgaatgtcctagagaaccgcggttcacagacatgccataactctgcatccttgtgggacaatgccaaaaatgattgccttcaagatgttcaaagtgaagttattgaaacaagaacagctgcttgtcttccagtatcaaccaattgtgatacatctatcatggagtcccaagatgcagttgatgtgtcgtcaacactatctaatgaggaggatgatagggcaacgcatggcacggcttctatagagtgcaacggggatggagatgagactgattccaagagaaggaagctggatgctttgacagctgcaactgctgctattaccaccaccagtaacattgacatgggagctgcggcatcgagaggtgtccgggagcctcgtgttgttgttcagacaacaagtgaggttgacatccttgatgacggttaccgctggcgcaagtatggacagaaggttgttaaaggaaatccaaacccaaggagctattacaaatgtacgcaccaagggtgttcggtgcgcaagcacgtggagagagcatcgcatgatctaaaatccgtcatcacgacgtacgaggggaagcacaaccatgaagttccagctgccagaaatagtggacatgggagctctggatctggaaacgctccatctgcaccgcaatctaacggctctcagcgcaggcaagaacaagggcaagccagcttcagccagtttggtggcgcggctcccttcagctccttcgttctcccaccaagaaaccaatttggaccatcggcgagcaatttcccctttgggatggtcccgccaggcatggcgattcccatgccatctctagggtctcttgctccagcaaagatggctggtcatccatccaccatgcagggctaccaggggctcatgattccggaaggagagatgaagacagagcccatgtcgcagctcggcttccccgcggtaaaccaatcttcatcatccttccaacagatgatgaacaggcctccatcatttggacctcagatgtaaataataatattaaagaaagaaaagaaaatgatagatgtgcttcagcttctatacatggtagcaatgctacaacatagctttgttgttctagcttttacctgttattttttctttgggcttttattttttggaagcaaagaatgcagaagatgttacccgttttgtttatgttgtaattggaaaaaaaaggtggtggtagtgttcaggacaaaaggcaaaatcattcaattggaaaaaaaaaagaaaaaaaaaaaaaaaaaaaaaaaaaaa

SEQ ID NO: 22395 - DNA, 699 bp, Oryza sativa
  Clone ID: TF_OsC123567_2
atgtctcctgtgccgagtccgcatcaatcacaccatctaggccatggctcaaggaaagagaagcgcatgaggaaggtggatacctttgcgccgcacaacgacggccaccagtggaggaagtacggcgagaagaagataaacaactgtaatttccccagatactactacagatgcacctataaagataacatgaattgcccagcaacgaagcagattcagcagaaagattatagtgatccaccattgtactcagtcacctactacaatgagcatacatgtaatagtgcttttcttcctcttagcccctcagagttccagctgcagactgcatctgggaaggcagtctccatctgctttgaatcatctggggctcaagaaccaatgaccaatgccagctcaccttcttcaagcgcagcacggcgtagcacaccttcagagaacaagaatcagcctcttccacggcattcggaagcctattcttggggggttggtgttgtagaacaaaagccgtcctgcactgagctccaatcttgcagcaccgaatgtcaggatgcattttcagctggtacgattcctgaagagacagtagatgcaggaagatttggttctatcagattcttccattttttgtaaatgaattaatggaagacagtttattttatttcaaagagctaatatgatacacatgttttttcctct

SEQ ID NO: 22396 - DNA, 1882 bp, Oryza sativa
  unsure (1)..(1882): unsure at all n locations
  Clone ID: TF_OsC44619_1
ttttttnnnttttttttctagctccttgaagcctggaaatcaaaagcctcattttgaattaatttgtttccccccacatagtgcatatacaattgagtgatctcacgcttgtgcatgcttatatatactgtactctatgtacatcaatttgccaattaggagactaatacgtacgtatagcagaacaaatcaagcaattattaccatctaattgattatctaaacaaaatttagatcaattttatgaacttgcttcacttgttcggcgccgccgcgccgccgccgcgccccatgtaggacgtgatcgccgccgccaaaaccgactggaagctcgggtccgacgtgatcgccttcgcgatcgtgtccgtcacggccgccggcgcgacgccgccgccgccgatggctctctgcaggtacggcgacgtcgtctggccgccgaacagctgctccggcgccggcctcgccgccgccgccgccatgcccatcatgccgaaatgatggccgaacggcgacggcgcaacgcccttggcgtagtatggctgcgccgccgccgcgccgccgtacgccaggtacccgctgctccacgccgccggcagcgccctgctggactcgtaccccgcggcggcggcggcgtagggcgacgccgacgacgggtgcaggagcgagtgcggcgcggtgaggtcgagcgtgacggtggggcaggacgtggcggtggagatggtggtcgggccgagcagcccgacgccgccgccgccgccgacggccgaggcgaacggcaggtggtggtgaacgccgccgctgccgtgcatcgtggagttggtcgagccagacgtcagcatcgccgccgcggccgacgttgtggacgccatcgccgccgccgccggcggcagcgggtggctgtgcgtgccctcgtacgtcgtgatcaggatcgacatgtcgtccgcgcatctctgcacctgcttgcgtacagggcagttgggtgcaacggtgcaacggtaataggcgcgcgggcaagggttcccctttgagattttctgcccgtatttccgccactgacacccatcgttcatcgtgggggtgtcgcacttgactctgacggaaaccctagccttcttggcctgctgctgctgcagcacctcgtcgtcggcgccatcgccgccgccgctcgagctcctggacgctttgttcggctgggtaggctcgccggcgccggcgccggcggcgtccccgctgctgtcggagctgaggttcagcacgggcatcggcggcaacgcgcggcggctcgcctgcttgtcgtcgtcgtcgtcggaggcaacgccgccgcgagcgcagctcagcccgagggacagccgcccgtcgtcgccgccgccgccggacgacggcgtcctctcgtggcccttccggcgcgtcgcggcggcgttgggcctcgtgcagaggctcagggagacgaggtcgtcgggctcgtcgtcgtcgtcgtctccggagagctccgccgccgtttgctccttgaccttgacgacgtcgaggaagtgcgtgtgcagcgacttgtagtcgctgacgatgcgtgtgagcatcgtcttgagccgctcgttctcctccctcacctcgcccatctccgccttcgctgcctccatcttctcctccttcttgatgatggttgaatctctctgcgtcgatggtgcaaaactctcaaagactattggaggcgcgcctccaatcgcggcgacgtcgactttcttctcgtccctcaccggcgggctctcgacgacgacgtccattgcggcgttcgatcgatcgtcgttaccgatctcgaaatattaaaccaggcttagcttaatcacgtaggctctgaacaagaagggtatcaagcaaaacgatgcgt

SEQ ID NO: 22397 - DNA, 1120 bp, Oryza sativa
  Clone ID: TF_OsC209019_1
atgggcttcgccaaaacaacaaccgaaacggatatcaaattgtttcttatggggccgtgcggggcatcaaagcaaaacaattcgaaacggggcggctcgcgcacggtcgcgcgcgccgaagcttcatccaacgactcgagccaggaagctcgacggctcttcggcgcgtgtcacgtaagagagtcggccaacccacatgcacgtgtaccgatgtacatggcggcggcggctgcgggagcaagcacacccttcaatttttgccgccacggctcgcacgccgagtacgacgccgtcttcagcggcagctggatggcgcgccgcccctccgcggcgccgcacggtggcggcgcctccggctccggctccggcagcggctacggcgccgcctcgtacgttgctcccaccttcggcgcggcgtttaggcagcagcatctcgacctcctcgactacctgtccgacgatcagggcgttccggcgccaccaccagcggctgtgcccagcgcgtcgtacgtgacgccggcgccggcgatggcccccgctgaaccggtcgtgccggatgctgttgccgccgccggcggctatccgaggagcgtggctgcggcggcggcggccgtggccggcgagggaagagatcggacgacgacggacaagatcgcattccggacgaggtcggacgatgagatactcgacgacgggtataagtggaggaagtacgggaaaaagtccgttaagaacagccctaatccgaggaactactaccggtgctcgacggaggggtgcaacgtgaagaagagggtggagagagacaagaacgacccgcggtacgtggtgacgatgtacgaggggatccacaaccacgtgtgccccggcactgtctactacgccgcgcaggacgccgcctccggccgctttttcgtcgccgggatcagtcacccagaccttaattaagctaggatatgctttgccggcccagctgtggcttagcttgatgtgcagctctagttattgtatgggctgtacggttcagttatttgaagcgggttatacttatatgttgttaatgtttgcctactgattttaattaatttcttagagttagactcaatttggcggagggatt

SEQ ID NO: 22398 - DNA, 821 bp, Oryza sativa
  Clone ID: TF_OsC140224_1
agtggcgcccccgggcccgaggaaaattcaccggtgaaaaggttcagcactgtgcaatggcggcttccgtaggactgaaccctgaagctttcttcttcagcaactcctactcctactcctcatcccctttcatggccagctacacgccggagttctcggccgccgctatcgacgccaacttattctccggcgagctcgatttcgactgctctctcccagctccggcccaggagtacccggaaaatgaaaacactatgatgaggtacgagagcgaggagaagatgagggcgagggtgaacgggaggatcgggttcaggacgaggtcggaggtggagattcttgatgatggcttcaagtggaggaagtacggcaagaaagctgtcaagaacagcccaaatccaagaaactactaccggtgctcgacggaggggtgcaacgtgaagaagcgagtggagagagaccgggaggaccaccgctacgtcatcaccacctacgacggcgtccacaaccacgcgagccccgccgccgccgccgcggcgctgcagtacgccgccgccgccggcgactactacagcccgccgctcagcagcgccggctcgccgccggccgcctattcggcaggcggctcgctgctcttctgaggctgatgagtttgtctagtactagacacgcccgggagctctagctaggatagaaaactagagaaagtttaattatacctgaattttaattaatcacctcacaaaactctgatgtatcatattatatcgtgatagtgactgcttgttaatttaattttggcgatcgatgtgatcttcggt

SEQ ID NO: 22399 - DNA, 1674 bp, Oryza sativa
  Clone ID: TF_OsC457_1
ccccgggccgcagcccggcggctcggcgcccccccccctggtgtccccttttttttttctttttttttttaggcacgtgaagctatatgtttttttttttcgaaagcggaagaacaggattacattgtacccaaatcctcttctcttgcttgtcacacaaaaaaggttaagacccccagctcataatcaggaaccacattactacgtactaatcgtgttgctacttgctagcatgtctgcagcttaaagctgagacgacacatcaacaaggaatttacaaactaatctagccaggctaattaggagtatctttgcaagttccaaattaagatccgcgctgccgctaattatttctgtacacacgcgtggaatccatcttctttcgatcgttttacccggcccgtgtccatccatgattcttcggtgatcaaaagctcaaacccataatgtcgtccagatcgaagacaacctcgtcgttcttgaagaactccatgccggcgacggcgtcgtagctccagtgcagggaggacgtgacatcgccctggtccggcccgaagggacccgcgactccgccgccgccgccccgccgcgcgccgcggagctgccgggcgtgaggctgctcagcacctcctcctggtcggacgagccgacgccgccctccaccttgagcggctgcagcagcgggcccggcgcggtgaccgtggtgatcgtgctggtcgtcggcgccgcggcagcgtctactggcgccgccggcgcggcgacgaagctgatgaggcgggaccccgcttggaggccgccgcagccgtcgtcgttgtcgccggcggcgacctggtggatgacgtgcgccgcgatgatgggggcggtggccgggtcccggcaggtgtgctcgccgatgtaggtgaccctgtagctcgccgggtcgtcgtcgcagcgctgcacctgccgctgcgccgtgcacagctggtcgtacttgtgcgtgcaccggaagtaggcctttgggtgcttggagttttggatctccttctgcccgtacttgcgccatgcctggccgtcgtcgaggttcttgacgaccaccgaattcccggacgattgctgcgtcctcgttttacgtatcttcccaatctcctcaatccccttctcaaacactccccgcctcctgcggcagttggccttccggtcggcggcgggggctttcctcttcccgccggcgctggccccgcccccgcaggtgacctcgctctgcacctccgacccttctcctccggcggcggagaccgccgccttgtcgagcgcccgcatcgcccgggagaaggtgtggagaatctggtcgacgaagcggccggcctccggcgagtcgcggaggagcccctgcagctgcgccgccagctccttccccttctccatgtcctccatcacctgcgcgtacgccggcgccggcgccggcgacatcgatgacgtcatcctggagcggattgatccgtccccattgctgcagccggcggggggggggcgcaggcgcggtctaccgtcgatgacgcgtaccgtgtcaatgccaggtgggaccgtgcggctacgcccagtgagcggctcacgaggggtttccatggactggggcgctcgctgcgtgggcgatgggaaaaagggacgcggctcggcaccacgcgagaaccatag

SEQ ID NO: 22400 - DNA, 1221 bp, Oryza sativa; identical to SEQ ID NO: 13112
  Clone ID: TF_OsC340734_1

SEQ ID NO: 22401 - DNA, 1260 bp, Oryza sativa; identical to SEQ ID NO: 13117
  Clone ID: TF_OsC47923_2

SEQ ID NO: 22402 - DNA, 986 bp, Oryza sativa
  Clone ID: TF_OsC177829_1
gcacgagggcagctagcttagctgccggcatggacgacgacggcgacggctcatcgtcaccgaccgacgacagcgccgccgccgggcttttgccgctcttcagccgatcgccggccgaggatcttgaggagaagctgaggcgggcgatggaggagaacgcgcggctgacgcgagcgctcgacgccattctggccggtcaccacgcccaccagcgcgcgctcttggcgccgtcgctgtcgccgccgccgccttccgccacagcaagggcgccgagcgtgtccaccagctgcgcggcgagggaggacgccgcaccggcggtcgccgccgccgccgcgtcgacggcatgtccgtcgagacagcagccgccgaccgcggagccacggcccaaggtcaggacggtccgcgtgcgcgccgacgccgccgacgccaccgacgccaacagcatggcggagaccgtgaaggatgggtaccaatggaggaagtacgggcagaaggtgacgcgtgacaacccctaccctagagcttacttccgctgcgcattcgcgccgtcttgccccgtcaagaagaagctccaaagatgtgcggaggataggtcaatgctagtggcgacctacgagggagaacacaaccatgccctgtccacgcagacaaccgaattcgtcgccagcggctgcactacgagccagcacgccggggggtcgtcgtcgtcgccgctgccgtgctccatctccatcaactcgtcgggccgcacgatcacactcgacctgacgaaccaagcagggtccggatcgatcgcgagctgcggcgtcgaggcggccgccgtctccggcgagctcgtcacggtgctctcgccggagttgaggaggcacctcgtggaggaggtggtgcaagtgctcaagaacgacgccgagttcgtggaggccgtgaccaacgccgtggccgctagagttgtggatcaaatcccacacattcctgttcatttgtag

SEQ ID NO: 22403 - DNA, 853 bp, Oryza sativa
  Clone ID: TF_OsC17758_3
atcgcaggagctactacaagtgcacgacggtgggctgcccggtgcggaagcacgtggagcgggcgtcgcacgacacgcgcgccgtgatcaccacctacgagggcaagcacaaccacgacgtcccggtcggccgcggcggcggcggcggacgcgccccggcgccggcgccgccgacgtcgggggcgatccggccgtcggccgtcgccgccgcccagcaggggccctacaccctcgagatgctccccaaccccgccggcctctacggcggctacggcgccggcgccggcggcgccgcgttcccgcgcaccaaggacgagcggcgggacgacctgttcgtcgagtcgctcctctgctagtcgagccgagccgagccgagctgagctgggccccacatccccctgctcgccacgtggcgtattttcgcctcgccgtatacgtacggccgtatagcgtacgtatacacgctcgcacgccctgcccaacacggcaatacacacatacatactctcgtacacacgtagtagcatacatatacagtatagtaggtggtagtggtagctagctagggagtgagatccaatttgttgattcgttgcaggccactgccacgtgggccacaccggaaacagtacacgcgtatacaccacacttgggatacgcgtacgtacgcacatgtacacgtagttttgtgcctttgtaactgctgagagacaggtcaaataagactgatgaatttttcatttcttaaaattccactcgtgtgaattactagtagtataaatatctatacatgatgtttttacaatctgtaccgaactgagaaagaggaaaaaaaagagagagattttttttt

SEQ ID NO: 22404 - DNA, 2404 bp, Oryza sativa
  Clone ID: TF_OsC11608_1
agagctgaaaatgtagcatcatgtttcaaccgggacgaatccaacggtccgagcattcgtacgtgttacaggtatcacatttgcatatctttactgccaacggcattgtacatatgcagtgagatacaaagctttgtcacaaaagagaattagacaagctcacaaaaccaaatcaaccataatccatgttctatccacattccactgaaggcgaagatagttaaagaaaaccaaattctgatgatctaattaatcttaacgggttcactgtacaacgaatatagggccagtgccacatacaagtatacaacaaggcctttgccgctccagaagacccatgtggtgtattttgctgcagcccacaggtacagctctcgcctccggttcaactgatgtgtcaatgataggagcatctttctgaagagaatgtcaatacgaagcattggtaatatatgattctcgagctataagcattagtatagactctcacggacccatgactaaattgccggcggtactgtagcataagttagccgaatggtccatcggtgtggctttgaaagtaaaaccttcactaggtttttcttctctcgaaccatatatattgctagctgcattgccagccatagtcggcattgccattgctggaagtcccatattactgtatactgaacccatgggctgcatttgatactgcatctgatcagaaactgaggactgcaattggtttgtggcatcgctgtggttcgggctgattccaacaccaagatcaaggctgatggtgtcactttcagctgcttgagaatattggtttggaaatgtcctaggttcacatgctctcatcatgccaccaaggccctgcatattgctgttaattggatggacaacaggcttcatggggggagtggacatctcatggctcgcattcctcgacgcagggacttcatggttatgttttccttcatatgttgttatgactgattttggatcatgtgatgctctctcaacatgcttcctgactgggcatcctgtatttgtgcacttgtagtaactccgtggattggggtttcctttaactactttctggccatacttgcgccagcggtacccatcatccaagatgtcaacctcactaaccgtttgtactacaacacgaggctcacggttaggcttgcccatcaaagcagcatcaatagcagcagattccattttccttcgttttgactctaaatcatcatcctcaacagcatcatctccagggtaaggtctccctcctccggcatcattgtcatcatcactagctgagcctggaacaggctcaatcataccagctgtatgtactgcattaccaagaatgctaagaacatttgaagatttgtcatcagtagttgccacaccatcatatctttcttcaccctggattggaggaactgcaccggcagacagcctcctattgggttggggcttagggtgattgtgacgccctttataaaccacttcagtaatctgaccatcaagcgaacgctccaatagcttttttacatcacagttaggatgtgtgcacttgtaatagcttctcgggttctcacttcccttaacatgcttttgcccatatttgcgccagttataaccatcctctgcagacttttcagccacactttcaggctgtgactcctgcatagcatttccagagctattcatctgatgcaactcagatgtaccaacttcagcaggtgagctgtcagttaaaccaaccattccaaccagttggctcggggcacttgaaatattgactgcgagagttgactcacgagaacatagaggtatattgtcgatcatcatatcgtcagatgacagggcagtattcaggctttcatttttcatagaagtttcatgctttttgggatcattgatagcagaagccgtcgattgagaggatgaattcagatgaggcttgaattcaaaatctcgagagccaccatcttcatgggtgctaccagatgttttatccctaggcgaaggaagtatgtctggatttgcactcttgttcataattgcagccatgctcagagtaccagttgtcggagagggttcaaccttgaagttggtgaggaggacgggggactcgaggagagccgaggggctgaagcccgcggggatggtgaggcagggctcccgcgagatcggcagccgcgcgggggacatcgccttgtacctcgcccccgcgcccgccgcgcccgcggcgagcgccgcgacgcgccgatccaccgggggctgcttctccggcgacccgccgacgcccgcggggtggtcaccggagctagggtttggcgaatcggccatttgctgcggttgcgcggcgctgcgtgggaagccctcgtgccgaattcctgcagcccggggg

SEQ ID NO: 22405 - DNA, 1260 bp, Oryza sativa
  Clone ID: TF_OsC732_1
atggacgcggcgtggcgcggcggcgttggctgctcgccggtctgcctcgacctctgcgtcgggctgtcgccggtgcgggagccgtcggcggcgaggcacgagctgcttgaccggccggccggctgccgcggcggtggggattccaagtcgggggccttcctccaggcgaagatcgtcgaggcgaaggtcactcagatgagcgaggagaatcggcggctgaccgaggtgatcgcccgcctgtacggcggccaaatcccgcggctcggcctcgacggctcggcctcgccgccgcggccggtgtcgccgttatcgggcaagaagaggagcagggagagcatggagacggcgaattcctgcgacgccaacagcaacaggcatcagggcggcgacgccgaccacgccgagagcttcgccgccgacgatggcacctgccggaggatcaaggtcagccgggtgtgcaggcggatcgacccgtcggacacctccctggtggtcaaggacgggtaccaatggcggaagtacgggcagaaggtgacgcgcgacaacccgtcgccgagggcctacttccggtgcgccttcgcgccatcgtgcccggtgaaagaagaaggtgcagcggagcgcggaggacagctcgctgctggtggcgacgtacgagggcgaagcacaaccacccgcacccgtctccgcgcgccggcgagctcccggcggcggcggggggggccggtggctcgctgccgtgctccatctccatcaactcctccggcccgaccatcacgctcgacctcaccaagaacgggggagccgtgcaggtggtcgaggcggcgcatccgccgccgccgccggacctcaaggaggtgtgccgggaggtcgcgtcgccggagttccggaccgcgctggtggagcagatggccagcgcgctcaccagcgaccccaagttcaccggcgcgctcgccgcggcgatcctccagaagctgcccgaattctagcttcctttacaattctccaattcttcttacaggaaaaaacatagaggcgcatttcaatagagattagagcttaatctccccccaaatttgaaaattttatacagggtaagaattccgaatgcttttctgctgcttttaggatgtgaattgtactctctcataataacctgttggtccttgggccgtcggaagaagattgcgggcttctatcgggcctcacgatcctgagccccattgcgaggctccttgagcttaaaaaaaaaaaaaaaaaaaa

SEQ ID NO: 22406 - DNA, 897 bp, Oryza sativa
  Clone ID: TF_OsC47394_1
gcacgacggtcgcggttttcccaagctgagagttgtcgtgcgagagtgaggagcatggcgatgctggggagctcgtcggcggtggtgctggagctgatgacgatggggtaccagtcggcggcgtacctcggcgagctgctccgggcggcgtccccggcgcaggcaggggatgagcagcaggagctcgccgcggagatcctccgctgctgcgaccgcgtcatcgccaagctgaaccggggaggagccactggtgctactaccggcaagaagcggaaggcggcggagtccgccgccgccgccgccgtgacctccccttctctccccgtcacgccgaccaaaagaagggcgcgtggcgcggaggcggtgagggaggtgaggagcggcacgacgacggacgggttcatctggaggaagtacgggcagaaggagatcaatggctgcaagcacccgaggctctactaccgctgcgcgttcaggggccagggctgcctcgccacgcggcgggtgcagcagtcgcagtcgcaggacgacccggccgcggcgttcgtgatcgcctactacggcgagcacacctgcggaggcgacgccgccgccgccgccgcgtgccgggacggggaactaatgccacctgccgtcatcaactccggcgcgtcgagcttcgccgccgcttggaacatggcctcgcgtgagccggcgtcgtcgctcgccgtcgagcggaggagctgcgacggcgacgctcccagcgagacgtcgcaggggtggtctccctccttctcgtcggaggtggagctggacgtggtgggattcgacctcgccggagccgactcgtcggcgtcgccggtgtgggagttcttgaatggcagcttcgactgggaattcgtcatcaactccctctga

SEQ ID NO: 22407 - DNA, 471 bp, Oryza sativa
  Clone ID: TF_uC-osflM202091c10b1
gccggaggtcagtggagaagcgggtggtgtccgtgccgatcgcggagtgcggcgaccggccgaagggcgccggggaggggccgccgccgtcggactcgtgggcctggcgcaagtacggccagaagcccatcaagggctctccctacccaaggtaattaggctttatattcagtttggttgatattcttgagcctgttgattagttaccgtgctgattaatcactgcaattagatcagttaaacggttgttgaagtggcaagatttaatttgggtttgttgcttgtgtttattatgctcagggggtactacaggtgcagtagctccaaggggtgtccggcgaggaagcaggtggagcgcagtcgcgccgaccccaccgtgctgctcgtcacctactccttcgagcacaaccacccgtggccgcagcccatgagcagcagctgccacgcgagcatgtcgtctctcggtcgacg

SEQ ID NO: 22408 - DNA, 1678 bp, Oryza sativa
  Clone ID: TF_OsC1773_1
cccgcgtccggttccctcttctccgccgagtccagccccggcgcgctcactctcgccgcctcgctcttccccgacgcgccctccccggccttccagggctctttcacccagctcctcgtcggcgccatgggctaccccgccgcctccgcccccgctccgccctcaccgttcccggtgccgcacggactcagccccaccgcgttcctcgggggctcccccggcctcttctccccgacggggaactttgaaatgtcccatcaacaagccttggcacaagtaacagcagaagcagtccattctccgtacagtatgattaatcaatcagatttctcactcccgttctcgtcgacaacgacttcagtgttggcatcacaacatgtcaactcttctgccaatgtgtcatcaccacgagaaataccaactctgccatcccacacagataatagcaacattgaatcaactgaggtttcacatggattccaaactactgccctcactgaggataaacctgctgatgatggctacaactggcggaagtatggccacaaggcagttaagggtggggagtatcccaggagctattataaatgtacccatttaagctgtccagttaagaagaaagtggagcgctcatctgacggacagattactccaatactttatagaggccagcataaccaccaacgaccaaccaaaaagagtccaaagatggtggcgctatacttaaatgaagcagatgtttcccgtgagaaggaagatgcatcaattagatcagaacagggctcccaagattattctggaaaattcaaggcatcaaatgatggtggtccttcatcatccaggaggggagataggggtgagcaaatatcgggctcaagtgatagcaagcatcaaggcgaggaagaagtgaaggttgagggtagagctactagtgatggaaatgcgaacaaaagacatgtgccagctccagctcaaagaatcattgtgcaaacaactagtgaggttgatctttcggatgatggctaccgatggcgcaagtatggtcaaaaagtactaaaagggaatcctcacccaaggagttactacaaatgcacgtaccaaggatgtgatgtgaagaagcatattgagagatcctcacaagacccaaaggctgtgataactacatatgaaggcaagcacagccatgacgtgccagcagccaggaacagtagccattcttccgctaatgccaacgtatcgtcttccagcaatttacctcccaagggacagggggcaacggtcgtcgtgcagagatggttcgcggaatgcatcttcagtttcttccttccagttaaaggagggggggggatggcaggaaatttgggtggggtttagcggggtaaattgttttttttttcagtccatttggggtgtgttgtttcccaagccccgttgggcggggggtctgggctttgtgggtgggttttggcatgggtttagttggggcttgggggttcgttgggtaggggggaatatgttcattttccttttggaattcgacccgtttcatgggaaaataaaatttatgccttccaaacaggcccttggcaaggggaaaccccgcatagcttccttcccaaaaaaaaaaaaaaaaaaaaaaaaaaaaaaaaaaaaaaaaaaaaaaaaaaaaaaaaaaaaa

SEQ ID NO: 22409 - DNA, 1124 bp, Oryza sativa
  Clone ID: TF_OsC62508_1
gcacgaggctcgttctcgtctccgatcactctcctcctcgtcttcgtcacggtctcctcgcttcgctagctcgcttgcttgctggctgagctgtggtacgctcgccatggcgtcctcgacgggggggttggaccacgggttcacgttcacgccgccgccgttcatcacgtcgttcaccgagctgctgtcggggggcggtggggacctgctcggcgccggcggtgaggagcgctcgccgagggggttctccagaggcggagcgagggtgggcggcggggtgcccaagttcaagtccgcgcagccgccgagcctgccgctctcgccgccgccggtgtcgccgtcgtcctacttcgccatcccgccggggctcagccccaccgagctgctcgactcccccgtcctcctcagctcctcccatatcttggcgtccccgaccaccggtgcaatcccggctcagaggtacgactggaaggccagcgccgatctcatcgcttctcagcaagatgacagccgcggcgacttctccttccacaccaactccgacgccatggccgcgcaaccggcctctttcccttccttcaaggagcaagagcagcaagtggtcgagtcgagcaagaacggcggcgccgccgcgtcgagcaacaagagcggcggcggcgggaacaacaagctggaggacgggtacaactggaggaagtacgggcagaagcaggtgaaggggagcgagaacccgaggagctactacaagtgcacctacaacggctgctccatgaagaagaaggtggagcgctcgctcgccgacggccgcatcacccagatcgtctacaagggcgcacacaaccaccccaagccgctctccacccgccgcaacgcctcctcctgcgccaccgccgccgcctgcgccgacgacctcgcggcgcccggcgcgggcgcggaccagtactccgccgcgacgcccgagaactcctccgtcacgttcggcgacgacgaggccgacaacgcatcgcaccgcagcgagggcgacgagcccgaagccaagcgctggaaggaggacgctgacaacgagggcagctccggcggcatgggcggcggcgccggcggcaagccggtgcgcgagccgaggc

SEQ ID NO: 22410 - DNA, 933 bp, Oryza sativa; identical to SEQ ID NO: 13126
  Clone ID: TF_OsC329265_1

SEQ ID NO: 22411 - DNA, 1386 bp, Oryza sativa
  Clone ID: TF_OsC146479_1
ttttttttttttttttcagagcaaaaaatggagttccaatccttctgtgtttcttttttccaatctttatttatgtatccattgatggttccaaaggagaaaacaaaaatcttcaaccaaaccattgacaaagtgacttgtctctctcaatcctttctccaatcaacagtgtgcaataataatattgtaccgattcttttctgtatgctactgtagagaataaccaaaatgaggagggaaaaaaactaaccgacaattggcaagtgaacaagaagccaaaaactacaggagcttgtctggtcttattggaggccggaccgggcccacctgtctgtgtcagcatcatgtcatggccgtgctctccgccggctgctcgatcttaacccctcctcccatctccagcccgtcgccggcgcgccgccggaacaccatggcgcactccggcagctcgccgagcccctcgaacaacgcctcctcctcgcccagcccctccccgcctaacccgccgacgtcgccgaactcgtcggggaggagcgcggccgtgccgacgacggcgccgccaaagaacatcggctgatcgtacagctgcatctcgtcggccgcgtcgatgtcggagggcgaggtcgacgtggctgggacggacacgacgtcgtagagccaccggaactcgtcgcgcacctcgatggccgccgcgccgccgccgccaccggtggcaggcccggcggtgacgccgtactggtgcgtttcctcgggttccacttccaccaccggctccggcggactgcaggcctgcgccttgggcttctgcggcgccgcctgccggttctgcgccctgggcaccgtggcggagtggttgtgctcgaaggagtaggtgacgatcaccgtgtccgggtcgttccggctcctctccacctgcttcctcgccgggcaccccttcgagctgctgcaccggtagtaagcccttggaaagggtgagcctttgatgggcttctggccgtacttccgccacgcccacgagtcggtcggcgtgttgccctccccgacgcccttcggccgcggcccggtcacgtcggccagcggcacggtcaccacccgcttctgcgccgaccgcctcgacctcccgctaggcgacgccgccgccccagccgccgaccgctgagcagctgccggtgacggtgacaccggcgaccccgggcaatccgccgcagcgacgtcctccccgcccttcatctgctcccgcccgccgccgccggacatcgtcggcgacgacaccgccgccccgtcgctccactcgccgtccatatatatacacaagagccggccggcggcgtgatctgtccgccgggaatggatggatcaaggaggcagttcttggatggatgccgt

SEQ ID NO: 22412 - DNA, 1278 bp, Oryza sativa
  Clone ID: TF_OsC10544_1
cccatttctcacttactccggcgatcaccgtggttgagcgtcggcggcggaggaggaggcgatgattaccatggatctgatgggtgggtacgggcgggtggacgagcaggtggccatccaggaggcggcggcggcggggctaagggggatggagcatcttattctgcagctgtcccagactgggacgagcgagaggtcgccggcgccggcgcaggagcagcagcaacaggtggactgcagggagatcacggacatgacggtgtccaagttcaagaaggtgatctccatgctgaaccgcaccggccacgcgcggttccggcggggcccggtggtggcgcagtcgtcgggcccggcggcgtccgagccggcgccggtgaggtcgtccccgtcggcggtgtcgaggcccatgacgctcgacttcaccaaggcggcgtccgggtacggcaaggacgccgggttcagcgtctccggcatctccgccgcgagctcgtccttcctctcgtcggtcaccggcgacggcagcgtgtccaacgggcgcggcggcgggtcatcctccctgatgcttcccccgccgccggcgaccagctgcggcaagccaccgctgtcctccgccgccgccgccatgtcagccggcgcaggccacaagcgcaagtgccacgaccacgcgcactccgagaacgtcgccggcggcaagtacggatccaccggcggccgctgccactgctccaagcgccggaagcatcgggtgaagaggacgatccgcgtgccggcgataagctcgaaggtggcggacatccccgccgacgacttctcgtggcggaagtacgggcagaagcccatcaagggctcccccttcccacgaggatactacaagtgtagcacgctgcgcggttgcccggcgaggaagcacgtggagcgcgacccgaccgacccgtccatgctcatcgtcacctacgagggcgagcaccgccactccccctccgccgccggccaggaccacccgccggcgccgcctccgccgctggcgctgccgctcgcctgagatacccccggtgaagaagagtgagaattagcttgtcggtcatcataattaccgttagaaattatttttttcgtttttctctctttttttttcttttttttactgcatcattgtagaactagcgtgtaaaacaattttaggagactttgagactgagcttttactgaagaaaaaataaagcagaacaaaaaaaaaaaaaaaaaaacctgcagcccgggggatccaaaaaaaaaaaa

SEQ ID NO: 22413 - DNA, 1436 bp, Oryza sativa
  Clone ID: TF_OsC171299_1
atggccggagcggagtggtcgccgttcgacggggacgccgccttcgcggagtactcgtcggcggtgctggccgagctcggcgggtgggcggcgccgggcgaggaaggcggcgcggggatgatggtaccggcggcgctggatctgccggtggatgtggtgggggcggcggcgcgggaggaggaggaggaggaggaggaggcgccggcgagatcgggcgacggcgccgccgccgccgcgtcgtcgagctctagcggggagcccgccgcccccgacaagcgaccggccgccgccgaggcagcgccggcggcggcggcgacggcgacggcgacggcgaagaaggggcagaagagggcgaggcagccgcggttcgcgttcatgaccaagagcgagattgaccacctcgaggatggctacaggtggaggaagtatgggcaaaaggcggtcaagaacagcccattcccaaggagctactacaggtgcaccaacagcaagtgcactgtgaagaagcgcgtggagcggtcttccgacgacccttccgtcgtgatcaccacctacgagggccagcactgccaccacaccgcctccttccagcgcggcgtcggcggcgccgccgtcgcggcgcacatccacggcgcggcggccgtcgccctcgccgagcaaatgtcggcgttcgtctcgccgccgccacagccgcatatgctgtacggtttaccccggttgcacccgccgtcctccgagaccgccgtcagctgctcgatgccgacgacgacgtctttgcaggagctgaacaatagcgaggggctacaacgccctggctataataatagcccccaggcggcggtgaccatcgcgcagcggccgccgtcgccgtcggtgcctccggctgtttcgtttgacaaggggctacttgatgatattgtgcctcctggagttagacttggatgacaatactcaaatatacatgcatgacttatctccctacactagatatttgaagtgtcatctcatctcttggcatggaggcagctggcaggaaggcaaatcacgcagctagggttctttgattagctcctgctgaaatccaccgtctcagtcattacctaccaattaatggcttggaaattaggagtatatattaattaagcttgctccagcgatggagagctgacttacaagtgattgcaaacctcattggtcagccggtggagtatttttcatggcaaacttttatgtgcccgattaaccgtagtctgtgtatgcagttggcagcactaggcattccctgactgtatcttcttggcagaagaatctctacctatgttaactacttctgcattataatgtgtatgtaggttggtgtagatatatactactagctatatctatgtacacttatgctaaattaatgttgtgctgtagtaaaaacctgcagcccg

SEQ ID NO: 22414 - DNA, 3792 bp, Oryza sativa
  Clone ID: TF_OsC57056_1
ggctatccggcggcgccgcccgggatggagcgccctgccccggaggcggcggctgcggcggcggagccccctggggcgaaggcggaggaggaggaggaggggccgaaggatgtgggggtgaagggtacggggaaggagaaggagacagagaaggttgaggccgagaaggagatggaggggaaggggaaggggaaggagtcgatggaggtggaggaggggaaggagaaggagggtaaggggaaggcgaaggagaaggagaaggagacgaaggtgaaggtgaaggaggagggtggggaagagaaggagaaggggaaggttgaggtggtggaggcaaagcggcggccggctggtgttggcgcggagacacccatcctagcggtgccgatggtggccgtgccatgcttcttggcgtctcctgcatttgcgggtcacttttcaatgagccatcaagcagctttggcgagtgtgacggctcaggcacaaatacaattgcagtcaccaaccacaccatattcagaagggctgcccagtccatttcctataacacctaaagctgtaatgcccctgcagcgatcaccttcaggaactgaagggagtgttcgcagatcagtgttagagaagtcagcctcatttcagtcaagaccacacaatcatgtgtctgtaaacatggttggtgatggcttcaactggaggaagtatggtcagaagcaagtgaaaagtagtgaaaattccaggagttactatagatgtaccaactctaattgcttggctaaaaagaaggtcgagcattgtcctgatggccgcgtggtggaaatcatttacagaggaacacataatcatgaaccgccacaaaagaccagatttgtgaaagagagagtggctcatattactgcttcctctggagatgatgaaaccttgggacttgtgaacaatgaaattatagaatccccgtcaccgggatgtaaattagagccgggtgctgtctctgaagcttctgaacagcagcttttttgctcaagtgattgtgaaggtgatgctggtaacaaatcagaagatgatcatcctagcacagagcctcagccaaaacgaagaataattgaaactagcacacctttgactccagttctcagaactgttagagagcaaaagattattgtacaggctggaaagacgagtgatgggtatagatggcgcaaatatggacagaaaattgttaagggaaatccaaaccctaggagctactaccgttgtactcatgatgggtgccctgtccgtaagcatgttgagaaggcaccagacgatgataacaatattgttgtgacctatgaaggtaagcacaaccatgatcaaccgtttagaaacaacagtgagtcgaaggatgggcctgttcctatgatcattccagcagagacaacatctgagcagcccagcacaatgacctcaacatcagaacagaaacagccgatcagtctgctgaaggatggcggcgatgagcccatgaagggcaagacttcagaaatcggtggtgagaaggcagtggagtctgcgcaaacccttatcagcattaaaactaatcccgatgacatgaagaataccctcttgaaagatacttccgcggtagttcctgtccaaaataattgatcctgtgaggttagggttgattcgattaatgtattagtttgtggtatttattggttcggggagctattgttgtgttagattctgtacatgagttgagggccggcattctgtggagcaccattggatagaagcatctaggctcgggaagccatgatacttacagttgtcccccttgtatagatctccaaacccctagtgtgtataggtactgtatcgcttactgaggctaagcaacaaggagacctgagaaacttcatgtgcggggtgctctgcttggattcattgcacatctaagccgatccatgccatgatatgtttattgtatctggtgttatatcataaaaacgtgcaaggtgtatgccatttccattctatgaacagagtaacacaggctgcatcgcttgtctgctcggtgagcagtagacaaggtgagtttgggcatttcatgtggttgtatgtggaacatttgtagctgaactgaacgactacaagacacattgaatcagaaccaggcaaggagcttttgctgctcacttgctcaggcgagctcactgtaaccgtgcagatctatgtacagtgcaacaagaagatgatggtcttcatcatgtttgagccaatgcaacgcttggggcggccttgaactccttcaccgccttcttgacggcctcgacgtcgatgtcgatcagcttcccggtctccgacgcgacgacggtgcagcccttcttctcctccaagtacggcaggaacagcctcgccttctccttggatgagaagagagccacgcatggcttgtccctggcgttggcgagctggacggcggcggtgttggtcgcgacgacgccgacggagtcgttgatgaggcaggtgagttggccaggagtggtgatgaacaggatattggtgtccttccccacagtctcctcaacctcttccctgtgcttctgatgagggatcacaaacagaggcttcagaccattgtcttcagagctgccaagacaccaccatttttttggctttagttctaccttctcacaatcggtaccaagctggaaatgtaagtgtaagagcagccgtgcttgagtgagtgagtgaggtgaggtgaaaaacctgatctccttggcgatctcagcccaatgctcgagagggaggaggcagtcatcgtcccccctcgacctcatgttggcgaaggagtcggaggcgatgccgtggacgacgacgaacttgcccttctcgacgccggcacggctatatttgtcctccacgaacgctcggagcttcttggagatggacacccgcaacggcggtaccgggtgctccggcacacccttcgctggccgcccaatccactccaacatgtcctgatacatgttgtagccgctgtcggcgaggttggtggtcggcggccggaacatctcggtgaggaacagcccggcgccggcgctgttgacgttggggtaaacatagccgaccttgtcgcgggccgacgacatgaagaggaagagcgcgtgccctatcccggccaacttggtcgatatgatcagatcatagtacctgttcttgagcacgccgagctggtgggtgtactcggcgggctcgggccagtcgtcgtcggggtcgtagacgtcggcgtacctgacgttcttgcacatctcgtacacctgcttccccctcgccgatgccaccacgtccaccaccaccccggggtacctgtcccgcagcagctgcaccaccgggaagaagagcacgttctcgtacaccccgccggacaccacgcagcacgcccgccgcacgtcgcgccgcaccttggatgccaggctgtccagctccgggttgtaccccgccgggaaccgcaggaacccgtacgggttcgccgggtcctccggcggccgcgggtcctcctcctgcttcccccccgagaacgcgccgcggtagtcgaactcgtcgtcgggcccgtcgtcgaacgggtccagccacgggttcttcttcttcgccgacgcccgcgccacgccagcgccgccgcgccgccctagctgcagcaggtggcagcagcattgcctcgctatcggcagcgacggcggtgaggggagcttcgccggcgtgcccatgacgtcgacatggttggcgcctgcagcccggggatccactagttct

SEQ ID NO: 22415 - DNA, 612 bp, Oryza sativa; identical to SEQ ID NO: 13137
  Clone ID: TF_OsC338525_1

SEQ ID NO: 22416 - DNA, 542 bp, Oryza sativa
  Clone ID: TF_OsC153308_1
caactatacaagatcttcagcagctggctccctccatttaggttgcaactgacatgcaactacctgagttctacgtacggtgaccaccttctcccatggcatcaaattcacagatgaataacagaggggccggaggagggagaggccaaggcgacgacgaggagccgacgccgacgccgccacctgcgccgccgccggagacagcgccatccactgtcggcggcggcggcgacggcgttcagctagtgatgcccgaggacgggtacgagtggaagaagtacgggcagaagttcatcaaaaacatccagaaaaacaggagctacttccggtgccgggaccagcggtgcggcgccaagaagaaggtggagtggcacccgcacgaccccggcctcaacctccgcgtcgtctacgacggcgcccaccaccacggctccccctcgtcggccgccggcgaaggaggcacctccgctgccgccgccgccaaccagtacgacctcagcacgcagtacttcggcggcgccggcgggccccgctcgcagtga

SEQ ID NO: 22417 - DNA, 1953 bp, Oryza sativa; identical to SEQ ID NO: 13140
  Clone ID: TF_OsC2081_2

SEQ ID NO: 22418 - DNA, 1205 bp, Oryza sativa
  unsure (1)..(1205): unsure at all n locations
  Clone ID: TF_OsC132992_1
atggcgctgattgccactggtgctaccgctactgctactgcggcgccggtggctagcccggctgcttcttccatggcgtccgagctgatggcgcaggggcgggagtccgccgccgtcctggaagccctgctccatggcgcgtcgctcccgccggcgcacggcggtgcccacgccctcgccgccgagatccttcgctgctgcgaccgcgcgctcgccgcgttgcgcgccggcggcgatgccgaatcgtcgtcagccgacacgaagcgcaagccggcaaccgcccagccgtcgacgcgccggaggagaaggtatatatatatgtatgtctcctcccgttcttgcgatggcgcgcgcgatcgagcagcgactcagcaagagatcttttgcagagcgacggcgagcggcggcggagcggcggcggcggcggagccggcgagggtggagaaggcgcggacgtcggaggacggattcctgtggaggaagtacgggcagaaggagatcaagaacagcaagcacccgaggctctactaccggtgcagctacaaggacgaccatggctgcacggcgacgaagcaggtccagcagtcggaggaagacccttccctctacgtcatcacctacttcggcgaccacacctgcagctgccagacggccgccgccgccgccatggacgacgacgacgacgatgaaaactcgcagcatttcgtcatcaacttcgggccggccaccgcgagccgcagcggttcgccgcctctgctctacgacgacggcgacgacggcgatgtctgcgcgtagacggcggccaccccaccgtcgtcgaggcagtccaggtgctcgccggagggagacggggaggaatccggggtgaagatgagcaaggaagagccagtggactcgtgtccggggccgtcagcggtgagttcgccggccgacgtcgtttcttgttcgtctccggcaatggagcccgatctgctgggctgcttgaactgggatgatgactttggagacagctcgttcgtcgacgccgatgagttcatgaatttcgatgagattgatctgtttcaaatctactcctagctagcattgttatgcgactaaattgcgtgataaatggtactaataggtgtgtagtattgtaggatgtgtttctggctttctgcaagtattattgttgcaactatgaggtgatcatgaatgccananna

SEQ ID NO: 22419 - DNA, 1545 bp, Oryza sativa; identical to SEQ ID NO: 13145
  Clone ID: TF_OsC339450_1

SEQ ID NO: 22420 - DNA, 1115 bp, Oryza sativa
  Clone ID: TF_OsC35308_1
tggccgcccgcccggccgcgtacccggccggccgggttcctgtcttcttcttcctctccctcttccctaccaagcgagaccactcggcccccacaaaatctccgcttcttctccgagaccgagatggcactcgactctgttccatcctaccccagcgatcttggatccagcagggccaggacgccgcagcagcaaagggtcagccccaggaaggaggagcggacatggacgaccgacacctacgcgccgtacgacgacggccaccagtggaggaagtacggcgagaagaaactctccaattccaacttcccaaggttctattacagatgcacctacaagaatgacatgaagtgccctgctacgaagcaagtccagcagaaggacactaatgatccaccattgttctcagtcacttacttcaaccaccacacctgcaacagcagctcaaagatcgtaggcagcactcctgattctactgtgcagtcgaggaaagccatttcgatctgcttcaattcacatggccaaaccggtgaacagcccacattcttgtcatcatcagcttccttgttgtcaccgagcatgcagtcgtacagttccaaccagcaacctgacatgaacacctacagtcgccagtttcagtgggcagacacatcgtcatctacaagcaatgctccggttaagatggaggcggacgattatgcagaagcaagtgcttcacccagtaccactggtgctctgtcgaggacattgctgccgatcggtcagtcaagatgcatcgagtatttccatttcttgtgatgatttttatggaaagtgaaggagatgcatatacattctgaggagcctcttggatggttccagatagggttttatattgggaggtgaggatgttgtgctgatgagattccatatactatagtggcattatgttgttttctttgcatgtagattcaagccagatttttgtgcttgaatgatgtaaagaactgaattggcgtttctctatctagtaggaaggagtacgtgatacagaaaaaggaaaaaaaagcagaacctgttaaattatactagtataaaattaaggaaaaatctgacagtaaatctgcctggctgtt

SEQ ID NO: 22421 - DNA, 678 bp, Oryza sativa; identical to SEQ ID NO: 13153
  Clone ID: TF_OsC348254_1

SEQ ID NO: 22422 - DNA, 900 bp, Oryza sativa; identical to SEQ ID NO: 13148
  Clone ID: TF_OsC313723_1

SEQ ID NO: 22423 - DNA, 1331 bp, Oryza sativa
  Clone ID: TF_OsC227792_1
atggcgtctcctgatggtggcgttggagacggcggcgcggagccacatgaagttatggacgacctgctcgagatgcgcgagcaagcggcgatgctccacagcatgctacatgggacatcgccgtcgagctgtgcggcggcggcgagcaccaggcagctgaatcagctgatagacggggtgatgagcaggctgcagtccagctcgctgtcggtgatgtcgcctggaggaggaggaggaagaagaggatcgggcgggaggaagaagaaaggcgccaaggccgtggccgggccgcacaggcggagcagctccggtagaagaagatcgaaaagtccttttgtcaggatggtcacgaccaaggagctggaggacggcaggcaatggcgaaagtacgggcagaaacatatacaggactccccaaataatccaaggagctactacaggtgcacgcataggccagaccaaggttgtatggccacaaagcaagtacagacctccgagtctaactcgtcggagttcgtcatcagctactacggtgagcacacctgcagcgacccttccaccatcccgttcgtcgtcgaggccgaagctcccgctgcagactacgcgaacctcatcagcttcggatccagcggcggcgcgagcacaagcagagtcgaccctcttcgtcagagccgccatcgtttgatggcagaagccgttgatccgacgccgtcctgcagcttcgccaactgccactctccggtactgtcctcggagtgcgccagcgaggcggcggcgctcagcagcagcctgccgctctccgccgtggtgggatcggcggtgacaacgccgtcgacgtcgatcgtgggttcagcgcctgcggattacgactggccgtcagggctcgccggaggtgacatggccggcagcttcccgtcctctcccagcagcctcgggttcatgactggctcctttgggaatcttcctggggatgacgacgacatgtttggcttcgatccttaacaagggctgtgcatgcatacattcttgccatgctaattattgctactactaatattcaagaaaaacaagtccgctatttgcatgcagaagtgtatgcatgcatgcataatactattgctgtgaggctatagcaaattagcaatacttgtagtacatgtgtgtactgctattggaggaaatccaatatatatacggtacgtagtaaatatgtgtattagttgatcgctgtactagtgagttgtgtgtatgtgattttgtaagtattgaaacataatttgaaattaatatatagtagtgaaagtaatatataagaggaaaaaaaaaaaaaa

SEQ ID NO: 22424 - DNA, 2066 bp, Oryza sativa
  Clone ID: TF_OsC62577_1
ctctcttcttcttcctctagtcctctcctgcctgcttcgtctactcctctcccaactccgatcccctcctctgcgagctcccggtggccggacccgtccggcgacgacgatgagccgctcgccggcacggcgccctgctcagatctgaagagctgcgagaatccgaggctgctcttgctggtttagctccggcggcggcggcggcggcggcgatggaggaggaggtggaggcggcgaacagggcggcggtggagagttgccacagggtgctggccttgctgtcgcagcagcaggaccctgcgttgctcaggagcatagcttcagagacaggagaggcctgtgccaagttcaggaaggtggtctccctcctcggcaatggcggcggcggcggcggcggcggcggcggtggtggacatgctagaggcaggatggccgggagaagcaggccttcggcggtgctgagagagaagggattcttggagagcagcagcggcggcggccagctggggatgatgatgtccggtgctgccactccgtctactagctccgccgcgcatttgcgcaaccggattggcggaggcagcggcgtgccaccggattcgttgcgggggctcgatttggtcagctcgagcagcaagggtggtgctcatcagttcgatcctccgaagctggtgcagccgttgtcggttcagttccagttcggcgctaccgcgcataggtacccgttccagcagcatcagcatcagcagaagttgcaggctgagatgttcaagaggagcaacagcgggatcagccttaagtttgatagccctagtgccaccgggacgatgtcgtcggcgttcatgtcgtcgcttagcatggacggcagcgtggctagcttggaagggaagccgccgttccatttgatcagcggcccggtcgcgagcgacccggtgaacgctcaccatgtgcccaaacggcggtgcacggggagaggggaggatggaagtggcaagtgtgccacaaccggaaggtgccattgctcaaagaggaggaagttgcgaattaagaggtcaattaaagtgcccgccattagcaacaaaatagcagacatacctccagatgaatactcatggcgaaagtatggtcagaagccgattaagggttcgcctcatccaaggggttactacaaatgtagcagcgtccggggctgcccagcgaggaagcacgtcgagcggtgcgtagacgacccggcgatgctcatcgtgacgtatgaaggtgagcataaccatactcggctgccaacacagtcagcccagacctaggaaacctgtagtatttcacgcgagccattcagaaaatgcagaggctccaagcttttgctcggggacggtcggaccggtcatgtgaaagtaggtcagcaaactgtgaaagtaggagtaacaaacagggaagccatctgatgagagctatagtgattcgcttgggtccttaactgagctacaagccatgtcgcatttctgctatggtctcaatgttctactgtccaaagtggggacatacacaacttgttctctcttttatgagctatggcactatcagattaagagagaatggaggaagaacatgtgattggatagtgaccggcaagatttgctcaaagaagggagggattaggtttgaagatttcaaaggaagattgacaaaaggaagtgaacaactgaaacatcgtgtaagcctggaaaaggataagcaggatttggcttttagcgtgcacaagtttacttgcaatgacttgcctctgtatgttgcttttgctttattgaaagatcaaaattttcttttggcagaagaatcattcagcattaaagctgtttctacttgctaacatactgacacacttggaccatcagggtttttttttccaggtgttagctgttgggtatgatttctcagtcgtacttctgcttttgtgtaaagcattccatgttatgttaatgactttgacatcaactgctatcctgaggttctttaaaagctctgcagtctacacaataaatggaatctcaaacatcaaatattcataa

SEQ ID NO: 22425 - DNA, 1440 bp, Oryza sativa
  Clone ID: TF_OsC246772_1
atggcgcccaatccggtcgggcatgcgcctttgtgttgcagactggtgcagggcaactttgaaactttccctcaacaggacttggtacctttaacagcacaagaggttcattctaagtgcattacattcggtcgagcagagaacctgccttttatccctttggcgacttcagcgctggtctcccaacatactggttcttcttctgtaaatgtgacaccgttgcaagaaattctgacttcgccgtcgcaaataagcaatgtcaacactgaatctattggggtgttacaagggctcccagcttcatccatcgttctggatagacctactgatgatggatacaactggcgaaagtatggtcagaaggcagtgaagggtggggaatatccaaagagctactacaaatgcacccatctgaactgtttggtcaggaaaaatgtggagcactctgcagatggacgaatcgttcagataatttacagaggacaacacactcatgaacggccctcaaaaaggaggtttaaagattgtggtggtatatcagatgatttagacgatttcagtggcaccacgggcacttcagtcagatcacagcctgattacgatgattactgcagaaagcctatcattccaagtggcaccatggttgctcctttagtgaaaaagattgaagatggtgatgaccaattgtctggatcaagtgataaccaggatgagcatgatgatgaggtgaggacttctgatggagcttccggtgatgccagtgcaaatgaaaggaatgtgccagccccaggtcaaaagattatagtgagtacaaccagtgagatcgatcttttggatgatggttataggtggcgaaaatatggacagaaagtggtgaaaggaaatccttacccaaggagttattacaaatgcacctacctaggctgtgatgtaaagaagcaagttgagagatctgttgaggaaccaaatgctgtgataactacatacgaggggaagcatatccatgatgtgcctgctgcaaggaacaaaagccatgtcgtagccaatgcctctctattgcagaacacaaagtcgaatacctactgcacagagcaatcctacacaacgatcacttgctagattctgccatacatccgtctgattgctcatatgtagcatttctgaagctgtgtattttatcggccgtacccactaacgaggcgatttttggcaccattgtgccatgtatttttcctgctgcaagcatacgttctcctatttgggaacatccgaattgtaatattgatttctgcaagtgctatttcaatgggatatgcagaagttgtgatttctgaacctgatggagcttcactcttggtcagaccttttaatgtgtgatgctgttgtactagtacatatcaaaaaaaaaaaaaaaaaaaaactcgagggggggcccggtac

SEQ ID NO: 22426 - DNA, 5649 bp, Oryza sativa
  Clone ID: TF_OsC22739_2
ctagcgagactccgagcaagcaaccaataagtgatcaatcgtctcatcgcattgatcacaaagagggcagcgagccgggtgtgacagtcctcgactccgaagacgatctgctgtccaacaacgattcagtgcgaccagccacagaaagtaccgacagcgcgggggcgctagagacttccaaattggcttgtgctcaaggctggttcttcccgcgaagagaagacgatacgccgagcgagcggagtaggaccccgagctttcccaacgccaagagatcgtgtccggttcctcacctagctgaatcgatcgcagaatgtcccaaagcttgagatattccaggattgcctgaatccccagtgccgcacagatgtctcgaatccacctcctgtcttgcaaagcctcagctaccgttcgtctgttccggaaccgagcgggaacagctgcgtagactgcgggcgccagcgaccgaattgaagagccctgcagccaacaatcctcccagaaccgtaccagcttcccatcgcccactgagcaaaccaaagaaatcgagacaaggttgcgttccttctgtgaaactgggatgttaagtccttgccacggcttatccgacgaggttctttgttgccagagccatcgcgacctcaaggctatacccaatctctcaagatcgaggatgcctagaccaccatactctatgggcgagcaaactcgagcccacgcaacgcgacagacaccgccgtttgccgtggccttcccggcccaaagaaaaccacgacggatcttatcaattcctttaattacccacttaggcgcattgattgccatgagcaagtagatggggatagaacttagtactgctttcaccatggtggtccgaccgataggagtcatcaaatgagacatccagaaaggcagtcgacgaccgattttgtcaatcagcggttgcaaatcctcttttttcagacgaaagatggaaagagggagccccaaatatgtgcatgggaaggatgcgacctggcatggtaactcgtcatggaggatctgaagatctgcctcattacattggattggaagagccgaacacttagcaaagtttgttcgaaggccagatgcttcaccgaagatggagagaacctccgtcgccacatggatctcctctactgccggacggataaatgcgaccacgtcgtccgcatagagcgagacccggaaaggaatccccaacggtcgcagcaagccaacattctcggccttcgcaaggatagaactcaacacatccattgctaggatgaacatcatcggggagatgggatctccctgccgaacccctcttcggtgtatgatcgggcaacccggctcaccattgatgagcactcgcgagctggctgtccgaaagagcatagcaatccacgagcgccatcgaacgccgaaacctttatgctccagcacttcgagaatgaactgccatgagatggagtcaaaggcctgagcgatgtccagcttcaacagcaccgaaggagttctacgatcatgcaggtattttgctgattgccgcactaacataaagttgtcttgaatgcagcgtttcttgataaaagcgctctgatttttggcgaccaaagagtctagcttcggcgagagacggcgtgagagaattttggtgaaaagcttcacgaagctgtgtaccaggcaagggtcgtccttgatgatgacccagcagcggtggtagaacatgcccgagaagccgtccgggcctggtgccttgtcatgcgggctgtcagcaattgccttccgcacctcatcctcggtgaaaggatcttccaactcctcgatatgctgtcccctagattcgaagaaatcaaggttcaccgagaaattacggtggctcactgacccaagaactccatcaaagaagtcgtgggcaagggcagccttctcgtcaggggcagtagcgacctgtgagccatgctccagttgctgcacaaaatttcttcgtcgtcgccaggcagcatgttgatgaaaaaatctcgtgttggcatcgccttctcgcagccaagagatgcgcgacctttgtcttgccatagttcgctcaagggaggcaagagcaaggtacttccttttcaattcgcgatgaagaaaacgctcttggccggaaaggccccgcgattcttccatgcgatcgaacctgccgatgagttcccgggccatctccaattgcaactttacattgccgacctttttgtcactccagctttggagagcacgaccagttgatcttagtttgaagtccaaccgggagattggatcctgcagtctacaatcagccgaccatgcttcctgaacgacctcctcaaaaccttccaatttgcaccaaaaattctcaaaccggaacctccctttcgccggaagagaaggcagtgttgaaagaagcagtggacagtgatcagaaatcaccgaaggaagagctttgaggaaactttgtgggaagagctcttctaggtccgaagtaacgaatattctgtcaagacgctccaacgttggatgttcccatccattcgaccacgtgaaagagcgtccattcagatgaagttcgttcagcgccaggtcattgatcgcccgccggaagcgacccatcatccttctgttcaggttggagttatttttatcctgatcttggtaaatcaagttgaagtcaccaacgaccatccacggcccatcacgggtgcttctggtgtccctaagttcctgcagaaaacgcaccttatctgcgtcgggttgtggaccgtaaacgaccgtgatccaacaggaattcccatcgcaaaaggagaggcgcgctgtaagagagaattctcctagagaatgcgaatcgcaagaaacgacgctacgatcccaggccaagagcactcctcctcttgtctgaatggagggcaggtagcaaaagtctgctagattaggacccaaaaattgggtagccaacggtacagagatagcatccagtttggtttccaccgcgctggcaggaggcggtagacaaatgccaaagaggtcggccagcgccaacatctgatcctgagacagctccttctcgaacagctcgttgtactgctggatagtacacacagtcggtgcaggcgcagctgggacagcagtatccttctcccccatcttcttagctaacactgactggcagcgggagaaagttggggcgccatgtgtcgcttgaagcgcttgacgcacactgcgacgcggcgtctgcagcggcgctggttgcggcggctgctgaggggctggtgggggaagcagtgccggggggattgctttcttggctctcctggagaaggtgataagcgtcggcggcggagctgaagcctcctccacagccgctgcgaacacggcagtagatggagcaggcggagatgcggccatctcatctaccggaacgacctcatcgggaaacggccccccgatctcagctaccacgaccaccgcggaggcagtcggcaaagccgagaccggagagaaaacttgtgataacggcgtcgaggacgccgccaaatgctgttctgggcacaccaaaggagcagagacagcctccactccaagtgtcgcgtctggcacggagtcaggcggcggaagcgctgactcacccggcgctgccattgccatgcttggctttgctgccagaacgaccgagaggaacgggtctgcatgggctgaaacagacccttgaaggaaggtagaagcgtcatggtgggcctcctccattgctagcgggctgggctgtgactgcacctcaggccgagacccagctgactcaacagccggcccagcgacagtcgatagcaccaaaccgccttgttgggcctccaacccaactggagaggcggccagcccaaccatgtctctcctcgaagagactgccgaatcagcctcagacgccgcgctcacaggcaagacaaactccctgtcctcctgccccaccacagagccaagagacagagattgcagagcagaactctcctttgcctttgcgaccgagaccggctcagaagtgtcttgtccttttcgtggctgccacctgcaacagctgcgaacagggctaagctttaagaacttgcttttccactttagcaccttttgctgacgtcgccgaccacgaggcctcctccgccgcgccatggccgcctccgcgccggccacagcccggacaggcttctccggcgccagcgccccagcccgccgaagaaggcggccggaacagagctccgccggcatcaccgccaccggagcggccctgtgcccaccgcctccaccgccgcctgtcgagccctgaccggactgcggcggagggggggaaccatctcgtcgacctctggaggtgtggaagaagtgccgtcgaggagggccgtcgtccgagtcgtccgagctagggcgaccagaatcaccgctggacggcgcgaaagggaggtacggctccggcggcgagatgtgatcctccatggcggtgaggtggatgagaacgacgtagtcgaggtagcgctcacaggtgccctgcggcgtgacaaccgggccaccatcctcgacaatgcgcagccatttctccttcgggatggaggcagggtcggaggtccaagcgtagagcttgaagaccgccatgtcactggctgaggaactgaccggatcacaggagatgatacggcaggaagaaccgagcaccgcagccgccgtcgcctcatcccaggcgtgaccggggatcccttccaggtgcagccgcacccggaaaagcatcgacccctccctcgcatgcagctgcctcgaccaaggcgcgaccaagagacggaactgaccgagagggatggagcggcggcgcgcaacacggtcgaagatttcgtcggactggaaggtgacgaggaaatcctccgggaagaaacggcgtaccgagaagctgtgaggagacagagagaactccgagcatagctcgtcgtgcacctgggccgcggacggcgtacgagccgccccaaccaccaccgccaccaccgcccgccggagctgcgcctcccgctccctcatcgcggccgagaacggcagcacacagatctccctgtttacccggagctccgggtcgccaggtggaacatgctcgaactccgaaggggggtttgcgcgcgccggcgacagagaggcgcagccacgctccgcgcattcaaccggcgaccgagggggtgagcatgacggcgaagagaacggcacgggtgggtcgacggagggacttcttggcggcgttggccccctctgtgggtggttatgaacgcccatagaaaatgtttgagtggtctgtccgtctgcagagcgtgcgaccgatttctggaccatgcagtttgcttgggcacactgatagtagaatatcgtctggcatggctcaccctgaattgtgttctgcccacacatcctccaatggtagccatcatcagctaggtatatgttaccataatctgtgtgggatggcggggttgccacctgaattactgcagtgttcgacgaagaacccgtgtgctgctgtgcagtagatggtgccgagattgaggctgagaaggggcgaaatccatgatcagccatgccgtactgcggttgtcctgattgattgtccat

SEQ ID NO: 22427 - DNA, 1692 bp, Oryza sativa; identical to SEQ ID NO: 13156
  Clone ID: TF_OsC1517_1507

SEQ ID NO: 22428 - DNA, 1249 bp, Oryza sativa
  Clone ID: TF_OsC73968_1
atactaaaagagttttttttttcttttccaacgacaatattgctttttggtttttcctgtgatggttcagtagaagaagtacaagtacaaatgtgcaacaaaatctaatttgtcctgatatgtatgtccaggaatattgaactctacgaactaagctagctctcaaatgcttaaaggttcactcatcaaagagcagtaatttgtatcttctctgaaaattgtgctaatcagccataattagctagtagcagttcatgaggctctcatagatgaggagaaggtttggatcgtagaaataaggatcatctagatctgctcctagccctaatgcttcctccatcaccgtcgtctccaacatctgatgatggtcgaattcatcagcgtagtgagatatgacagatgaattggaagaagaaggaggcacctcttggcacacatgtaatcctggcgtttcatcgaaattgttagaaatggttgctagatcagcaggaggaggaggaggcagccaagcagcttgttcttcttgcttgatcatcttggtgaagatggtatcatcatcatctgaatcatggtgaccatttggattggctgtcaagttgtgcaatgctgcgggattattgatgttgttaataagcctagtggtggtgcaggtgtgttcgttgctgtatgtcacttggaacatgggtgggtcgttcttatccttttgttggatttgcttggtggcctggcaacctctatcatctctatacgtacacctgaagtagctccttgtgaagtgagtgccctggatcttcttctctccatattttctccactgaaagccatcctcatgaggcacgggcgtgaattgagaccatgacgacgacttgtactcctcaccattaatccttcttcttttggcggccgatgatgatcttcttggctttccaacgacatggttgtcagctgcaacatctgctgcaggggaactactgttcgctggagtcgccgcctctgctttgatcaagctcatcaccggaacggcagcagcagcagcagaagaagaagcatgtggttggttcatgacggagagggcgacgttgagggctcgcagggcgtggttgaggaggccgtgcgctagctgctgcggctgctggtgtacgaggaggagaggctgctgcgtcttgatcagctcgtacacctgcgccacctccctcactgccaccgcttcttgctcataactcaaacaagctgattcagtaactgccat

SEQ ID NO: 22429 - DNA, 3501 bp, Oryza sativa
  Clone ID: TF_OsC17758_2
cccacgcgtccgcccacgcgtccggtctcgttctcgtctccaatcactctcctcctcatcttcgtcacggtctcctcgcttcgctagctcgcttgcttgctggctgagctgtggtacgctcgccatggcgtcctcgacgggggggttggaccacgggttcacgttcacgccgcctgcgccgacgacctcgcggcgcccggcgcgggcgcggaccagtactccgccgcgacgagcccgaagccaagcgctggaaggaggatgctgacaacgagggcagctccggcggcatgggcggcggcgccggcggcaagccggtgcgcgagccgaggcttgtggtgcagacgctgagcgacatcgacatcctcgacgacggcttccggtggaggaagtacggccagaaggtcgtcaagggcaaccccaacccccacggctactacaagtcgtgggcggtgggctgcccggtgcggaagcacgtggagcgggcgtcgcacgacacgcgcgccgtgatcaccacctacgagggcaagcggacgcgtgggcggacggacgaccgcgacgccggatcggccgccgcctccccgcctcatcgccggctccctcctcggcgacgatcccgacgctggatctgccgcctcctcctctcctcgctggctcccccgggcgcgcggatccaccgtcggctcccctcctcgccggggaggggaggagaggggaggggaggcggcgacgaggaggaaaggcaacagctcctgtcctgacgacgacgatgactgccgcaacgacgagggcgactgccgcaacgacgacgactcccgcgacgatgatgtgggggcggcgacggatgcaggaggagacgcggcggctcttctctcgatgtggatgatgactgccacgacgaaggcgcccatgactatcgaagcagcggtggacggatgagaaatgatgtcgtctaccggaaggagaggccagcgaacagtaactctactgcttgcgaatatagtgtgcacctacgtaaatcatctattttcgcaggcccttgcttgcagggaagatgaatggatcatcgagaagcttgcggtcatcgctgctagacgctcatcatttgtgtctgaagaatccttgtgctctgttccccctgcgggtttggtctctgtggccagtccccatttgccgcccagcaggggccctacaccctcgagatgctccccaaccccgccggcctctacggcggctacggcgccggcgccggcggcgccgcgttcccgcgcaccaaggacgagcggcgggacgacctgttcgtcgagtcgctcctctgctagtcgagccgagccgagccgagctgagctgagctgggccccacatccccctgctcgccacgtggcgtattttcgcctcgccgtatacgtacggccgtatagcgtacgtatacacgctcgcacgccctgcccaacacggcaatacacacatacatactctcgtacacacgtagtagcatacatatacagtatagtaggtggtagtggtagctagctagggagtgagatccaatttgttgattcgttgcaggccactgccacgtgggccacaccggaaacagtacacgcgtatacaccacacttgggatacgcgtacgtacgcacatgtacacgtagttttgtgcctttgtaactgctgagagacaggtcaaataagactgatgaatttttcatttcttaaaaaaaaaaaaaaaaaaaatactagtagtattcttatctatattttatgtttttacaatatgtcccgtactgagaataaggagataaagagagagcgaattttttttccaaaaaaaaaaaaaagtcgctaccgatttctgtcaagactgaagctactagcattcaaaccgcacaagatgaagcagcagccaaccaactgatgcagccgcagttcaacggcggcaagcggagccgcgctgcacctgacaacggcggcgacggcgagggccagccggcggagggcgacgcgaaggctgactcctcctccggcgcggccgcggtcgccgtcgtcgccgccgccgcggcggcggtggcggaggacgggtacagctggaggaagtacgggcagaagcaggtgaagcacagcgagtacccgaggagctactacaagtgcacgcacgccagctgcgcggtgaagaagaaggtggagcgctcgcacgagggccacgtcacggagatcatctacaagggcacccacaaccaccccaagccggcggcgagccgccgcccccccgtccatcctccgccgccgtcgccggcgacgacgacgacgacgccgctgccgccaggcgacgcgcaggccgaccacgcgcccgacggcggcggcggcagtaccccagttggcgccggacaggcgggcgcggagtggcacaacggcggcgtggttggcggcgaggggctggtggacgcgacgtcgtctccctccgtccccggcgagctctgcgagtcgacggcgtcgatgcaggtccatgaaggcgcggcggcggcgcagctgggggaatcccccgagggcgtcgacgtcacgtctgcggtgtccgacgaggtggacagggatgacaaggcgacgcacgtgttgcccctggccgccgccgccgccgacggcgagagcgacgagctggagcgaaagagaaggaagctggactcctgcgccaccatggacatgagcacggcgtcgagggcggtgcgcgagccgcgggtggtgatccagacgacgagcgaggtggacatcctcgacgacggctaccgctggcgcaagtacgggcagaaggtcgtcaaggggaaccccaacccaaggagctactacaagtgcacgcacccggggtgcctggtgcggaagcacgtggagcgcgcgtcgcacgacctcaagtcggtgatcaccacgtacgaggggaagcacaaccacgaggtccccgcggcgaggaacagcggccacccggcgggctcggcttcgcccggcggcggcgcggggtcgtcgtcgcagccccacggcgtcggcgtcggcgggcgcaggccggaggtgccgtcggtgcaggagagcctgatgaggctcggcggcggctgcggcgcggcgccgttcccgccccacttcggcctgcacctgccgccgccgccgccgagggacccgctcgcgccgatgagcaacttcccctactcgctcggccacgcgccgtcgccggcgctgcggggcctgccgccgcccccgcccccgccgccgtcggcgtcggcgctggcggtggcggggctcggcggcgtggtggaggggctcaagtacccgatgctggcgccgccgtcggtgcactcgctgctgaggcaccgccagggcggcggcatggaggcggtggtggtccccaaggcggaggtgaagcaggaggcgatgcggcccgccgccgccgtcgccggcgcggggcgcggcgcggcggtgtatcagcaggcgatgagcagggtgtcgctggggaatcaactgtag

SEQ ID NO: 22430 - DNA, 1191 bp, Oryza sativa
  Clone ID: TF_OsC143704_1
tcagttcttggtcggcgagagctcgaggatccggccggagagcgccgtgacgagcgccgccttgaacccggggtccctcgtcagcgtcgccgccatctgctcggccaggttcttcctcgccgccacctccgtcgacggcccggccgccgccgcctgctcttgctgctgccggacgacggcggcggcggcgctcggtggcggctggtgctgtgagtgcttggcggcggcggcggtcttgctgccggcgtcgtggtgcggcggctgggcgtggttgtgctcgccctcgtacgtggcgacgaggacggtgttgtcgtcggcgctgcgctgcaccttcttcttcaccgggcacgccggcgcgaacgagcacctgaagtaggctcgcgggcacgggttgtccttcgtcaccttctgcccgtacttccgccattgatacccatccttcaccacgaggctgaggtcggaggggtcggcgtggacgaagcgcttggagaccttgggcttgcagtcctcgcggacgacgcgcttcgcggcggcggcggcggccgccgacgtgcactccatctggtcgggggaggcgtaggccgcggctgcggcggcggcgacgaacggaggggatggcttgcggtggtgggcggcgtcgtcgaggctgtcgacgctacggatccgcttcctcgatggcgacaccgagccgccctccgacgtcgacgactggtggttcccggcgttgaccgccgccgccgccgccgccgacatcatgtcgttgacctgtccctgcagctcggtgtacttggccaccaccgcccgaagcatctcggtcagcttcttgttctcctcgctcgctcgccggagctccgcctccagcgcctcaacctcgtgatccttcttgaaggacaagaagttctcctccacgagaaccttaatcggcgccgccggagccgatgatctcctcgccgtcgacggcaggccgacgttgaggtccaagctcagggaagtctgctcaatccacgaatccatgaattgaatatactgaaaatcaagaacaggaggaggaggagaagaaggcgaagaaggcgagagccgaaatgcgcatgagctagtgaaggtgccatggcgacgacgaggaggaatatatagccaagaaggtgggcgagaggggactgactggctcggaggaggaagcatcttagccat

SEQ ID NO: 22431 - DNA, 2121 bp, Oryza sativa
  Clone ID: TF_OsC1528_1720
atggaccgggaccacgcgggtggtccaccgccggtccacgggaccgactgtccagatcggccgggaggccgatcggacggcgcgggcggtggcttggcatggctctgctcggcacaaaaccgaccggccggccttggggagcggcggcggcgagcggccgccggcgacggcaagcggcgccgcgggaggcggcggcaaccggcgcgaaagcggcggcgcacggccgaagacgacgacgcacgcgcggatcgcagcggtgctcatgggagagaaagaggaaaggaaggaggagagcgggattcctcactggcgagaacggcggccggcgcgaaggaagaaggcggcggcgacaaccggcgatgcggaggcgcggacgggcggcggtggcaccctaggagggagcagagatgggttaggggtgggttatggatttctcaaggttttatcaaccctgaagaagacagtcaaccagaagacactggtctgcagtattttaatgagttgttctgcagatcattttttcaaaacggtccctctcgcgatgatgatcataaggataagtttgttatgcatgagttatttcatgatttggcgtgctccgtctcaaaggatgaatgcttcagttcaggggaagcattttgcagccttccagaaaatatttgccacctttcagttgttcttccagattccaagtcagttgtgctgactaaagtacaaagacatctgcagtccctgatggttgtcaagagatctgcatcagagtacccaggttcatttgtgccacttttgaaaatactgggtctgaatgatcttctcatgaaatgtagatttttaagagcgttgaatttgagctgtacaacaatacgagagctccccagttctattatgaagatgaaacacttgcaattcttggctctgaacaatacaaagatccaaagtctcccagctgaaataggtcagttacaaacccttcagacattagaactcaagtattgttgctgtctcattgagttaccggaaagcacaatgaatttgacaaagctgcggcaccttgatgtccaaaaggaaccaggaaatgttcatgttagcatgcctcatgggatcgggcaactaactgatctgcaaacattaacagtatttaatacgggggatgatttatcacattgttcaattggggacctgaagaatctcagtggactaaggggacatgttcatataacaggtcttcagaatattactgcaagtgatgatgccaaagaagcaaatctagtaggtaagcaattcctaggagctttgacactggaatggtgttggagcagtcaggacatggaagatgacagtgacaaagaaattgctaatcaggtccttcataatcttcagccaaacactaacctgcaggagctctccattcgaaattattctgggaatttattccccaactggattcaggattcttcactttccatgcttgtctcgattactatcgatgactgccaagactgtaatgagatcccacatcttggtgacctgccttttcttaaatatctcctcatacataaaatggacaaatacacagtaaaatatctccttaagaagactacgacagatgatggctggaattggagaaagtatagtgaaaaggatttacttggctccaagtacaaaagatcatggtacagatgcaaccagaagcagtccacggggtgcgtggcaaggaagattgttgagcctaacaacgatgatcccaacacatggttggtaacatacttatacgagcacaaccataaacaagaagctaggccctgcgacaagccatcaccttctgatttgcacgttcagctggcaagtggcaacacccagtggtgtgtgcttagaggcttctacggtggagtgaggcagatgacggtggggagcaacacacagctgcatgagcgtgactacaccggcaacgcaaatcacagtggcatcatcgcaagacagacatggatcgagatgctccggcgcggctgcacggccggccattctcaacgtagagctgtcacctattggatatactgtgacgatagctctagtatcaaggacaagttggagattgtagatgtcgatgttttatatcagcaa

SEQ ID NO: 22432 - DNA, 1165 bp, Oryza sativa
  Clone ID: TF_OsC318264_1
ctgcaggaattcggcacgagggccaccaaccatccatcgctgacgcttccaacccaactgaattcaaacgaagcgaacgacacgaaccatgcaggcgcaatcccgcctcgctgctgccgcgagcggcggcagcggcagtggaattagcgggagcggtggcattagcaggttgggtggtggagcgggggaggagcacgaggcggtggtgagggagctgacgcgcgggcacgagctgacggcgcggctgcgggcggaggcgctgcgggcgctgcgcgggcaggggcaggccgaggccaccgctacattcatcctcggggaggtctcccgcgccttcaccgtctgcctctccatcatggccagcgcctccccgtccgcctcgccgccacaaccggacgagacgccgccggccgactcagccgtctcgccaccaccaccgcgcgcggcgagagaggacaacgtcccgcgaaagagattattgacagcctctccttacgacgatgggtaccagtggaggaagtacggtcaaaagaagatcaacaacaccaacttcccaaggagctactacaggtgcagttaccaccgggagcgcagatgccccgcgcagaagcacgtgcagcagcgcgacggcgacgacgtcccggcgctgcacgtcgtcgtctacacccacgagcacacgtgcctgcagggggcgcccgccgagcttcccgacgcggcgacgaacggtggcgccgccgccgccgcgtcgccggactacttccccgccggcggcgagacgccgtcgtcgctgcggcggctccggggcgtcggcggcggcggcctgcagcctcagttcgtggaccaccgcgccgccatggaggagcgcgagcgccaggtgctcgtctcgtccctcgcccgcgtgctgcaggggcggcagtgctacgacgacgacgacgacgacgacaccgacgtcgcctccctcggcgccgtgcacgcgcgcgcgcctgcggcggcggcgccggtcgccgcgtcgtcgtcgtcgtccgggcccgtcgacgctgccggcgaggagctggacgtcatggactacgacatgacggacgcgctgttctgggggcctttcggcacggacagcaactcgtacgacggaaacctgacgtcgacacgctgttttgatctaattaattaa

SEQ ID NO: 22433 - DNA, 1092 bp, Oryza sativa
  Clone ID: TF_OsC82840_1
cccacgcgtccggcgcgatgtcgtcgctgtacccgtctctcctctcgctgagcgagagccccgccgagtaccggcaggtcggcggtggccgctacgcgggggaggacgtcgtcgacgacgacgacgacatggctgccgtcgccgacgctgtgtccagctacctctccttcgacatggacgacgtcgagtattacacgccggaggtgggcttccactcaaagcagcacaacccgccgccagttgctgcggcgccactggaagccggaggaggcagggagcaaagccggcgggaagccgccgtcaatcttggcaagatggacaggggaccggcgccggtgagcggcggcgcggcgactggcggcgtgccgaggagcaagaacggcagcaagatcgcgttcaagacgaggtcggaggtggacgtgctggacgacggctaccggtggaggaagtacggcaagaagatggtcaagaacagccccaacccaaggaactactaccggtgctcgagcgaggggtgccgcgtgaagaagcgggtggagcgcgcccgggacgacgcgcgcttcgtcgtcaccacctacgacggcgtccacaaccacccggcgccgctgcacctcaggccgcagctgccgccgcccggcggctactcgatcgccggggcaccggccgtggtggcgccgcacggccgcctcgggctggaggaggccgaggtgatcgctctcttcaggggcaccaccgccacctcgctgctgcttccttgacggattcttgatcgagatagcagcctcttgattgagatgcccagatgggtcattttggatgtgagctggatctttgttttccccttttcttctctcgatctctgtcccgtccttgtttgcctgtttcgatcattggaaggccgggccaggcctggctggtttgcagcgatagtgatcaaatgctgtgctgctgtgtttctgtgctcttgaggatcctcccaactatcccccttgagcctaggtaatatagccatgggaaatgtaacatatatatactgtttaaccgtccaaataaaaatgtacagagcttgaaaaaaaaaaaaaaaaaaaaaaa

SEQ ID NO: 22434 - DNA, 2139 bp, Oryza sativa
  unsure (1)..(2139): unsure at all n locations
  Clone ID: TF_OsC93838_1
atggaggccgacgacagcggcggtggcggcggcagggcacgcaggtccgtcgaggtggacttcttctccgacgagaagaagaacatgaagaagagccgtgtctcgggcggcgtcgccgccgaggcggacgacgccaagggacccgccgccgccggcctcgccatcaagaaggaggacctcaccattaacgttagccgccgccgccttcttcgctcgtcgatcgccagacacctgtttaactcacggcgatctaacgcgtgtgctcgtccgtgttcgttgcagcttcttcccgccgggaacaacgcgaggagcgaccggtcgatggtggtcgacgacgacgcggcgtcgcggccggatcacgaggagaagagccggagcagcaacgagctcgcggcgatgcaggcggagctgggccgcatgaacgaggagaaccagcggctccgggggatgctgacccaggtgaccaccagctaccaggcgctgcagatgcatctcgtcgcgctcatgcagcaaaggcctcaaatgatgcagcctccgacccagccggagccacctccgcctcaccaggatggcaaggccgagggcgcggtcgtgccgaggcaattcctcgatctgggcccgtcctccggcgccggcggcgaggcggcggaggagccgtccaactcgtcgacggaggccggcagcccgcgtcggtcgtcgtctaccggcaacaaggaccaagaacgtggtgacagcccggacgcgccgtcgacggcggcggcgtggttgccgggacgcgccatggcgccgcagatgggcgccgccggcgcggcgggcaagagccatgatcagcaagcccaggatgccaacatgaggaaggcccgcgtctccgttcgcgcgcgatccgaagcgccaatcatcgccgatgggtgccaatggaggaagtacggtcagaagatggcgaagggaaacccttgtccacgcgcgtactaccgctgcaccatggccaccggctgcccggtgcggaagcaggtgcaacggtgcgcggaggaccggtccatcctgatcaccacgtacgagggcacgcacaaccacccgctgccgccggccgcgatggcgatggcgtccaccacgtcggcggcggcgtcgatgcttctgtcggggtccatgccgagcgccgacggcgccgcggggctcatgagctccaacttcctggcgcgcaccgtgctgccgtgctcgtccagcatggccaccatctcggcgtcggccccgttcccgacggtcacgctcgacctcacccacgcgccgccgggcgcgccgaacgccgtgccgctcaacgccgcgcggccgggcgcgccggcgccgcagttccaggtgccgctgccaggcggagggatggcgccggcgttcgccgtgccgccgcaggtgctgtacaaccagtccaagttctccggcctgcagatgtcctccgattcagccgaggccgccgccgccgccgccgccgccgcgcagttcgcgcaaccgaggccgccgatcgggcagctgcctggccctctctccgacaccgtcagcgcggcggcggcggcgatcaccgctgaccccaacttcacggtggcgctcgcggcggcgatcacgtccatcataggcggccagcacgcggcggcagctggcaacagcaacgcgaacaacaccaacaccaacaccacgagcaacaccaacaacacaagcagcaacaacacgacgagcaacaacaccaacagcgagacgcagtaaaaacgagttcggatcagtaattttcacatagatttccaagtttttactcttctttgttcaggataggttcttgatttctctcctttggtttcgatagctcggccgagctgtgcagtgggcacatggtatacactttcttttttcttctccactttcctggttttgcagcagcaaaaagttgtattaattcattgctttttcttagttctttttctaccgcaaaaacagctgttgatacttcgcagtaagtaataatcagtacaataataagtataataatagcatcttcctgagaattatgtacacttgtcaaagcaacaaaacaaaagaaacaatgacagcttactagatccctcttttntaaaaaaaaaaaaaaaaaaaaaaaaa

SEQ ID NO: 22435 - DNA, 1025 bp, Oryza sativa
  Clone ID: TF_OsC271102_1
gcacgaggcacattctcaccctcagcagctcctcctcctcctcttccaccaccagcaacagcagcagcggcgtgcgctctcgcctccgtctccggcgacccatggccgtggacctcatgggcttcagcccgcgcggcggctgccgcccgtccgtggagacggagcagctcgctttccaggaggccgccgccgcggggctccgcagcctcgagctgctcgtctcgtcgctctccgccgggggggagcaccaccaccgccgccgcccgcaggagaagcagtcttcgccgccgctgggggagatcgcggaccaggcggtgtccaggttcaggaaggtgatctcgattcttgaccggaccggccacgcccgcttccgccgtggccctgtcgtcggagcggcagctgcggaggcggctgccgcggcggcgtcggcgtcaccgtcgtcgtctcctgtctcgccgcctctcccgccggtgacgacgcagccggcggccgccgtgaagagcctgacgctggacttcacgaatcccgccaaggtcgcggcggcgtcggtgacctcgacgtcgttcttctcgtcggtcaccgccggcggagacggcagcgtgtccaagggccggagcctggtctcctccgggaagcccccgctcgccggcggcgtcaagcgcaagcacccgcacccgccctgcgccgccgccggcgacggccacggccacggcgcaggccacgcgcacgcgcacggcgggtgccactgctccaagaagcggaagcagcgggttcggcgcacggtgcgcgtggcggcggcgagcgcgcgggtggcggacatccccgccgacgagtactcgtggcgcaagtacgggcagaagccgatcaaggggtccccctacccgcgcggctactaccggtgcagcaccgtcaagggttgccccgcccggaagcacgtcgagcgcgccgccgacgaccccgccaccctcgtcgtcacctacgagggcgaccaccgccactcgccgccgccgccgccgcttgtttaa

SEQ ID NO: 22436 - DNA, 963 bp, Oryza sativa; identical to SEQ ID NO: 13059
  Clone ID: TF_OsC278621_1

SEQ ID NO: 22437 - DNA, 1422 bp, Oryza sativa
  Clone ID: TF_OsC61691_1
tggatcccccgggctgcaggctccgcccggagctccaattagtcgcacaccgatcccctcctcttcttcccccccttctcctctctcctctttttttcctcatccgtgcgcgatactgcgcttagtttgtgggtggggggagtgatcatcaccaaagccacaaagggggcgcggagagatattatatattctttgggaaagcgttggattagtttttctcgctttgggctttttatccggagttggagtgtgtgtgcgccgggagtggtggtggtgatggcggccggagaggaggtgatggatcggtcgacgtcggccgaggacgggtactgcagcgccggcacggactcgccgcgggcggagtccgtcgacgagcaaggggccgccgaggagtcgtcgccccggggagggcagaagcgggagctcccctcgccgtcggcttcgccgtcgtccccgctgccacctgccgcgaagcgcagccggaggtcagtggagaagcgggtggtgtccgtgccgatcgcggagtgcggcgaccggccgaagggcgccggggaggggccgccgccgtcggactcgtgggcctggcgcaagtacggccagaagcccatcaagggctctccctacccaagggggtactacaggtgcagtagctccaaggggtgtccggcgaggaagcaggtggagcgcagccgcgccgaccccaccgtgctgctcgtcacctactccttcgagcacaaccacccgtggccgcagcccaagagcagcagctgccacgcgagcaagtcgtctccccggtcgacggcgccaaagcctgagccggcggctgacggacagcagcccgagccagcggagaacgaatcgtcggcgtcggcggagctggaggtaccggagccggagccggagcaggaatctgagccggttgtgaagcaggaggaggagcagaaggaggaacagaaggctgtggttgagccggcggcggtcacaaccacggtggcgccggcgccggcggtcgaggaggaggatgagaacttcgacttcggatggatcgaccagtaccacccgacgtggcaccggtcgtacgcgccgctgctgccgccggaggagtgggagcgcgagctgcaaggggacgacgcgctgttcgcggggctcggcgagctcccggagtgcgccgtcgtgttcggccgccggcgcgagctcggcctggcggccaccgcgccgtgctcctgatgatcacctcctcttttctttttcctccccttttacaatttcccttttttttttttgcttttctttagttctccttggagtaatttggattggaggttagtacatagcttgggtgatcaatgggagtgagtggcttaactgttcaagagagcctcctattccaactctccaaattgcgtcgcgtgttcgtcatcc

SEQ ID NO: 22438 - DNA, 874 bp, Oryza sativa
  unsure (1)..(874): unsure at all n locations
  Clone ID: TF_OsC102358_1
atgacgtccttggactggcagtcgctcctgcagacgtgcctgcaggtaccgcctccggtgctggagcagcagcaaccggcggcggcggcgcaggcggatcagtacagcggggagaacgatcacggcgatctgcaggcggccgagagcagcggggcaggtaacaaggagaagcaggtgatggcgaagggcggggcggggaggccgtcggggacgaagaagaaggcgagccggccgcggttcgcgttccagacgaggagcgacaacgacatcctggacgacggctaccgatggaggaagtacgggcagaaggccgtcaagaacagcaagcaccccaggagctactaccggtgcacgcaccacacgtgcaacgtgaagaagcaagtgcagcggctcgccaaggacacgagcatcgtggtgactacgtacgagggcgtgcacaaccacccctgcgagaagctcatggaggccctcacccccatcctcaagcagctccagttcctctcccagttctaattaacgacccatatcgatcggtctcggtcggtctcaaactctgaaatgatcgatctttcaagttactacacaaacacaataacacacattcacgtgtacatatatacctgcaacaaattaaactctctgtttagcttggggggaagaaaaggagaacaatgtggcctacctcccccgtctcccgtcaatacagtacaatatactgctagttgatcatgtatgtcgtcatactgtatatacgtactccctgtacgtgtatccttgtatattttncatatgtacgctaagcttacgcatatattgtatatgtgacacaaataatgcccccggaaagttaaaatatgtcgctgttatttatttc

SEQ ID NO: 22439 - DNA, 2098 bp, Oryza sativa
  Clone ID: TF_OsC26646_1
tcagtagagcgagttctggaagaacatgtcgtctccgggctcttccttggctctcgaggcgtgcatcgcgtcgttctgcctctgctgctgctggtgctggctcatgtacgagcccctggcgtcgtcgaacccggagaagccgccgaagctgctcccgccgaccacgccgccgaacggtccctggccgccgaacccgtcgggcctcagcgcgtacggctgtggccccgtgggctggtaggacatgggcggcggctggttcggcaggtacgggtggctgctggtggcggccgccgccggcggcgcggggcggtagagcgcggcgctcccccgcgcggcgggcacgtcgtggttgtgtttcccctcgtaggtggtgatcacggcgcgcaggtcgtgggacgcgcgctccacgtgcttccgcacggggcaaccggccgtggtgcacttgtagtagctccttgggttcgggttgcccttcaccaccttctggccgtactttctccagcggtagccgtcgtcgaggatgtcgatgtcgctcatggtttggacgaccaccctcggttcccgcaccgtccggttgccagccatggagatcccctcgccgtcaccgtctttcctccatctcttggaatccggctcgtcgtcgtcgaactcgtcgccgccgccgttcccggcccgaggggagccaactctgatctcgtcgtcaccgaacgacgccgacgagttctcgggcgtcgccgctgtgccggacatgcccccgaaggaatgctccgacatgtcgccgccgctctgcaggacctgcgccgccgacgagccggagttcctgcgcgtgttctgcggcttggcgtggttgtgcgtgcccttgtacacgatctcggtgatctggccgtcgagcgaccgctccaccttcttcttggtcgggcagttcgggaaggtgcacttgtagtagctgcgggggttctcgctccccttcacctgcttctgcccgtacttgcgccagttgtagccgtcgtccgacgaccgcctctgcgactgcggctggctgtacccgccgccaccctgcacctgtggcgccatctccgacgaggtcgcctggaacggcgccgcaccgaagctcgccgcgttggcacccgcgtccatgcctgcaggctgctgctggtagccccatggctgctgctgctgctgacttctgtatgcctcgtcccccagtggggccggtgggaccggtggctggaaagtcgtcgttcgcacggcctcctcgctcgcaggcgccgtctgaaacgagaagtcggagtaggaattcctctgctcgtccttgccgccttgatcggcgctctgcgccgccgccacctccggcctccagtcaaagtgctgcgacgcgaatgcgcccgtcgtcggcgacgggaagatactggaggtcaggagcaccggcgagccgaggaagtcggcctggttcatgccgatcgggctgttgaagaaggacgacggcgacaccggcggcggcgagagcggcagcgaaggcggggtcatggccttgtacctggacacacctccgccgccggctcccgcgtttcccccgaggaggtccgtgaagctcgcgctggcgaacgagaacgtccccagccgcgaattggccgacgtctcgacgctcccggacgacgaggttgtcatcggaatccctcaggtcgcgaccaaaaccgccgcgtctcacagctcgtcgccgtgcgaactgcagtcagccgagtatacgtatgtgttcctttttcgtgtttgtgacttggaggctggagacgtggacggatgggtctacgtgctgacgtttctctacggccgagcagagacaaagctggccgggaggaaggggtcgtcgtcgtcgtctccggcggccgaggaggacgacgacggcactgcgtcggcgaggtcggccaaccctcagcaggaagcgggagctcccctcatcctcgccctcgccctcggcctcggtgtcaccgtcatccccgctacggcctgccgctttgcgcctccgggatggacgccggcagcctgcgtcgacttgcaacagtaccctctgataccccacaagtatcaggctgatacctag

SEQ ID NO: 22440 - DNA, 852 bp, Oryza sativa; identical to SEQ ID NO: 13063
  Clone ID: TF_OsC387129_1

SEQ ID NO: 22441 - DNA, 613 bp, Oryza sativa
  Clone ID: TF_LIB4371-013-R1-N1-H3
aatctcttgtctagaaagggatgctatcgaagtgatccggcgactgaaagcctgaaatgtcgatcaggctggctgggcagctaggacccggttgtgattgtgatcaccttcataggtaacaatcaacatcgaggggtcgtcgacgcacctctcaacatgcttcctggctgggcatcctcttacactgctacacttatagtaacccctaggatgtggggatccttttattggcttctgtccatacttcctccatgagaactcatcagctggaatgtcagcaaccttattactgattgcagggactttgatagacctccttatcctcagcttccttttcttcgcacagtgacatcggctcccagttgtgcatcgtccactaccatcctccctaccagtgcacctcctcctctgcatgaggcctaactctggagtgcttgacgtctgggacccactaactagctggaatggacgactggagcggctacccgccaaactcgcaatgcttccctccatactcagagacgacaagaaataacgggaggatgatgcccgtgcaattagaactgtcaaacttgagattaacacccttaccaccaccattgctaccaccctg

SEQ ID NO: 22442 - DNA, 1914 bp, Oryza sativa
  Clone ID: TF_OsC337842_1
atgacatgggataataggattaaggaggagtcttccctcctcattgcccttttaatacgtcttagacacccagacattgacttagatgcctcgggagaagtagcattaggatttaagaccgttccccattttagctgtaccaagagagacaaaggtacacaagattaccagaaagaggccaggagcatgtcatccaagaagaagagagctgccatagatctctccctggaggcagagagaagacggccagaagaacgcggcggcggcagcgatcgcgaagccagcgatggcgccgctgctgcagctgaggaagatggtgatgtcaagcaacgagagggccctaaagaggaaaccggcggcgaggaggagaaggtagttgaagtggttgtggaccaaggagaagacggctccaatgaggagatcaaatataggactcaacaagcagagatgatcgaggaggacaagcaaccagctgcagcagcaaacgtcgacgacgatggcggcgacagcgacggagtcggagctagcgcggaagagaagcacatggtaacagaggccaccggcggcgaaggcgacgacggaggcgatagccgtacccccatggcgcaagatgagctcagcgagatgcaggaggagatggagaggatgaaggaggagaaccggatgctccggcgagtcgtcgacaagacggtgcgcgactactacgagctgcagatgaagctagccgcctaccagcagcaaccggcagcagcagatgagcctaaggagaccgaggtgttcctctccctcggcgcaacggccgccgcctccgccggctgcggcggcggcttcccggaggcgaagagcaaggagcaggccgcgtggcggcggcgctctgtcggaagcgacgacagcgactgcggcaaggaggatctagggctgtcccttagcctgggagcgtcgtcgtcgtacgacgacgaccagaaggcggtggaagcaaggccgcacgacgtcgacggcgcggcggctgcggccatgatcggcggcgacggcagcaggccggcgccgagggggtacccgctgctggagagcagcaaggtgcagggtggcgcggcgccggccgccggcgagctcgccgcggccggcggcatcacgagccagagcgtcaacccggccaaccgcaaaactagggtttcagttcgagtccggtgccaaggccccaccatgaacgatgggtgccaatggcggaaatacgggcagaaggtcgccaagggcaacccgtgcccgcgagcttactaccggtgcaccgtcgcgccgggctgcccggtgcggaagcaggtgcagagatgcctcgaggacatgtcgatcctggtgacgacgtacgagggcacgcacaaccacccgctccccgtcggcgccaccgccatggcgtccaccacctccgccgcggccaccttcatgcttctctccagcaccacctcctcctcctccgtctccgacgcctccgccgcgccgtcgtcgtcctacctcagcccgtacctgctcaactccgcctcgccgttgctaatgccgggcgccaccggcggcggcggcggcatgcagcatctcaacctgttcgggaattcgccgtcgtcgtcgtctctgctagctccgcaagcgccaggctccagcaagtacccgtggtctccgaaccaccctccgctcgccggcgccggaggtaataagagaccgttctggagcgccggcggcgacggggacaagccggcgccggcggcattggccgagaacgtcggcgcggtgatgtcggacccgaacaagttctcggcggcgatcgccgcggcgatcaacaacttcatggggaaagacggcgagagtagcagcggcaagagtagtagtaagtggggcgtggttgaatcacttccaccccatgagtag

SEQ ID NO: 22443 - DNA, 1557 bp, Oryza sativa
  Clone ID: TF_OsC61565_1
ctcctcctcgtcgcgaacacctggcgcgagcgattcttggcttcccaattttgcgacggcgatcgatctttgggttttcttggtgttcgatcgatcagagcagctgaggcgaggcaatggaaggcgttgttgacgggagcggcgcgcagctggtggtggcggagctggtgcgcgtgcaggggctgctccggcagctcgaggcccacctgagcgcgccgtgctccgtcgagctctgccgcggcctcgtcgcgcagatcgtcgcgctcacggacaggtccatcggcatcgccacccggtccttctcctccgcctccggcggcggcgcgcatttcgcggacacggcgccgccgatgccggcgctgacgtcgtgcacgcccagcccgctcagcgacggctccgaccaccagccgttccggaccaccaacgccaagaagaggaagacgacggcgaggtggacgagccaggtgagggtgagcgcggcgggcggcgcggaggggccagccgacgacgggcacagctggaggaagtacgggcagaaggacatcctgggcgccaagcacccgcgcggctactaccgctgcacccaccgcaacacgcagggatgcaccgccaccaagcaggtccagcgcaccgacgacgacgcctccctcttcgacgtcgtctaccacggcgagcacacctgccgcccgggcgccgccagcgccgccgccgccaagaggccgcacgcgcagacgctgctgcagagcctcagcgccagcctcaccgtgaacacggacaccaacacgccgctgacgccggagaaccgcgcgccggcgccgccgctgcagcagcagcagcagcagcagagcgtgtcggcgtcgcccgtggcgtcggactcgtacggcctgggcggcgccgggtacggggactggcgctgctgcgacggcgacctgcaggaggtcgtgtcggcgctcgccaccgtgacgtcggcccccgaccacgccgccatggacgccgccgacttcatgagctactgcttcgacttcgacccggcggtgtacggcggcatcgtcggcacgccgagcttcttcctatgaggaagaaaagccatagcagagcagagcagaggccctgtccatccatggtggcaggagggaagaagaggaaagcttaagctttgctcttcaaggcttgagcttcttcttcctaagtaagatcagtgcaggtgtaagcagtaatttagcttaggatatctcttgtttctattctttctttaatttccttttgtttctcccaactctctctcatggagtttggattttgctggtttctgtcaagcaaaagagaggaaaataagaagattttgttactactgttctgatgaaaaaaaaaaaaaaaaaagtttggagaatgattcacttttttggggagaaaaggttcaacctttctgttatccatcttgccaattagtggatggatgagagagagcctaggcatgaaactgtagggacagcaattcatatcttgacataagtggcaagttggaccaaatcatagttcaaaaaaaaaaaaaaaaaa

SEQ ID NO: 22444 - DNA, 332 bp, Oryza sativa
  unsure (1)..(332): unsure at all n locations
  Clone ID: TF_LIB4371-039-R1-N1-B10
atgttaatgaagatacttacaacatgagatcaagaggcacgtaggatccactcgattgtcctgagaactcaagcaatccaggattaaaaccttttggggactaggagcatccatggccctatcaggcttcttgctgctgtgagggcagcctaccccgttggggatgctccagaaatgcgcaaaattctttgatccagtaccgaaggctttcgtgcggcttaagctnggatcggtggcttatatactccggatgtgtaccttgataaaggtgtgataatcatgaaggaacccggtgcctcttctgtgtgaggggaacgggcggcatatgctct

SEQ ID NO: 22445 - DNA, 1338 bp, Oryza sativa
  Clone ID: TF_OsC14991_1
gggcagcgggtatgtggctgagctcccgaaaagaggaaagtgagatagctcaatttctccttccttcctctctccatctaatctacacatgcacaaatgttgcagctgatatatggcttagctagcatatgcaaagcaagccttcctgcagtctagtcacctctcaagctacatactcccagtactgcttcatctagctctctctagtagctagctctatcatcatcgatcatcctcctctcaccggccggccaacccagagaagagattattcctcagaagaagaagcaacaagaagaagacgaaatgtctgcccagatcgctccggcagagcaagtgtgctatgtgcactgcaacttctgcaacacgattctcgcggtgagtgtcccaggaaacagcatgctgaacatcgtgaccgtccggtgtgggcactgcacgaatctgctgtcagtgaacttgagaggactgatgcactcagccccagcactacaagatcatcatcatcatcatctccaggagagtggtctgagcggatgcttccgtgatcaaagtggctatccggagtttggtttttctgcagcttcgtcgtcttccaagctcaggctgcctcctgctgctgctgccatggtttcctactcgcagcaaaaccagcagctcgagcaagctctccatgctcgccctccagagaagaggcaaagggtaccttcagcctataacagatttattaaggaagagatacgaaggatcaaagcaaacaaccccgacattagccacagggaagccttcagcacagcagccaagaattgggcacattatccaaacatccattttggcctaagccctggccatgagggtggcaagaagctcgtcgacgtcgaccccatcccaactgctccatcttccaagaagatccaaggtttctactcatagattgaggggatcaatctgccgataccgataccgcaaataggaggaagagcatcaagagcacaaaacatatatatactgtgagtaaagaagcaaaggaaaaaagaaaagaaatgctgccaccttacctttgttcatgaccaaaaaacttgtgaagacgtatgtcataagtacatagaagaaatcaactcatatagagtgaaaaaaaacatacaaaaaatcaagctactatagctcatcgatcgactgaaaggctgaataaaccattcgaccataatgttgttacatgtataagtatgtttgaagctagctagctggctagttctttatttcctctttatgtcttccaatgaaattaatttgcaaacatattaacagcactgtcgacggatgcaaatcagtgaaaaaaaa

SEQ ID NO: 22446 - DNA, 934 bp, Oryza sativa
  Clone ID: TF_OsC256574_1
gcacgagggccgtcgccgccgtcgtcgccgccgcaatggatctcgtgtcgccgtccgagcacctgtgctacgtgcgctgcacctactgcaacaccgtgctcgcggttggagtcccatgcaagaggctgatggacaccgtgaccgtgaaatgtggccactgcaacaacctctccttcctcagcccgcggccgccgatggtgcagccgctctccccaactgatcaccccttgggcccgtttcagggaccttgcactgactgcaggaggaaccagccgctgccgctggtctcgccgacatcaaatgagggtagcccaagagcacccttcgttgtgaagcccccagagaagaaacaccgcctcccatctgcttacaaccgcttcatgagggaggaaatacagcgtatcaaagctgccaagccagatatccctcacagggaggccttcagcatggctgccaagaactgggcgaagtgcgacccccgctgctcatcgacggtttccacctccaacagcaaccccgagcccagagtagtagctgctcccattcctcatcaggagagggccaacgagcaggtggtcgagagcttcgacatcttcaagcagatggagcgcagcggctagggcggcggcggcggccggagccggcggcgatctatatcggcggtgaagctcgtatgaagctagctagcctgcaggccggccactggggagagtaccaaatttcagatcccccttattatcaccgtcgtcagctcagctcatgcatgcatgctcatcgttcccctttagcatatatctgtgctcgtttggtgtttattagttaattatgtttgatcttgttaatttgttgttgcatggagtatgtaccccctataagaccagctgctgctaccgtacgatatacgtacgtatgctatatatatatatatatatat

SEQ ID NO: 22447 - DNA, 1257 bp, Oryza sativa
  Clone ID: TF_OsC1295_1
caccaatctctctctctctctaagatctctatctatctaaagatctgagctacaattaattaaaacctgataagaagaagaccctgagctcaatcccttcttattatactatatatatacttctgtatttgtgcacagtgttggtacaggtatctgcagacagccatatctatctttctagctaattggcaatatgcctgaagtccactgctcgtcctaagatttacttctccacccccccccctctcctttgcttcttcttcttcatcatcatcttcttcctcctcctgttaattaagttcttgatttctaagctagcaattgagcacacatcgatcgcgagagacgcagcggcgcccgtctaccgcggggctagaggaatgtcggcacagatcgtgccggcgccggagcatgtgtgctacgtgcactgcaacttctgcaacacaattttcgcggtcagtgttccaagcaatagcatgctaaacatcgtgaccgtccgttgtggccattgcactagcctgttgtcagtgaacttgcgaggattggtccaagcactcccagcagaagatcatttacaggacaatttgaagatgcacaatatgagcttccgcgaaaactactctgaatatggctcatcttccagatatggccgagtgccaatgatgttctcaaaaaatgacacagagcatatgctgcacgtgcgacctccagagaagaggcagcgggttccttcagcttataacagatttatcaaggaagagatccggaggataaaagcaaacaatcctgacataagccacagagaagccttcagtactgcagcaaagaattgggcgcatttcccgaacatccatttcgggttaggctcccatgagagcagcaagaagctcgatgaggccattggagctcctagtccccaaaaggttcaaaggctgtattgatcgagtacacatgatgatcgatggatcctacgtgcttgttgatctcatgttgtaagtaacttaaaaaaaaaaaaaaatctacgcttatttatttcttaagtatcatcagttaaatttgtgagcgagtatatagatgagttgtcatgatcagtgagtgatcgtatgcatgcagtgctgagaattaaaggtgtatatgcatgagtaacgttacatgcagctagtgtcgacgcacgtatgacagactgaataaactcttcaccatgttgtttttttatgtttgaaatgaattaattaattgtccaaaaaaaaaaaaaaa

SEQ ID NO: 22448 - DNA, 1544 bp, Oryza sativa
  Clone ID: TF_OsC1294_1
gcacgaggccttgcactcagcttgcagcttatagtgcaccgcacactgtcctctgttcatacaccccaccaaacacctttttttcctccttgacatgtagctagcttctttctgacttgctcgcagctggtagtaccctctctagcttattgcagggccatatcctctgctagcttagcttctctcgcaaaccccttaattccatctcatagacagccaaaagggtcaagaggaaattgggtttgtgctctccccaaaatcctccatatatagtgcacaggaggcatcattctgttcatacatatctctcccttgcttgctttgctcctggatatatagctagcttctttctttcttcctctctccctgtgtggcacgcgcctccaatcgatctcttcggtgagtagacgcatcgagatcggggggaaatgtcggtccagtttacatcggagcatgtttgctatgtcaactgcaactattgcaacactatccttgtggtgaatgtgccaaacaattgttcctacaacattgtgactgttagatgtgggcattgcacaatggtgctctccatggatcttgctccttttcaccaagcacgcactgttcaagatcaccaggtacagaacagaggatttcaaggtaataactttggaagctatgacatagcttccagaaatcagaggacatcgacagccatgtacccaatgccaaccagtcagcagcaagtgtcacctatacgtccccctgagaaaagacagcgtgtcccatctgcatacaacagattcatcaaggaggagatacagaggattaaaaccagcaatcctgagattagccacagggaggcattcagtgctgctgcaaagaactgggctcatcttccccggctccattttggcctcagcgtcgccgacggcggcggcggcggcggcagcaactaatcgcggcggcgcggcctgccggccggccaccgatcgccggcgtgcacgccggcgcgcggcggcggccggtcgagaatgcgcgcgcaggagggacgacgacgatatattattatcgcgtgtgcccctctctcttcgccgcgtaattaattaatcagttaattaattacgtacgacctactgtgttatgctatcgatccgtgttaattaattacctacgtatcttgattaattagtctcgtattatacgtactattatacgtacgtgctgtgctatgtacgtagacaacaaaaaaaaatgtgcgtgatgagttctactacgtacgtacgtactgtgttctagtgttttaatttgtatccgaaccaaggagttgtttaattaactgcatgcacatgcactggacttgaatctggagtattatgtaagtgtgcatgcatgctggattatgcaaaataaacgaattaatgaatagaactgtttttgttaaataaaaaaaaaaaaaaaaaaaaaaaaatcgagagaaaagacagcgtgtcccatctgcatacaacagattcatcaaggaggagatacagaggattaaaaccagcaattctgagatagccaca

SEQ ID NO: 22449 - DNA, 282 bp, Oryza sativa
  unsure (1)..(282): unsure at all n locations
  Clone ID: TF_jC-osflLIB3479001b04b1
cggacgcgtgggtctagatcgcgagcgganactattnttgatatggttnatnttacaaatatggacgantgccaatgatgttctcataaaaatgacacagagcatatgctgcacgtgcaacctacatagaagaggtatcgggtaacttcagtttataacatatttatcaaggaagatatccggaggataaaatcatacaatcctggaataaggcacaaaaaaatcctttaatactggatgtaaaaattgggcgcatttcccaaacatccatttttgggttta

SEQ ID NO: 22450 - DNA, 2022 bp, Oryza sativa
  Clone ID: TF_OsC17966_1
cgccccggcacgaggcgagcttcatctccactagtctcatccctccttctccctctcctcgttgaacaccgcactatcaaatcacccagctgaaagccaagaccgcgcgcgccggccggccgggcagggatcacctagctaggatacgcgccatgatgtcgtcggcgccggagacgttctcgctggaccacctctcgcagcatcagcagcagcagccgccgccgtgcgccgagcaggagcagctctgctgtggtgcactgcaacttctgcgacaccatcctcgcggtgcgcctgccccgtagctgcctcgtctcggccggctccgtccggtccgaagccagccagccctctaaccacctcatcacatcaaagcgggaccaaaaggatatctctggtggctaccccctctcctccggccgctcgtgtaaaatttcccttctgatcctgcgctgtgccagattataaggccattgcgtagctcgatcgaagaaagaagcaggccagccacagtactgcctctcttgtcgatcgatcgacagccacagcctgcaggtgtggggattcggctggccgtcgtcttcgtcttcgtcttcgtcgtcgtcctcatcatgtcgtcctcgtcctcgtcgtcggctgtcttcccactggaccacctcgcggcgccgtcccccaccgagcagctctgctacgtgcactgcaactgctgcgacaccatcctcgctgtcggcgtgccgtgcagcagcctgttcaagacggtgacggtgcggtgcggccactgcgccaacctgctctccgtcaacctccgcggcctcctgctccccgcgccggcgccggcgccggccaaccagctccacttcggcccttccttgctctcccccacctccccccatggcctcttggacgaggtggcgttccagacgccgagcctactgatggagcaggccgcgagcgccagcctgagcagcatcacgggccgcagcagcagcagctgcgccagcaacgcgccggcaatgcaaatgcctccggcgaagcctgtgcagcaagagcctgagctgccaaagaacgccccggcgtccgcgaacaggcctccggagaagcgtcagagagtcccatctgcgtacaaccggttcatcaatgatgagatccagcggatcaaggccggcaacccggacatcagccaccgggaggcgttcagtgcagccgcaaagaattgggcccatttccctcacatccattttggcctcatgccggatcaggggttcaagaagaccttcaagcctcaggatggttctgaagacattcttctcaaggatagcctgtatgctgcggcagccgccgccgccgctgcagccgcaaacatgggcgtcactccgttctagcgagctttggcaaagcggccgcaagcaccgaattcttggtggtggccctagctcgctctcatgtgtggcgccattctagctatatagcaagggtttaattagcatcagatcatcatctcttaatatcatgtgtgttgcttaattagagtacttctgagtgtgtagaagagagatggggaatcctgttgagtgcctaggtttatgcttataaccatattcctcgtagagacttttttccctgtttttctcttttcttttccttctttatttttttatcctttctttctttcaggactatcttcgtactccctattcacctgtagagtgtagagaagttgctgttccgttgcctgattgtgtcccaaaagacgtgtcttaattacgaactcatgaacatcatctagcaatataaattctagaaacccatgcatgcatgcgttgctttctttaatatttcatgtgcttttcttcaatagaaaatgttttgggtttttatcaccatacattcgttatgagattaagtgcttagtgctaagattttggcaaataaatttgtaaaatttcaaaaagagaataatataacttctttgcttccttcaactaaaaaaaaaaaaaaaaaaactcgagactagttccctcgtgc

SEQ ID NO: 22451 - DNA, 939 bp, Oryza sativa
  Clone ID: TF_OsC17966_2
gctagcttcatctccactagtctcatgcctccttctccctctcctcgttgaacaccgcactatgaaatcacccagctgaaagccaagaccgcgcgcgccggccggccgggcagggatcacctagctaggatacgcgccatgatgtcgtcggcgccggagacgttctcgctggaccacctctcgcagcatcagcagcagcagccgccgccgctcgccgagcaggagcagctctgctacgtgcactgcaacttctgcgacaccatcctcgcggtgggcgtgccgtgtagcagcctgttcaagacggtcaccgtgcggtgcggccactgcgccaacctgctctccgtcaacctccgcggcctcctgctcccggccgccgcctccaccgccaaccagctccccttcggccaggctctcctctcccccacctcaccgcacggcctccttgatgaggtgccgtcattccaagcgccggcgagcctaatgaccgaacaggcgagtcccaacgtgagcagcatcacgagcagcaacagcagctgtgctaacaacgcgccggcgacgtcgatggcgtcggcggccaacaaggctacccagcgagagccgcagcagccgaagaacgcgccgtcagccaacaggacttcagagaagcggcagagggttccctcggcatacaaccgattcatcaaagatgagatacaacgcatcaaggcaagcaatccggacatcacccacagggaggctttcagcgctgctgccaagaactgggcccatttcccacacatccattttggcctgatgccggaccagggcctgaagaagaccggcatacaaagccaggacggagctggggaatgcatgctcttcaaggacggtctctacgctgcagccgccgccgctgcagcagccacagcagcatctagcatgggtgtcactccattctaa

SEQ ID NO: 22452 - DNA, 1391 bp, Oryza sativa
  unsure (1)..(1391): unsure at all n locations
  Clone ID: TF_OsC1270_1
tttgttccctccacttcggcctcttcttcctcctccatccccatcctccatcggatgcactagtagctggccttgtaccctacctagcttagctacccacccatgtcctcctcctcgtctcctctcgctgtctgcctttgacttggaggcctagctcgtcgatcgccggccatgcgggtgcagtgcgacgtctgcgccgccgagccggccgcggtgctctgctgcgccgacgaggccgcgctctgctccgcctgcgaccgccgcgtccaccgcgccaaccgcctcgccagcaagcaccgccgcctcccgctcgtccacccgtcctcctcctcctccggcgacggtggcgccgccgccgcgccgctgtgcgacgtgtgcagggagaagaggggcctcgtgttctgcgtcgaggaccgcgccatcctgtgcgccgactgcgacgagcccatccactccgccaacgacctcaccgccaagcacacccgcttcctcctcgtcggcgccaagctctcccctgccgcgctcgccgaacagccgctcccgtcctccgactgcagctccgacgacgacgccgccgccgccgccaccgaggaggagtaccactcctccgccgcatccaccggcgccgcagtgagcgcgcctcttgacgcctccagcaacggcgccggtggcggaggaggagtaggagggagcagcatctccgactacctcaccaccatctgccccggctggcgcgtcgaggacctcctccccgacgacgacgccttcgccgccgccgccgcgcaggcggggaaagagaaggacgagcgcgtgccgttcctcgacgccgacctgttcgacgtggtcgccggccggccggagaagaagggcggcgcgtgggcgccgcacgtgccgcacctgccggcgtggtgcctcgacgaggtgccggtcgtcgtcgccgcgtcggcggcgccagcggcgacacctgtaaaggcgaagcagggacacgtgcgggacagccactggagcgacagcgacgcgttcgccgtgccggagttctcgccgccgccgccgccggccaagagggcgcggcccagctcgcagttctggtgcttctgaacgccgccgccgccgtacaatctggccgccggcgagctcgacgaacacctcgatggatcgatcgaacacctgtgtaatcactcagctggtcactactacaagtagcaatcagcaagcttgatgtgccactgttactagctgctgctgtttaattagtgagtactaagctactactagttaattttggtgaaaactatgctactttgttactatataatgaagtatgtgtatcaaactaaactgagatgttggtaattaattatcgtattttgtaaaantnaaaaaanttnaaa

SEQ ID NO: 22453 - DNA, 1300 bp, Oryza sativa
  Clone ID: TF_OsC280_1
gcacgcctgagacgagcccactctacttctccttgcaacatcgtcgttagtcctctaacccaaggcattgacctgagcttgttgtgcgcttctgccttatctgcatcccctcccggccgagacgcgaccatctttctttcccgcttcgttagctgtctctgccgatcgatcggactggacggggagacatgaaggtgcagtgcgacgtgtgcgcggccgaggccgcctcggtcttctgctgcgccgacgaggccgcgctgtgcgacgcgtgcgaccgccgcgtccacagcgcgaacaagctcgccgggaagcaccgccgattctccctcctccaaccgttggcgtcgtcgtcgtccgcccagaagccaccgctctgcgacatctgtcaggagaagagggggttcttgttctgcaaggaggacagggcgatcctgtgccgggagtgcgacgtcacggtgcacaccacgagcgagctgacgaggcggcacggccggttcctcctcaccggcgtgcgcctctcgtcggcgccgatggactcccccgcgccgtcggaggaagaggaggaggaagcaggggaggactacagctgcagccccagcagcgtcgccggcaccgccgcggggagcgcgagcgacgggagcagcatctccgagtacctcaccaagacgctgcccggttggcacgtcgaggacttcctcgtcgacgaggccaccgccgcctcctcctcctcagacgggctatttcagggtgggctgctggctcagatcggtggggtgccggacggttacgcggcgtgggccggccgggagcagctgcacagtggcgtcgctgtcgccgccgacgagcgggccagccgcgagcggtgggtgccgcagatgaacgcggagtggggcgccggcagcaagcgacccagggcgtcgcctccctgcttgtactggtgaaaaaaaaacgtgcgcttatcagccacagccagtacgaaatgtacgatgcttgtgtaccagtgtactgaggtagtagcgttagaagattaggaatttagtagtggatgttgattttgagcttaacgcgtgtcttggatgaatccctgactcctgaatgtttggggaattaatgtgagtggtagtgtcctctttgggcggcaagaattatacgccccttgcgaacatgtcgaactgtacggtctgccatttaatctgcacgttcacccctctgcatcttctgtactgcaaatcagattttgtgactcttccattaggttatgaagttttcaggatgttgcagcgcaaaaaaaaaaaaaaaa

SEQ ID NO: 22454 - DNA, 1014 bp, Oryza sativa; identical to SEQ ID NO: 13165
  Clone ID: TF_OsC1270_2

SEQ ID NO: 22455 - DNA, 1183 bp, Oryza sativa
  Clone ID: TF_OsC1273_1
attgacgtcttcgcacaggcacccagccatgctgaagttggagccggagttccccggcctgccgcagcggtgcgactcgtgccggtcggcgccgtgcgcgttctattgcctcgccgattcggcggcgctctgtgccacgtgcgacgctgacgtgcactccgtcaacccgctggcacgccgccaccgccgcgtaccaatgggcgtggtggctgcccccggcgccgggggagccttcgtcgtccgccctgcaggcggtgtcaactcctcctggccaatccgagagggcaggaggtgcgactacgacgatgacgacgccgacgccgctggggaggaagacgaagaggcgacgtcgtggcttctgttcgacccgctcaaggactcctcggatcaggggctgccgccgttcggcgacgcgctggtggccgacttcctcaacctcggcgggggcgccggggagaaggaggacgcgtcgtcgagcaaggactgcagcagcagccacgggaagagcagcgagggcagccacgagttcgccgtgcccggcgagcccgtaccggagcgccagggcttcggggcggtgagtatggacattaccgactacgacgcctccaatttcaggcgcgggtacagctttggcgcatcgctcggccacagcccgccagcgacgacgaagctcgtggcgcgcgcatcggtcgacgggcggagcactggcggcttggttgacgggcggagcaccggcgactcgcggggcggcggatccggcggaggcgactcgcggggcggcggatccggcggcgacgactcacggggcggtggatccggcggaggcgactcgcggggcggcagatccaacggcggcgactcgcgggggggcgtcgcccagcggcggcgactcgcggggcggcgcggtgcggcgagtccggcgacggtgacaaggagaaggggcgactcgtggggcggcgtcgcccgacgaatccaacggcggcgactagctttgcgaggcggcaggtctgattcgcaccggtggatggcagctcggcgacgaggtgcagtggctgggctctacggcagtgacccacctcctcgtcgaccttgggcctccctgtcgccggcgatggaggatgggcacgccggtgattttgattttttttttcaaaatctggattccaattttcttcttttttaa

SEQ ID NO: 22456 - DNA, 1429 bp, Oryza sativa
  Clone ID: TF_OsC1273_2
attgacgtcttcgcacaggcacccagccatgctgaagttggagccggagttccccggcctgccgcagcggtgcgactcgtgccggtcggcgccgtgcgcgttctattgcctcgccgattcggcggcgctctgtgccacgtgcgacgctgacgtgcactccgtcaacccgctggcacgccgccaccgccgcgtaccaatgggcgtggtggctgcccccggcgccgggggagccttcgtcgtccgccctgcaggcggtgtcaactcctcctggccaatccgagagggcaggaggtgcgactacgacgatgacgacgccgacgccgctggggaggaagacgaagaggcgacgtcgtggcttctgttcgacccgctcaaggactcctcggatcaggggctgccgccgttcggcgacgcgctggtggccgacttcctcaacctcggcgggggcgccggggagaaggaggacgcgtcgtcgagcaaggactgcagcagcagccacgggaagagcagcgagggcagccacgagttcgccgtgcccggcgagcccgtaccggagcgccagggcttcggggcggtgagtatggacattaccgactacgacgcctccaatttcaggcgcgggtacagctttggcgcatcgctcggccacagcgtttcgatgtcatcgctggagaacatgagcacggtcccagactgcggtgtgccagacatcaccacctcctacttgaggtcatccaagagcaccatcgacctcttcacggcagcagctggctcccctgtggcggcgcacagcataatgtcgccaccgcagttcatgggcgccattgacagggaggccagggtgcaccggtacagggagaagaggaagacgaggcggttcgagaagaccatcaggtacgcgtcgcggaaggcgtatgccgagacccggccgaggatcaagggacgcttcgccaagcgcagcgacaccgaccttgaggtcgaccagtacttctccaccaccgccgactccagctgcggcgtcgtgcccacgttctagcgagcagcttggccgcacgcctggaagacaatcaaagaagctcaggaatgaatatattctcccactgtatagtacatcttggttgcttagctatatatatatatatatatatatatatatatgtataattcgccgaatcgcctctaaatttgtgggaggtatgaggcttcagctgtaggtatatatagatgctagaaagatgctccttgtaaaattgtgcaggagtaaatgtaatcatgtagtcatccctccttctccaatcctttacaatacatttctgtttttttattcagcttaaaaactacgttttgttttttctcccgataacgctattgatctgatggtaaattttgatcaataataattctcgttcagaaaaaaaaaaaaaaaaaa

SEQ ID NO: 22457 - DNA, 1542 bp, Oryza sativa
  Clone ID: TF_OsC101635_1
aggtcctctctctcgccgctccccgcgctgctctgttggcttcgctgctgctgctgctgctgttctacgcgcgcgacacggaagagagaaaagtggttttttattgggttcctaagccctttttgtttccagaggcttctggattgatcggttgatctctctcccttcccctctagggtttcctgggggtggatctgaggagcggcggcgctccttcgtcccggtttatgtaaatctgatcgatccagaaagtttgtgaaaaaagagtgtggcacatacctaaagctggcttaaagtttgtccatagctaatatcatgggcgctctttgtgatttctgcggggagcagaggtctatggtttattgccgatcagatgcagcatccttgtgcttatcgtgtgaccgtaatgtgcattcagctaatgctctttctcggcgccatacaaggacacttctgtgtgatagatgtgcttcacagcctgccatggtccgctgccttgtagaaaatgcctcgctttgccaaaattgtgattggaatgggcatagtgctgggtcttcagctgctggtcataagaggcagaccataaactgctactcagggtgcccatcatcttcagaactttcaaaaatctggacatttgtttcggatattcctaatgtagctcctgagccgaattgcgagcaagggataagcatgatgagcatcagcgacagtggtgtcagtaatcaagacaatgctgcaggggacagcagtttgttagatattgctagtgcaacccttatgagtgatcttggcactgctggcaagccaaagtctttgataggctcctcatctgaagctggcgtgaaccttcttccacttgctactgatcagatggctggatccgtggattcgacatcagctaaggtgccctatacggcagaccaagatatgttcagcaaagacagtatatatgaagatttctgtgtggacgatgttgatcttagtttcgaaaattatgaggaactatttggcacctcccatattcaaacagagcaactgtttgatgatgctgggatcgacagttactttgaatcgaaggaaataccttctggaaactctgatgagcagcccaagctgatgcagccagtgaccagcaatgcagtatctgctgattcagggatgtcgatcccaggagccaaaggtgattccagtctttgtatacctgtgaggcaagctaggtccagtatctctctttcattttctggtttgactggtgagagcagtgctggagattaccaagattgtggggtatcaccagtgctccttatgggtgagcctccttggcatcctcctggccctgaggggtcatttgctggagctaccagagacgatgctatcacacgatacaaggagaagaagaagagaagaaaatttgacaagaaaatcaggtatgcatctcgcaaggctagggcagatgtgagaaaaagagtcaagggccggtttgttaaggctggtgaagcatacgactacgatccactctgtgaaacgaggagctactga

SEQ ID NO: 22458 - DNA, 1026 bp, Oryza sativa
  Clone ID: TF_OsC91_2417
caaggtactggatcttggccaggaggaagctgggagatcagaaggcgcctctcttccccacccctcacatcaccatcggcgccggcggcagctccacctcctactacgagtcatgggaggaacgtgccttcgcggaagactccgcagggcatctcgggggctgcatctggccgccgaggtcctactcctgcagcttctgcggccgtgagttccggtcggcgcaggcgctgggcgggcacatgaacgtccaccggagggaccgggcaaggctcaagctctctggggttgtggaggacggcaccggcggcgaaagccacggcatgccgccaaaccaaaagtacatgatacaaccatgccctccccaaattggcaccctgcagcacgcctacagcccaaaccctagaagtggcagtattctcgctgctgacactaaccctaattccatatgtgatgttgtcgcgtaccctgctagatccttgcttcaagttgcagctgctagaactgccttgggcaaacaagtcctgaacgcccctcttgtctcatcgaagtcgccgtcggctggtagagaacatggtaagagggagacgttgtttcttggtgctgttcgattggcacaggatcatgacacggtgagttctaatcttgacctgcgtgttgggaaaaatgaattgaagataactactgttttggggtgccgatcaagaagggactttatgtacgataacgaccgcgcggatgatgaaaagactgttgaagcaagtcacaagaaaagaagaatcgatttggaggtaaaccccctgattctaacttcttcaaccagtaatcatcaacagcaagatggtggtgatgaccaacatcatgaaaagatactaaaactttatcgtagctcctcggttgaagaactagatcttgagcttagactcggggaagccccaaaagaacagtaagtttcatatcccctgttgtatttcaacttgattaccaatgtttaatttggatttattcacccctcgtgtttccttgaat

SEQ ID NO: 22459 - DNA, 312 bp, Oryza sativa; identical to SEQ ID NO: 13181
  Clone ID: TF_OsC376286_1

SEQ ID NO: 22460 - DNA, 623 bp, Oryza sativa
  Clone ID: TF_OsC267651_1
ctgcaggttgggatttgctgcaaagcagcagctaagatagctaagctaagctaagctagcctcactccatgctcaccgctgtctcggctttctcccaggagggtagaggagtagcagctactagcggtggtggtggtcctttcaccgggtggtgctcctcccggcggcggcggccggaggcgccggcagccatggatcggtacaacggcggcggcggcggcggcgaggagggggatgagcagctggacctcaacctgtcgctgcagccgtcgcaggcgaacgagccgccggggtacttcacctgcacctactgcgacaagaagttctactcgtcgcaggcgctgggcggccaccagaacgcccacaagttcgagcgcagcgtcgccaagcgcacccgggagctcgccgcggcgcgccgccagcaggccgccgacgaggaggcgcggcgaggggcagggaccaccaccaccagggagcccacgggcaatgcctcgtcgtcgtaccagagggcgtcgccgccggcggaggctcgccgccgggacctcctcaccgacgacatcgacctgtccctgaagctatgatcgatgattagttaattttctcggcgccggctccggctgtgt

SEQ ID NO: 22461 - DNA, 1977 bp, Oryza sativa
  Clone ID: TF_OsC33740_1
atggtggctcagggcgacgacattgacgacaatggtgagccagcgacggcaggcggcagcaacggcaggcggaaggcgtgcccactgggtatccaccgggcatacctgtgcccgtcgggcataggttggcttaggttgagatgctcaaccagcccattagcctggcccgccgatcgatccagatcaaccaccctcctggccctcgcgtcgtgcggggctgcgcgcctagagaaggtcgtaattaggctggagaagcgcttgcttggcccaagcatgttgtcgcctcctgatggtttggaacttctcgtctcctacttggctgtaaaaaagagcaaagcagtggttgtctcaggcggggaagcagctgagaggcggctccttagggatcagagaatgatttactgcccaggcaagcaccttgaacgtgcatgcatccgctggctcaaagtgctcgataagctagcggttgagcttgttgaggatgtgcttgagggcctctggctcacagagtggctcaaagtgctcgataagctagcggttgagcttgttgaggatgtgcttgagggcctcctcccctttttctttttcctcctctcccccccccttcaccacagcgggcgccggcgagcggcgaggccgggccggatctcgccgccgcccaccgcttgacctccctccgtggcgctgcctccagccaaatctctaaaagctcgggaagaaaataacaaaagcagcaatggacgtcgatttttggggagtggtaattgagccgtgcaataagaaggagatcttttgtcctgaggataccctgtatcatctaacatcggtagcccttgatgaggcttacgggctaaaagactccaatgtgaaagtatttgtcgaagttaatgatgagaagtttgcgattgggacgctttcctccaaaaggcatccgcatatcaaggttgacttctgtttcaagaagaactttcaactattccacacctcactaatcagcaaagttgccttttgtggctatcaagtaaagaatttgggaaaattcactgattctgaaggtgatgaatctgatgaggaggttccaccagataatatgatcaaagaagcacagaaaagtaaacttcctgcaaagtctgctacagttgcatccgccatgcaaaaggcttttgtaaaggaaatagagcactatgagaaatcaaaagctgatgatgacaacaatgaacgataccgtgatatttcagtagttggtgaatctactggtaatgaggattcaagtgatgatgctgattatgaaggtaagagttctgatgaagaagagactactgcaaaggaaggtgagagtactgatgaaaaagagactcctgcaaaggaaggtgagagttctgatgaagaagagactcctgcaaagaatactaaagaggaaaatgaaccagtggtaacacccttgaagacatttccacatgagatggcaagatagaagcaccaattacggacaacaaaactggtactaatactagcaagagaggtagtcatcttcaagttacaaaccctcacccagcaaaacaggcaaagaggacgcccataaagaacgacacgcctaagcgttctgctagctatgtctgcaactcatgcaaaaagactttcaactcctctggtgctctgaaggatcattcaaaggcgaaacaccctgcaaccaattgatacgagataacactagtctgtgttagattgttagtgataggtaactgaatatttttttttcgccgggagagagagagtatttttgaagcagctatttcctagcctcatctgaaacaatattaggattcgagacgatggtctcttcaacataattttggaacactttatgtgaaaagattctggaacgtagataccacagtttctttatgaatgagtgctgaacggtttcattgttcaaaaaaaaaaaaaaaaaaaaaaaaaaaaaaaaaaaaaaaaaaa

SEQ ID NO: 22462 - DNA, 6046 bp, Oryza sativa
  Clone ID: TF_OsC9089_1
tctgactcctcctcgtcagtttgcccgccgcggcgccgccgccgccgccgccgatccccatccatcccgcgagcgagcagggcgccgtcgttcgtcctgctgcatccgccgcatcgctgtaaacatgaaccctttaaagaggtcattggaatcatcttctcaggaacatgaagcaggcaaacagaaactgcagaagagagagtgtcaagatttcactcccagaagatatcagcttgatgtctatgaggttgcaatgcggagaaacacgattgcgatgcttgacacaggagccgggaagacaatgattgctgtgatgcttatcaaggagttcggaaagataaacaggacaaagagtgctggaaaagtcatcatatttcttgcaccaacagttcaacttgttacacagcaatgcgaggtgattgaaatccacacagattttttggtaaaacaacactatggtgcaaagggggttgatcaatggacaggttatggtcatgacaccacaggtgttcctacaagctttacgcaatgctttcttaatcttggacatggtatctcttctcatttggattgtgaaggtcagttctgtgaattggagaacctgttagatgctaagatctacacagtttcagatagagaagagatagagttttgtgttccttctgcaaaagaaatgtgcaggtactatgactcgaaaccagtttgttttgaagatttgagtgaagaattgggagttttatgttccaagtatgatgcattgataacagagttgcagaataagcgaagcgacatgtataaagatgctgatgatataacaaaagaatcaaagagacgcctttctaaatctatagcaaaaatttgctactgccttgatgatgttggtcttatttgtgcaagtgaggccacaaaaatctgcattgaaaggggccaggagaaaggttggctgaaggaagtagttgatgccacagatcagcaaactgatgcaaatggatcacgcctatttgcagaaaattcagcgcttcatatgaagttctttgaggaagccttgcatttaattgacaaacgcctccaacaaggtatcgacatgcttctaaactcagaaagtggatgtgttgaagcagcaaagacgggctatatttccccaaagctctatgaactcatccagatctttcactcttttagtaactctcgtcatgctcgatgcctcatttttgttgatcgaaagatcactgctagagtcattgaccggatgattaagaaaattggccaccttgcacatttcacagtttcttttcttactggagggagatcttcggtggatgctctgacacccaaaatgcagaaggatacattggattcatttcgctctggaaaggtgaacttactatttactacagatgttgctgaagagggtatccatgtcccagaatgctcttgtgtaatacgatttgatttgccaaggacaacacgtagctatgtgcagtcacgtggacgagcacgccaggaagactctcagtacattctcatgattgaacgggggaacgtgaagcaaaatgatttgatatctgcaattgtgagaagtgagacttcaatggttaagattgcttcaagcagagagtctggaaatctgtcgcctggttttgttcccaatgaagaaataaacgaataccatgtaggcacaacaggagcgaaagtaactgctgattcaagcatcagtattgtctaccgatactgtgagaagcttccgcaggataagtgctactccccaaaacctacatttgagttcactcatcatgatgatggatatgtgtgtacattagcattaccaccaagtgctgtgcttcaaattctggtgggcccaaaagcaagaaacatgcacaaagcaaaacagctcgtttgccttgatgcatgtaagaagttgcatgagctaggagcacttgatgaccacctttgtctatctgttgaagatccagttccagaaattgtaagcaaaaataagggtactggtataggtacaaccaaacggaaggagctacatggtacaacaagaattcatgcttggtctggcaattgggtgtcaaagaaaactgcactcaagcttcaaagctacaaaatgaattttgtttgtgaccaagctggtcagatttactctgaatttgttctgttaattgatgcaactttaccggatgaagtcgctactttggagattgacctatatttgcacgacaagatggtcaaaacttcagtttcttcttgtggacttcttgagttggatgctcaacagatggaacaagcaaagttgtttcaagggcttctcttcaatggtttgtttggaaagctgtttactagatcaaaagtacctaatgctccgagggaattcattcttaataaagaggatacatttgtgtggaacactgcgagtgtatatttgcttttaccaacaaatccttcttttgactccaacgtttgtattaattggagtgtcattgatgcggcagctacggcagttaaacttatgagaaggatttattctgagaataaaagagaattacttggaatatttgattctgaccaaaatgttggagatttaattcatttagctaacaagtcgtgtaaggctaacagcctcaaagatatggtagttctagcagttcacactgggaagatatatactgctcttgatattactgaattatctggcgatagcgcttttgatggtgcatctgataagaaagaatgtaaattccggacattcgcagaatatttcaaaaagaagtatggcatagtacttcgccacccctcacagccactactagttttgaagcctagtcataatcctcacaaccttctttcctcgaagttcagggatgaaggtaatgttgtggagaatatgagtaatggcacaccagttgtaaataaaacaagcaaccgtgtccacatgcctcctgagttgctgattccccttgatttacctgtggaaattttgagatcattctatttgtttccggctttgatgtatcggattgagtcattaacgttagctagtcaactaagaagtgaaattggatacagcgattctaatatatcaagtttcctgattctggaagctattacaacgcttaggtgctctgaggatttctctatggagcgtctagaattattgggagactctgtattgaagtatgcagatgaggggcagctatcatccataaggtgccatatgatttgtaatgccacactttataagcttggaattgaacgcaatgtacagggttacgtacgtgatgctgcatttgatcctcgtcgatggctagcaccaggacagctctctattcgtccatctccttgtgaatgccctgtaaaatctgaggttgtaactgacgatattcatatcattgatgacaaggctattgttctaggcaaggcgtgtgacaagggacacagatggatgtgttccaaaaccattgctgattgtgttgaggctattattggggcatattatgcagggggtggtttaagagcagccatggcagttctcaaatggttgggcatcggggctgaaattgaagaagacttgattgtgcaggccatattgagtgcttctgtgcagacttatcttccaaaagacaatgtatttgaaatgcttgaagcaaaactaggctattctttctcggtgaaaggtcttttggtagaggctctgactcacccatcacagcaggagttaggtgcaaaatactgctacgagcgcctagagttcctcggtgatgcggtcttagacattctgttaacaagatatcttttcaatagtcataaagacactaatgagggggagttgacagacttacgttctgcatcagtcaataatgaaaactttgcacaagttgcagtaaagcacaacttccatcactttctccagcattcttctgggcttctgttagaccaaattactgaatatgtgaataggttggaaggttcatccatggacaaagttgaactgttatcagatggactcccaaaagggcctaaagtccttggtgatattgtagaaagtattgcaggtgcaattcttttagacaccaaacttgatttggatgtagtctggggtatttttgaaccccttctttccccaattgtcacacctgagaatctggagttacctccatacagagagcttatcgaatggtgtggcaaacatgggtattttgtaggaattaactgtagagatcaaggagacacagtagtggctactcttgatgtacagctcaaagaggtgcttcttgtgaggcaaggttttagcaagaaaagaaaagatgcgaaagcgcatgcatcttccttactgctcaaagatctcgaggaaaaaggactaataatcccaaagaatgcaagcaagacagaacaatttgaaaagcattgtggcagcactaatcccttcaacaatttgcatgtcgatgcaatggatacacagactccaaaaccaaccaaggaaaaaaacgcagctgattcaaggaacatttctgatcccctgcttggtaaaccattgcacgtgattgtgaaaacgagtaaaggaggaccacgcattgcattatatgagttgtgtaaaaagttgcaatggccaatgcctacaatggaatctgagaaagtacaaccaagctttagcagcgtgtgctcctcccctggtggttcctctcagaaagctaccccccaagcgttcgctttcgcttcaaccattacattgcatataccaaatgctgatgtgatcagcctcacaggagatggccgtgcagataagaagagctcacaggattctgctgccctgttcttgctctatgagcttcagcggcgaggtattgaagtgaagccaggaaaggctgtttcatttaacgttgatgatgagtgtgtgattcacatatcacaggttgcactgggagaaacaaagaaggcaggaagtgagaatgtagttgtatctgttaaagttgatggcaagaagacagttattggaaatctatcggctaaaaatcatcctcaatttatgtgtgatttgtttattggcaatgactttgagctttcacacagttcaaagactactagtgtcttcctgtgtgatgaagatgaaaacatgtctgacatctgtgacattatgggtaaacatctgggaaggcctgttgcagaggaaggtaaaaaggataattctgatgatggtatggacttgtcctcatctgatgatgatgatgattctttggactcgtcctcatccgatgatgatgatgatgagtcaggtgatgaggatgatggatctgatgagttaccagcagaaatggagtccagtgaagaagaggatgggagtgatgggcaggatgaatcatcttcatcgatggtgtccactgatgaagaggatgaaagtgatgaggaagatgaaattccagagaaacctgagagcagcaagctgacagctgctggatctacactttcttctggtaagaagtcaaagactgcaacacactttggccagaaaacaggggactcaactttagctaatttttcgcatttactaaaggtgataagaatactcatccagcaaaggaagatggcaagacgccggcaatcagcaaaccaaataaggagactcccgaatcctccggcacccatgcctgcaagtattgcagcaaggcatttagtagtgataaatcactccggtctcatcagaaggcaagacatccagccaagtgaactactggtggcatgtttgactgcagctgcttttgcttcaaagatgatcctctaaccagttgcttgccaccactcagctttgtacatcttctccagtgttcaccttctgaattatgataagagggtacccaaagaatggagaacagctggcctggttctggtgtgtgtcagttgttatgtgtgtttgtccatatgttatctgcgtagaaactgaataagcccccaaagttgttgctgacgataaacacgcaaatatcatgcccctgtagcctgtaggtgttaaaccaattgttcaaggataaaaagaaagacccttttc

SEQ ID NO: 22463 - DNA, 1245 bp, Oryza sativa
  Clone ID: TF_OsC312792_1
cggctggccggcctctcctatagcttagcttagcttgcgagacttcgttccactagtcttctcctaatttcttcctcctgcaaatatgcgtagtcttctgtcatcgtcgaccgtcaagtgtgtctctcgctgcacacggagatgcatgcacctcttgattgattgctcggtcgactgattgcttcttacacaccgcaactcgctctaattagttggtttagcctgtgtagatttgtagtattagaatcgtcacattcaatatgtattagatttatttattttgagacgagctagagccgcttgattattgtcgatcggtactagctagtgctacttagtaagccggctagtggagtactcaatctctgctactactcggctagcagctggctgctgctgcagcagtagaacatcaagagaggaggttaattagctagtacttagtaccttggctgctttaatgaactcgatcgatccacagctagctagcatagcagagcagcagtaatggaggagcaaagaggcgaggaggagtgggtgatgtggggatcggcagggagaagacgaatcatcaggcaatcggcgtcgtgggaggagcaggcgttcgcgcgcgatgcggcggccaacgccaacctcggcggctgcgtgtggccgccgcgcttctacacgtgcagcttctgccagcgcgagttccggtcggcgcaggcgctcggcggccacatgaacgtgcaccgccgcgaccgggctcgtctccgacagaggcagacctcctcctcctcctcccccagccaccaagaagaagaagctgaagcaccccaagatcagcaagctggcccttactatacctctttctctaaacctagcaccacctccaccgataatactacttgcagtaacgacatactactgctagcaagagatcaagaaaccatcaagaagagggtaccgagacagcaagtacaagtagttgcagatcaggacgaggacgaaccggccgggagaaggtacaagaggaggaggcttggtttggtggatcagctgccgtcgtcatgtgaaggaggagatcatcatcatcaggtactgatcatcacaccaacaacagccgccgcaagccctagctctataattgcttctgcttctgcccttgtggttggggatcagcagcatcaacaagcaggatcagtactagatctagagcttaggcttgggactagtactcctcctaaagctgttgtgcacgcttaa

SEQ ID NO: 22464 - DNA, 1332 bp, Oryza sativa; identical to SEQ ID NO: 13186
  Clone ID: TF_OsC1713_4288

SEQ ID NO: 22465 - DNA, 2771 bp, Oryza sativa
  Clone ID: TF_OsC12651_1
acaaaaatccattgaaccccacacgcccggctcccgatccgacaccaaaggagagagccgcctcgccttcgtcttcgtcttccccccgccgcgctcgtgccctcgcctcgcctcgcctcgccgaaaccctaaccctagaatcgtcgatcgcccgcgagagaggagggggagggggacgagggggaaccgcgcgtgatggggaagaagaagaagcgcgtggagaaggtgttctgctactactgcgaccgcgagttcgacgacgagaagatcctcgtgcagcaccagaaggccaagcacttcaagtgccacgtctgccacaagaagctctccaccgccggcggcatggccatccacgtcctccaggtccacaaggagtccgtcaccaaggttcccaatgcaaagcctgagagggaatcaacagagattgagatctttgggatgcaagggattcctccagatgtgttggccgcccactatggagaagaggaagacccttcatcgaaggtagccaaagtggaagtgccatcgctaaggcctcctgttatgcccaatccagcgggcatggtatatcctccacgaccggcctatggtgtagctccacctatgtataaccctgcactgaatccattgatggccagacctccaatctggcctgctccacctccgcaaccttggtttacacaaccagtagtttcggttcctcaaatggcttctgggcttgcaccacaacagccactatttccaattcaaaacatgcctgctcctatgacatcagcacctgcaaatttacttcagacttcgttccctatggcccatgttggagtaccttcacctgttacccctcaggtgtcacaacctctctttcctgtcagtacatctgctggaaacggtgcagtaagttctccatatgtagcatctgttgcacctggaagcatcccaacaagctctccatcagttgctcctgcaggagtaggatatgcagctactaaccaaggtacaggaggtccagcggctgtacctccacccgcttctaataataaagcaccagccacccaacctggtgcaaatgaagtctatctggtgtgggatgatgaagcaatgtcaatggaggaaagaagattgtcgctcatcaagtatcaggtgcatgctgaaactagccaggagttccaagtaggtatttacattgttctacctggtggagcaagagtgttaaggccagatgagctactactcgatcactactactaccaccactcgtcgtcgtctgatccatactacagcacaccgatccttccaccctacggcgacgcattctcaccgccgaaccctcctccccctcctcctccgatgtcaccaagcgacctcatctctccgatcattccggcaccaacattcacatacagttctcctccaccgccgccactctactaccctccaccgccggatataagcccaagcccgccaccgtctattccctgatagatacgcctagtctaccgaagacaacagtagctcctacagtcggtgcattcccctgttcctgttctccgtttatttaactagtttcctggaggaactgtgttcagtcaaaggaatatgttgcttctgatcttggaaagctttgaatgtatctttcccacccgagtgcaagatgttagtctagaacccctatttcccattgtcgcttaaagaaaatgtgatttgttggtcaactctggatatctcatcctgaattaccaaaatcacagtttactagaaacatgcaagcagataattcgttatttctgatggcacccgagcctgtactaataacaacttattgcgcacctagtccaccgatcgttacaccgatgccacccataatctacccaagcccaccggaagtcacacccagcccgccagaaatcacaccttatccaagcccaccggaagtcacaccaggcccgccagaaatcacaccttatccaagcccacccgaaatcacacctagcccgccagagatcacgccgtatccaagcccacctgaagttgtacctagcccaccaaagatcaccccatatccaagcccgccggaagtcacacctagcccacctgagatcaccccatatccaagcccacctgacatcgtccccagcccgccaagctatgagcctagcccacctagctatgaacctagcccaccggagtacgcgccagaaccaccggtgtacgcgccgtatccaccggggatcttcccgagtccaccggagtactcgccggagccgccggcatacgtgccaagcccaccgcagtacgcgccgcagccgccgtcatacgtgccaagcccaccggagtacgcgccggagccgccggtgtacgcgccgtatccaccggggatcacaccgagcccgccggagtacgcgccggagccaccgccgggcccgcccggcggtggtggcgggtacctgccgccggtggtgttcccgccgccgtacgcgtcgcgggggccgccggggaggcgcgcggtgtggtgcgtggcgaagccgtcggtgccggaggggataatccagccggcgatggactacgcgtgcggctccggcgccgactgcgactccatccagccgtcggggccgtgcttccggccggacaccatgatcgcccacgcctcctacgccttcaacagctactggcagcgcgccaagtccaacggcgccacctgcgactttggcggcaccgccatgctcatcaccaaggatccaagttatggtggctgccattacagtacgatgtga

SEQ ID NO: 22466 - DNA, 2099 bp, Oryza sativa
  Clone ID: TF_OsC83960_1
atgcatgaagcaagtgaagtgaaaatcccggctaggcctaggagtaatactatatgcaatccgaggctcgacgtgatcgtggcggccaaccacagcgtcttcatcaagggagtactttcgctagctatatgcatgcaggtgtccactgccgttggcagttgcgactacgcctcaaccgtgccggccgctatagtgtctagtggtagtggagtagtaaatcacactagttactgtacatgcagatccatagacatcatgctgcaactgccgctgccatggccactagctctgcacctgaactgcacaaatggagtggagtagtagtactctgctccagcaacatccaaagcataaggaagcaacaagctaagaagcagcatcattcactccacgagctagcaaaaaggatagcaatggtggaaccggggagagcgcgggagacgaaggtcaccgcctcagcctcaagctctgcaggctcagacgccgctgtcatgaagaagaagaagaagaagaagaagaagctggtggtagcaagcaggaaggtggatgagaaagacaagaagcaggtggattacaagtgcagtagaagcagcggcagagacgagtgctgcaaggtggagagccgtcatcagcagtgcacagagccggagagcccttcctacagaaacagcagcagcagcagccacgccggccaccaccaccaccgcgccgccgacggcaagaagctcggctgcaattccgcctccatctgcaaggtcaagcaagacaacccgatgcagcagcacatgcgcagggcggaggatgagctcaaggtgaaggacaagccgccggtcgccgagccgtactgcaagcgcagagcttcggtgagcgcgtgcaacatcagcagcgagcggtcggtgaagaagtcagtgaagcagcagcagcaggaggcgagcagcagcttgcagtcgtcggcgtcgatatcggcgtcgtcgtgttcgtcgacggcgggtggtggggggtcgttccgggggatgcagcagttgagcctgaggcggctgtcggggtgctacgagtgccacatggtggtggatcccatcagcggcgtcttccgggacagctcctccatgagggccaccatctgctcctgccccgactgcggcgagatcttcgtcaggcccgactccctccacctccaccagtccatcaggcatgcagtgtcggagctgggggcggaggacacgagcaggaacataatatcgataatattccagtcgagctggctgaagaagcagagccccgtgtgcgccatcgaccgcatcctcaaggtccacaacgccgcccgcaccctcgcccgcttcgacgactaccgcgccgccgtcaaggccaaagcaatggcccaccgccaccctcgctgcaccgccgacggcaacgagctcctccgcttccactgcgccaccctctcctgcgacctcggcctccacggcgccacccacctctgcgaccacctctcctgcgccgcctgcgccatcatccgccacggcttcaggccgcccgcgccgggggccggcatccgcaccatggccaccagcggccgcgcccacgacgccgtcgtctcgtccgggtcggagggcgaccgccgggcgatgctggtgtgccgggtgatcgccggccgggtgaggagggaggaggcggcggcggcggcggcggaggaagaggaggaggagtacgactcggtggccgggacgacgccggggctgtactccaacctggacgagctggacgtcttcaaccccacagccattctcccttgctttgtcgtcgtctacagggcctgatcgattagtgatcattaaccaataataataatcttagctagcatcatttccttcactcttcgttaattgcatgtaatcaatcgatcgatcgatgatgatgatgatcccatttataattaattaattcatcgttaatgtctgattattgtactatctgatcgatcgatcggtattgactagtgatcagcgtatcaatcaatttgtacaatcagatagatgtttgttagtttcttctactgaaggaggagtacattattgcatactagagctaaaaaaaaaaaa

SEQ ID NO: 22467 - DNA, 472 bp, Oryza sativa
  unsure (1)..(472): unsure at all n locations
  Clone ID: TF_LIB3598-028-P1-K6-G8
ttcgatggnagnagttcttgatggcgccgcgccgatgctgtcgtcgtcgccggcggcgagcggcgaggaggtgggggcgcggaagccgcagcaacggtgcggcggcgccgaggggtggtccaagcggaagcgctcgaggcggcgccaccgcgaccgcgccgctgcgccgccgcctcacggggggggggaggagcacctcgcgctcagcctcctcatgctggcgcgcggccaccgcgacccctcgccggcgccgcaggagcagcacgggtgctccgtgtgcggcagggtgttctcgtcctaccaggcgctcggcggccacaagacgagccaccgccccaggacgccgccgacgatggcggccgttgtcgtcgtagacgagccggcagcgacgacggcctcgccggccgtgtcctcgtccaattccggcttctgcngcggcggcggcggcggtaacatggtgcacgagtgctcc

SEQ ID NO: 22468 - DNA, 1642 bp, Oryza sativa
  Clone ID: TF_OsC154858_1
atggcgctctccactctcctcctcccctcctcctcctcttcctcctccaagacggccactgccaccgacacctccgaccgccgccgccaccaccaccaccacaaccacaccaagcgcaagaagaagccgccgccgccgcccagcttggagcaccaccaagccattcgccatgctgtgtcggagctggggccggaggactcggggcgaaacatcgtggagataatcttcaagtcgagctggcagaagcgcgaccgtccgatctgccagatcgaccgcatcctcaaggtgcacaacgcggcgcgcaccgtggcgccgttcgaggccgcgccggtgtcgtcgtcgtgggagcagctgaagagcctgctgagctgccggagcgcgacggcggcggcgcgcgtgcacgaccccgccgcgccgtcgtccgcgttgtcgcggctccgcagccacggcgccggcgcgtgcggcgcgtcgctctgcgccatccgcgacgtggtcgacgccgccagctccgcctccgcggcgtccaccgccgccgcgtccctcgaccgcgacaccaccccgctcacccgctcctcccgccgcgcccaccgcgccgccacctcctcctccggcggcggcggcggccaccacgcctccctccgtggcctctccggttgctacgagtgccgcgccatcaacgtcgagcccatgtcaaggaggtatccgaggccacgggagctgtgcgcatgctcgcagtgtggggaggtgttcaacaaggccgacagcttggagcaccaccaagccattcgccatgctgttaagattggatggcaaaaatacatcaaaaggtatctgtgcctagccatcttttgcatgcttgcagtcgcatctgcatctccatttgttgaagtgtcggagctggggccggaggactcggggcgaaacatcgtggagataatcttcaagtcgagctggcagaagcgcgaccgtccgatctgccagatcgaccgcatcctcaaggtgcacaacgcggcgcgcaccgtggcgcgcttcgaggcctaccgcgacgccgtccgcacccgctgccgcgccaccgccgcccgcgccgccgccgacggcaacgagctcctccgcttccaccccgccgccctcgcctgcccgctcggcctcaacggcgccacctcgctctgcgacgacgacgacgcctgcggcgtgtgcgcggcgatccggcacgggttcgcgccgtgggcgggcgcgcacccgctcggcgtgcgcaccacggcgagcagcggccgcgcgcacgactgcggcgcggcggcggcggcggcgcagcaggcgggcgggtgccgggcaatgctggtgtgccgcgtaatcgccggccgtgtccgccggaacgacgacgatggcggtgcggaggaggaggagggagcgttcgactcggtggccggcgacgaggcggcgagcagcgtgtacggcaacctggaggagctgttcgtggcgaacccaagggccatactgccgtgcttcgtcgtcatctaccgtgttgtccccgagtgaagcagcgaaacaagcactcaaaatcaattaattgtatcaaccatttgtattagcataatcgtccagcaatttcaacatcatataaatgtataaattaaatgcattt

SEQ ID NO: 22469 - DNA, 1594 bp, Oryza sativa
  Clone ID: TF_OsC254894_1
atggcctctgcagagagaagaataaggatgtggtggcgcacagctgggaggcctaagcatctatggggtcgccggagcatgctctacatgggccacagccgcatctacatggaccgctactacgaccccatcgagctccatgggcagccgccgccactgctcatgattccaggcggtggcggcggcggcggcggcggcggaattagcccttacttggtgcagagccagcatgggcatggtggcggcgtcgacggcatggagatggaggagggcggcggcttcatgggcgagcagccacagtgccacccgctgctctacaacctgtccgtgctcaaggacagggtgcagcagctgcacccgctcgttggcctcgccgtcgcccacaacgcccacgcccacggccccctcgacgtctccgccgccgacgccatcatccaggaaatcgtcgccgccgcctcctccatgatgtacgccttccagctgctctgcgacctcggcacggcgccaaccaccgcgccatcacaggagaccgccgccgcctccgccgttgttgtcaagaacaacgaccatgccgccgatgccggtcagatggaggacgaccatctcatgcagcagcagtggcagcagaacggcagccgccagcacgattacagcagccatgcccatgcgccgccggtgttccacagcgaaacggcggcaccggcaggcgcgacgtcggcgacggacacgatcatcgagctggacgcggcggagctgcttgccaagtacacgcactactgccaggtgtgcggcaaggggttcaagcgcgacgccaacctgcggatgcacatgcgcgcgcacggcgacgagtacaagagcaaggcggcgctgtccaatccgaccaagctgctcgccaagggaggcgacgagacgatggcggcggcggcgaggaagtactcgtgcccgcaggagggttgccggtggaacaggaggcacgccaagttccagccgctcaagtcggtgatctgcgcaaagaaccactacaagcgcagccattgccccaagatgtacgtgtgcaaccgctgcggccgcaagcacttctccgtcctctccgacctccgcacccacgagaagcactgcggcgaccaccgctggctctgctcctgcggcacctccttctcccgcaaggacaagcttatcggccatgtctccctcttcgccggccaccagccggtcatgccgctcgacgccccccgcgccggcaagaggcagcgatcgtcctcggcgtccgtcgccgggaacattgacgacaccaccggcattggcatgggcgccgcctgacgaccttactaactaactgtgattgtattgttgccatcacctgctgcatatatatgtccatgaaagattcaatccagtactgcatggctagttaaattagcatgacaatgctaattggaacacacatgttaatttggaaatcgatcagggcagcaatttcaggcagtttatcagttagttctatacattagcttatgagatgtgtgatgaatatatactgtattagctaactagctaggggctttagctttacaatataatactaaggtttatt

SEQ ID NO: 22470 - DNA, 1395 bp, Oryza sativa
  Clone ID: TF_OsC64601_1
aaaggtcaatcaatccctatgtatgtatggctgtatagttaatcttaccgaaaagaatcgaaagaatcaatagtctatggtccaggttccagcttgatggacatgccaaacaaatttgtaagtaaacatgcatgtatagggattaatcccccagaaaaaaattaagaagaagaagtgaaaaaaatgatcaattgatcagtgttaatcacgaaaagaattcttgagcttagctttgctcatgtcatgtcaataatggcagccgaccagcgcggcggaggcggtgagctgcagaattggcttcttgccgtcgttgaactgcccgccgagagccaggagcaccggcggcggcggcggcggcggaggagacacggactcctcgtcggacggcgccggcaggttgaggtcgagctccaggttgatgctcgtgcttccctctttcttggtgtccggggcggtggcggtggcggcggtggtggcggccgtggtcgccgcgcgctccggcggcgcgtgcagcggccggtggcgccgcatgtggccgcccagcgcctgcccggagccgaactcggcgccgcatatcgagcactcgtgcaccctcagcttgttgattatgctgccggcggcggccacgttgttcaggctcagcacggtggtgacgtccgggaccacgacggcgtccgcctgaggcggcggtggagacggtgccgacggcgtcgtcgtcgtcgtcagcggcggcttggacttgacgacgatggcgttggtgttggtgacgttgttaacgttgtcgtcgtcggcgccggggaggcgaggcttcttgtggctggcgcggtggccgccgagggcttggaaggtggggaagcacttgttgcacgtcttgcactcgtagacgtagaacccggccctgacgccgtccgccgtggtggccgcctccgtgtacttgcggctcgtgtacctctcgctcttcaccaccaccaccggcggctgcggcggcggcggcgcgggcgcgggcgcggcgagcaccggagggacggcggcgccctgagcaagcaggatgaggcagtgcgccatgtcctcctcctcggtggtggtgctctcggaggaggaggccggcgccgcgtggtggcgcggcctcttggtgcgcttgcgcttgacgaccccggcgtgcttgtcctccacggacatggcgacgaacgccagagcgcgctctgtgtcggcgtgatcggtggcttgcatggcgatcgatcgaaagcaagaaacgatggatggaatcgaagtggagaatgaatagcaagtttcgatctctttgcctccttatcaatggaggagaggaaagaggagtaggaatggcaaaaacctagcctagctccctagctgcctttgcttcttcttcgtcttaaa

SEQ ID NO: 22471 - DNA, 4415 bp, Oryza sativa
  Clone ID: TF_OsC63096_1
atgccgccccagcctccgccgtcgtcatccatattattattagacagcaatgtgctcactgagaccatgagacattaacacatttttcaaatggtacttggaagttatccaagtgatctgtattcataaactttacggactgaagaaagaatgaatgatcccatgtaaatgggaaagatcagctgcttatgaaaatctacgttgatgcatcagggggtacaatccttaacccccaactatttctctactttctacactaaacacattgctaacgaaggaacaaacactaggcctatcagacgtcagggtggttatctacgtgatctggtataacaggcatggcctcaacagctagggcctctgcccccagctatgagctcggctcagtttccttgacagtggtgacccagcatgggtgatacaaattcgtactttagcgacttgaagatgaaacttatatgaacccctctccatagtctggagacgacgcttgatacgaaggatcgactggcatcgcgctgtaaatcctcacatagatcacatgtgctgccggtcgtaactacaataccaaggccaatgatgaggttggtcctaatattcctgaaagcctgggggagcttggtcagcacacccagaagaaaaacattgctccgaaggacgtatgggagaggagttcaggctggaggctgtcaaaaagccaatggaagctgcaagcaattgcgcgggctcctggttcgctcacacggtttatgcctgacgatgttcctggggtgacttctccaatggtttacattggcatgctgttcagctggtttgcgtggcatgtggaggatcatgatctgcatagtctcaacttcctccacactggcgcacctaagacgtggtatgcggttcctggtgatagggctgttgagcttgaggaagttatccgtgtacatggctatggaggcaacactgatcggatcgcgtcactagcagtgcttggtgagaaaacaacactaatgtccccagaggtccttatagacaatggtgtgccctgctgtagattggtgcaatatcctggtgagtttgtggtgacattcccaagggcttaccatgtcgggtttagccatggattcaattgtggagaagctgccaattttgcgactccccaatggttgaagtttgctaaagaggctgcagttcgaagggctgtgatgaattatcttccaatgctctcccatcaacaactattgtacttgctagcagtttcatttatatccaggaaccctagagaactactgtctggaatccgaacttctcgtctaagagatcgtaaaaaagaagaccgagaactgttggtcaaacaggaattcttgcaggatatgattagtgaaaatgaacttatatgttcatttcttggaaaaaaatcggttgataatgttgttctatgggagcctgacttgctgccatcgcttaccgctctacacccctgctcgtcttgctcaaaagctcctgaaaagaagggtgaagatggtcccagaattggatctacccaatccagctcaaaagatgacagctcatctgatggtactgcatgtatgactgggacacaatctaaaggcttgtctatggatagcaaacaagctcctgagggagaaaagcttgataccgatgacggagatgacctgccttttgatttgagcattgattctggttcattgacatgtgttgcatgtgggattcttggctatccatttatggcgattttgcaaccttccagaaaagcactggaagaaatttcccttgttgataaggaaagatataaactgagttgtgaaaaagagatttgttcaaatgtgcttccgtgctctcctaatgatggtagctccggatgcccactcatcgccaatagatcgtccagccctgtggaaaatgctaacctcagtcatcaggatgtgaagccaattagaagtgacatttctttgatgggaaaggagtttaatggaaccctagggaaacatattggcacttcctgttcttgtagcagtgaaaataccattcatccttacggtgacacagaaacccctgagaagaaaataccaagtgattgccctggctcagagttgagtaaacaatcaggcagaggtgatgttaatgtaccagatgtcgaaggtagtgaggaaactatcagctggaatacaggctgtgcatttgcacggcctcggatcttttgcttacaacatgcccttgagattgaggagttgcttgcgagcaaaggtggagttcatgccctcatcatatgccatgcagattatgtcaaactaaaagcacttgcaatatcaatagctgaggaaattgagtttcagtttgactataaagatgttgcactagcaaatgcgtccaagtctaatttgcatctaattaatatttcaattgatgatgagggatatgaggaagagggaacagattggacatcacggatgggtctaaacctcaaacatagttccaagattaggaaagaaacaccagagagtcaagaacagcctcctttatcattttggggattattttccaagccatcacctatttcagttgtttcaaacttgaaatggctttgcaggaaagcacggactccatataaggtcattggttatgcttccagccctgatgttgtggcaactccagacaaagttaagcccgcagttacaaaaactcagatagacacttctggaaatgctcatgaaaacattggaagtgaacaaactctgcaacaagattgtgtcctgcaagaatccaatgatgtagctgatatgtgcaagcgtcccaaggtgaatgatcaggatggacattctcttattaatattccaattgctgttgctgaatatcctatgatgcatcaagtttgtgagcgtccagattcacccacaactgttgcagtgtcagctggcaaacctaccagagaacaatgtggtgctgaatcaactgagttgagtactgtaaaacagttcctggacaatgggcttatcgctgagggaggcagcatgaacttcataagtaatcatgagcacttagaatctgacaatgcaacttcagtgtgcaaagatgaacaattgcaagttcaacaagatcagttggccatggtactttgtaataatcccaacacagaattggttgcaggagaattacatgggggggcagcatcatcaacccttgaaaatgaggatagctgtggtaatacgtcttactgttctgacactgtattaaagaacagcgaacctgatacagatgatcaacctgaaacatgtgatcgtagtgttgttcttgtaacaccaaagtcgagctgtgaccagatgatttctagcagtgacagaagttgcagtctgaccttggactgccctgtctccactgatgctgccttttcaagcgaaaagctgtctatggctcatgatttgatgggcagtgagttgcaggcagtccataattcaaaggctgaggttgtggccagtttgactgatgtcaagggtgctaagctcaatagcattcataccacacaattacctcatgaatctccaagcagtgatttcatcatttcagaaggtgcgcaatctgcttcaacaactgcaattcccagaaaaaatggaacatccatgcacacagagtcaaattcaattgatattttacttggagttctagccgatgaatctaaggtctcttctggaaaggatgaggttggcaaagcttccttgacattgatgacactggctggcaatgaccaatctgcagatgatgtaactcaggatgaagttgcagagatcactgatccgtcgcatggcttctgctcatcagacatagtgtctagaagcattggaagttcaaacagaacaaatatcatatgttatgccagacgcaaacacaaaagaaagagcggatctgagttcaatattaatagtccccaaagcttggggagctttgtccgctctccatgtgaaagcttgagaccaaggactagacctgcgattgttgaagacatgacaaacgaaacaaaaactgcagaagcttcaactgcaaataagaggaagaaggcaaaggtggaagcatttcagtgtgacatagaattttgtgacatgacatttgagactaaagctgaacttcgtgctcaccaacgcaatatctgcaccgacgagtcttgtggcaagcgcttcagctctcacaaatacctgaagcgtcatcagtgtgtacacagagatgagaggccattcaaatgcccctgggatggttgtccaatgactttcaagtggttgtgggcgcaaactgagcatatcagagtccatacaggcgagcgaccgtacaagtgctcggctcctgactgtggccagagtttcagatatgtctcagattatagtcgccatagaaagaagtttaatcattattga

SEQ ID NO: 22472 - DNA, 2658 bp, Oryza sativa
  Clone ID: TF_OsC43957_1
tttttttttttttttttttcacgttagtcacttttcttctctctatacagataatcgttttgaccatcctgcatgagagcatcgcttgggtttttctggagcgggctcatcagaaagagaattttattggtcatgtacatgttgatgtcatgttatgacaagggtgtaggcactacattttttttttttttttttttaattagaaacgcttcttgcatatatataccaagattgggctatctcaatctataaggaaagataaaaagtacttgatcattactgatgatcataaaataaagtacacttcaggaagaaggaatgacctaaaatggctccttcaacagaggaagaatagggctagacaaggtacacaaaggtaggcaaggccattgccgtcatcgttaacgttggcctcgatcagctgtctccgttctgctgcccgaagctgcatgatcctgagggcaagaaggagaagggattctcagagatgtcaaatccaggtcgagtgaagtcatcaagcccaccgaagcaaggatcaaagctcaatggcgagaaatagcgtggatcatcggccatcttcatgtcaagatttgggatgtcgtccgatgagctaccggggaagttatacccagcgctccccaccatggtgttcatcgcctcgctgccttgaggttgctctgatgctcctgttactttgatatcatccatagggagtgcaggcgtgtgcccttggaaaagagcaacatgcccaaataacttgtcttttcttgagaaggtagttccacacgagcatagccacttgtcgcggccacagtgcttttcatgagtcttcaagtccgcgataactgagaacttcttggtgttgcaacggctgcaggtgtagctcttgtcacagtggcttctcttgtagtggttcttcacacacaggattgtcttgagaggctggaacttcttgtgctctttgttccgcttgcagccaacatatgggcacgagtaccttgtaactggtgcagactctaagctagaatctttcgaaggtttcgcaagagctgcagcagttttgtactcgtctccatggcccctcatgtgcatcctaagattagcatctcttttaaaacccttgccacagatcaagcagaagtgagtatgtggtgctaaaatctcctccttctctaattgcaatactacataagacccaggggggagattctctctctcaccaccatcatcactctccttcacatcatggtcttccattggaatcggttctgacccttccccaccacaaggattttggcagttcatcatctcatcgctttctgcctgagtagtattaaggctattcatcagctcctcatagtcatgggtcttgctaatgtcaggaattgtggcttcgtcgtttgcgcttggtcgcaggttacaattggtgcccaggatcataggagcacaaagtgtgttactgagatgtctgagtgccgggttgctgctgattgggttcttcatcgaaggaagcaaggaaccagctgttgaaataagctgaattataatacaagtgagatcagcagtgacaagctgctgctttgcttgtgcctcgctggaaccaccagcaacttggctctcacgattactcatagactgcacgatgtcttttacctgcttgatcttctgctcaaggaaggataagttgctcagcattgcctgagggtcccaatccattgtaggattattcggggaaggatttgattcgaactggttaccgattttagcttcaatgtcatcaggtaaatacaagctggaagactgaaccccaaagagtggaggaaaagcagggaacgattgaccaggtcttgcaaaacatggaggctggtccgtggaactgaatcgaacaccctgttggtcaggatcagtattccttgttgcattacttgccattgatggcaaggctttcaaggatgtctctgaacttcttcccaagccactgtccatttagattcaccaaaggccaaattctacttcaatatgcccttctatctcatggaactacagtccttccaatcaggagctgatctatagggcagtcatgaaaacgcgagtagaatttgaggctccaccccgggcgcaccacgaaaccccgcgccctgctcgcggtcgccgggatggattgggatcggatcggcggaggccacggcgacgccgagggcggcggcggcggcgagcggaggagtcgacggcgagcgaggggaaatactcctcggcccaccgtggtggcgaacggcgagacgatttcctatttcttcgtgggcaaaaacacaaatttacggaggggtccctgggaatatgagatattgggctcaggctcctctgagcgagtagaatttgagctaaaatgggactcgggagggcgggtgggtggctttataggaggagcagccctgctggttcctggctcccgttgaccttaggcaattttccattggttaaattggataacgagtttttcctttggttaattggatactgagttgtggctccgctcgtttagctagcgaaaagagcctctgctcgcgagtcgcgtcgattaacgacgtaaccctcacatatttgctactctctttatcctaaaaatacgaactaaaaatattaaatcggacgcgtggg

SEQ ID NO: 22473 - DNA, 3675 bp, Oryza sativa
  Clone ID: TF_OsC82170_1
atgaggccctcgccgcctcccgccgccccggcggcggaaccggtgcccccgtggctgagatcgctgcccgtcgcgcccgagttccgccccaccgccgccgagttcgccgatcccgtctcctacatcctcaagatcgagcccgccgcggcgccgtacggcatctgcaaggtcgtgccgccgttgcccccgccgccgaagaaggccaccttctccaacctctcccgctccttcgccgcgctccacccggacgaccgctcgccgtccttccccacccgccaccagcaggtcggcctctgcccgcgccgcacgcgcccggggctcaagcccgtgtggcggtcctcccaccgctacacgctcccgcagttcgagtccaaggccggcgccacccgcaagtcgctcctcgccggcctcaacttccctgcctccaggcaactcaccccgctcgaccacgaggtgctcttctggcgcgcatcggccgaccgccccatcgtggtcgagtatggcagcgacatgtcgggctcgggattctccccttgcgccgcgcagccgcagccgccgccgcagcagcaaccgacggcgcgggcggcggcgcaccttggggagacggcgtggaacatgcgcggcgtggctaggagccccggatcgctgctgcggttcatgccggaggatgtccccggggtcaccacgccgatgctctacgtcgggatgatgttcagttggttcgcgtggcacgtcgaggaccacgacctgcacagcctcaactacatgcacctcggggccgccaagacgtggtacggcgtgccgcgcgacgccgcgctcgcgttcgaggacgtggtgcgcgaacatggctacggcggggagattggtgcagaatgcaggggaatttgtggtcacttttccaggatcttatcactgcggtttcagtcatgggaaccatccaatggtgaaatggagacacggagctctcgaataaaggagaagaagaaatgcgaaggggaacaactggtcaagaagatgttcatccaaaatgttattgaagataatgaactgcttagtcatcttctaaatgacggatcatcttgtattattcttccagcaaatgcccatgatggtcctggtctttctactttgcgctcaacagatcaatcaaatatgaattccagaatatcacataacctatgcagtagggaagaagctccagaagcctcaggatgcttatcgccgaacaggaatggtgataccagaaattgtatttcatcagatacgcataacatggaaggtgataagggagatataatgagcgctactggattgttagatcagggtctattatcatgtgtcacttgtggaattttaagtttttcatgtgtggctgtactcaaaccaagagattctacagcacgatacttgatgtctgctgattctaattcaattaataaccagctttctatttctggagggagtattctggcagatgcgccaacaaatgaaaggaatggtgtcatttctcgtccatattctgaacactgttgcaacgaaataatggccgatgatgcagaaatcgataagaattctgctcttgatctcttggcatttgctcatgggggtcaaccagatcctgaagaagatccactggagaaaatactgaagattgcacatggcattaacaaatcacaacctaatagttcaaataatgttggttgtgttggaacaaagctgtcctcaagtagcacagagcgccaagaaagaccatcttcccagaacgctcattgtaatggtagctcagttatttcaaatggaccgaaaggtgttcgcacgagaaataagtatcaacttaagatggtactttctgaaggttttcaggcaaaggatatctattctgcgaaggaaaagaaggttcaatcagaaccatcaagctcaaaaggggatgttaaggagacaattgatgttagtggcacagagaacgatgtcggatgtaaaagcactacaatctctgtcagtgaacacaggggttctacaaagaatatgtattcagtgaaggaaaagaaggttcaatcgaaaccatcaagcttaaaggggactgttaaagagacagttgatgtcagtggcacagagaacgatgctagatgtaaaagcattacaatctctgtcagtgaacacaggggttctacacctatgaccaatagtttagctgcatcaatcgtgaaacctgacaaggattcatcaagaatgcatgtattttgtcttgagcatgctattgaggttgagaagcaactgcatgctataggtggttctaatattatgcttatatgtcgtccagaatatcccaaaatagaagcggaagcaagattgttgggtgaagaaatgggactggtatatgactggaagggcattcatttcaaggaggccaacatggaggacaggcagaagatacaggaagttctgcgggatgaggaagcaatacctacaagcagtgattgggctgtaaaattgggtattaacctttattatagtgcaaatctggccaaatctcctttatataacaaacaaatgccatacaacagagtcatttatagggcatttggctgtgattctcctaatgactcgccagtaatgttcaatacttgcgaaaggaaacaaagccaccagaagaaaatagtggttgctggccggtggtgtgggaaagtatggatgtcaaaacaggtccatccatacttggctcacagagttgaaagccaggaagcggaagaagcagatagaatctgttcttatcattttgatgagaagcacaaagctgagccagttgggaattctagtagagtggaagcctccaaaagaaagagtagcagtttgacagacgtaacagaatcaagcaatagaaggggggaaatacctggtgaggaaacaaacaccaagaggcccaaacattctcaagagaacaatctcagagctttggaaaccgctgctgaagttgtggtgccctcaccagctggaacaggtctccgcgttagctccaggattgccaacagggcaaacaagctaaaatcaaagatggaaaaggaggatgtcccttctagccgtccaaagtctaacataaaggagaaaagcagtcatgctagcggtcagaaatcaaatgttcaagaggcgaatgctaattctgctagccatttgagagcaatgccaccaaaacagaaggctgaagcagaagcaaagaagcaaataagaactccaaaacctccaaagcaagcagtggagtactcgtgcgatattgagggttgttctatgagttttcgtacaaagcgggacttgtctctgcacaagagtgatatctgcccagtgaaaggctgcgggaagaagttcttctcgcacaagtatctgctgcagcatcgcaaggttcacacagatgaccgtccgctaacatgcccatggaagggctgcaacatggcattcaagtggccatgggcaaggactgaacatctcagggttcatacaggcgacaggccctatgtttgccatgagccaggttgcgcacagacattcaggtttgtctcagatttcagccgtcacaagcgcaagacaggtcattctgtcaagaagaagaagaaagcaaagagttgagctcgtattacagcaagctagttatggtagaaccggacgcagtaggaggtagtttgt

SEQ ID NO: 22474 - DNA, 1157 bp, Oryza sativa
  Clone ID: TF_OsC87628_1
atggcgctcgacgggaagccaccggtgccgccgccgtccacgccgccgatggactcgtgggcctgcggtggtcgccgctccaagcgccgcggcggcggcggcgggagcagcgggagtagtggcagctccggcggcggcggcggcggcgagtccgaggaggagtacctcgcggcctgcctcttgatgctcgcgcatggcgtccgcgacgaggccgaggtcgtcggcgtcgcggcggcgacggcgaagccacagcatgggtacgagtgctcggtgtgcggcaaggtgtacgggtcctaccaggcgctgggcgggcacaagacgagccaccgcaagccgccgtcgccggcggccgaaccggcggccggcgaagagccgtcctccggcggggtggccggcgaggcgaaggtgcaccgttgctccatctgcctccgcacgttcccgtccgggcaggcgctgggcgggcacaagcggctgcactacgagggcggcgccgtcggagacgccgtcaaggagaagaactccctgaagaccaaggcggcggtggcgacagcggtgctgaaggacttcgacctgaacctgccggccgcggcgacgacggcgggggacgaggccgagagctcaccaccggaggccaagagagcacgtctgctgcttctcgtctaattcacttctggttgggcgatggagacgggtggcatgataaacatgccgtgtttagatggttggccagcagttctggtggaaataatataatggggccccatgattccccagctcgctgtgtcgaatactcctacagtcctacatgcagatacggcacatttgcaactggtggatgtgacagttttatggcctttgggatggcgctagcaaaagtgccccagccctcaaatacccatgtaacatcacttcttgtctttcagcaaggatggccatctgcttcgctgtcgcatccaggtgcacgttcgataagccttacctttctattgagatatcaatcatatgaaacccactgggtatccaccgggtataccatacccaacgggtatgggcatgggtatgaatttctacccgccaattctatcgggtatcaatcgggcgggcaaaagcgggtcaggcataagcctgacgcaatctttatctgtaatgtcaactaa

SEQ ID NO: 22475 - DNA, 2600 bp, Oryza sativa
  Clone ID: TF_OsC2514_6
acaaagggagctctaatggcagtagctctacacagctttatgagctgagaatggctaaaaattttattattacagtaggaagatgaattaactatgatatatagctagcataaacaacagtatataatttgaaaagttccatatatatgaattgaacagcccataccctcccaaaagaacatcgaattattaaacctcaattggaacatcaaaagagaaaaagctgggtaaattcgacttacttacccagctttgaaataatcttgacatgaacatcatcatcaggcagttcttgtcgaacgatcgatgagtaccccacgaacaaaatttgtttggatttgcttgcatgattcattcgctattcatccatggctgatccgaggggtactaacagcatgccatggctcgttgctccggttgcccggagcccgaagagttgctctagctatgccatggcttgttgctgtggtggtggtggtcgtacggcgccgccgacgacgccgacgtcgtcgacatgcagggatcgaagccggccatgctcattatgttgccgtgggagaaggctcggagacccaagaagtccctggtgaggccgtcgttgccggctccggcgacgccattgccggtgtcacgatcggacctggcgcccctgctgctctcgtctgctgcgatgaagtgggacgcttcgaaggcgagcccgtagccgccggcgccgacgcaagtgctcgacacgttgctggtaggaggaggagggggagcattggtggtggcggcgctgctgctgctgttgtgcgtgctcgccgccgccgccgccgccatgtgggcgtggctcgacgggcggctcagcgtcgcgcccatctgcgccgccttctgcagcagcgcggtggcggacatgtgcgccgaggaggcggcggggtgcggcggcgcggatgacgtcgacgagaacccgaagctgaggccggcctgctgcgcgccgccgctctccggcgtggagctcccgatgaactcctggtccagcctcgccgacccgtacatcgccgccggattccccgcgccggccatcgcctccagctgctgctgctgctgctgcgccgtgagccacgacggcgcgaactgctgctgctgctgctgctgctccctcttgaggcacagctcttgcatcagcccatgcccccccatcgccatcgccgcctggtgatcaagcacatccgccacctgcgagaagagcatcccgccgccatgctgctgctgccccgccaccgccgccgccgccgtgaccgccctcgcgctctcctccgccagcgcgtcgcagaacgccctgtgcgtgatgaagctgtcccgccgggagaagagggtgccgcaatcgcagcggtactcgcgggtgccgcagaccttggagtgggccttccagtcggagtggacggcgtagcgcttggagcacttgtcgcacttccacttcttctcgccatgctggcggctgaagtgcttcttgatgccggtgaggtcgccgagggcgcgcgccgggtcgtggtggacgcagccggcctccgggcacacgtacaccttcttcctcaccacctccttggggttccgctgcttcagcttccatggcaggttgtgccctcgccggtgcagctgcaggttctggtctcgctggaaccctttcccgcagatctcgcacacgtacctgttcgtcgccatcagcgtcctcggcgacagcgcgatcacctccgcctcaggatctgggttgccggggaggctgcgcttcttcttggcgggaggaggagcggggtgggacgagacgctggcctggtcgccggacgccgacgtcaggttccacatggcgcggcgtcccggggagcagcttcgctgctgctgagcggaggctgcggctgcgccggcggccggcccggcctgggccgcccgcgcccgccccgcgctcggccgtcccggacgacgtctcgacctcctttcgggacgcatgctctatcgatcggcccggggcagcggctaccactcctcccggtgccggtgctgctcgcgtccacgtaccacgtgcctcgtgcaccgatcgctcgcggaccgcgttgccggcccgggcgacgccgtggtcgcctcaccctgctaccgcggccccgcgccatccaccggtgtgcgccgcgccgtgcaaccgccgcggcggaggctgccgctgcgccgggtgggtcatctcagcaagaggcgggggcgtgatcgaacgatctcaaattctcaattgccgccggggagcccgctccctccatccgagaatctttcttttgcagaagttccgtggacgcgggtaccactcccgccgatgctgctgctactagcgtccaagaagctagctgcctcgagcataaaagctcgcgtcacgcctttgcaacgcaggccggacggtgggggcgacaccgagctaccggtcaccgcggcaaccaccggtcgtggacgcggcgagcaaacgaggcggcggcggctgctgctgctgcgtgtgggagaagccaaggtgaggaagtggcggagctgggcggagaccgggagataagaaagggagccaagagcggtgcattcggacgcgtggg

SEQ ID NO: 22476 - DNA, 1110 bp, Oryza sativa
  Clone ID: TF_OsC182396_1
atggcggtggaggcggttcttgaggcgtcgagaagtagtagtgaggaggaggcggaggtgatcgtcacgcacggcggcggcggcggcggcggaggaggaggaggacaggtggaggggtgggggaagcggaagcggtcgcggcggcggcgaccgcagctgccgccctccgaggaggagtacctcgcgctctgcctcctcatgctggcgcgcgggcgacgcgacggcgacgacgtggcggcgtcggcgtcggcggcggcggcggcggtggagcaccggtgctccgtctgcggcaaggcgttcgcgtcctaccaggctctcggcggccacaaggccagccaccggaagccgccgccgcccgccatggtcgacgacgacgaggtggtggtggagacgaaaccggcggctatcgcgacgccgtcctcgtcggcgtcgggcgtctccggcggcggcggcgggagggcgcacgagtgcaacgtgtgcggcaaggcgttcccgacggggcaggcgctgggcggccacaagcgatgccactacgacggcacgatcggcagcgccgccggcgccggcgcgtccaagccggcggcgaagacgaccgtggcggtggcggcgagccggggcttcgacctcaacctgccggcgctgccggacgtcgccgccgccgccgaccagcggtgcgcggcggaggacgacgaggtgctcagccctctcgccttcaagaagcccaggctcatgatcccggcatagctagccaagcccacaagatttgtttaattttagccataaaattccattaaattaaacccatagttttttctgttaattactttcttaatttggtgattagtcttaggaatgatgattagtttgtgtatatagccattgtttgttcatctatcatttgtatcttgtaattaatcccctgttagctagatttggtttaattggatataggagttacagatcaattctttcattggttgaattggtttaatttatgtatatatatacatatgtaaaatacatgtataagaaaaatacgcatatgtatttaatttttttgttaaaaaaaaaaaaaaaactcagctatagctaaataaaaaaaaaaaaaaa

SEQ ID NO: 22477 - DNA, 759 bp, Oryza sativa
  Clone ID: TF_OsC32707_1
ggtcaccctgcggggcccggcgcgggatcgatctccccccaaccaaaaatctctctctcaatccattgatccattaattcacaagcttatcgaatcggagatgaagcacccgaggcaggaggaggaggtgtcgctggcgctggcgctgagcacggactgctcgtcgacggcgtcggactcgtcggcggcggcggcgggcggcgcggcgaggaggaagagggcgcggcggaggagcgtggtggcgacgtcgggggaaggggagttcgtgtgcaagacttgcagccgcgcgttcccgaccttccaggcgctcgggggccaccggaccagccacctccgcggccggagcaacgggctcgacctcggcgccatcggcgacaaggcgatcaggctgcacagggcggccgacaaggagcacagggacaagcacgagtgccacatctgcggcctcggcttcgagatgggccaggcgctcggcggacacatgcggcgccaccgcgaggagatggccgccgccggcggtggatcctccgccgacgactgggtctggcgctgcgacgcgcggccggaggggatcgccgccgagccaccggtgttgctggagttgttcgcctagttaccgctggtctccattagtttcgtccaagttttgaactgacgcagtgtgtgtcaccattaattagttcatgtacatggtctagaaaaaaaagtcaggttcattcgatcttgtaactatgaataggggtttaatttttttttttc

SEQ ID NO: 22478 - DNA, 2129 bp, Oryza sativa
  Clone ID: TF_OsC3319_1
cccccctcctcctgctgctgagcatcgtcgaacaagttgttgtgaattatgtcacccgtttcttggtacatgacactttacaatagcatatcatcaactctccactgccctccgtaatgcactaatgctgtctcaggaaagtccaatgagaagcaaacaacaaaaagattccatgcacgtcacgattagcaagccctgcttagctttccggccggcaagacacaaaaaacactagctagcctagcagcatatgcagcgtctaattacaccacacgatctcgtcgtcttaatttgctggtgaaatggaacgtacaagaagagattcgatcagaggtagacgaagagatggcgcgtttcgcgagctagctgggctggactggattcttctttggctacatgatgcccatgctgttagcgtgctgtaggcgacgccgcgtggcgtcgacgacgtcgaggggatcgtcggcgtcgccgccctcggtgacgacggacgagacgtagctgcgggcgacgtcggagctcatggcggccgctctcgcccggaacttgtggctgcagctgtagcaggtgatctgcagctgcgtggcgtcgacctggcgtatggcgtggtcgcggagcacgtgcgcgcggctgagctccacctgcgcctggtaccgcatccgccgcgcggtcgccagctcctggtcggcgagctccgcctgccgcttcgcctgcgcgcgcgcctcgtccgcggccgccttctcggccatcgccagacgcagctgctcgtgggcggcctccttcagcctcgtcgccgaggccgacacctcgccgctgctgctgctgctgttgttgttgccatcatcgcgtgcgccgccgaacccgatcgagagctgcagccgcattgcgtcggcgaccggctgccgcgacggaagagcagcagcaggcgaatgcggcgaagaggaagcgtagtacccaacggcggtggcaactggagtaccaccgaggctgccgcctgcgcaggtggtggtggtgcgcggtggcatgagctgcagctccaggctgtgggtagtgtggcatcctcctcgccggccaccacacggcgtcggtggcgacagcgccgggtcagtgaaccggtggtggaacgccgcgatgctaccgccagcaggagccggcgccgcagcacggggactcaccattgccggaccaccaccaccagtagcaggccaggccaccgggctcaccaccaggtcgctcgacgggctggcgctggacgccgtccgcgacaacgaagccggcaccgcaaaaagctgctgctgctgagacgacgatgctgccgccggcgcaccaaccacgacgccaccgccgcgtcccggggacgatgacgcctcggcggcgcgtggcctgccggcgttgcacgcgtcctggtgctcgatgaagctctccaccctggagaagacgcggccgcagtcgcaggtgtggccgcgggtgccgcaggtcttgaggtgggccttgtagtcggagtggacggcgtaggccttggagcagcgggcgcacgcccactggcggtggccgctgtgcttgcggcggaagtgcttcttgatgccgacgaggtcgccgagcgcgtgggaggggtcgtggtggaggcacgtcggctccgggcacacgaacacccgcttccgcgccgcctcgccggcctcccgcttcagcagcttccacggcaccttgtgccgccgccggtgcatctgcaggttctggtcgcgctggaacccctggttgcagatctcgcacacgtaccggtcagactccagcagcgtcctcggcgacagcgacaccacctccgcgtccgggtctggcgtgccggctggccgtcgcttcttcttcgccgagccggcggaggcggtggcgatctgcagcgaccggaacggctccgtcgccgcaccggacgcatcctgcggcggcacggccgtcggcgcgcaagaactcagcatgatgtccgcctccgcgcgcgcaccgccggtgaccactcccacctcttcccttacaaccaagaattccccttcctcctccaacctagccaatctctccagctctgtgacggatgaaacacccgtcacagataacccatctctgaccggtatataagtcat

SEQ ID NO: 22479 - DNA, 883 bp, Oryza sativa
  Clone ID: TF_OsC722_1
gctcgtcattaagagcgaaagaaagttacttggaattctttggtttgttgtaatgacaatcacgagagaagaagcggagagcaaggagatggagagcctacgggtgcacgccagcgcgctgctctcgctgtcgtcgcctgcagcgtcggcgtcgcagccgacgtcgtcgtcgtcgacgacggagggggtgttcgagtgcaagacgtgcagcaagcggttcccgtcgttccaggcgctgggcgggcaccggacgagccacacgcggctgcaggcgaagctgctgagcgaccccgccgcggcggcggcggcggcggccgagagggacagggcacgcgtccacgagtgcgccgtgtgcggggtcgagttctccatggggcaggcgctcggcggccacatgcgccggcacaggggcgagacgggcacgacgaccgtcgtgctcgcggacgccgacgactcgggcggcgccaccgtgccgcagccgccggagcccatgccggacctgaactacccgccgctggaggacgccggcgacggctcggagcctgagttacttaaccttcttgtataagttgcatcgatagatatacatgtgaattgaattggcgtctgtacatagatatggtggatggattctttaccaaatttgatcgaaaaaaagaactaaattttggagcgtgatgatcatagcatgtaagttgtaacaaatgattgttaactgtaagataggaattctattcatttgttctcttctgtacaaaattacaaataggttgattaattagttggtcggttgtggttgattctttgtaaaataccaatttactagtataaatatactgacagcttattgtttcaaaaaaaaaaaaaaaaaaaaaaaaaaaaa

SEQ ID NO: 22480 - DNA, 507 bp, Oryza sativa
  Clone ID: TF_jC-osleLIB3474010a01b1
cacggagaagcgcgggaaatcacacctcgtcgcagccaagatctcctccagtccaaacgcatcaaagattccaagatgtgctctggagatgatattgatggagacatgagggttgaagcaacacaacacagggatataaggcgctacaagtgtgaattttgcacggttgttaggtccaaaatatgtctcatccgagctcacatggttgctcatcataaggaagaactggacaaatcggaaatctacaagtcaaatggggaaaaggttgttcatgaaggtgaccacacctgccaagagtgtggtgcttctttccagaagccagctcatctgaagcagcatatgcaaagtcactctgatgagagatcgttcatttgcccacttgaagactgccctttcagctacattaggaaagatcacttgaaccgtcatatgcttaagcatcaagggaagttgtttacctgctctatggatggttgtggtaggaagttcagtataaaggcaaatatg

SEQ ID NO: 22481 - DNA, 1703 bp, Oryza sativa
  Clone ID: TF_OsC1528_2323
ggagaagcgcgggaaatcacacctcgtcgcagccaagatctcctccagtccaaacgcatcaaagattccaagatgtgctctggagatgatattgatggagacatgagggttgaagcaacacaacacagggatataaggcgctacaagtgtgaattttgcacggttgttaggtccaaaaaatgtctcatccgagctcacatggttgctcatcataaggaagaactggacaaatcggaaatctacaagtcaaatggggaaaaggttgttcatgaaggtgaccacacctgccaagagtgtggtgcttctttccagaagccagctcatctgaagcagcatatgcaaagtcactctgatgaggatatagattcttaactgtgtgaagcattggatcccaaagaactccaaaatgcgatgaggcatatttaatcttgtctggactagtaacaggttgggatgaccaccttgtgaagctccaacaggattgcctcctcacgctctttcaggagagatcgtacatttgcccacttgaagactggcctttcagctacattaggaaagatcacttgaaccgtcatatgcttaagcatcaagggaagttgtttacctgctctatggatggttgtggtaggaagttcagtataaaggcaaatatgcaaaggcatgtaaaggaaatccatgaggatgaaactgctactaaaagcaaccggcagtttgtttgcaaggaggagggctgtagcaaggttttcaagtatgcttcaaagatgaagaaacatgaagaatcacatgtgaaattggactacgtggaagtagtctgctgtgaaccaggctgcatgaagacattcacaaatgttgaatgtttgagggctcataatcaggcttgccatcaatatgttcagtgtgatatctgtggggaaaaacacctgaagaagaacattaaaaggcacctacgagcccatgaggaggtgccatctactgaaaggataaaatgcagtttagagggctgtgaatgctctttttccaataaatcaaatttaaccaaacatataaaggcgtcccatgatcaagtaaaacctttcgcatgtcgattcacggggtgtgaaaaggtgtttccatacaagcatgtcagggacaaccatgagaaatccagcgctcatgtatacactcaggcaaacttcacggagatggacgagcagttactctcgtgtccgagaggtggacggaagaggaaagctgtgactgtcgaaactcttacgcgcaagagggtgaccatgcacggcgacgcttcgtcgttggacaatggaactgagtacctgcgctggttgctttctggtggggatgatgattcgagccaaactcattagccgtatcatctttgcatctgattgtgatggtcatggtgtcaatggctcaatgctttgtcgtaaaggggtgtgctagcccactcacgttggtagttagatggccgtggtgtttttgttgtaagtagttggtctgaatttagaaagtgcagcagttttagaggaagcctactagtagtatatatttgtagcataatggcgcagtttgagttgtgagttgtaagtattttgattctttactgttttgaccactgttcttggaacctcaaaattatttgacttgttgaatgcaaaaaatgatgtgattacaagttttggttcttcttgaaaaggttgtacctgaaa

SEQ ID NO: 22482 - DNA, 1077 bp, Oryza sativa
  unsure (1)..(1077): unsure at all n locations
  Clone ID: TF_OsC14_2
cccacgcnttcgcggacgcgtgggcggacgcgtgggcttgcttcagatttcgatcagcttcagggttgacacaacagagaggttggttcacaaagtttcagtaagtaaagcattcattcagatcatgaagaggtttgcattcgaggacagcgatatggcgcgcgtgctgatgctcatgtcgtcgcacgggcagcaggagcaggcgctggctctgccggtgccggtgcagctgccgctcgccgccgcgcgcggcgaccgcgccccggagcgcgcgttcgtctgcaagacgtgcaaccgcgtgttcccgtcgttccaggcgctcggcggccaccgtgccagccacaagaagccgaggctcgacggcgacggcgacctctccctgtccaagcccaagctccacggctgctccatctgcggcctcgagttcgccattggccaggctctcggcggccacatgaggcgccaccgcgccatgaccggcggcatgccgcgggcgatcgtcgtcgacaagaagcccgacgtcgtcgacgtccacgtccacggccacgacgacgacggcggcatcaagcgcggcggcctgtggctcgacctgaaccatccaccctgcgacgacgccggcgacgacgacgccgagtgcggccacaatgccgccggcgccggcatcacgttccaccagttcttggataccggagccatggccgttgactgcgtcggctactagctctctttgccggatttttgccggatactacaatacttatatgcaccgattaatcttggtgcaatttctcttttaccttttctttttcttttcatttcttcttcttcttgttgagaaatccacattttgtagcggtagaatatattagttcctaatacaacagagcatggcacacgttttgggtgccaatgatcagatgctgtgctttggggttaatctggaggattacatgagataatattcacctcctgatgatttcctggatttgtgatcaaaaccctttgatcaaatggattaatgtaattatctgaattgagtaaattaagtatagagcttgtggttttcagttgctactc

SEQ ID NO: 22483 - DNA, 1150 bp, Oryza sativa
  Clone ID: TF_OsC83619_1
cgggccgcgggcagcaatattaaccattctctcgatcgagtcagaagctagctagctaaaactcgtctcgtcgatcatcttgtgttcgatacgatctccagttcgttcggtttctttcttgaccatgaccaagcatccgagggacggcgaggtgatcagcctctcgctgtcgctcacgctcggcgctgccgcggatagcggcgagcggaagaagccgcggcgcgggtcgtcgccggcggcgtccgggagtggggacttcgtctgcaagacgtgcagccgcgcgttcccgtcgttccaggcgctgggcggccaccggaccagccacctgcgcggcggccacgggcgctcggtcgggctcgcccccgccacggccaaggggaccaccaagaaggtgcaggagaagccggcggcggcggcgacccacgagtgccacatctgcggccaaggcttcgagatgggccaggcgctcggcggccacatgcgccgccaccgcgaggaggccgccgccgccgccgcggcggtacagatgctaccattatctggtggagggcaccgcgcggggccaaatctggaggtcttcgagctcggacatgttagatctggcattggagccaccacccttgccgtcactaaagaatccgacacaagagggctggggataaacggggcctctagctgccaagcactagagggggggagggcgaacgcgacgtcgggtgtggcggtgagcgaggagtgcaaggcgaggttccaggagctgagggcggggcgggcccacaggttcgtggtgttcaagatcgacgacgcgatgcggcaggtggtggtcgacagggtgggcccacgcgacgccggcttcgacgagctcaccgccagcctccccgccgacggctgccgctacgccgtgtacgaccacgacttcaccgtcagcgacgccacggccacggcggccgccggcgagggcggcgaggcgccgcgcagcaagatcttcttcgtgtcgtggtcgccggcggcggcggacgtgaggagcaagatggtgtacgcgagctccaacgaagggttcaagaaggagctcgacggcgtccagatcgacctgcaggccaccgaccccagcgagctcaccctcgacgtgctcaaggaccacacctcctaa

SEQ ID NO: 22484 - DNA, 654 bp, Oryza sativa; identical to SEQ ID NO: 13235
  Clone ID: TF_OsC171199_1

SEQ ID NO: 22485 - DNA, 730 bp, Oryza sativa
  Clone ID: TF_LIB4309-044-R1-K1-G6
cagacccggacgcggaggtgatagcgctgtcgcccaagacgctgctggcgacgaaccggttcgtgtgcgaggtgtgcaacaagggattccagcgggagcagaacctacagctgcaccggcgaggccacaacctgccgtggaagctgaagcagaagaacccggcgcaggcgcagcgccgccgcgtgtacctgtgcccggagccgacgtgcgtccaccacgacccggcccgcgccctcggcgacctcaccggcatcaagaagcacttctgccgcaagcacggcgagaagaagtggaagtgcgacaagtgctccaagcgctacgctgtccagtccgactggaaggcccactccaagatctgcggcacccgcgagtaccgctgcgactgcggcaccctcttctccaggagggacagcttcatcacgcacaagggcgttctgcgacgcgctggcgcaggagagctccaggctgccgccgacgagcctcagcagcctcaccagccacctgtacggcgccagcaacgccgggaacatggcgctcagcctctcccaggtgggctcccacctcaccacctcgctccaggacggcggcggccaccaccaccacccgtcccccgagctgctccgtctcggcggcgcgggcggtggcggcgggggccgcggctgggagcagcatcgccgcgcggtttgaccacctgctgtcgccgtcgggcgcgtttgtcttccgccccccg

SEQ ID NO: 22486 - DNA, 2843 bp, Oryza sativa
  Clone ID: TF_OsC2514_9
ggagaggaagcacggatgtatttacaagtctgcatcttacattgttctaggtttctctctaccaatacaggcaggtggctgaaagaatgatgctagccagagcacaaaacccaaggttattgcaaaaagaaaacctcacaggattgtgcggccgttggtctttctcttggcctcctcccatggcgcctgtgcagaccccatgtccagctctcctccaaccatcaatgccgggaggccaccatttgcagtggagccacccatggtccctccaatgccaagcccaaggaagtccagagtggcaggcttgggaccgtacagtgccgatggtcccatcatcaagtccggcaaccctgaattcccagtgtcataggtgagaccaaggccaagaccgccaggtagcatcggcccaggctccatttccatttgctggttgctcctatggtgccactgttgtacactgttatcggtgaacattcgatgtggcagcttggctggcggtggcggctgtgggacgttatccatgaaccttccttgaggcggatgaggatgcggatgtggatgtggatgtggatgagatgttgttggtgtgttaccagtagtgaacctcccttgggatagcttggatgggggagacgatgaggtggaggcggcgagcccaaactccttcaggaaagatgagcttgattgcgaagcaccaacctcagcagccttctgcaggagagcggttgcggacatgtgcggtgctggaggtggagcaaaggagcaggggtcacttgcatttgtctgtgggaagagagaagacggcgcaccaattgcaaggcagaggaatgtgggatcgacgccgatgagatcgcggagggatctgctttggggagtgctgctcgttgtgaccgacgcaaacagaccagcgaacgtgctcgtcgtcgtagctggagcgatagcattggtaacgctgcttcccgtgccgcagctggtgctgctgccatctgtgccaatggcctccgagggcgagggaaggaaacaaggcagcatcggagtgtcattatccagcaggtttgagtcctccagttcagcatctttgtatcgatccacttcctgaaagcaaacctcctcatctcgctcatcttccacctctatcttggcaatcactgctggcttagcaaccacctcttgctcatccacatttggtaccactgccaccaccggctgaggatgctcctgcagtatcggaggcggcggcggcggtgatggagcgcactgctgcggcacctccgccaccgcctggctgggctgcggctcatcgacctcggccacaggtgaatcctcattctcctccagctccttctccttctccttctccttcacctcctcctccttatccttatccttatccacattctcctcggcctccaaatcaggcgggcgaggcgacggcggcgcaggcacggcgagcaccctgcccgtctcctccacgagcgcgccgcagaaggcgcgatgcgtcacgaagctgtccctcctggtgaagagggtgccgcagtcgcagcggtactcgcgggtgccgcaggtcttggtgtgcgccttgaggtcggcctggacggcgtagcgcttgccgcagcgctggcatgtccagcgcttctcgccgtgcttgcggcagaagtgcttcttgatgccggtgaggtcgccgagggcgcgggtggggttgtggtgcacgcagccgggctccgggcagacgtacacccggcggcgcggcggcgccgcaccggggccgcgctgccgcagccgccacggcaggttgtggccgcggcggtgcagctgcaggttctggtctcgctggaaccccttcccgcacacctcgcacacgaacctgttcgtcgccagcagcgtccccggcgacagcgcgatcacctccgcgtccggatctggcgttccggggagattcctcttcttcttgaccaccggcgccgcccccgcccccgccggagccggctccaccgccggcccgggctccccctccgtccccgtccgattgggtggcatgacctccatccgagaatctttcttttgcagaagttccgtgcacgcgggtaccactcccgccgatgctgctgctactagcgtccaagaagcaagctgcctcgagcataaaagctcgcgtcacgcctttgcaacgcagcccggacggtgggggcgacaccgagttattggtccccccaacttcaagtaggggagcaaatgaggcggcggcggcgggtctgcagctagatttctcatcatcttgaccggtggcaccgccgtcggtgcgccttggctggacgccgcagtaggcgccgctgttgccactccggtcagtgacgctgccagctgctgctgctggtgctggtgctgttggtgtgacatcagcggcttaatctggtcatgctggtccccatccctgctaatcccgaagaacgccgccgcagctgcagccgatgaattcgatgccatcacctcccaaattttcccaactcagccgcaggagcagaaaatttccttttctgttgcccccgttggattgttcctcggattggcagcagtgttcttcttcttccttccttcttcccccgtggctcactctctcttctctctcccctactgctgtgctcttcctgctagctccccaagaagaagatagaacaagaagtggagaggagaggatggaagaggaaggctaacaagcgttgttgtctcatttctttcatttccttgtcatacttttctttctctctctctctcttctcctgctcctttccttccacgctcgtatatggcccccctctctccctaaagatattttatagaaattc

SEQ ID NO: 22487 - DNA, 1096 bp, Oryza sativa
  Clone ID: TF_OsC13219_1
ggtcgatgcgcgtgccggcgcccgtgcgcgacgagttcgtcgtcgacgaggagccggaggacgtcgccctctgcctcgtgatgctgtcgcgcgacaccggccggccatggaactcgagaccaagcgacgagtactcatctctcatgtacaacagcagctaccaccaccaccacgacgccgtctccgacgacgatttggagttgtccctctcctccccgtacgcggacaccgagatcaggaccaagaagaggaggaagacgacgggtgcggcgagcaccgccggcggcgagaagcggggccggtacgagtgccacggctgcggccgggctttcctgtcctaccaagctctcggcggccaccgcgctagccacaaacgtataaacagcaattgcagccttgtcaaacctccggccgatcagccggagccgagcatcgaaacatcgttcagctctgcctcgacgtcggtgtcaccagctgacaccatgatcagcgcggccaccatctcgaagacggtgaagaaagcaactaaattcgtgtgcccaatctgctccaaggagttcggctccggtcaggctctcggcgggcacaagcggtcgcactcgatcgcaggcgagctctacgagcgcggccacgccgacggcattgtcaagctggagcaacctttgctcgccgacaggtttcttgatctcaatctgccagctccaggaggagatgatggctgaagcttaattaggaggagatgatggctgaagcttaattttggttcctccaagttttgacattttttggggagagcatgggtatgtacagattcagattcaattcattcttttggagtttcagcttagttgatcatgagggattaaataattatattgttaggtctttagttaattactccagatttttcgaccagttttgttttgaatttagtgctttttgttagctctgttctgtttttgctccacattgggaggaaaataagaacatcatatgatctcaattgagaactggtacaatgaaatgcttccagaaaagatttcagttgaaaaaaaaaaaaaaagggcggccactcgcgatctagacggacgcgtgg

SEQ ID NO: 22488 - DNA, 1010 bp, Oryza sativa
  Clone ID: TF_OsC3878_2
ctacggcaacggcaggagagggtgcgggggcgggggcggggggcgctctcggtggtcgcggccgaaggcgcggatgtggtccttgagggagcgcttgtgcttgaagtcggagccgcaggcgcagtgccagcggcggccgcagttcttctcgtgggtgcgccagtcgccgcggacggcgaggggcttgccgcacttgcggcaggcgaagggcttggcgcagtgcttccgcttgtagtgggtctgcagcgtgcggaagtccttgagggggcgcgcccgcgggtggtccacgttgttccggcaccccgccgcgcagcagaagcacggcagccgcagcatcgccgccggctgcgtcccccgcagcgactccggacccctcctgtactgcgacccatgcccccacatatgcatctgcaggttgttgtatctgctgaaggtcttgcagcaaacagggcaggcaaagtgtgtaggaccaatgaggatctgggttggggtagggatccaatacttgcccttggtgagctttcccatagagaagtagtccaagcagaggtcatcactagctgcttcttcttcctcctccctctccacctccaccttgtgatcatcatcatcatcaccatcaagctcttgtgatgtcgtcgcggtcgcgccgagaggattgctcttcgcgaaatcgatgaccgagctgttaggatcaggagaaggcaggccaatttggagtgatatgtccacatcctccatgacctcctcttccttctcttgcttataacagccatggatcttgttgtgatcatggattgaagggaggaggctgagaagagggatttcctcctttttaggaagggaattgtggggagaggaggattgagagattaggcttctttggttggggaagatgtgatctttgcttggattagccatggcagcttggagagattacttgctggagtggagcagtgcagcaaggggatatgtattatagagagaagaaagtagagctagagagagag

SEQ ID NO: 22489 - DNA, 1479 bp, Oryza sativa
  Clone ID: TF_OsC4331_1
agcatacaacacgatgtaccaacgggtaatatctttcatcatttgttttttcgactgcttcggaaacagataccactactttccaggttataaagatccttgtcatgggtaaaagagagttgcataacaggctaacagcgagcggtaaaagatggggagaccaggggaagagagagagagagagacagaggcaagccgggggaaggtctgttcttcacaggacccttcttcattcatcttctcagtcatctcttcctaccataggcccaaattgctcttgctgcactgctaatgtccagcttctgacggcgcagaccaattgggggcaacagcgccacctctgagctcctccatccactcctggaagaacttcggatcaaaaccaccctcctcatcctcctctcgatcacaattcgcttcaactcctccttcctccatcatagaaatcgatgcctctgcagccgctgtcgccacacccttgttcggctcggcgatcgccggcgtgtggccttcgaagagagcgagatggccgaacagcttgtccttgcgggagaaggtggtgccgcaggagcagcgccactgcgcctcctcgccgcagtggcggaggtggctccggaggtcggcgaggacggcgaagcgcttcttgccgccgcagcgctcgcaggcgtagagcttggggcagtggctccgccggaagtggttgcgcgcgcacacggccgacttgagcggccggaagcggcggtgcgcgcggttccggttgcagccggcgtaggggcacgagaaccgcacctcccggccggcaggcggcttcggctggccgggcctggagagcgcgtccagggtcttgaagcggtcgccgtgggcgcgcatgtgcatccggaggttggcgtcgcggcggaaccccttgccgcagatgtcgcagaagtggacgtgctccgcgagaagctcggaggcgtcgagctcgacgacgtcgtagtcgccgtcgcccttggctgcttcttgcgggggttcctgaggcacggagaccaccacgggggggagctcctggacggtagtagccggaggcggaggtggagccgggagggaggcgacggtggaagagaggagggaggcggcgttgaggacgacgaggtgggcagcggaggagatctcggaggagacggagtggatgtcggaggaagagaggggcccggattctccggatatagatgcggcgatgcggcggcggacggcggccatgcggtcgccgagagcaaccaaccggaggagcgcgtcgcgggcatccccgtctcctcctccggctccggcgccgccggccccgccgacgagggcgccagagggatcccctacttccatggccagcgtcggcgccgtggcagccgttggtggcgcgacggagccgccgccaccgccgccggcgagtaggtgggtggtggacttcatttcccacccccaccttttttcctgcagcccggggat

SEQ ID NO: 22490 - DNA, 1244 bp, Oryza sativa
  Clone ID: TF_OsC478_3
tgcatccccgggctgcaggaattcggcacgagaccacacagcaaccagccagctgccacactagcttgaggcgagcgagcgaagcttagctagcggatataacaagtcgtcgatctgcttgctgcttttgtgaattgcggtggaagcatgtcgagcgcgtcgtccatggaagcgctccacgccgcggtgctcaaggaggagcagcagcagcacgaggtggaggaggcgacggtcgtgacgagcagcagcgccacgagcggggaggagggcggacacctgccgcaggggtgggcgaagcggaagcggtcgcgccgccagcgatcggaggaggagaacctcgcgctctgcctcctcatgctcgcccgcggcggccaccaccgcgtccaggcgccgcctccgctctcggcttcggcgcccccgccggcaggtgcggagttcaagtgctccgtctgcggcaagtccttcagctcctaccaggcgctcggcggccacaagacgagccaccgggtcaagctgccgactccgcccgcagctcccgtcttggctcccgcccccgtcgccgccttgctgccttccgccgaggaccgcgagccagccacgtcatccaccgccgcgtcctccgacggcatgaccaacagagtccacaggtgttccatctgccagaaggagttccccaccgggcaggcgctcggcgggcacaagaggaagcactacgacggtggcgtaggcgccggcgccggcgcatcttcaaccgagctcctggccacggtggccgccgagtccgaggtgggaagctccggcaacggccagtccgccacccgggcgttcgacctcaacctcccggccgtgccggagttcgtgtggcggccgtgctccaagggcaagaagatgtgggacgaggaggaggaggtccagagccccctcgccttcaagaagccccggcttctcaccgcgtaattcagcagctgcatggatccgatccgtcagagagtttttgtctagggagtgaaattcagtcgaaacacactattcgttgattcgttttgtgccgctattgtttaatttgttcctgcttttgtacagagcaagcgagtgatacatagccatacatacagtcatacagatataggtctagctcttccttggttctttgtaacactggaactgtacctgtatcttttacactttgttctttgacagtcatatattgtagaccataaaaaaaaaaaaaaaattcgaccaac

SEQ ID NO: 22491 - DNA, 1826 bp, Oryza sativa
  Clone ID: TF_OsC111363_1
atgcccatgcccatcgggccaggtatccgcggatacccggacccgtgggtaaaattgccatccccgggcacacgtgaaggaactgtggtaggggagaatgagggcacacatgcgggtttaaggtggtacccgaacccggcacccgcattctcaaacccgaacccgctaagacttgcctactccactaccgcttctactgcttggttcgagtcgagggtttctccttctcccaagatggggagcgtggagctcggagcggaggaaagggaggtcgccggcggggagggggggagcaagggggcggcgcctcctgctagggatattaggcggtacaagtgcgatttctgcagtgtcgtccgttccaagaaggggttgatccgtgcccacgtcctcgaacaccataaggatgaagtggatgatttggatgattacttgggacgtggtggcggcgagacgtgcaaagagatggaccatgattgcaagcattggatcccagagaactccaaaatgcgagaaggccttgagtggactagtaccaggatggggagacccttctgggaagctccttcaagaatgcctctttcacgctcttcttcaggatggggagactctcctgagaagctccatcaagaatgcctcgttcacacactttttcagaggcccttttcctgccatgtagatggttgccccttcagctatagcaggaaggaccatttgaaccggcatctacttacacatcaaggaaagctatttgcatgccccatggaaggatgcaaccgtaagttcactataaagggtaatatccaaaggcatgttcaggaaatgcataaagatggctctccttgtgaaagcaagaaagagttcatctgtcctgaggaaaactgtgggaagacttttaaatatgcttctaagttacagaagcatgaggaatcacatgtcaagttggattatagtgaagttatctgctgtgaaccaggctgcatgaaggcatttaccaacttggaatgcctcaaggcccataacaaatcttgtcatcgacatgttgtctgtgatgtctgtggaaccaaacagctgaagaagaacttcaaacgtcatcagagaatgcatgaaggttcctgtgttactgagagggttcgatgccacctcaaggactgcaagttgtcattttcaaagaaatccaatctggacaagcatgtgaaagcagtccatgagcagaagcgaccctttgtatgtggattctctgggtgtggcaagagtttttcgtacaagcatgtaagggacaaccatgagaaatctagtgctcatgtgtacgttcaggctaatttcgaagaaattgacggggaacgaccacgtcaagcaggtgggaggaagaggaaagccatacctgtggagagtttgatgcggaagagggtagctgctcctgatgatgatgccccagcttgtgatgatggaactgagtatttgagatggcttctctcaggctgattcgtcgtgaaccagaatacagaaatgtgagatctttggatatcaagggtgttgatatggtttgagatactagtagcaacgttcttttcctttgtgcatgtataggtaaaacatggaagtaattttgataagacctctatgtactgtctcagacatcaagttaccagaagtccagaatgcagaaacgccagatctttatatgctcaagggtgtttatgtgctagttaggtagcaacgttctctctttttgtatgtataggaaaagtgaaaggaattttagtagaccctaatgtcttgtgacaggcatggtaatttatcaaggttggtttgttctacagtgt

SEQ ID NO: 22492 - DNA, 1263 bp, Oryza sativa
  Clone ID: TF_OsC3319_2
ctagatgccggcgccgacgccgccgcccctcaggtgctcgcgcgccaccgccgacgcgccgtggccgtcgatggcggccatggacatcacggcgagcgagcgctgccggcacgcgtggcaggtcacctgcgcgatcaggcgcgccgcgtggtcccgcagcgcgagcgccttctcgagctccccgcgcgcccggtggcgcgcgcggcgggcgtcctccagcgcgcgctccgccgccgcggcctcctcgcgcgcccgctcccgcgccgcgtccgccgcggtcttctcctccagcgcgcgcctcacctcttcccgctgctgctcctcctcccctcctgccgccgcggcgcaggcgccgccgccgccggacgccgcggcgacgacggcggcggggccgattgagagctgcagcttcgtcgttgtcatcgtcgtcgcgtgttgctcgtgggaggaggagccggtggtcgtggagttggacgagaacgcggcggccaacggcgccgtggtggacgccgggaggagctgcagctcaggcggcggcggcggcggatgatggtgatgatgccgcagcgccgcgggacggatgaccggcagcgtcgtggccacgggcacgacctcaccgcgcacacgtccagagttacacgcatcctggtgctctatgaagctctccactttgattgctatatttgatagagatattatatacttcattcttaaataattggctatgtcactatacaggtttaaacttctggtaatttttcgggagaagacgcggccgcagtcgcaggagtggccgcgggtgccgcaggtcttgaggtgggccttgtagtcggactggacggcgtagcccttggcgcagcgggcacacacccactgccgccggccgccgtgcttgcgccggaagtgcttcttgatgccgacgaggtcgcccagcgcgtgtgccgggtcgtggtggaggcagctcggctccgggcacacgaacacgcgcttccgcgcccctccgccgcccgcgccgccgccggcgccgccgccgccacccgcggcgccgccgtcctccgccgccgtcgccgccgcggggcgcttgaccagccgccacggcaccttgtgccggcgccggtgcatctgcaggttctgctcccgctggaacccctgcccgcagatctcgcacacgtacctgtccgactccagcagcgtcctcggcgacagcgccaccacctccgcatctgggtctacgtacacacgggctccatgatcgaacaccat

SEQ ID NO: 22493 - DNA, 879 bp, Oryza sativa
  Clone ID: TF_OsC24770_1
gcaaactaaggctaggctcgccgcgagaggaaggtaagtaagtacgtacatttgcgcgaggtggacgagcttgacgatggcgagtgggcaacgagcggtcggcgaggggagcggtggcctccgcccgacgacgcacgtcgcgggcggcggcgggagcgcgcgcggggagtatttcaggtgcaagacgtgcagcaagacgttcacgtcgttccaggcgctcggcgggcaccggacggggcacacgcggatggcggcgcggcagcggcaggagcacggcgccgcgggggccgccgtcgtgggggctaccaacaaccagcggcgggtggtttccgcccaccagtggcacctgtgcgccgtgtgcggggtcgagttccgcatggggcaggcgctcggcgggcacatgcggcggcacagaggcgaggcggcagcggcgacgccgccgccggcggctgcggctgcgagcgccggcgccgtgtccagcatggagccgccggagatgatcgacttgaacagcccgccggcggtcgaggaggccggtgaaggtgatcagaggttgagcgtgcggaacaggagccccatctgcttaatctgctcgtgtagggtggtgttctctgtttggtgattgtgtgcgcgcggttgcgtttccaatgccattctagtgggaccaaggaagttataaaataaagtggggccaaggatctcgatccgtcttaaaaaaaacttaatttagtaattggataggacaaaaaatggatatcccccccccttgtattagattatgtcctatccaagtactaggttgagttttttttggccggagggagtatgtagtataatatgtttgtgcattttccgtgtaaaaaaaaaaagtgccctagc

SEQ ID NO: 22494 - DNA, 936 bp, Oryza sativa; identical to SEQ ID NO: 13257
  Clone ID: TF_OsC328939_1

SEQ ID NO: 22495 - DNA, 1600 bp, Oryza sativa
  Clone ID: TF_OsC11776_1
cccctcccccccggctgaacaaaaaaagaaaagaaaaaccctaggccgcctagagagagaaaggaggagaagggttcgccggcggcggatcggatcggcggcattcactcgtcgtctcgatggagtacgcggcgccggcaggggcaggggcagggggctactactactacccgccgtcgcagcagcacaagcctcgccgtcccccgcggcccgccgcccgctgggtcaagcactggatcccgcaggatctcgccacctcctccggcaaatgcgccctctacaagtgggtcagggaggatgtgtacaagaatctcaaggacggcaaggccgtgccggagccggaggcggtgaagcctgaacccaccacggagatcctcttcctctgcagctatgaaaactgtggcaaaacctttgtcgatgtcgccgccttaaggaagcacgctcatgtgcacaacgagaggcagtatatttgtcaggagcctggctgtgggaagaaattcgtagatagctccaagttgaagagacaccaccttattcatacaggacagaaggattttatctgtccccatccaggctgtggtaaggccttctcattggattttaacctgcgttcgcatctaaaaacgcatgcgttggaaaactatcatgtatgcccatttccagcatgtggcaaaagatttacgagtgactccaaattaaaatcccatgtcaagggccatgaaaagactggaactccgatcacagcacaatatgtgccatcatcagataaaccacaaagcagcagtaagcctgcgacaccagcaacaactaagcctacaacaccagcagcaacgaagacgacaacacctgcatcaactaagcctacaacaccagcacccacaagctttgctgagcgaccatatgtctgcccatatgatggttgtgggaaagcctacattcacagttacaaattgaaccttcatctaaaaactcagcatcctgaacatggtcaagaagagaatggtaggattgctgcacatgcaagtgagcatgctgtaaatgatcgtgccaatcagtataactatgctgagattgtcgaccttgcaccgaatccaaaaaggagcaagacaaattcagggcataagaccccctcatctaataaagcctacaatgtcaagatttctagcgtgttgcctgctgatatcagtggagtgaagaatcagtggccaggtaagtatgaagatgacagtgaagagacagaagaagaccagggcaacaacattgaagatggctggagatatggtaaccagaatgccgatgatgaggaaacagaatatgaagattaaccaaacgattctcttttgtcctttactaacatcctgctgcaatatatgcactaactagacagtagacgtggtggctgatacctttactaatctgcgtgcattctgaaccctggaagtagattagagaagtgctgttcttgagagtagtagaatcagatggccgtgattgtgtggtttggtcataaatagtctttgtatgcgacttattctcgttcagttttttatgctcgatctatgtattcaatcataagttgtgttatcatcgttttgtaaaa

SEQ ID NO: 22496 - DNA, 1021 bp, Oryza sativa
  Clone ID: TF_OsC343306_1
atgggagagcgtcccctcgccatcgccgccggccgtgaccccatgttcgtcaccgcctacgccgtgcacccggacggccacgacagcgacttcctcgacttcctcctcgagctcatggccgtcggcaagatgaaggagcgggtcaacgtgctcattagtttaccgacgatggaagtggccaccaatacggcgacacgatcgccggtgaagctaatgctggtgctgacactgtcgccggcgagcaaggtgatcgccaagggcggcggcggcgtgaagcgggtgcacctcgacggcggcgcgttccagtgccggacatgcgggcggcggttctccacgttccaggctctcggcggccaccggaccagccacaagcggccgcgggtgcgcgccgacggccttgacctcctcctcggcgcgcgccccggcaagctcggcgccggcggcgcctcgacgccggtagtgcaccggtgcgacatgtgcggcaaggtgttcgccaccggccaggcgctcggcggccacatgcgccgccaccggccgctggtgagtcgtaatggcacaatgtccacgacgtggacggcggcggcggcggcggcggcgacaatgtccggctcctcgtcggaagagcgtgacgacgacgacgacgacgacgtgcacaattataatttcatccactttttctgacgtcttcgtcgtcgtcaccgccatggaccagcaggaggactacactagtgatctgcagcttgagctcgaggaagaagaagacgataaccaacttagccagctcgcggagctcgacgtgcagctctcgctgtcgctggcgtgcggctcgacgacggcgatgtcatcgtccggcgatgaggaggacgcggagccacggcgtcgccggcgggacgaggaggcggcggcggcggcgttcgagtgccggacgtgcgggcggcggttcccgtcgcaccaggcgctcggcggccaccggaccaatgggccaggccctaggtggccacatgaggaggcatcggcctag

SEQ ID NO: 22497 - DNA, 1317 bp, Oryza sativa
  Clone ID: TF_OsC3878_4
ctagcgcggcggcggctgcagggaggaggcagccatggaggacgaaggtctgacgacggcgtcggcgtcggagacggcgccgtcgtcgtcgtcggcgtcgagggcggtgtgggcgtggccgaaggcgcgggcgtggtccttgagggagcgcttgtgcttgaactcggagccgcagaggcagtaccagagcttgccgcagttcttctcgtgggtgcgccagtcgcccttgacggcgaaggccttgccgcacttgcggcagaggaagggcttgaggccgtgcttgcgcttgtagtgcgtctgcagcgtgcggaagtccttgagcggccgcgcccgcgggtggtcgatgttgttccggcaccccgccgcgcagcagtagcacggcagccgcagcatcgccgtcggctgcaccccgcgcagcgactccggccccttcctgtactgcgacccatgcccccacatatgcatctgcatgttattgtatctgttgaaggttttgaagcagacagggcaggagaactgggttgggccgatgaggatctgcgatggcgtcggaatccagtactgccctttgttcagcttcccgatcggcgtcgacgagaaccctagcggcaccacctcgtcgtcgccgccgctgccgccgccgtccaccttgcagtcctcctcctcctcctcgtgttcgacgccggcgccggtgagcccggagaggagatcggcctccgtgccgccggcaggcaggccgatgcgcagggcgaccgcggcgtcgatgtccgccgttgtcccggcgacctccacgtccatcgggtcgccgccgtcgttgtcgtcgccgcagcaggtggggatgcagttgaggtcggcgaagagcggcgcgcgcgcggcggcggcggcgggggtggccgtcgacccggccgccgccccctcctgatcctgcaggtggtggtagcagcagtcgccgtcgtcgtcgtcgtcggagtccgagtcagccgctgcgtcgacgacgccgccgcggcgcgccggcgtgggcgacagggacagcagcggcagcgcttcccgcagcggcggcgacggcggcgcctgatgctgctggtgcaccggcggcgggtggaagaatgcggccggcgggtactgatgatgatgatgcgcgccgacgccgacgccgacgccaccggcggtaggatacagggcagcgtaaggcggcggcagcggcggagggaggtgagcggcggcggcggcggcggcgggcgcggtggggaaggagctagccgaggtgcagtagtagtagtaagggttcttgaagaagctagtgtaggggtcttccat

SEQ ID NO: 22498 - DNA, 494 bp, Oryza sativa
  Clone ID: TF_uC-osroM202007h05b1
tttcaccatcccagccgtcctcctcctcctccggcaagcttctaaaccctagccgcaacgcaaaccctccactcctcctctccccttagcccccccctaacgccgccgcaaattaaccgacgtcgacgatgatgcagactgccgggcgccgccgccaccgatgggtcaaggagtgggttccgcaggatctggtcgtcgccggtggcccatgcgcgctctacaaatgggtgcgagaggataggttgtcagctctcaaatccagggacaaggaacaagaagcagaactggcaaaacctgaaccaaccaccgaggttctcttcctgtgcagctatgagggctgcgggaaaacttttgttgatgcaggggctcttaggaaacatgctcatgttcacggggagaggcagtatgcgtgtcactatgccggttgcgacaagaaatttttagacagctctaagctgaagaggcattttcttattcatacaggagagaagaac

SEQ ID NO: 22499 - DNA, 1530 bp, Oryza sativa
  Clone ID: TF_OsC3878_1
cacattaagaagaaattaatcaaataaatgtataagctacaaagctagtactaattaatatacataaccatgcaagagcatgagataaagagacacgtacaaacatacaacaaatttatcaactagaaaaactaaacgaatcaagtttacattgcaacatacatacacatatccatagtctaatcaatgaaacctcgcactatcttgtacgatttgttttgttttttaaaaaatgtgacgacaaagaacaccggcggatgggaacggctacggcaactcgcacaatcttatacggtccattttttttaaaaaagtatgacgatatagatcaccggacagacgggaacgacgactacggcaactcgcacaatcctgtacggttcgtttaaaagtaaaaatatgacgatgcggatatcaccgggtgctgcgtcaccgttggaagcttatgatgcggtctttgtcggcgggggtggtggcggcggcggcggcggattcggcgacggggaggtggtgggcaccgaaggagcggacgtggtcgttgagggagcgcttgtgcttgaagtcggagccgcaggcgcagaaccagcgcttgccgcagttcttctcgtgcgtgcgccagtcgcccttgacggcgaagggcttggcgcagcggcggcagcggaagggcttggcgccgtgcttgcgcttgtagtgcgtctgcagggtgcggaagtccttgagcggccgcgccctcgggtgggcgacgttgttcttgcaccccgccgcgcagcagtagcacggcagcttcagcatcgccagtgtctgcgtccccttgagcgactccgggcccttgcggtactcccgcccgtgcccccacatgtgcatctgcatgttgttgtatctgttgaaggttttgttacagacatggcagatgaactgcaccgggccgacgaggatctgcgccggcgtcgggatccaataccggctgctcatcgccacgccgctctccgccccgaccccgccgaacatatcccccacggcggtgatgctgctcgacccttccaccgacgccaccgcctcgccgtactgctcttcatccccctccaccttgcaaccgccatgcataggcttccactcgtccatctcctcctcccctacgtcgtcgtcatcctcctcctcatcgtcctcctccatggtgacctcctgagcgctagatcctgtaaccggcaagccgatattcaactccacgccaggctccactaccccggctgcgtgtgcactgctcatgatctcttctttcacagggtgctcatgcctcttcgaattcccctcctcgagcatgctgagcagcggcaaacaagtcataccgctcttatgatcttcttgaatttcacctccgccatcttcaccaggtactactgtttcttgatccctggaagccatcgaggacgacgaggagaaagacgacgaccacgacgaggatgacgccggccgcggcggtggcttgagccactcgaagaaaggcgaggcggcgacgacctcaccttccat

SEQ ID NO: 22500 - DNA, 1465 bp, Oryza sativa
  Clone ID: TF_OsC337334_1
ccgcgcggcgcagccggagagcacgtgcagagagatggccgtcaactccggcgatcgcgcgcgcgcgcgcgggcaccacggagacgacgacgaggagggtgtggccgtcgtcggcgaggactacccctactgctctgactcggattccgacgacgacgacgacgtcgaccgctacgtgttccttgcacgccagcccgcgccgccggtggaccgcgacgatgccgaagccgacgccggggcggaaggaacgggttgttgcaaacggaagaggcgcgtcgtcgacgacgacgaccatgatgacggtttctcgccgcgccagccggcgttgctggatggcagcggcggccaagcggcggaggaggaggaggacgccgaggggagctctgatgatgatgacgcaatggcgccgcgtggggaggcaggaggcggcggccgcggccgcggggtcgggaaggtatcacgcaagaaggctcgactcgtcgacctgatcagatcgccattgttgccggccgagctggatggttcggataaggcggcgccgccacctccgcgcggcgtgtgtcccaagaagatcgcggtggtggtgcaggcgaagaacaggaagcgccgcaggttcgtcgacggtggcgaggagcaggagccgcagccgcagccgccggtgcgcggcaagagaagcagaggccctgacctcgaggcgagcgagggtttgcaaacggcttcggcggcggcggcggcggcggcggcagaggcggcggagagagcttccaagcgcttcgtctgcagcatatgcgggaggtgcttcggcagccaccaggcgcttggcgggcatgtcctcggccacaagaagaaagccaagaacgccgccattgccgccgcagcgcgcgacgccacgacgacggcggtcacggaggccgtggctccagcaagccaaaggcaaagcttcttcgccgccgacatcaacggacaagacgagcgtggatgcgatggcgccgagggcagccgctacgacgacgacgaggagaagagccccgtcgtcgttgacgacgttgcagcatgccatgacgcggacgtcgacgaaagccgcggtcacggtaaggccgagtcggcctctgccattgatgccggcggggacgcgggcaacaacaaggtcgcccatggtgacggcgaggagaacgacaagatcgccggcgtcgtcgttgcatcaagccacgacggcgatagcgacgtgggcaagatgaagatcgtgcagcacaagtgcgacgagtgcggcaaggtgtgcctcacggggcaggcgcttggcgggcacatgagcaagcaccggcggacgcgaccggcggccaacggcggcgaggggcctgcaactgcaacggtggcggacgggggagcccaaactgttcggctgatcggcgacgatgtttgcttgcagagagcggtggcaatcgctgggtttcactcggctcagtaa

SEQ ID NO: 22501 - DNA, 550 bp, Oryza sativa
  Clone ID: TF_rsiceg_8849.y1.abd
gcacgaggggcttcccctcaacacattctgcgcactcttcgatatcctcagccagttacggtgcggacggttactacggtggagagggctctgtgactgattacagttccgcctctgagtcagttgacctcacacattctcgcactcttcctcgacctagtgctcttctaggtgccaacatgccacctgcgccccagtccatgatgggtcaggtcagctccaaggtgtcatcaagctcccagaagaaacacaaatgcaagatttgcgataagcgtttcactcgtcccagttctctccaaacacacatgtatagtcacactggagagaagccttttgcgtgcgaggttgagggatgtggccgccacttctccgttgtgtccaacttgaggagacaccgcaaagtgcacaagaatgacggaggtgcagatcatccatcaccagaagatgcataagctgcctaagctgcctgagaggtcgattcctcaccctctctagacatttcgtaactggattctctacgtcatggtagttatacctttatcctcttgca

SEQ ID NO: 22502 - DNA, 486 bp, Oryza sativa
  Clone ID: TF_OsC48690_4
gacagatatgacggccgccctgcaagcgctgctcgacccgacggcgctgtccttgggcctgcccacgccggcgatcaacaaggaggagtacctcgccatctgcctcgccgcgctcgcctgcacgcgggcggggaaggccctggtgggagtgggaggccagcagcaggtgcaggcctgcaataagtggctgtgcccagcgcccgcggcgcctgaggagctccgcttccggtgcaccgtctgcgggaaggccttcgcctcgtaccaggcgctcggcggacacaagtgcagccaccggaagccgccttccccgggagaccactacggcgccgccgccgcggcgcagcagctggcatccgctggtgactcgaaggaggactcggcgtcgtcagcggccgggagcactggcccgcaccggtgcaccatctgcaggaggagcttcgcgacggggcaggcgctcggtggccacaagcgctgccactactggga

SEQ ID NO: 22503 - DNA, 2411 bp, Oryza sativa
  unsure (1)..(2411): unsure at all n locations
  Clone ID: TF_OsC57972_1
gcctttgcggaggcgagaggcggaacacgaggaggccaccagaaaattcctccctcccccagggaggcgaggcgaagcggagctctcctcccaaattccccaaccctccaccgcctccaccgccaccgccatgcgcatccgccgctacgccgcgcgcctcctcgcctcctccaccgccaccgccccctcctccctcccgccgccccccgccgcctccgcggcctggtgccacgccgccgcggacgattgcgccatctgcgacctcacccgctccgcctccccgcaggtggtggcgccggacgcaatcaagcagaaggggcacattgccggccgggcgctggaacccgagctcaggagcgatccgcgcgtcggactagccgaacgaactcctgttccggaagatcaagggcgcgatatagatgacggtcctcccgcgaaaagatctctcacgtttactgatgctgcggcgaggctagaaggttcgggaaatgttggtgctggagttgctactgaaccagcagctagactaggagcccccgttgctaatggagctgttagtgggcaggaggatagagcagcaacttgtcttgcggatgaatctgctgcggagctgattgctaccggggtaacttctctcgttaccggagcaaccgctgaaccagaggttttaaaaggggcttcatttgctaatacaaatgttaccgagccaagagtttcggagagagttcctcttgtgcgtgaagctgcaactgagccagaagctgaagtctctatgcgagaagttacagaaggagctctccctgatggtgaaggtgctgcaaagttggaaattacaggggggctttctcgagaatctgctgacaaaatggaagttacaaagggaatttctcttgttactgaagcttctgctgattcagaacttgcacagagagttcctactgaaccaggagttgaactctctctgccggaagttacagagagagttcctgttgtgactgaagatttcactgagctaggagatacattcagtggcctacatattacagggttcgcttccctggataatgaaggttccgtggaacaagaagtcacaggaagtggttctcttgtaaatgaagctacagagatggaagttaaggaaggaacctgtatcttcaccagagttgccacagagctgggagatactggtagagtttctgcttgtagtggagatggtgacattgctttagatgagccacgacctcctgattgtgtttcggaggttgccaatgtgaatgttggaaatgcaggagaggctgttgcgagcaaagtgcagccttttagagacaatgcagaaagtgttggtggttctattaattcaacaggcaatggccatgttagctccaaaagtccaactgcagatgaagcagcaccacctggtggatgtactgatacacccagtgtttcatgtttatcagacattgtggctagaagcatcggtaagtcagggagaacagatatcatatgttatgttaggcgcaggggtaaaaggaagctggaaatggtggaggtaaaggaagaaaatgttgaaatggatgacagtgctatctgtgatcaatatgatgataaagtggcatcagaaagaactggtccttgcgagagtgtgacgtcaactgctgtatctgtagagattaaaattgctgacataaagagagagcttgaagataattcaactgctagcaagggtaaaaagaagagggccaaaaggtttcaatgtgaaatagattattgccgcatgacattcaagaaccgagctgagctttctgttcataaaaagaacacatgcacggtcaagtcatgcggcagacatttcagatcccacaagtatctgaggcgccaccagagcattcacaatgatgatatgccatacaagtgtccatgggagggttgcagtatggctttcaagtggtcatgggatcggggtgagcatttccaagtccatgctggcaaaagaccttataaatgcacaacacctgggtgcagcaagatatacaagtttgtttcggacttcacccggcataagaggaggtgcaaacctcagaggtaaaagcttgtgtgatactacagatttaggataggagtaaaaatcttgtacttgctactgtagatgttttttttatttatttgctggatgatcggtgttgttctagcgacctatagccggattgcttgttactttgttgagaaaattttacaatctgtagttcggcaaattttnaatgcgtgtttctcnaatatcgttntacattntaaaaatgctgcttcataatatccgagatgtttttccggtgcngtntntntntaaaaaaaaaaaaaaaaaaaaaaaaaaaaaaaaaaaaaaaaaaaaaaaaaaaaaaaaaaaaaaaaaaaaa

SEQ ID NO: 22504 - DNA, 2130 bp, Oryza sativa
  Clone ID: TF_OsC78077_1
gctcatgcgaacaacatatatgcaattgcaaacgcatggaaataatgtaacagtatatatgtatgtactgatcaattcgcagatcaatcactccttgtcgttatcatcagcacccccgcgagacgaggagccaatgccgacttgcagccacggtgtcgtctcccctgccatgctcacgtccttgagatcgctaagcctcgctctcttgacggtggtgctgtccgcctcgtcctctgctgcggcggtgcttaacccgaccgcgtcgttggcgttctggctgccggttgtcgcggtagccttgttccgttggctgggtatcgccggcgacgatgggatgtataccggtggtggcgcgtcgagatgaaacgagctgccgccgaccttcggacggactgttgcggccgaggccagcagtggcgggttcgccgcgatgctgaggtcgagagcgggctccggtgcgtccaacattggccggaacgagagcgggacaaggtcgtcggctaggggtgggactgaggcggtgtgatccgccgaacttgacgtcagccagtggcaccgtttgtggcctccaagcgcctgcccggaggtgaacagtcgatggcagaccgagcattcgtgcatcttgcccttcttcttcaacggtgcagcggcgagcgcggcgaccggcggttctatgggcacgatggccatcgacagttctgccgcggcatcgctcgtgccggcgtttccatcaccgtcgatgcttgcgtgcacgttcctcctggcatcagaagtggccttggcgggattgtcctcgctccgatcagcgacctctgcatggtgtgatggctcagccacctctggcggttgctctccagcttggcagcgaagcagcccttcaccttcttgtggcttcttgcacgccttgcactcgaacatgcctcgaggcacggtcgagacatactgtggcgccggcgccggcgggggaagcgccatcactgtatccagtacatacgtcgtcggctccatgaacgtgatcagtctcttatgttccttactcgcggaagaagatgaccgttgttctgcttcagtgacgcctgcctgatctaccttggacgacgagagcatgaccaggcaattggccaggtcctcctcctcgccggcagcgcacgctgagggtgtcggtgacaaatcgactcctgtgcccttgcagcgacgcgagcgcttccctttcaaccaaccggcggccggtgcagaatcctcttcgccgtcggcctcgggcgaaggcgaccacggttgcagcgagtgatccacgtcgtcctcgtcgtcgtcgtcctcgccggagctgcacttgccgtgctcgaggaaatgctcccacgacgtgaactccttcccgcagttcttgcacacctggcggctcctcgtgacccggttaggattggtgcggagctcgtagacgtgtgtcgctgcccctgacgacgacgggccgcccgcgttccaaggatcatctgccccgccgcgcgcacgccgcacggcctcatcgccgagcgaatcgtcgtcgtcgtcgtcgtcatcatcggcacccaacccatcgccgtcgccgacgccgtgggccctcatgtgcccgcctagggcgcttccgcacgtgaaccccttgttgcagactctgcagaagtgcttgtaccccgacgcctgcgccgccgtcggcggcggtgcccgaggtgatgacggcgacggctgcatgatcgcagcaatgccgcgagttctcctgaacgtggctcctttgacaaggtctttatcccacgtaacattgacgtggcgcttatgtggcaatttgattcgccccacccaacctcttgcacccaccagatccgcgcgccaatacatccactccccctcactatagccaacctgtcgaaatctagggctcccaaattttcccctctctcctcttctctttcctacccatgttttgtttggtctttggaagtaacagagagacaacaaatgaagaagaaaaccggcggaatccacttctagtctacgcacttgggggtcataatgcggaagagcaccacgaccacaagaaccgtggtggccttggaggcacggtcgaagagggaaggcaccggtgaggtcgccgcccaccat

SEQ ID NO: 22505 - DNA, 2537 bp, Oryza sativa
  Clone ID: TF_OsC2514_1
tattgttttaatttattaatcacgagaacaatatttttttctctagagggttaactgaatgactgaaagtgtacaagaactagaaaagatcaggagggtaattaagtctcattatctcccacatacatataaattgtctgtcagaatagaaagaagtagatagttaaatctcctaacagttataccttgatcaaatgcaattaacccaaatacatttaacatgatctatttatttaaataaattgaaacaatactgtctaccatatttagcatagtacttacctcgtgcaacatgtaaactacagcacaagtcgtttgcttcctggttcaaatagctacatcatgcaatagattgagtttatttaaagatctattgcgtcaccatacttggtgctcagattcggctcggcattagccctggcctgacccttttgcacggaggcacgcaagaacacctctcacatgcgtcacgagtctccgcattctctggcacccgccaagtacagaacgccttccgtcctgggttagtgttgatgcgatcggtgccgcgcccctagcgctgtcagagctcattgcatcctgcctccgttgaaggacgacgacgccgacttcatctcggcctccaaggggccatgcatgtcgctgccgccaccgccatggtgctcccctctcgccatcgacatccccctcacgaaaccgccgccgccgacgccgaggaagtcacgcgtcacgtcgccgtcgccgccgccgccgccgccgcgctgcaggctgaacttcacctcgtgctggtccatgtcgtacagcctcgggtcaatcatgctgccactcccaaacatgccctggtggtcggcgttgccaccgccggcgagcgagttcatcaggctctggaggtgcatctgcccctggtcgaccatggtcgtcccgcggccgtgcgggatggacgacggcgccgacgagccggcgaagccgccgccgaacacggacgcgccggcgccgttcgcgctcgacgtgctcgagcccatctgcgccgccttctggagcagcgcggtcgccgacatctgcggcagcatcatggcctgatcattcgcgtacatcccggcaggagaaacctggtggtggtcgccgccggagaagttcccaccggcgccgaacagcgccgccgccgatgtctctgaaccgccgccgccgccgccaccaccccctccttcgctgaactggtcggtgttcgtcatctgtccctggctcgcgtggccatggctggaagtacccgagctgttcgcgctgttggcgatgtagccgaggttgtagagacccggacccgacggcgacggcccgccggtgccattcccttggaggtcagggagctgcatgaggccatggaacggcttaccctgcaagaatccgtgcggaccactgccgtcgccgccgtcgccgaacccctgcggcgccgcgccgaggaggaacggcgccggaggctgctgctgcggcggcggcaggggccggaacgcggaggcgctggacgacgacaggaggtgctcgaggcgtgcagccatggcgccaccgccgctgccgccgaagcggaggaggtccggggaggcgccgtgatggtggtggtggtggccgtggtcctggagggtggaggcgaggtgggagccgacctgggagaggctgagcgccatgttggcggcgccggcggagccgtagaggtggccggcggcggcgggtggcagccgctcgccctcgggcccccctcgggtcgcctcccgcgaccccgccccgccctcaccaccgagccgacgggccccccgccttcctgcggccccccccccctccctccctgccctgcccgccctggcgctctcctgggcgagggcgtcgcagaaggcgctgtgggtgatgaagctgtccctccgggagaagagggtgccgcagtcgcagcggtactcgcgggtgccgcagatcttggagtgggccttccagtcggactggacggcgtagcgcttggagcacttgtcgcacttccacttcttctcgccgtgcttgcggcagaagtgcttcttgatgccggtgaggtcgccgagggcgcgggaggggtcgtggtggacgcacgtcggctccgggcacaggtacacccggcggctcaccgcctccagcgggttcttctgcttcagcttccacggcaggttgtgcccgcgccggtgcagctgcaggttctgctcccgctggaaccccttgttgcacacctcgcacacgaaccggttcgtcgccagcagcgtcttcggcgacagcgctatcacctccgcgtccgggtctggtaaggttctcttcttcttcgctggtggcgccgccacggccgcttgaccggccgccgaccctgccgcagaagccgccgccgcggcgttggatggcgccataggtggctggtggtggtggtgttgctgctgctgggcaaatagcggcttaatctggtcctcatggtcgccatccctaattccaaacaacgccgccacagctgccgctgatgagttggatgccat

SEQ ID NO: 22506 - DNA, 1381 bp, Oryza sativa
  Clone ID: TF_OsC46145_1
cttttttttttttttttgttttctgtgatttgtccttttgaatttgattaatgggagcagcccaacattaccaacctgcataattcagaaggaaggggggtaattctcaattctgaccaactacccagccttattttgaatattgtacatgtatgcaaaactataacccaaaagctaagattttgtaaatcatatgcacaagcactggatgaaaaaacgactgatctgagcagctcattcttcgtcctcagtctcctcatcgtcgtcgctgctagcagctctgtacctcgccccgtccccaacattatctccctcttcctcagtctcctcgctatcgtcctcgtacagcacattcctcggccactggtgctcttcgacaacactaacaggaggttggtatggctctgtgtaacccctgcgcttagggaccttgggcagtggcatcttggccgtcaaggagggcttgcttcttcgcttcgacatcttcgaagaggcggcttgagcaccggcatcctggtagtgattagggtgctctttcttcagatggaggttaagtttgtactcatgaatgtatgccttggcacaaccatcataaggacagacgtatgggcgatcagctgagggagtgggtggagctgctgacggtttcggtgtgtgactattatgggagtggtctgctagaccactgcggtttgttgcagacccacctggattctggagaccacccttttcatgctgttgcttgatatgagcccttaattttgattcctgtgtaaaccttcgagcacattctgggtacttgcacacatgatagttatccacagaatgtgttttcatgtgtgcctttaaattaaaatccaatgagaaagccaaaacctttccacagccttcatgagggcagacaaagttcttctctcctgtatgaataagaaaatgcctcttcagcttagagctgtctaaaaatttcttgtcgcaaccggcatagtgacacacatactgcctctccccgtgaacatgagcatgtttcctaagagcccctgcatcaacaaaagttttcccgcagccctcatagctgcacaggaagagaacctcggtggttggttcaggttttgccagttctgcttcttgttccttgtccctggatttgagagctgacaacctatcctctcccatggaattcaagcagccggcaactgcaagggatcccatcagatcctgcggaacccactccttgacccatcggtggcggcggcgcccggcagtctgcatcatcgtcgacgtcggttaatttgcggcggcgttaggggggggggggctaaggggagaggaggagtggagggtttgcgttgcggctagggttgagaagcttgggggaggagga

SEQ ID NO: 22507 - DNA, 1870 bp, Oryza sativa
  Clone ID: TF_OsC3319_3
ctacatgatgcccatgctgttagcgtgctgtaggcgacgccgcgtggcgtcgacgacgtcgaggggatcgtcggcgtcgccgccctcggtgacgacggaggagacgtagctgcaggcgacgtcggagctcatggcggccggtagtggcgcccccgccgccgcggcgcggaacttgtggcggcagctgaagcaggtgatctggagcagcgtggcgttgacctgccgcacggcgtggtcgcggagcgcgtgggcgcggctcagctccacctgcgcctggtgccgcattcgcctggcggtcgccagctcctgctcggcgagctccacctgccgcctcgcctgcgcgcgggcctcgccggccgcctccttctccgccatcgcctgccgcagctgctcccgcgcctgctccttcgcggtggccgcggccgacgcctcgtcgcttgtcccagccgcgcccatgacctcgtcacggccgatggagagctgcagctgcgtggaggcgtcgttacactgggagacacccgtcgggtgatgctgatgcgccgccgcgtagaagcacgcccccatcccgcccggagcggcggcggcgccacccgcgttgaacggcggcatgagctggagctcgaggttgtgcgcgccagcgcccccgcggtaatgatcgtacgacggcggcggcggcgacggcgccatgtcgaaccggccgcggaaggcggcggccttggggctcggcatcgagggcgccccggccccgggccaggcgacggggctggcaaccacgtcgctggacgggctggtgctcgacgcggtccgcgacagcgacgccgccgccggcgcctgcaggtccagctgcttctcctgctctaacaccgctacgccgccgcacgccgccgtcgacacgttccctccctccgccaccgccgccgcctgcccgcggctggcattgcacgtgtcctggtgctcgatgaagctctccacccgggagaagacgcggccgcagtcgcaggagtggccgcgggtgccgcaggtcttgaggtgggccttgtagtcggagtggacggcgtaggccttggagcagcgggcgcacgcccactggcggtggccgctgtgcttgcggcggaagtgcttcttgatgccgacgaggtcgccgagcgcgtgggacgggtcgtggtggaggcacgtcggctccgggcacacgaacacccgcttcctcgccgcctcgccggcctcccgcttcagcagtttccacggcaccttgtgccgccgccggtgcatctgcaggttctggtctcgctggaacccctggttgcagatctcgcacacgtaccggtccgactccagcagcgtcctcggcgacagcgacaccacctccgcgtccgggtctggcgtgccggctggccgtcgcttcttcttcgccgagccggcggaggcggtggcgatctgcagcgaccggaacggctccggcgtggtcgcctcgtccggcggcggcccggccgtcgtcggggcgcaagaacccaacatggcggcacaggaagaggcaaaataatccctcttttttttcctgttcttgtctgatcacaaactctcagacgatgtgaacagaatgcattgcactcgttcgttctatatagaggacgatgaagaacaacaagagatcgataggcaaaacaataaactggagggaatgggagtactataatatactactcctaccaccatgagcttgcaaggaatcaacaagatgtgagagagggaagaaggaagaaagggtcttggagttggcttttgtgggctgctacagagacaactccaaaggaggagagagagagagagagagagaggaagcagctttccaccggctttaggttttagcagc

SEQ ID NO: 22508 - DNA, 1188 bp, Oryza sativa
  Clone ID: TF_OsC3878_5
tcaccctactcgcgaagcggaggcggaggcgtggtcgaggtcggaggaggggtcgtcatcggcgtcgaggtcgtcgaaggagtcgatgccgcaggcggcgtggccgcggccgaaggcgcggatgtggtccttgagggagcgcttgtgcttgaagtcggagccgcaggcgcagtaccagagcttgccgcagttcttctcgtgggtgcgccagtcgccgcggacggcgaacgccttgccgcacttgcggcacatgaagggcttgatcccgtgcttccgcttgtagtgcgtctgcagcgtccggaagtccttgagcggccgcgcccgcgggtggtcgatgttgttccggcaccccgccgcgcagcagtagcacggcagccgcagcatcgccgtcggctgcgtcccccgcagcgactccggccccttcctgtactgcgacccgtgcccccacatatgcatctgcatgttgttgtatcggttgaaggtcttgtagcagacggggcaggagaactgggtagggccaatgaggatctgggacggtgtggggatccagtactgccccttggtcagcttccctatccctatggacgcgcaacccagcggcagcgtcgccgtcgccgccgccgccgccgcctcgtcttcatcctcctcctctcctccttcctcctccacttgcatcctgctgcttcctccacctgctgccgatgcttctgctgctgctgctgctgcagcttggttgccggcggcggcggcggcgtcggaggggctcgggctcgggaggccgatgtgcagggccacggtcacctccgccgcctgatcatcggctgctgctgctgctgatggtgattctcgtttgtcgtcgttgttgctgcaagaagcggcgccgccgccgccatggctgttcttttcttggccttgcttgtgatggtggtgatgatcttgatcatggcggcggtggtggtgatcgtcgtcgtgggtggtggagggagtgaggctgaggagggggagggcttccctgatcggaggggaggaagggggaggtggtgggtggaggtaggaggagtagaggccggagaaggaggcggcgtagggcggaggcggcggcggcggcggcggagggaagtggagggggtggtgggagcggtggtggtggtggtagcctctcaagaagttggtgtagggatctcccat

SEQ ID NO: 22509 - DNA, 1841 bp, Oryza sativa
  Clone ID: TF_OsC2514_4
gaacaacaaaagaaactcacttgtaacttcgtactaagctaaataaacaaaagaacgacgttggtcaaaggaaacaaacaaaagttggaagatactgctaaattgctaactgaacctggctgcttccactattttcaccgtcttacttcgtgctgcatgtgtcgaattcacagtggtttgctacttggtgctaattgctaccagacgctagctagctagtgctattacaggattggtgagctactcgggttcctctcccacggatttgcctggccgccatgggcggcgccgaaggtctccgcggcgacggtggcactcccggccaagctgacagcgccgccgatgggttggatgaatgtcgggaagcccctgcttgtcgacgcgcctgtcgggctcactccaagccccaagaaatctagtgttgccggcttggcactgaacagtgtggactgacccatcatgagctccggcaagctcaccggaccgcctgtcgcgtcgtatggtaacccgaggccgagcccggaggacagcattggggatggctccggctgtaaccgcggcggccattcgggcagcgaactcgccgggagtggcacttgcatggtttcttggtggtgatggtggtggtgctgttgctgctgccctgacgacgaaggcggcgccgacgatgacgatgacatgtcgaggcccacgcagcggagaaaggacgagctagacgaggtggcgcccatctgcgcggccttctgaagcaacgccgtggcggacatgtgcggcgacggggacggcggtggcggcggagcgaactgctgccggtcagctggtacaggcgccgtaaacagcgacgacgacgcgttgggcgcgaggcacagcgccggaggcttggcaggcaccgcgcgctcctgatggccacccgctccaactccgatggggtccgcgtactgcggcgcctgggccaccgacggcggtgcaaacatgctgctaaggaggctttgcgacgtcggcgccacgccgctactgctgctgctgacacaatcattaggagcggcaaccggcggcggcggaggagcagtaactggcggcggcgccggcgccggcgccggcgtggcgaactgatccagtgcagcatcccgatctcgttgctccggttgcgccgcgggagccggagctgcggccggaggaggtggcggtgctggcgccggcaccggcgcgggtggtggtagaggcgcttgcggcggcggcgcaccggcagaagccgaggtcccgtcctcgtcggccggcggcggcggcgccgcgcgcgccttggcgctctcctcggccagggcgtcgcagaaggcgcggtgggtgatgaagctgtccctccgtgagaataaggtgccgcagtcgcagcggtactcgcgggagccgcaggtcttggtgtgcgccttccagtcggactggacggcgtacttcttggagcacttgtcgcacttccacttcttctcgccgtgcttgcggcagaagtgcttcttgatgccggtgaggtcgccgagcgcccgcgacgggtcgtggtgcacgcacgtcggctccgggcacacgtacacccgcttccgcacctccttcccgctccgctgccgcagcttccacggcaggttgtgcccgcgccggtgcagctgcaggttctggtcgcgctggaaccccttgttgcagatctcgcaaacgaacctgttcgtcgccagcagcgtcttgggcgacagcgcgatcacctccgcatcaggatctgcaccaccacgcgaacgaacgctcgatcggtcaccgtcgccatcgatcatctcgccatcacgcataactctggcattagccat

SEQ ID NO: 22510 - DNA, 1541 bp, Oryza sativa
  Clone ID: TF_OsC154556_1
atggatgcggggggagtggagctctctggcgtgatgcatcggtgtagggtgtgcgggaaggggttctcgtgcggccgctcgctcggtggccacatgcggtcgcatatctcgtttggggaggcggcggcggagctcggcgccaatggcggcgtggttgggtacgggctgagggagaatcccaagaagacgaggcggctgtctgagtttgatggtgatggtgatggtgaggaggtggaggtggaggagggtggcgatggcggcgagctcagggcgtgccgggagtgcggcaagctgttctcgtcgtggcgctcgctgttcgggcacatgcggcgccatgcatccggcggcggagggaggaatcacgacgacgacgacgatgacgacgtggatgtggaggatgagttcggcggcggggaggaggaggagattgtggcgccggcgccggcggcggtgactgtgatcgcggcgccgccgaggcggaggcggcggtcgatgcgcgtggcggcgcccgcgcccgcgcccgcgccgccgcggccggtgctgctgggcgggttcgagaaggaacaggaggacgtcgcgctcggcctcctgatgctctcgcgcgacaccggcgtgtggcgctcgccggtcgcgcgcgcggatagatcatatctagcgtggacgatggcgaggcatcggtggtatgtgcaggcggtggcgctgctggtggtgctgaaggcggcggcagggtctgcggcgccgccgacgacgacgaggagcaggagcagcagcacggtggtggccgggatggtgttctgcgaccagtgcaaggacggcgccagaggcctcttcgactacccgctctacggtgcgcgggtggcgatcgagtgcggcggaggggagagcccggtgacggtgcgggagtgcaacaccaactggttcgggggattctccgtccgcatggagggcacgcccgagatgaaccgctacccctcccaagaaacggctacggctacggctacaactccgacgaggattcagctctgctccagtacggcggcgacgtcgcgaagagcaggaagcgaagggctagctaccactctcccaattccatctcctcgaagaagaagcagcagccgcgcgcggcggcgccggcgaagcggacacggtacgagtgcccggggtgcggcaaggtgttcgcctcctaccaggcgcttggcggccaccgcgcgagccacaagcggatcaacactagctgcagcgcccccaaggtctcccccgccaccgccgcggcggcggcgcccgcgccggagccgagctcggagacgtacgcctcgctgagcaccctctccccctcggcgtcgccgggctcggcggccgccggcattggcgaccgcaaggccaacaacaagtcgtcagcggaggaggagaagttcggcggcgcgtgctcctccgacgagctctacgccgagctggagctggagcagcgctcgccggcggcggccgcggggtttcttgatctcaacttcccgccggcctcatcggaggttggcgtgaactga

SEQ ID NO: 22511 - DNA, 1955 bp, Oryza sativa
  Clone ID: TF_OsC2514_2
atccaccaaatgtactgctctagtgctgtgtttaaatgcagaggcagtggcagctacaggacaagagcaaggaggcgaacgagaacaaacaaatgcaaaagacagcacaggagaagagaggccgtgaacaacaaaagaaactcacttgtaacttcgtactaagctaaataaacaaaagaacgacgttggtcaaaggaaacaaacaaaagttggaagatactgctaaattgctaactgaacctggctgcttccactattttcaccgtcttacttcgtgctgcatgtgtcgaattcacagtggtttgctacttggtgctaattgctaccagttgctagctagctagtgctattacaggattttacttcatctcttggtccagtgagccggccatgcccatcccggcggcgccgccgtgccgcagttgaagccccggcgcgccgccgctcacgccgaggaagtccctcgtgctcagcttgccgtcgtccacgccggggaagccgccgccgacgaacaccgttccggcgccggtgccgcccccggtcgccgagagcgtgttcatcatcagctcccggagctggctctcgttctccgccgtctgagaagcagtgctcctcgacgagctctccccggacatgatgaacccggctgctccggcgggcttaccgttcagagcgccgccgccgccgccgcttccgagacctctgagtagcgagttcacgctgccggcgccgccgctgctcgtcgtcgcgcccatctgtgcggccttctggagaagcgccgtcgccgacatctgcggcggcgggacggtctggtcggacgagctgtacaaggacgagaagccgccgccgccgcccatcatgttcccggagaagatgctccccgagtcggcgttgttaccgctgttgccgtgctcgccgctgccggcgcgggcgccgttcccggcggcgacgccgttgaactgatccgggaagacgagtcgtccctcctggtggtggtggtggtggccgccgttcccgccggagaagtagctcaggttaaggaggccgccgccattgctcccctgctgctccggcagctgcattaggccgtggaacgccggcttgccgtggagcagcgaggtgtgggcctgtccgtcgtcgccgccgccgccgaggtagaacggcgaggaggacgacgacgtcggctgcgcggcgcggaacgcaggggagccggccgcggcggacgacgtggccatgaggtggtcgaactgcgcggcggcgttggcggcggtggtgatggcggaggagtggtcctggaacggttggagctggtgggaggcggccatgccggtgaggccgccgatggccatgccggcgccggcggcggcgtacagggcggcgcccatgggtggcataatcctgccgctctcctgcgccagcgcgtcgcagaaggcgcggtgggtgatgaagctgtccctcctggagaagagggtgccgcagtcgcagcggtactcgcgggtgccgcaggtcttggagtgagccttccagtcggactggacggcgtagcgcttgttgcacttgtcgcacttccacttcttctcgccgtgcttgcgggagtagtgcttcttgatgccggtgaggtcgccgagggctcgcgacgggtcgtggtggacgcaggacggctccgggcacaggtacacccgccgccgcgtctccttggggttcttctgcttcagcttccatggcaggttgtgccctcgccggtgcagctgcaggttctgctccctctggaaccccttgttgcacacctcgcacacgaacttgcttggattcccgggctgattcctcttcttcttgggcggcggcgtggccgcgaccggagcagccgcgttgttctgcaggggaggctgctgctgctgctgctgcatctgcggctcgccgagaccgaagtagtgtgcagacgaggcggctgccat

SEQ ID NO: 22512 - DNA, 1416 bp, Oryza sativa; identical to SEQ ID NO: 13224
  Clone ID: TF_OsC348190_1

SEQ ID NO: 22513 - DNA, 4050 bp, Oryza sativa
  Clone ID: TF_OsC391117_1
atgtcgctgcagccgccggcggtggagccgccggagtggctgcggacgctgcccgtggcgccggagtaccacccgacgctggcggagttcgccgaccccatcgcctacatcctcaggatcgagccggaggcgtcccgctacggcatctgcaagatcgtgcccccgctcccgcggccccccgaggacgacaccttccgccgcctccaggccgccttcgccgccgcggcctcctccaatggcgacccctccccgaccttccccacgcggctccagcaggtcggcctctccgccaggaaccgccgcgccgccagccgccgggtgtgggagagcggggagcgctacaccctggaggcgttccgcgccaaggcggccgagttcgagcccccgaggcacgccgcgccgcccaggaaccccacccacctccagctcgaggccctcttctgggccgcctgcgcctccaggcccttcagcgtcgagtacggcaacgacatgcccggctccggcttcgcctcccccgacgagctccccgacgccgccaatgccaccgacgtcggggagacggagtggaacatgcgggtggcgccccgcgcccgggggtcgctgctccgcgccatggcccgcgacgtggcgggcgtcaccaccccgatgctgtacgtggccatgctctacagctggttcgcctggcacgtggaggaccacgagctccacagcctcaacttcctccacttcggcaaggccaagacctggtacggcgtcccccgcgacgccatgctcgccttcgaggagacggtgcgcgtccacggctacgccgacgacctcaacgccatcagtgagccattatgtgactgcaatagcttgtaaactgtcttatctcctgaggtgcttctttctgctggtgttccctgctgcagattggttcaaaaagcgggagaatttgttatcacattccctggagcttatcattcaggctttagccatggatttaattgtggggaagcatcaaatattgcaactccccattggttacaagtggctaaagaagctgcaatccggagggcttcaactaattgtggtccgatggtgtctcattatcagctgctttatgagctagcactctcattgcgtccaagggagcctaagaatttctattctgttccaagaagctcacgtttaagggacaagaataagaatgaaggtgatataatggtcaaagaaaattttgttggaagtgtaaccgaaaacaacaatttgcttagcgcccttctggataagaattcttgtataattgttccaaacgctgatttcttcgttccatcctttcctgttgcactggaatctgaagttactgttaaacaaaggtttacagctggtccctgcagtattagccagcaaggagcagaaaatatggctgctgatcatgtggctgtagacaaggttacagagattcaggacatgagtggatccttatatccttgtgaaaccagtcttgtgggctgtagcaatagaaaactttatgaaacaaaatatggccaacgggatgctgctgctttgtgcttatctacttcagagattcagagcagaggaattgatacagcaagatcacatccagcaggcgggatcttagatcaaggacggttgccatgtgtacagtgcggaatactaagctttgcatgtgtagccatcattcaacctagagaagcagcagtacagtttatcatgtctaaagagtgcatctcatcgagtgcaaaacaaggaggaattggtgcatctgatgatacctcaaactggattgaccagagtcatgagattagtcctccaccaggtccagcatctggaacagatgataatgtaaagcatgccgtaagtttggcccatgtctctgatcggtgtagagaactatatgccagcaatacagatggatgcacctctgctcttgggcttctagcttctgcatatgactcatcagactctgatgatgaaacaactgaggatgtttcaaaacatagcaagaaaaatgattcagtaaaccaaagcacggatcctcaaatcttggaaacatcagctagctgttccagtacagttcagtgtcaaaagacaaattcacacttgcatgaagaggaatgtgaggcaagagccacatcattgatgaaacctgtaagccataatagtaggcccattagtcagtctaacagggatacagatatcgaccattttatagaactgggaaagtcaggaacacagtgttcaggttatcttgatttggttgatgatctaactacatcagttttaaaatcctcttcagatacttgtgtaagtgcagctaaagcctcaatggatccagatgttttgaccatgctcagagaaaaaaaaacatgtgtttacaactacatgagcaactacaccaagggcataaactgcaaataccctagagcagagtcagcagcaaaagtcatagcagaagaacttggtatcaagcatgattggaaagatatcactttcaaagaagcaactgaagaggacgttaaaaagattcagttggctttacaggatgaagatgctgaacccactggcagtgactgggcagtcaaaatgggtatcaacatatattacagtgccaaacagagcaaatcaccactttacagcaagcagataccatacaattccatcatttataaggcatttggccaagaaaacccagacagtttgacagattatggatgtcaaaagtcaggctcaacaaagaaaaaggtggctgggtggtggtgtgggaaagtttggatgtcaaatcaagttcatccacttctagctcgtgagcgtgaagaacagaacagtagcgtagtgtacggcaaagcaatgttcactactatttcccatggcaaagtacaagatgaagcgtcaacaagatgcaatacaagcaaccgaaccccatcaagaagaacatcaagaagaaaaaagggggtatctgctgagaaatctaaaccaaaaaacaagagatccactgcttctgatgaagctagtatgctttgcagtggccttggaatgaactctggagttatccatgaccaaactgaaaactctgatgattatgacaaacatggcaatggagatgaaattgaggaaggaacaaatcctcagaaatatcaacaacgtaaattgcaaaacgtgaccaggaaatcaagttctaagaagcggaaggatgagaaaagaacagatagttttcatgaactatatgacgaggataatggtgtggattattggcttaacatgggtagtggagatgatgccacactaggtaactctcgacaacaaagtcctgatccagtgaaagtgaaatctggaggcaaattgcaaggtaagagaaaatctagcaagtacaagtccaatgatgatttgttgaatgaagaaaataagttacaaaagatgaacaaaaaatcaagctctaagaagcaaaagaatgataagataaatagacaacttcaagaagatcaaaccgaagatgaccatatggaccacttagttgacgtagcggttgcagatgaagtcacactagacaatgaggataaaattacagaagacaaaattgatgacgtgaaagtgaaatctagaggaaaatcgcaaaatggtaagagaaaaggcagcaaacatcaggctaccgatggtttgcgcgctggaaataaagtggccaaatttccgtgtgatatagaaggatgtgacatgagcttcagtacccagcaggacttgttattgcataagcgtgacatttgtcctgtcaaaggatgcaagaagaagttcttctgccacaagtacttgcttcagcaccggaaggtgcatatagatgaaaggccacttaagtgtacatggaaggggtgtaagaaggcattcaagtggccatgggcgaggacggagcacatgagagtccatacgggggtaagaccttacgagtgccaggaacctggctgtggtcagacattccgattcgtttcagatttcagccgccacaagagaaagactggccattcctctgataagagaagaaagaacagtacataa

SEQ ID NO: 22514 - DNA, 860 bp, Oryza sativa
  Clone ID: TF_OsC48690_1
gcacgaggctccctgcagctacgtactgtacttgttagcaatcaatcccatcaaatcatccaccggtcgctgctgctgctacgtactatacagcttgattaattaggttttacgagaagccacgagccaaaccctcacgttggaggagtcggagccccaggcgtcgcctcgtccggtccccccatgcaactgccccaaatccctcggcggcggcgccagatccgccgccgccgccgccgtggtcgtcgtcgtggtcgtcgtcgccgccagatccgccgccaccggtgctctctgccgccgagctcgcgccggagaggggaggggagcagccggtgagctccccgccaccagatccgcccgcggcgcctgaggagctccgcttccggtgcaccgtctgcgggaaggccttcgcctcgtaccaggcgctcggcggacacaagtccagccaccggaagccgccttccccgggagaccactacggcgccgccgccgcggcgcagcagctggcatccgctggtgactcgaaggaggactcggcgtcgtcagcggccgggagcactggcccgcaccggtgcaccatctgcaggaggagcttcgcgacggggcaggcgctcggcggccacaagcgctgccactactgggacggcacgtcggtgtccgtctccgtctcggcgtccgcgtcggccgcctcgtcggccgtcacggcttcggcgtcaggttccgggtcgtcgagcgtgaggaactttgacctcaacctgaaaccggtgccggagacggtggccgctggcgtcagaaggtggggagaggaggaggaggtgcagagccctttgccgttcaagaagcgccggctgtcaagccca

SEQ ID NO: 22515 - DNA, 2251 bp, Oryza sativa
  Clone ID: TF_OsC359_7099
ctaacgaccatagatggccttctgagaggatgactctagaaccccacagggtggagagagggcagcccaaccagaagacgacagcacacggagccagacttgccaagcgaacacgcagtcgagcagaatgtggttcgtcatctcaagctcctgagcacaaaaggaacagaccgggtgactatcgatgccacgcttctggagaagatcagtcatccagtagcgcggcctaggagatctgcttagctcctgtgcaggaccaaagattgatgagatgcgggcgtgccagtcagtttgctccggcctaggagatctgcttagctcctgtgcaggtacaaagattgatgagatgcgggcgtgccagtcagtttgatcctgcagccagggcaacgactcccctgccactttcatgtccttgaggtcgccgatcttggctctcttggcgctcgtgctgtccgcttcatcgtcctccgtggtcacgccgccggccgcgtcgttgatgcggctgctcgtcgcggtggtcttgttcacgtggctcccgttgctgtgccctgtccaggactgcaggtacaccgacgccgccgcgttgaggcagagtgcgccgtcgttgagagcggcgacctgctgctgctgctgctgcctggccgcgaccgcttctgccagtgggttcgtcggcacgttaaggtctagtatccgctggtcggtagggtcgaatattgggcgcccgagcgtgagctggtggcacatggcggccatcatggcgtggtcttgggcgacgggctggagcttcgtgagcgggtccgttgcgcccgacgtcagccagtggcatcgcttgtggccgccgagcgcttgccccgacgtgaacacccggtggcagatggagcactcgtgcaccttccccttcttcttgaacggtgagacggcggatggcgccaacggtgtcggcgcgaagtcctcgaccgacatcatcatggccatatccgtcgacgaagctccggcgaggacaatttcacctgcgccaacgccgcttgccgctgccttgccgtcagcatcagcactggcaccgatcgtgtttgcatccatgctgatatcgctggtgatgacatgagaggtggtggccctggtattgtcatgaggagcggctgagacgtgttgctgctgagtctgagtctgactagtctcgttgcggctgctctcgagcttcgcggcgaagcatcctttcaccttcttgtggctggcacggtgcccgccaagagcctggtgcgatgtaaacaccttcttgcatgccttgcactcgaacatgccacgtggcacggtcgagatgtgctgtggcaccacttgcggagcgatcactgtcatctgagccatcatgggggctgccatcgagattggctgcggcaccaagaacctgttcctctcctcgtccttgctacctgatgcgcaggactcttggtccgcgtcgtcgacgacgatggctggctgtgcaacacgcgacgatgatgacgaagaagaagagagcatcacgagaaagttggcgaggtcttcctcttcggtagacggagccggcagctgtagctcggacacggagccggtcccgacggccatcactttagcacggcgcgagcgcttccctttcgaccacccgcccgcagccagtgtgaggtcgtccccctcctcctcctcctcgccgtcgttttcgtcgccaccgtcgtgaagcggcggcgaacggagcgagacgtcgaggcgaccgtcctcctcgtcaaggccgcacctgccatgatccagcaacgtcttccacgacgtgaactccttcccgcagttctcgcatgtcctgcagttccttggccgcccgggattggtccgcagcgcgtacatacgtttcgtcgtcgtcgtcgtcgggctcccggctgcctccgacggctcgccaccaccatcgcacggtgacagcgaatgatcatcatcgcggccgtcgtcgtcgtccatcgtgtcgttgtcgtcgccgatgccgtgcgccctcatgtggccgccgagcgcgcgaccgcacatgaaccccttcttgcacaccttgcagtggtgcctgtacgtcagaggaggaggaggaggctgcggcggcggtggcgggaccagccgcagcgactgcggcggcggcggcggccgatggctccccgcgacgaccatcgccatgatcgcgcgcggtcgatcgacgacgctttatttgggcagtgggcaggcatgcggggccggtgcggtcgag

SEQ ID NO: 22516 - DNA, 1677 bp, Oryza sativa
  Clone ID: TF_OsC78077_2
tcactccttgtcgttatcatcagcacccccgcgagacgaggagccaatgccgacttgcagccacggtgtcgtctcccctgccatgctcacgtccttgagatcgctaagcctcgctctcttgacggtggtgctgtccgcctcgtcctctgctgcggcggtgcttaacccgaccgcgtcgttggcgttctggctgccggttgtcgcggtagccttgttccgttggctgggtatcgccggcgacgatgggatgtataccggtggtggcgcgtcgagatgaaacgagctgccgccgaccttcggacggactgttgcggccgaggccagcagtggcgggttcgccgcgatgctgaggtcgagagcgggctccggtgcgtccaacattggccggaacgagagcgggacaaggtcgtcggctaggggtgggactgaggcggtgtgatccgccgaacttgacgtcagccagtggcaccgtttgtggcctccaagcgcctgcccggaggtgaacagtcgatggcagaccgagcattcgtgcatcttgcccttcttcttcaacggtgcagcggcgagcgcggcgaccggcggttctatgggcacgatggccatcgacagttctgccgcggcatcgctcgtgccggcgtttccatcaccgtcgatgcttgcgtgcacgttcctcctggcatcagaagtggccttggcgggattgtcctcgctccgatcagcgacctctgcatggtgtgatggctcagccacctctgcggcgttgctctccagcttggcagcgaagcagcccttcaccttcttgtggctggcacggtgcccgccgagagcttggtgagaagagaaaaccttcttgcacgccttgcactcgaacatgcctcgaggcacggtcgagacatactgtggcgccggcgccggcgggggaagcgccatcactgtatccagtacatacgtcgtcggctccatgaacgtgatcagtctcttatgttccttactcgcggaagaagatgaccgttgttctgcttcagtgacgcctgcctgatctaccttggacgacgagagcatgaccaggcaattggccaggtcctcctcctcgccggcagcgcacgctgagggtgtcggtgacaaatcgactcctgtgcccttgcagcgacgcgagcgcttccctttcaaccaaccggcggccggtgcagaatcctcttcgccgtcggcctcgggcgaaggcgaccacggttgcagcgagtgatccacgtcgtcctcgtcgtcgtcgtcctcgccggagctgcacttgccgtgctcgaggaaatgctcccacgacgtgaactccttcccgcagttcttgcacacctggcggctcctcgtgacccggttaggattggtgcggagctcgtagacgtgtgtcgctgcccctgacgacgacgggccgcccgcgttccaaggatcatctgccccgccgcgcgcacgccgcacggcctcatcgccgagcgaatcgtcgtcgtcgtcgtcgtcatcatcggcacccaacccatcgccgtcgccgacgccgtgggccctcatgtgcccgcctagggcgcttccgcacgtgaaccccttgttgcagactctgcagaagtgcttgtaccccgacgcctgcgccgccgtcggcggcggtgcccgaggtgatgacggcgacggctgcat

SEQ ID NO: 22517 - DNA, 2160 bp, Oryza sativa; identical to SEQ ID NO: 13431
  Clone ID: TF_OsC198558_1

SEQ ID NO: 22518 - DNA, 1368 bp, Oryza sativa
  Clone ID: TF_OsC135231_2
atggccaccgtggggcagcctgatgccatgagaaggatcaccgttcactacgtgaatccgccgccgatcgccggcgccggagaagcacacgtcgatggcctcgacgacgaggttcttgattatgtgattggtgatgttcttcaggatcaggagggtctgtatcaatcgatattgtatggcaaatacggggatgacatgagaggggcaagaaacactgctcttgcccaatctgatggtttacattactactatcacggagagaacagcagtggtgaagcaacaacctcgagaaattcagaaatcgaccaacagattgagtatgacttggtgttcgctaggcagctgcaggcaatggataatctgacaattgagacacctgcagatgaagatgatgatataagctgcgtaccctctccatctgactctgaaaccgatgaaccggcagaaggcaacaacgaagaggctgccacacaggatgataacgatgatccagacaacatgacatacgagcaaaggcaggcacttgtggaatctgtaggaaatgagaacagaggtttatctgatctgcttatctcctacttggagacatggaagtacaaatcaggctttttcccaaggaaggcaaaccatgataactgtcctatatgtctatccgctttcagacgccgagaaacactcattacattggcttgcaagcatagttaccatgaaggttgtattgctagatggctcaagattgacaaggcctgcccagtttcaaatatgaagtgtttggaccttcctagcgtgtgaggaggcgatcaacaaggctgaccactatgactcgatgagacggcatatagtggttcagcatctgctctcagtattaattaaaaagggaaaccttaactcccaaaaaaaacagagaagggaagaaaaagaaacacaacaacttcggagagcttccggtggacggtgagcccggccaaccgggagggcgcggtcgcggtggccgcggcggccgtggtggccgaggaggcgctagcggcggcggcgggggcgggggcggtggtggtggcggtggcggtggcggcggagccggcgggaaaggagggaaaggcggggccggtgggcacggcggcgccggtggcggtggtggtggtggcggcgggaaaggcaggaaaggcggggccggtgggcacggcggcgccggtggcggtggtggtggtggcggcgggaaaggcaggaaaggcgggcgcggcggggacggtggcagcggcggggccggtgggcgcggaggcgacggtggcagcggcgggcaaggtgggcgcggcggggacggcggcggcgttaggagctgcacaaacagcagagggacccagatgctaa

SEQ ID NO: 22519 - DNA, 3058 bp, Oryza sativa
  Clone ID: TF_OsC13232_1
tcacttccatatttgggtaccaacaattttgttgccccacatgccaccaatcccctgggaactaacaccctttgtgcccatttggttgggcttctcttgattctctaaagaatttggccccggaagctgaaagctctggcaccggtcccggtattcctcaggaagctcttctgcggccagcaagccatcaagcatgccaaagtatactgtcatatctcccaaggatttagagcagattgggcaggtgtagtgactacaggtgtacgcctgaaagcaagctgaatgcatgaaatggccacaaggtagacctttaactgctgcactcgatgtaaataggaagtcgcagcagattgggcaattcatctctagcatcttttctcgacatttatgctctttccattgtatggtcactaactttatcatgacaaaacagccaaaaatctgattctctggatctcggtatgaaggacaacatccaggtaatactgtacatccattgcgatcttctgactgaggttggggcgatttctgctgagcagctatccagcggctggtcatgagattttggattagataagccttcctccttgggtcaagagtagaatcacgagaaacctttcgtatctcagcctcaagctcactctggttcattcggaagatgtccttccaaccaggcttaaacatctgttcactctgatcgaacttttcctggaaatgatcttcttctggatgggaggcatcgcttgaagggccagaagaagtaggtgatctcttccaccattcatttagccattcatcaaacattgtattcttagttacttgcctccatgtgtccagcatattgttctgttcatctagactaagcgctgatgtaacccagggtaacattgactgcagaacctcagctcctgtacttccaattatacggcctacaatcttatcctgctcctctacagaaaaatgtttatcaaatagtggccacaattcaagttcttctctatggacatgattagacagagtaacccggatagacttgcacattccttgaagctttgtcaaaagttcattattctttttggaccaatcgatcctattatatggatgaatgtggttcgctccaactgcatcagcaccaccaagaggatgcttcaaatcagcatgcaattgtgaaagctcaaaaagaatagtggatatatctttaaataattcttcttcctgcttgtggtcaagagtatatgagtggctgacattgtgcagtgtctctttcgattcaagagcaggaaatacaatttcatcttcagcattgctgtgtgctctataaagaccccacagtaaacgaaaccttccgatgaattggcgaagggaagattcatccccatctatgagctttctagattccacatctaagaactccaaatctttgcgaattgccttatgaaatttgaatattgtgtcaattggccttgaaatgttatctgggccagaaaaggctgcatctgtctcccatgaaaaaagacttgaatacaatgaaggagcagaataattgagagacagcgatcggaaggactctgccaaaaacatattctgaagaaaagcttctgcatcctgatcattcagcttcgatacaaaccacggtaaaacacgctccaataacttcaacggtatgacacagagactcttatataaaagttccctttgtttctctgatgaaaaatgaatcctagcttgaggaagtacctttgtttcctcatttttgaagtgcctctcgattttctccattatctgatcagcttgtgaacatagctcagagtaaaaatccactgctgttgatctggctcctgttatttggatttgttcaattaaacatctaaatttattaaaccgccgttcttcttcagcgtgctcctgctcaaaggacacttgatcgttgactgctggaaatataacctgatcctctgcaatactgtggaagatgcacacatccgcaataaattgaagtttcacattaaagtctgatatatccgagaagtccccagattgttggatccttcttgtttcttctactatatcgctcaattcttttcggatagcattgtgccaacacaaaatctcatctattggatgcataacaagctgactataactagattctgcacgctttctctttccagttttaaagtgctcatgtgagcatccatacttgtctgtttgatcaatagcatccttgcatctaacattgctttttgaacaaggactacaaaaatcatgtgatattgttttcactgcttcccctccaatccacgcaaatacaacctgttggagaagtttctcgtccggaactattttatgtaagcagttaagaatatcttggtgctcatcagatgaaacagaagtagcaagccatggaaggaactctgccatcatattgacagggatgctgcataagaattgccagactaaatcagcttgctcttcatgtgaaaacttcttaatgagcagtgggaagacctgctcttcttccttggacatatgttgggttataaacgtttgaattgcacctgtacaggacgcgagttccctccgaagaccatcatcattccgcacatcaagctttaacagagagaacaggtgtgcaaacagatcattttcccccttatgttcaagggaatacgtgcctgctacatttttcactcgaatatcaagtgctggaaagataaccgcgtcctcggcgtcgcagtggtgcctgtagacggagaagaggaagcggcaccgcctctcgagctcccccacgtcgccggaccgctccgtggcgaggcgcacggccgcggcgtgcagcctctccagctccgcgcggatcgccttgtggaagtagacgaatatcagcatcggcgcctcggccgccgaccccgcggcggcggccggtggagaaggcgagcgcggcatcaccgcggcggcgatcgagccctcgtcggccaacggggtcgccatcctcctcctcgtcgtcggcggcggcggaggcggctgctccgcgtgcgcgtctgactcgccggacgcgtgg

SEQ ID NO: 22520 - DNA, 3942 bp, Oryza sativa
  Clone ID: TF_OsC13232_2
cggacaatctatgttaatactgaatcttatgcgtcgaaggcttagggggcaaaaaggaagtgcatgtagcgtccattttgacagcttacactagacctagtagattgcagctaggcttgacaaaaatgaactagctaagggatgaaaaatatggtagctatgctacacaactacacgatgtattgtaagtctatatttacatatgccaaaaacgaagaaagaataattccccactagtttggcgtagttgcaacacacaagagcacgcatgacgcatggatttctttaagttgatgtatatttacaacaatatatatattcaaaaggaatttcgaatatgagagggaaaatctcgcctggttaatctgatgttgaacaatcagctctatcaatcttgataactctagtgttatatgaaccgcagaagccgcatttgtgatacagccaatggaaccgagaccttccttttctttcacaatcgttacaaagtatatcctggcaccggtcccggtattcctcaggaagctcttctgcggccagcaagccatcaagcatgccaaagtatactgtcatatctcccaaggatttagagcagattgggcaggtgtagtgactacaggtgtacgcctgaaagcaagctgaatgcatgaaatggccacaaggtagacctttaactgctgcactcgatgtaaataggaagtcgcagcagattgggcaattcgtctctagcctcttttctcggcatttgtgctctgttaatttcatccccaggcagcaattgcacttcatgcaatggaagaaatcaacaccaagaccatgcacatcatctcctgtgtcgctttctctagtatgatcaggcaacataagtattctttccatcgtatgatcactaattttatcatggcagaatctgcaagtgaacagcttgttgcagcatgcagcaacaagcttgcagttccttttgtagtgctcacaaccaaatatttgcttctcctggtctcgatatgaaggagcacatccagggataccggcaccttcactacactcttctgattttggctctggtagcttctgctgagcagctatccagcgactggtcatgagattttggataagataggccttccgccttgggtcaagtgtaggatctcgtgaaacctttcgcacctcagcctcaagttcactctggttcattcgaaatatgtccttccatccaggcttgaacatctgatcattctggtcaatcttgtcctgtaaatgactatcttctggagcagaggatgcctcttctgaagaatcagatgatgtcggagctcccttccaccactcgtttagccactcgccaaacattgtattcttagtggcctgtttccatgtatccagcatcatgttctgctcttcctgagtaagtgctgaagtaacccagggtagcatcgattggagaacctcagcaccagttgaaccaattatacgacctacaagcttatcctgttcctccacagaaaaatgctcatcaaacaatggccacaactcaagttcttctctatggacatgattagtcaatgcagcccggatagacttgcacattccttgaagctttgtggcaagctcgttgtactttctagtccaatcaatctcatcagaggaattaaaatcgtttttctctgcttcactgacttcaatgtgggggtgggtcaacctctcatgtagctgcgaaagctcagcgagggcatcagatatatctccaaataattgttcttcttgcttgtggtcaagagtgtacgagtgactgacattgtgcaatgtctctcttgattctaaagcaggaaaaacaatttcatcctcagcattactgtgtgccctgtaaagaccccacaataaacggaatcttccaatgaactggcgaagacaagactcatcaccatcaataagctttccagattcaacatctaggtactctaagtccttgcgaattgctttatgaaatttgaatatagtatcgattggccttgatatgccatctgaacaagataaagatgcatctgtctcccaagaaaaaaggcttgaatataatgaaggagcagaagaattgtatgatagagagcgaaatgactttgcagaagccagcgatgaactaatagcaagattgccagtttctactctcaacccaggaatacagcaaggttttttgctacatggacgtgcttcagtgtcatcagtctgagacaagtcacttccattagtaccaggaacagattctgcatcatttcctcgctttcctggcctagaaccattttcagtctgcggatgcagagaagcatctgtattgctacgtgaagcacatggacagaatggccgacatttttccagtccatcaacttcatccaataggcatctcatttctccagatgttaagcataagtactccccagaattggatttgtcctctgaacgagctttgcatgcccaaccagagaaaagggtaaccagtgctgtttccgatgatggtgctgccaagcgcatattttcaagaaaagaagatgcctcctcatcactcagcttggacactaaccatgggagaacacgttctaataacttcagtggcatcacacataaacttttatacagaagttgcctttgcttctcaggagagaaaagcatcctagcttgaggaagcaccttggtttcttcatcacagaagtgtttctcaattgtctccattatctgatcagcatgtgaacacaattcagagtaaaagtctagtgcagttgattttgctcctgctatttggatttgctgaattaaacatctaaaattgttaaaccggcgctcttcttcagcatgctcatgcacaaaggacagctcactatcaactgcaggaaacacaacctgatcctcggcaatactgtggaagatgcacacatctgcaataaactgcagccttgcattgaaagatgatatatcagagaaatttccagattgctgcatccttcttgtctcctctgctatatcaattaactctttacggatagcattgtgccaatacagaatctcatctatgggatgcctttcaacctgaccatcaatagattctgcatactttttgttcccagctttagaatcttcatgtgaagaaatatggttatctgcatgatcaatggaggaggcatccttgcaatcacaggttgcttctgaattagacttggtggaattctctgttacttttctcgttgttttcccttcgatccacgcgaagacaacctgctgaaggagtttctcttcaggtactattttacataagcagctacggatatcttcatgttcatcagatgaaaccgaagacgaaagccaggggaggaactctgccatcatatttacaggaatgttacataagaactgccacactagatcagcttgctcttcatatgaaaatttcttcgtaagcaatggaaagacctgctcttcttctttggacatatgttgggagagacatgtttgaatggcccctgtacaggatgcgagttcccttcgaagactatcatcattttgaatgtccagctgtaacagagcaaacagctggctgaagagatcattttcccctttgtgctcaagagaataggttcctgcgacattcttgactcggatatcaagtgctggaaagataaccgcgtcctcggcgtcgcagtggtgcttgtagatgttgacgaagaagcggcagcgctcggcgagcgcccccacgtcgccggcgcgctccgtggcgaggcgcacggcggccgcgtgcagcccctcgagctccgcgcggatcgccttgtggaagtagaggaatatcagcatcggcgcctccgccgccgaccccgccgccgccgaagccgtaggggacggcgaccgcggcatcaccgccgcgagcgtcccctcccccgccatgggcgtcggcgtcgccat

SEQ ID NO: 22521 - DNA, 2090 bp, Oryza sativa
  Clone ID: TF_OsC4555_1
gttttttgtttcttgtggagcgggggacggaccaccagcctccaggttagtatttttttttttttttttagaagcatatgagaccagacttgtagctctcataacaggttgtaaaatgtaactagtaaagatcttttctgcaccacgacatacaatgtaaaatgtattccagatatgttaaaggcatataacagatgagccttgtgcccacagtttaaaacacgctactctgaatgatcggtcaaaaagacccactgaacgggtacatctggggtgagagtcgcaacgagaagaatgaagtgtatagcattgcgtccttacacgagtaagacagcattgatacagccatcattctctgggttgtttgtaacttgtgcatatttaccccaaacaacttttccagcaggggttaccagaccaagttcactaacgttcacctcaatgatagttccccttgtcaaaacaccaagagtagagtacatttgaccatttgggtttttcttcacagaaattatgtcaaggttgaaagtacatttcagctcagggtgagtaacatgggcctttgtgaaacgaaggccagttggcctaataaaccgttcatactttggtggtttccttgtaaacccaggtccaacaaaggtggccttagtgaccattctcttccactgtttggtttttctcttgccagttcgtaaaactttgaacatttcttcttcagccacaggtctgacctttggcaaaggaacctcccatttgccagccttttccatcctcttttgcttaattgtgttgctgagaaccttggcacgttgtgtctgatcacggtccagcagatatggaggaagagcaccctcttgaacatcatcaaccttctgccgagaagttgactcgtcgtgcattttcagggtcttcttcatctgtgccttctcggcataccgcttcttggcgaacctcttacccttagcaccaagcaactgccgggcatccctggatcgcttgtgcacctcgcgcgccgcccgcttgcgcttgcgctcctcgtagtccaggcgccggccatggcgcttctggtgaagctctatgtgatctccctgcggcatggcggcggcgaaaccctagcgggagctcgagctttgggtgggggaggaggaaagcccggccggctttggtccagtttctaagaatatgcccaagaatgccctgcactgtgactcccagtgttccttagccagacgaacacgttcaacccgctccatctgtattctcttctcccagtactctggacaactatagcttagtagcatgttcagctcatccaagtgtacagcattaggaaagactcctgcctgtcggcacagtgggcactttgatttgcgctcggcagacttcagcccatcaacgatcgtaacggatgcagcagaacagctgcacaagtagcaatatatgtgaccacaggaaagagcaactggatcaaacacggtatccaagcaaatcgaacatgtcaagctaatgtcgacacgcatagagtcaaagaggttgcatgaaattgttggtttgtcatcatcgaatacgagagaacaatccccaaagagctccatagcaccgttgttcttcttgcttcttctcaagttcatgtagaaagccatcagctcacagagccatggggattgaagtatttcaatatgcagactctgggcttgagctttgaattcctgcccttgcttcgagtaatgtatataattattaatataaccattgaggaccgtcttaaatccaaagacaagaacaatgatagatacgttaattctaacaaaaatagtcactgatgccaggtgcaactcgagaagcttcttggccttttcattgaagcagccaataacggctgacatctcattgagaagagatgggaaaaaactcccatcacatacagagcaatggccggggcagcggccggcggaggagccgtcgttctcgtgggattggaggtcagagcggcatttcttgagcaatttcttgagccgcttcagccccacgcccgggagctcctcatccatccccttcatgtacttctcgtacttcttggcaaacttcat

SEQ ID NO: 22522 - DNA, 14410 bp, Oryza sativa
  Clone ID: TF_OsC2965_2
tttttgcatcgcctcaaactggaaccgaatacttcgattttccaaagaatcggcacagtaaaatgcaccgtagctgtacatggactataatgtatatttacaccctcgatttacagccctatagttttacagctaaaaaactaacgtgtctaatattatacatactaatagaaagcgaaagttgtagaaagagaaattaaggcctgaatattttcatcatcctagatacttgcgtccgacaaaatgggcatcgtgaaaccgaacttgagcatcgattacaaagaacatgaccgcatggtattatagtcatgttgacctccgcattcaggcagacacgacatgaccatgctgacttggcaacatcagcttctctaactgctgcctccgctttctcctgctccacgagtagagccacttgagattctttaagctggtcttgcaaggaaagagtagtctgtagaagcgtttcctttgtagcatccatccttacccctgcagctgaaagcatatcgtggactgcctgtaccagctcggttgaagataccttcccatattcaaggccagtagccacatcatctgcagcttcagttcctgtgttgatgggtgagaagccctgctgtccacctgcagctctaccactatccagttgcaatggtgcaggagagagatcagccattgaaacgcttttaaatgagtaaacctgactggaaagtagcatgcaagtttcaccagcagaagtctccactggaaacctgtaaagagcttggccagctgatggccttacatcttcagggaccctgccatatctgagcttttcaccctctttccccgtcttccatgccacaatttctccactatagaatggtcttaaaggaaggaattgaacctggcgagcatcttgggacaacaactctgctcccagggaaccattgtaccttccttcacgttttgaaactccaatgtcagtgcccagacggagtattttaagcacctctttctctgtgccatctgggcatgcaaatactgaagcaatcggcaagatcacgggtgcccctaatctgtaactaacaacaatagcaatagcatcgtgtattgtcaaaaagtttgggggctctgcaactagaatttgacccgtggatttgttcacaaagcaaacacttctgtgctttccattgcttgaccattcaggaaatggaggacgctggctgcttcttgtaacgtcttggagcatggggagtaatagaaagcgagtatggagacgctgaacaaactgcaggttctgtgatatatcctttagtacactttctatctgcgccagattgagtgcttcaaatgaaggaaaatgattggatacaccaatcataacaatccttaacgcatcttgcaacgatttactaagcagcttctcttttattttgtccagagtaacagagcaaatgctattcaccatctttagttcttcttttccatccagttcctctacaatgacatcagaaagcttctttatgcccaacgtgttgcaaatattctggggaagatctgggtgagcaaatcttatcctggatgtatctatgttactcagtaaatgagaaccatatgggtcaatatatacacacgatacagctgataccagcctgcaaccatcgtccggtattactgaatcaaatatgtcttctgatccatctgtggcttggttgacaccagaacacatgaagtctaaaatttccatcacagcgcggagttcatttggattcaggcgttggtaaccacatgctttttgtatatccaaaagaagttcccttgcataagtgtttgtaagggtttcctgcatcccaatttctctgaggatggtgacaaatggaagataaagacttggaagttcaaaagcaaaaggcgacatgttgattgtcagacgagcaaaaagtgatttcactgtgactaagcgagtcccgtttgcaactggtataaaagccagggtctgcaactcatttttctctgaagaagatattgttccccatattttatccaagtattgcaagatccgtagaaaggcatcttccaccgtcattattcctgatgaagttggccagtgtgccagtgtgtcctcaccattgcctctcccaacactctgcaagtgcttcagaactgttgtgaaggcaggaggactccttagtcgaaatgctccccaagaatattcaggagggataattgcttgattggtaagaataggagcagaactccatgctaatggccagtcttttgataaaattgattcactatatgaggcaagtacccttctaccccctctcttcccaccaatacttggaaaacctttttcggcaggaataaatgcgattttgccaatcttttcgcaaaaagaactgtcatacaaagtagcaaaattagcaagaatcacattaacaacagattctgccaaagaccaaagctcaaaaggaatttcgtttttgctgcctgaaaagtctgcctcaaagtcactaggatcttctgaagatgacacaatatcatttcccatggactctatttttgttgcacactgtactatcatatcagcctctgtagatgttcgaagacctgcttttctgagtataacaagccaaccatctgacaagaacctttcagctgggaacttgtgtctctccccagagaatactgaagtaagcaaagcatctgaagggtcaagtaattcccttggtttgaacaactctgtacaaaactcatttgcacttgtcagaaaattagtctctttcaaggtgtttacaacagaagagttcagctgcagatctttccagttagaatacaagtaggctagaatgtcttcttgctcttgagctgatttatttccaaagccaggcaaagcaaaccttactagtatttcttggtcactcaattgttcaacccccaaagcctgaagaaatagatctgcattagctgtactagaaaggcaccgagaatcagcagggtgaaagaatgctgtgggagaaagaatgcaatgatcggaccctgacagactagtgtatgttcctgtaactgttttatacattggaagctctctcaggacatccaattcttctctctgatataagtggttactggacaatctgaactctgagacaaacaatgcaaacagtttatcacagtcttcacttgatagactaagtggcaaaggtaaatggccaccattttttattgcaaccagtttagaagcaataatttgtccaagagtccggtcacgtgaaggaaacaaattgcatattgtaccacactctggaaaagataaatcaaaaactggtatattcaacttgtaaagcagagcaggtaaccatggaaatgctgagttcattgactgaaatgcagtatcaagtatgctgttctgttcagcttctccagtctcatctcctgggtgggcagacgtgtcaactactctagctgcactatctccactatcaggatttgaatcatctgctggtggtacaaatattagatggcattctttcacacggcagagaacaggtctgtctagatatgctggaattaagggccagtcagataaaagtgaaaggtcaccactcattgaactaaatattttccagaagagcctaatccattcaggacttggtccagcagttgatgaattagcattattatcccaaggaatccatggagacttcttctctactgcaaggtgcacccaacgttcatcaaatatgtgcttcaaatggcctgacaacaagtgaggagaaaaacttcttagctttagaggtctatgaataacttgagtggtgagcaatagctccaagaagggcttttgtaaacattgatgatggataaagtgatgcaagaatgggcgcatcaatagctgctgctcctcacttgctatccaaagttcggtagatcccagccttgttagacattttgtcgatgtcggaaacgggactcctttgagctctgtgatgatagatgacagcacattattttcagcagcttgggtcctatgggatgctgagccaccagtcttgctgatatcctcgacaaccccccgaccaaagtcatagagagcttttccaaagtatgtcacaatttcaagcgcgtcacccccagaagcaccctgcctttgtgtatttctatggtaagacacagagctgcttgaagatggcatagaatttgatattgaagaattcattatttcagattgttgattgctaactcgtgattcctcatgtatatgaagatctgagaaacggtatgggtccatatctgagaagcaatattcaagaacatccatatatgtttcaatagatcggagtaaaatggatgaagaagcttttagtagatccctaaccatcttgggcctgatctctcttacattaactccaactgcttgaatttccctaaccagctcccagggtacagaaaatacagggtagtgctctttaatgaaactacagacactagcagatggcagattatcatcatctccactccctgaatgggataagaacataccctcatccactttaacaagattcccaccataaagttgccaaacaggaagatcagccaagcgtacatagaaaggtcttatcacttgctctaccaaggattgccaatctgctttagatgctcttggtgaattcacattagttacagtagagccatacccagtgagtgaagcaggatgctgcttcgatctgggccagaaagagtacaccctatcaccataagcctgtaaaattgtactcaccgagtgtgcagaccttgattcaatagcagaagacagaggatccttcctaagcttttgaaattccaggaccatctcaacatatgaatcacgcacacatagcataagttccttattccatgcctcaaccaatttgtttttatgcatttcaaggtctgacagagatttatcatgtgagctgccaaaaatgtaccgcccaccattatgcctcacaataaaatggcctagagttgtgactggcatgcttatagacccagatagtggtaagggagataatatgcaactggatgcatgtatattggttgatactccatttcgagctatgtgtgccgctactccagcaacaggggttaagttataggcgagataccgcctgtcaagagccatgtttcgtgtttgccctgatccaaggcaaagggcaacaaaccatttgtcaatataattgcagccattgtcaatcacatgcacatcaatagcttgcattttaatagcagcacttgtacttgcaaatattctggatagttgaaattttctccatttcttttctgaaaatggattccttaaagtggctactgatgggtcaacaagtacagagtagttcaaagttggctgagaagctccaccttcccatgttgataaagatacctgaatgattgacctcaagaataggagagtgctggatggattttgtgtaaatcgatcaaaaatatgctttactctattgcaaccagcttcaagttctttcaggcactttgatgataaaggcatacgaataactgtggagtttgctgaagatagtgaagcctcctgtgtaacacgcattggtgtgaactgatcatgaaacctctcgaccaggtcatttcctatcaatgagaagaatctagcggatgaggtagcagtggaagtcgtgccaccagtcaagcccaagggatcaaaaatgtagaaatagccaccagaaagaatactcaaggtatcgcacacaaaataactgctaagaagtccaagtccatagttaagaatgtttcccttcaatttccatggaggaggaagttggaggctgcaaacttcttctctgctcattatcgttccttcaaagacgactgtcaatgaagaaccctggaagtcacctaaactctgctgcagcaaggactgctttggatgatctcgtttatcatagataaggtgcactttcttcgcattgcaatgatcagctagctctataaggtcaaacaaaagaaagtcactctcaccatataaagccagcaactcacttattttagcatattccatgcaaggcaaatccgtcattagctcgttatccagtaatgatgatccacgaagagatcgaaccccaagcctattagctagatcattaccaatactaagatgcacaaagctctttgaagtaggatcagcattcatccagggtgcatcattgtagacaagatttctggcaggtgtcaaaacaccaaatgaatcgggaatcaacaatgaattcaccatcatatcaggtgcttggttatcaggataacaatcaacaaatgcttccaaaacacgatgaacaaaacttagttgctctgtagacaatggctctcctttggcatcgctttgtaaacactgaagtacattcagataatctgctgcatcaaatgtctgcttcacacccaaaaccgacagtaacctcttatattccgacagttcagatggaactgcataaaggtaagggtgatattttacaggtgaatcaaaagcaagtgcctgaggtggcacgaacctatcacctatataaacccatgggtgtccatccagattccgttttagaatgttggtatcggctgtgtcaataatatcttgcaattttgagtagatcagttgaatttccttttgcggaacagcatcattggtactgtcttcagaaaacatcttgagttcatcataagacttggagatctcaactaactgggaagataaaatgtttgcatttggtgggtctaaccaaccaagttttctttgcagatacatggagcaagaatcagcactaagaatccgcatttttgatgaaacaagccacatttgtgattttggccttgttgtgattggaggagccacatgatcttcagatatgaaccatggaagtccttttagcaatggtgcaacatggactggacaccaagatatatttttcagctctgaccaaaattcgtcttctggtagatcatgatcgaagtttgagaacaaagataaaatagtttcttctggatcatacccatccccatcgttttctgcttcaaaacttccatcagtcttagaagcttcctgattgtcatccccatggaaggtttttttatcctccatgtttgaagccttgaattcaagaaaatttagataggtaagtagccttttcccatgctcaagcgcatcatcttgttgcagtgaaactgacctcgcaatgtcaagcaaagtactaaaacccaatttacttttaagtccaaagcttgcaagcagttcaattacttcagtcgtcatgaacttctctgaaggaaagaaggtttctttgtgcagcaacttatgtaactcaggcacacgaggatcataaagtctggagggatgtacccatgcaccactcgctgccaggacgaaaggggtttcatgtaatgcagctctcacagaagtatcattttctgccaatagtttcacatcacggagaattgctgaaacaacagctggttgtgatagaaactcggatattcgaggaagcacgtggtccttgtaaaattcagccttttgaggttccctaatagcaaagtatgataccaaaattgacttctcctttgccgattctgttcttataaaactttcattcaacagatcctcatgaacaccttcaggtttaagccattttctaggacttgtcaggctaacaagctctctagatttataggattcaaatataggaagattcctgattgtattcatatgggaagagttcatgtgatttcctgaaaaccactttgactggaaaataaaactgcgtagctcatgtgtttctgccagtgaaatacccatgaacaattccttgatatcctgaaaattagaagcaacagactgcacagcattcaaaacaccaactgcagtggcttcctgaacaaaatttgccagctgcggatgttctatctgcagatcagatctcagaaagaaacatcccagtttctgaagcaacgagtacatattttcactccacccatcatctattattacatttgaagcattgccaagttgcataagcttgccatctaccagtggtaatataggccattttgcaaaaattgaaagatcttcacatgaatgtcgcaagaaattccagagtgacaccatccattccacacttggctgaccttgatgtccaggagaccaaaataactgcttagcatgctgccattcaggtggcaagatcctaggcaacaactcaaggagaaaattgcatgtgaataagtaaatgtttgaccgtgcagaacaagctatgtcatataacttcttcaaaatggcatccggtaaagagttatcaacaacaagatgtggtatagagtccttcagaagctcaaattccatttgtgaagaaaagaatactctttcaccctccccccggttggtaaatgttgtgaatgatccatttgccaaaggaagaagagctaacccttgcaatttatcaggaaaggaaggatctcccatgtcactcaagcagtactccagaacaagtattgcttcttctctatttctgaagccacgcttccgtcggatcaacaaattcctcagcagatgaggattcaagagatgaactgaaggatatacgttcaagaaactgtcaactatttgtttggatacagataccacaggcaaaccagcttcagaaagaacttctgccagttcaatggcctttgaaaaactgaaatcaggaaagatagcttgccttgttgacacccaatgtccccctcgtgcttttgtatacagaacatgaagtccaagttctgcgatagatacataaagcttcctcaccatggaagaccatggctccacacctacagcagtaggccaaaatgagagaaacagatcggagggaccaagctcttgtgcaatggctgcaagcaggtgaccataagcaggagcagcaacatcttcaagcagtgcaagattccattctgatcgtactcttcctcccccagccatgtcatttcctatccagatatcccttcgatttgaagatagttcaaaataagcattcacatgcactggcatgctagtgttgattggtaaaggaagaaagcagaaggctcgaccctcaaaaaatttcctgtccttagaggatccaagagacagttgcttgagaaccaaatcatcaaggttgacttcagcttcaccagacagttcttttgtattgtccacagtcacagaatgcagataagcagcaacagatgcccagggaacaaagaagtgggacttactaccagaggcagttgacaactttctagcatggcccccacctatactctctgttaagatccatgaatgcaccaagcaagcagcagggctttgctcaaagatagagaccttttgagaactccaaggtaaatcactatctttagtcttattcaacttattgaaaaattgattcctatccattcctgatggttgatttccatttataaatgcaagcatcgtattaagcgcatgaggttctttggccatctcataactattatgcttcgagacacgatgtacaagtttcatctcctggctgtcactctccttgacatacagagttatattctttacgttgcggagaaaaagtagagcctcagatacaacttcagagaaggaagagaaaagcatttccacatcttggggtgtatattgttctcgctttatttggcttctagaagcagcagcctcgttcctaagagggaagcggaagagtgtgcctggaaatggctgttgcaagttgcaaccaaagtgtaagaatggggtgaattgatcagggaactgttctaagatcctccttcctacaaattttatccttagacctggatgagatggagatattcctggcagataagaggcatgcggatcaaacataacaatattctcaccagaaacaaacccaggaatgtctgtgaagtgatatacacaattgaagccaagaccaaacctgcctattgcaaaaggtttctcaagtttgctgtcttgaccaattcgtgagatggcataaagatcctggggactaaaaattgagtcattgaagcagtagagagcaggcccctgccattcagccatttcaggtgatagaatagatgaagtaccataatgggtcttatccagtaaaaacacaacctcagaagccttagcatcttctgcattctgtaccaactcaaacagaatccctggtccatctgcatacatctcaacgatgtgcttaagtcgtgtagtcaaatcttcatgctgtccaaaagcctcagcaacccctgacaaactcaaattcattgagtccgaactctcagcaagcaagagacggcggagagagcggacacctagcctttccgccacatcattagaaatgttgccatggacaaaattgtgaacatacttcttcgaattgaaagcaatgcttggtgcattcccagtgatgtcctcatcaaaatcaagaagccaaggggcatcattaaatacaagttcagaagacagacagagcctagctgaagaatcaggaagatatatttgtgtttggtggtcctgaaaccgaaactcagctagatgctgcacaaccaagacagctgttctaagttcctcagcttgtagtgaagtcgaagctttccttgtggccattctggtcaaaatactagcataatctacagggtcaagttgctcctttatgccaagctctaagaacaggtccttgaatactgctaaatcaattggaatcacgcgaatgtaaggtgccagatgaaggtgtccagttaaaactacttcatcagtttttgcaaatccatcccccacccatatccatctacagccttcaagtaccaccttcactatatccatttcatcagatccaatcaaattactcagtagcgaataaatcttaggcatcaccaacgctaactcttgccggagtacttgatcagtcacaatttcattgtttttacccagctcaagcaattgagctgcaattacacttccagatggaggagacaaccaacctaagctatatgacaaggctgacgaagtgcattcaccatcaagtatgcgtgagctagcagaaacaatccacatgtcgtcctgcatccttacttgcttaggtggagcaaccattgatgatactgaaggccatggcaaagctggacttggggcagtaaccaacacaggacaccaacaaatcattctcaaatcactccagaatttttcaagatcagcttcccaagatgtatcgcgagatctgagcacggtggtaactttagctagcatatttaccttcttacggccatcaaatggcttatgtacataccatttgtgagcatgaacttcgagataagaaaggagcactttaccccttgaatgggccttgtggtgatctttgtgcacgagtgagtcgatgtgccgagcactttgtattatggtatcaatagatacagatgttcttagccccaagcagagcaacatatcaagaacttcggggttttgaaataagccatggggaaaacaatctgattcctggagaagagcatagagctcttccacccgaggatcataaagagattgaggacttttcaagaccccattggtcgtaggaacaaatctaaggaccttcaaggcttccttaaaccttggattttccaaggacagctgaggcagatcttgcaagatggttagtagaactgaatcacgaaactctgtttgcaactcatctaacctattcagaacgtacctctggtagaagtttgattttggcatgcgctcaataccataatatctcattattatatcttcatcacttggggatatgcagaagacaaagtcatcattcagtaattgctctgcaacaccaagaggtggcagatactttcttgaagtggataaatccgagaaaccataagaactgggagaccctccatcaaataccctaaaaatgggtaactttttgcatagatttatgctcatatcagaaaggtggggtcctaagtaccattttgcatcaagaacaaactgatatagttcatttttttcagcaggagtgatgcgctgaaacaaagcttgcaaatcaacaccctccaatgaggcaaccccaaagattgaatggagtactccagatgcatcaccatcatacacataattagacaaatgctggcacgtactcaaatactttgtgtctagtatcttgcaacctaatttggtcaggagttccttcatcaaattagacagtgagcctgtattaattaattttgagactgtagatgctctataaaggtgccctgaggtagaaggtaatataggccaatcactaaacaaatcaaggtcatatgaacaatccccaatgtattgccagaaaagtttaaaccaggctgctgtaggagatgatccacccgattctggatcccagggaacttggtttcggcatttccatccaggaggaaatagccagggaaagaactgaagaaatgttcggccttcaataagtgaaatgttaacctgagaactactggctatctgatacaacttgtctagtattacagggggaatgcttcggtcaattattctatcgctaacagcagaaagaagctcatactctatgctatcacagacataatattgattctcctgtgaaataccagaaaaaatcccaaactgtttatttgctaatggaatcaatgggaggccattcatgcatttgccgatattaccactgtccagatcagcaaggcaatattccaataatattagcttctgagatttttctaatgtaccaagattttcaaaatccttgaggaaatgtcgcactgtagcaggagttactattttgagcatatacttcgaatggaacttaggaaacatatcagcaatcgcacctggtagacgaacgacaggcatgcctaacatcacaagagcctcactgagatcatcacttcttgaaaatccctcgtcatgaagcaaactctcagctggtgttatccaagtcccacctttgatctccgagtgaaatactggagaggtgtaaataaatttacagatttgttccacgagaatactccagggctcctcgtacaaaccagttggccataaggaataatatgatattttggagtccaaaactgtacgcaactgtagcagcagttctctgaacaaaggagcaacaacatcttctaacaataacatattccagtcagagcgaagcttaccacccctgtccatatcagctccataccaaatgtcacgtcggttggatgatacttcaaagtaaccattcacatgcacagataatcctgtctttactggcaaaggaagaaaacagaatgcgcggccttgtctgagaataacttcctcaggtcccacgttggagatgcaagcagcaacagaagcccaaggtagtaggtgaagatcataatccttggcagcagttgttgcaaaaataccaattttacttaatgcagatgccattccctgtacaataaaataggtatagctcttcttctcaaacttctcacccaaaaatgactttgatacaaaatccattgaaaaggaatctatcttttgctcagaggactcagcagcagtgccagaaaacctgacaagggcttgtcgatgccagcgcaaattgtcatgctgtgaccctatggagcaagagtacactatctttggttcactcataccagattcccatacatacatttcaagtgacagcacatttttaaggaaaagtaaattatatacagcttcttcgtaaagttgagcaaacagagataagatatcatcttctgtgtacacttgtctcgataaccgactaagagatgcttgctcagcagtccttaaaggaaagcgaaacaaagttccctgaaatggtgctttcatgtcacaaccaaatgcacgatagggtgaaagctggtcgttgtacagtgtaattgctgaagaactgacaaaatctatacgttttccaggatttgcagctgacacattcggaagataagcaccctggggatcaaacaggacaatgtacttgccactcacaaatgatggcaagtcagtcaagtggtacaccgagttaaaaccaaccccgaagcggccggtcttccagacctgggacaccttcctgctgtccccgatgcgggagatactggcgaagtcctcgtcggtgaagacggcgtcgttgtaggcgagcaacgccgggccctgccattgcgcgagggcgggcgcgagcagcgagcctgcgccgtgcgcgcggcggtcgaggcagaggcggacgcgggacgcccccgcgtcgtcggcgttctggatgagctcccgcagcgcggtggtgccctccgggtagttggcgagcacctcgcggatgcgccgcgtgaggtccacccgctgcccgaagtcctcgagcagcatcccgccgggatccat

SEQ ID NO: 22523 - DNA, 1632 bp, Oryza sativa
  Clone ID: TF_OsC359_6081
atggggcaggtggcgtacgcggcctcgagccacttgtccaggcacccgccgtggaagcggtgcccgcacggcgtctccttccactccgccgccgccgcgtcatccctgtccaggcagatcgcgcagttgtcctgctcctgcccgtcgtcgacgtcgtctctgggcgcctcgacgatcgccgccctactcgacgcgcgggtgggagccgctgccgccgccgcctccgcggacgacgacgggatcgtcgtcgggacgtcgtcgtcgtcgaagaagttgcggaatatttctcataagttaatgagaatcgccgacgccgcggtaggcgaggtgcctcagtggagccggggttccgcgttgttggcggctctgtaccgtgcactttgtgagtcttgcacgaagacggatcccagcgcgacctttggtgggtgccctctctttctttctatctgggcagctgagaggattgcgatcggccgccctgaggtggaccagcacgcgtacgaggagtcactgtacgaggagcgaccagaggtcgactaccctacgatgggtactctgtggtgccgtcgtcagcgtcgatgggctcacgtccaggttaggcggtcgtatcctgagtttgttatggagttcgaccgccttctgccgactgacgttgtgtgggagccctacagtgcagcggctacccaggctcgtgcgtcgttgggtctgtccacactctgcaccagggaccaggcgtactggatgactacggttccgatggtcttcgacatctgcgttgagcctcacgcccctttccgcgtgatgcggcagttcggcttccgtcagccctttccagtaccgtttccgaccaccgtcccagctgctgttcaccgggtcaccttcgctcccttggagcagcagccccacgttgcgagcactagagacctctatgccaggcaccgcgaccaggactttgctcgtgctgtcgacgacatcaaccgggtcgtcgttaacggttcaacgacgatccaacgtttaggcgtggggattccggtacccgtagaggagcacctgacgacgtacacgtggatggtggagtcgatgcgctcgattctccgagtgctcacctgtcgtgtagacgacgttgctcgggcagacgcagctgtacagcggccacccgtactgactggtccccgtccagctgcgcacgttcctaggccgactccccctccgcacggagggtttcgtgcaccgttcagcaccccgccttcctcggctaggccttctgttgtgccccccacagcgcagttctggcagtacaccgggacttcgtcacaggcagccggcacgtcgagtcagggtccaccactggaccatgctgggacctcgtcggaccgcttgctgccttccaccttgctcttcgacatcactgacttcgacttcgcttcaggctcgacagaggacgtcattggcccctcacagctgggaggcgcaccgccggtgcagacgcaggaccaggcgcaggccactcctccgcgggacactcgtgctacccgtgctgtgccaccggatcgtttcacctactcccaggaccacgtgcgagcacaggcccggaggaccaagcgtggtcgcggcgcggggcagggccagtag

SEQ ID NO: 22524 - DNA, 1842 bp, Oryza sativa
  Clone ID: TF_OsC13033_1
cgccggtgggttgcacctcgtctcgctctcgcgccaagaaagcaccgcgagttcttcttcttcatcctccatggccacaacctgcgtcagctgtccgccgtcgccgcgccacacttgcacctcgtctcgctctcgcgccaagaaagcaccgcgagttcttcttcttcatcctccatggccacaaccgcgtcgctgtccgccgtcgcggcgcggccactgtccgtggcctggctcaagaagcccctgtgcgcctcgttccagcccgtgccgagggcgaggccggcggcggcggcgaggatggccgtgagggcgtcggcgtcgatgaaggagagggcgacggccgggctgacggccgcggccatggcggcggcgatggtcctccccgacgtcgcggaggccgcgcagggcagcctgacgccgtcgctcaagaacttcctcctcagcatcgtgtccggcggggtcgtgctcgtcgccatcgtcggcgccgtcgtcgccgtctccaacttcgaccccgtcaagcggacctgatcttctccttctccttcattcacagacacgcctcgatcgctgtcttgtatcgagatcatcgtctctttgcagtgttgttttggagattctgtaaactgatttacgatatggagatatggagttgttgatggttaattgcttccataattctattgctgtatattgttcttgacgctgatctgccaatctgttcttttgctgctggtggtaattgtccttatggggaagagtgccctcagatgcatggagatctgtgcacaacctgtgggaaaatgtgcttacatccttatcgtcctgatgagagggaggaacataccaagctatgtgagaaaaaccacaagcgtcttgagtctttgaaacgtagccaagagatagaatgcagtgtctgcctggaccgtgtgctctcaaagcctactgctgctgaaaggaagtttggactcttatctgagtgtgatcatcccttctgtatttcatgtattagaaattggcgtaacaattctcctacgtctggaatggatgtgaactcagcactgagggcttgtccaatatgtcgcaaactttcatactatgtcattccaagtgttctttggtacttttcgaaggaggaaaagctggagattattgacaactataaagccaaactcaagtctattgactgcaagtacttcgattttggaactggtacttgtccctttgggtcaagctgtttctacaagcatgcctacagagacggacgcttggaagaggtcatactgcgacatcttgatgctgacgatggaagtacagtgattgccaaaaatattaggttgtcggacttcctcagtcggttacatctttagggaccagtgactgtatatatgtcaaataattattgaagttcgcagcaggcctcctggaggaagcaatcgtgatctgaggacaaggaaaacagaagttttgtcgcaaatacgctcaatagtccaaacgttagaactaaactgttgaaaaactttgccatatccactcatcttgcctcctggccagcagtgattcagtaaacattcactggccatcgtgccaaagcacaggtgtataatactattccttcctcaatgctctctactgagggaaggctgcctgcacccaaccacaggccacctgatgccgtgtgattgtacttgtatgaaaagaaggaactagaaaaaaagaaagagaggatgaaacaaagattactcttcagactacaaaaaaaaaaaaaaaagggcggccgctcgcgatctagaaccggacgcttggttgtcttggtctgagggagagaaggaaaacaagaaagga

SEQ ID NO: 22525 - DNA, 1647 bp, Oryza sativa
  Clone ID: TF_OsC2967_1
gctttcttttttttttttttttttacagcagaagcatttgattcgataattactacagttcaatggcaacattgtttagcagcattttcctcagtatgattcaggactagcacatatagagaattccaaacaatattgtcactttaactgagacaattcataaagcatcttcacttgaagaaactaacatgaggttgccttccagaaataaaaaaccataacggtacgaaataccggcatcatcaacataagatgacgattaatgacagcaacctgagttcctgacactgaagcctcagttatttcccattctttgctgaaacaaacccaaatatcggccaaccccggaatatacacgatggagggaagacaagtattcacaggaatcgcggagtaggcagaccattctgtgcgccataaatggaaagcagctctgtggctgatcttccactaaaattatcataagatcgattatgtacgggagccatcggactccaccagtgaggttccccagtttgtggccagaaggtctctgaactccagctgtatgattgattggcatgtctaggggcaccaacaccattacggatgttaccgtttgtggtgcttgcggtttcagtgagaggaaagtcatggggggctctgatctcagctgacgatgaggctgcaatgaaagatgtgattgacaaagcccttggtcgaacccttctggtcgcaggaggttgtggattgcttgccatggatgatggaattgtttgttgaacagcgtgacttgtcataccatggccatggcctctagtttcagacgcagcagttaatgacctcaaatgtgcaagattgcttgctctgcgagctgtcggcctgtggaataaggaattatcatgcatatgtggtcgcaatctttgctggttgcctccatcatatcttggcattcctatgccaaatggggcggtggaatgattgagtgttccaggcatttgaacactacctaaatactgctgttctctctcatggtttcttggctcagattcattgaaaacttgagtatttctcaaatctgtagttgcatgaccttccgtaccagtaggacgctgatggaatggtatgctttcagtactggcagtagaactagaaggcgcatacattggatggtgaaaaccatgcagagaccctatatactccaaaaaaggatttggctcagattcgctttccccaaaaacagaggtcaatggtgtattgaagggacaccacccaaattcaaatgagaacgggtagtcaaaggtttcaccattcagccagtcacctgtatcagaatggctacatggttggctctcattcccatagagccagtgacctttctcaatattccgacaatttgggcactgcatcaccccttttgcattaaatgcagatccaatgcagtctaggtggaactcgtggccgcactgcagccgcgcggtggacctcgccgccaccccgtcgccgcacgccaccgcgtccaggcagatcgagcacaccgccgccgccgccgccgccgccggcgaggaatccggcgacacctccagatccatcggctccgccgcgaaggccatgagaggctgacgtggtggggcccggatgtctgcgagaggagggggggatgtctgt

SEQ ID NO: 22526 - DNA, 5871 bp, Oryza sativa
  Clone ID: TF_OsC32063_1
atggggaagcacaagggccgagctgccagcagcggcttggcggcgtcgctgctgccgcatgcgcagggtgccgtccccatcgttggtttcgggggttaccatggcgcctcccgtgttgagcccgccgcgccttcgtcctcgaccgaccccgatgcctcgattctcctccctcccgatgtggacagtgaggtgctgcagcacctaaggagattaggaaggaaggatccaacaacaaaactcaaggcattatctacgctctctatccggtttgcacaacaacatagtcaggaggttttgcaaattgcatcacaatgggcattcgagtaaatgaggctgctgcttgattataaaaatgaaattcgtcgtgctactcgcgataacatgcctggcctcgactgaactgtcaatgggggtgctgatccgcatgttaaggtttttatgtgtcctagctggttttctcagtgtgaccctgttcttgaggctgcgtaagctgctcggcattcgtttgaggctgccttcccacaatcagataaaaggttggatgctttaatgttatgtgtgaaggaaacatttcttcacttgaacgagaatttgaagttaacaacacaagcattgtctgacaaggctacaccaatggatgaactagaagatatgcaccagaggggaggcattgaggcaggtcaggttactggcacagtatgtcacaagtcactgcaacaaccaagtgacgagcacaaacagttattcgttggatgggtaatatcatcatcattgttagcaatggcaactctgattgacattttgctaggtgtaaaattacaaaattgtgtccgtgacaattccagttctgaaaatacgagtctttcaaaagttctatctggcacattgtcttctgctgaatctgcattttctatgaataaatattttcttgatttcctcaagtcaaaaagtgcgattatacggtctgccacatactcactgcttgcaagttatatcaaacatgtttctcatgttttcaatgaagaagccatgaaggtactatctcctgctttacttggtgccttcaatgaaaaggacccatcatgtcactcctctatgtgggatgcatttcttgctttctctagaaggtttccagaggcttggtcatattgcaacattcacaaggttgttttcagccggttttggcactttctacaaaatggatgctatggatccaagcaagcctcataccctctcctggttcagtttttggagtctataccatctaaagctgtaactacagagcaatttgtttttgacttcttacataatctctgggctggaagaaaccagaggcaattatcagctgctgacagtttggcattctttactacctttaaacagagtttcttgtggcttctaaaagttctaccgagacattctggaggaggttcttcggatgatattcctatcaagctcataacttactttcttgcaaaagttgtttggcatgattaccttcgaataccatcttccaaaaaccaggatattagtttgagtggattgtctgatgaagcaatcagtggtgattgtcagttatctcataaggagtcactgttggcatcaagcacacgctacccaacttattatcttcaggatttggggaaatgcatcattgaaatattggatgagatttcagctatggaaaatcatttgttaaatattgcttgtgagactctattgaaggactgtttggatataatccatcaaagggagagtttgccaaattttcagtatcatgtggaacaagttgtgtccttttttatttcgttggatcagctcattgtacagaaaggtaaaacatggccattggaaagcttagcaagaccactgaatgaacaatctgtgccagctatcaagtctatgatccagaaggacactccaattgttgttaaacttctatcagttttggttgaaatattcaggcctgtccctttgttcttgaagaattcacagaaagagagtgaggaatctgtccaagatgagtgcttctttgaccagtggtgtacgattattaaatatactagtgctaagcaaaagcaccctgttgataataagaactcacacgttgatgaccaatttgaattgctgacacttatacttcaaaaggtaagagaaagaattgctgggggcaagttgagaaatttgcagaaaaatggctctctaccagaacattggcggcatgacctattagattctgctgcagaatctgtcttctgtgatttgcctgctacagattcccatgtccattatgtatgtgctgcacttggtggctcagatcaagatgaccaaatttgttttctttctgctgatactgtccacaaaatgctcgggtccattttgaagtgtttgacatcagtactcatgacatcaacttttgagtgggcaaggtttgcatatgtggtgttattgcctactgaaccaaaggactcgaaggttataggagcacaatccttttcatcaaacattaagatggctcattttgctttcaaagttcttgagggtagcttatttgccctgagaagactagaggaagattctttatttccttctgttctggcagctctgtttatcattgaatgggaatatagcatggccttaacactcgatgaagaacatgacttgaaaggttataaagaagatattgatgttgggtcttctgcatgcaacagttcagatgatcatttggatgagggaatacatttgaaagctaaccttgcagagagtatacataccttttgccaaagcttaagtccatccttttggagtgatcttcatccattcaccttgaataatttgttaaatattttagctcaatctgtcaggtgtgctttatttcagacactagagttgccaactgagagcacatcagtcttatgctcagagtggatggtgaacatgttgaagctcatctctcttgatcacacaaaattgcagagttttttttatcttcttttatctgagggagaatattggccactctgggtgaaaccatctttacaaaatgagaatgcaccagtgaagatcaaatttgagccagttattacaaatgaaacgggactgaaacaccatcaatttgttgcttttgttgacaagcttgttcttaaccttggctttggtgaagtgatcttaggtgttccaggaaatacatgttacaacacatcacaatcaattgatactacttcaactgttccttcattgtctagagcatgggttgctgctgagattctttgcacttggaaatggaaaggggggagtgtattcagcacattcttgccttctatgattcagcacttgaaaatggaatcatgtgcagaggtcagcatattgtccatattgcttgacacattgttggaaggagcttttcatgagtgtaaccagtgggtactgttcaatgcttggcacatttctgacaatgagattgagaaaattcaagatcattttctacgtgctcttgtggctttgctatttagtatcaatagcatcaatgagtgtatttggagagaatccgaggcacttgtattttttgagaaactactgagcaatctttttattggttccacagtaaatagaaaatgtgtaaagactcttccctttgtcatgagtacaatcatcaaaccgttgtcaggcaaactgaaattaaatgaagcttcttgttacactgatttggtggggcaaaacatactgagttggcttgatgtagccatctcttgcctatcatccagcccgagggaagtacttcaacaagacattgttgattggatgcaagtggtgttgtcttgcttcccgttgaatataacatgtggaacccagaaactagaagttaagattgaacgagagatcagtgatacagaaagatcattattgctgactctttttcagaagtacaagattttctgtgccattgaagctccgtcgctgtccaccagtggaactaccctgtcaacaatggttgaactattgggggtgaaactgatagcagttatggttggctattgctggacagaacttcaggaaaatgatttgcattttgtgtttcatacagtacagaagtggattgaatcagctgttttgcttgtggaagaaatgacagatgccatcaatgatgctgtaataaaccagaaatcaaatgaagatactttggagaagcttaaattagtggttagctctatagatgagttaactttaagcttcggtgaattcgctttggttacactgtgtcacctcaaccatctcgtggatatccaagaaacggagaacttccagagtttgcaaattattaaatcaggggattttgctgatagaaataacaatatgatggaaagtatgcttcgtttgttcttggcttctggtgtttcagaggcaattgcaaagtcttcttgtgaagaggcttcatccatcatagcttccagtcgcgttgcttatatgcatttctgggaacttgtggcatcatttgtcatttatgcttcaccacagactagaagatgtgcactggagtcgatggaactgtgggggctcgcgaagggctcagtcagtgggctatattcaattttgttctcttcacagccaatctctcatctgcagtttgctgcttattctctacttctttctgaacccctctgtcaattttcactaataaaggagtgttctctgggatcaaatagaccactgactcaggaatcttgcatgggacaaagtattgagttgatgccagattcagagaagacactagatctgagagaagaactctcatcgttaattgagatgcctacttctgaacttctccagacagatctgttagcccatgatagggttgatgccttcattgcctggtcattgttgttgtcccacctgcaattactaccaccagcttccattactagggaaaggcatattcctttaaggactggtgcaccttgtggaaagaaaaaagatgctgaactcatgcctgaagcagaagttgctgcgcaagcttctaagaatgccataattacatgttcactgctcccatgcattgaatccctttggccagttgggacatggcaaatggcctcacttgcagggggactgtatgggatgatgattaggctgttgccttcctatgtgcgtacatggtttactagtttaagagatcgttcattgtcatcctcaatcgagtccttcactagagcatggtgcagtcctcctcttctacttgatgaattttctcaggtcaaggactctctgtatgctgatgataatttctcagttagtgttaaccgctcggcgtacgaaattgttgctacatacaagaaggaggagacaggaattgatcttgtcatacgcctcccgagctgttaccctctgcgccatgtggatgttgaatgtaccagaagtttgggcatcagtgaagtgaagtgcagaaaatggttgctttctctcacggcattcgtacgcaaccagaacggcgcaatagcagaggcgatccacacttggaaaagcaattttgacaaggagtttgagggggtggaggaatgcccaatctgttacagcattctgcacacgagcaaccacagccttccccggctggcttgcaagacgtgcaggcataagtttcatggtgcttgcctctacaagtggttctcaacatccaacaaatcaacgtgtcccttgtgccaaactcctttctagtccggctgtgctgcgctatgcctattttttttttgcaccgtagaaatttaaatttatactccgtagttattatgttttgtcttacaaatttaatgaaggttagataaaaatatgtagttcatgtgtctccgttgtcccgtaattcaaaatgcgataattatc

SEQ ID NO: 22527 - DNA, 1249 bp, Oryza sativa
  Clone ID: TF_OsC302675_1
tgcaggaattcggcacgagggctcctccccctttcctttccccacccaacggcatctcgtctccacgcgagggatggcggcggcggcgagggaggcggcggagagcccgaaccctaggtcggcgccgcggcgtgcggcggcggcggcggccaaggacgccagcagcttcctcagcccgcgtttccggtcggcggccgcgcaggccgggtgggacgaggagtcgctcctccacgcggcgctcgtcgtcgaggacacccccgtccgcgagtcccgccgcaggaggcgggcctccaccacctcctcctccgccggcggcggcgggagcgccggatctaacactaggaagcggaggtcgtggaggcagccgccgggatcgatcccgccggtggtttttctgctcgacgacgacgagaagaagccggataccacggcagatggcaagaaggaggtgaaggaggaagaaaagaagaccgtcgtcgttggggagaaggaggcctgttccgagaaagcagcggcaaccagcgagctgccctgtatggatcgcctccgggaggagctgtcttgtgctatatgtttggagatctgcttcgagccgagcaccacgccttgcgggcacagcttctgcatgaaatgcttaaaacatgccgcagctaaatgtggaaaaaggtgtcctaagtgccggcaattaatcagcaattcaagatcttgcacagtcaacacagtgctctggaacaccatccagctgctatttcctagtgaaaccgaggcaaggaggacttcaatcgcttcatcctcggaaaccaacgacgacttggcgcaacaaatctctcaaagaagtaacagcatggcacaaggtggcataagaagcagcagttccaatggcatcggctacatcacgcagcgcagcacaagaagcagcgctaccaacaacaggagcttcacaacaacaggcagcagaagaagcaccttcgtcgcacaggagggcagcagcacagcaacagggagaggctttgtccgggcttcgcagctggtccctagtgccagggtcgtctcagtgagatcacaccagtctgatgacgcggcattggcgtacaggctgcagcaggaggagttcatgacggctttcgagagcgagggcgagaggcagccacctcggagcagcagcagcacggtgtccgctgctcgagcgaatctgagagctatggcctcccgggccattcgtctccgagctcgtggctggcctgtctag

SEQ ID NO: 22528 - DNA, 1778 bp, Oryza sativa
  unsure (1)..(1778): unsure at all n locations
  Clone ID: TF_OsC63595_1
tttttttttttttttttttttttttttttnagccaaaggcactgttctacctttttttttaatcttttgnccctctttacatgatctaanaaatganaaaggggnaattttttcttctctttttttttttaccctagtctgactgacggatgaacatgatatgagctgatgaatcggtagtttcagagtcttctttcctcctgcaattgcctgcagattttgcagcagatggattgtggcactggaggagtagaggttgcagctagctaagaggaaggaggccgctgtggccggcggtagccgagctccatgacgaactccttggcttgagcgcccagcgacgcctggacctgctccaccggcgagctcttcagccacagctcgagcaggccttgcaatgtggtcgagggggagattgcctcgccatggcatgtgatctccacctcatcttcacttgctaggtcaagcttattcatgatgtacctctggatcaaggaagtctgcagacttccatctttaattctcacgtaatatgttggtagctgaggcagcctgggatcttgtttctggtcaggtgaagggacaagcaaaaaccatactggtctagttattccatcatgcaaagcaccagttcttgtagaaccaatctgtccctgctgtgaatcagcatgttgtcctttcctcagctcatagtctgaggtggttttatctttcgatgatgcagattgtgaaggactgcgattattttcctctttaacttttaacttatttgagcatggcataacctttctgccagtaactaccagtttgtcttctgtgtcatcttctgccagtaacttaattgagttttttattttgtcttccttggcagcctggcctttaggacctgatctaaaaaatttcgtcctgtttgcagtgtcaaccaagctatttaaaggcttcttgagatcttccttgtcaattgtatgatcatccttcctatcttcagaagatgactggattgtgacatctacatcagtattattcttctttttattgccagtttttgtcatcttggcagattgtgctgctgagattttctgagttttatgatctcgaccttcagatttatttgctagcttgatggttccattattaccaggagagtttacatgggagactgctgtccttctcgcagttttggttctccgtcctgtcaaaccagtctgtactgccaccctcggagtgtcaacaaccaaggaagaaagtgacctctgttttctctttactggcaatgtcacagttggagccttaggagcaccaacctttttcactttaagtggaaaaaccttattcctgatatcttgaacattatggtcgggcctgagtttctcttcaggatcacagccaagatcaatgttgcatactgggcagtgatcgacttcttcgtcatctattttctccataatgcactccttgcaaaaggtgtggaggcactcggtgatggcggtggcctcccggaggagccccttgcagagcgggcacgtcatgcacgccacgagcgcctcccgccggacgcgccgcaccccgccacgcgcggcccccatctccccccgcgacggcgccgccccaccaccaccaccacctcctcctcctccccctcctcgtccaaggcgacctccactcccaacctcgtccaaactcaggccggctccggagggcggcggcggaagggagactcgggaacacgcagcgtcgtacgacgggagaaaccggcggcggcggcggcggagctccgg

SEQ ID NO: 22529 - DNA, 607 bp, Oryza sativa
  unsure (1)..(607): unsure at all n locations
  Clone ID: TF_8955298
aaaaaaatnttganccatcanccaatataccanccataaatattcanttnaatgcaaagcnacaaatnccagggattatttactgcaggagggggcattttgcagggaccantncttttacctttttttttaatcaaatttgtaggtcaatggcaaaaaaaatttctaatcaaaaaacggcacggtaatatnaatcnctaaacnatcttgcnatcnaacaancncncagtgtttactgccctgtgcttttnctaaaacttcaaancantntttttgcatntgggacaggtnttcttcncaaccagccattgcctgacgcatccaacatggaantcatgtccacagtccaatgtccnaaatctccccntcaacatnccttcctggcaaaaacagcatggtctcctcccanangctcccacccccanaanaaaattcctttctttagaacttgtccctctccccctgaggccgtggcaanatgctatccttctccatgccanaccccanaaatttttntnntnaggcntccnntttttntaatcacccccaaaangaccactaattcccccggacattcaccttcggattcataaccnccnccgcccac

SEQ ID NO: 22530 - DNA, 584 bp, Oryza sativa
  Clone ID: TF_OsC71294_1
tttttttttttttttttttttttttttcttaagaaaatcttcaacttcatatacaattaattcgtttgtacactcgaatagtgataacaagttaaatcaatgagaaaaaaaaaagcatagtcaacattgtcgacgtagtagtagaactagaaaccatcagttgaccgttgaacaaacaaattccacctcgcctgcagcggatccgccaccatcggatcggccaccagcacatgcacatcctctccggccgtcgtcgtcgccgctgccgccgccgccgtcagctcgcgccggcacatggggcaggtccctagcttcacccgagcccaagactcgaggcaccgcgagtggaagcggtgcgcgcacggcgtctccacccacgcctccgtcgtcgtcttctccccaccgccgccgccgccgtccaagcaaatcgggcagttgctgccgtcgtccggcgcctccaccgtcttcatcccgatcaacgcctcgccgccaccgccgctgccgccgccgatgtagtcgtcgacgtccatctcctccgtaccatcgtccttcaactggttcaccgactcgctcgacgtcgccat

SEQ ID NO: 22531 - DNA, 1385 bp, Oryza sativa
  Clone ID: TF_OsC93699_1
atgggtggctcgtcctccaccagccggcgccgccgcgacgagtactacgcggcccggcccccgccgccgccgcaccactactacacctacccaccgccccctcctccgccgccgcaccaccaccaccacccgccgccaccgcctcccccgccgcaccaccaccaccagcacccctaccggcctccgccgccgccgcaccacgccacctcgtcctcctcgtactactaccaccacccgccgcccccgcacgcctaccacggcccgtggcaccccgcgccgcgcccgccgcacccggagcagcccgcgctgacggggccgccgcccgagttcgtggatcaccagcaggcgcggaaggtgaagaacgacgtcaacctgcacaaggacaccatccggctcgtgcccgacgtcacggaccccgaccgacgcctcgtcgccttcaccttcgacgccgtgaccgacggcagcataactatttattactttggccgcgtccgaaaaaactgtactttctcttcagtatatccagaattacaaacacctacaaagatacctttccagaaaggattggctcaaaagtttgtccagacctctggatctggtgttgatttgggattcttttctctggatgagctttcaaatccttctggagaagtattcccactggtagtttatgcagaagcttgtccacctccagaggaaagtcaccagcctaactccactagggcacaaattactcttgctgttatagagaagcatcacaatgaccttcgagttaaagttgtcaagcaaatgttgtggagtgatggcgagaagtatgagctacaagaaatttatgggattgtcaactcgactgaagctgatgttcccgacgcagatgatagtgatatggggaaagaatgtgtcatctgcttgacagagccaagggacacagctgtttttccatgtaggcatttgtgcatgtgcagtgaatgtgcaaaaactctaaggtttcaaacagataaatgccccatatgcagacaacctgttgagaaattaatggagatcaaagttagaagtcccgagccataaagacaccttcgctgtatgctgcccgtgttgcggatcctcaaataatgagctggaatggtgtatgagaagcttcgatctggtcgtgatgcttcttttttgtttctggcgaactgctgaaggtgcctttggaaattttggcaagttttcccggtgtacagaacatgtaaatggtacggggcatgtccattaaccacgatgtacagttctctaagctacgactctgaatttgggcatgcaaatgtgtaagaattgtgtcaatgtatgttcgccatcctggatacgctcttccattatgtttttttgatgaaaagcttcaa

SEQ ID NO: 22532 - DNA, 1674 bp, Oryza sativa; identical to SEQ ID NO: 13293
  Clone ID: TF_OsC100587_1

SEQ ID NO: 22533 - DNA, 696 bp, Oryza sativa; identical to SEQ ID NO: 13294
  Clone ID: TF_OsC392270_1

SEQ ID NO: 22534 - DNA, 2741 bp, Oryza sativa
  unsure (1)..(2741): unsure at all n locations
  Clone ID: TF_OsC140765_1
gcacgaggttttttttgtttttaaattgatcagaaacaagatcagcatttggattagatatttcgtttgttcctttctgtcagtacttagtacacattgcgcttgcacaaaacatatttacatttctcaagaaacgctagctcgtatacttttggttgttaatgaaggtgattcaagaagcctcctcaaaaccagggcttcacaaactccacatctaaagctatagagtggcagctcttcttcctcctaagacctaaacctcaaaaattcatatgcgctcgaacaacatcctcaataggagattggcagattgggcaactcctgttgctcgatttcagctgatcggcgcaattgaaacaggtgcacatatgtccacacctgtaaagtagagagtcaacttgcgtctgatggcagatgcagcagcttcccctttttgctggtgtgtcgggttggcttggcatcaaccctgcttcgcgaagtgcactgcacatctcctctttaatggagtgctggatctttacttgggatgcaatacaactttccaccaacttccgtagttcatatatttcatgatggacctgtgccatttcacttctaaccctgacctccatttcaaggaagttttggttttcatgatgttgatgttcaaacgaagaatgctgccagccttcttgttggtggagatgggagacaggtgctaatgaacactgtgcagataccctctgatcagcattctgttgttcatcattctgtctccagtataagcgctcatcataatatccttcaaaatcatcaatcatgtgttgttgcctttgtttgcgcaagattgttagcaacatgttgttcattttattgctaaaatcactctcaagagactttgagacatttttgctctcaagaagattgcagatgtcagcattgccagacaaagcaccgctgtctgcttgtgtggcaacacacaatgatctccatgagttaggggaatctatccaggggcgatcattaaattcattctgagtgtgattctcaatatccccaatttcatcctgattccagctgtctggactcatggcttccactggtgcaggccaaccaagactacttatccatagtgccctctcttcccatgaaccattcaggctttggttgtcttcttctcttagattatcaccccttgaggatggagtgcaaagttcatgcaatgtgcttatggtacttggcgagacatcatcaacggtactatgctcgtcatacctcacgaaactcgatggctcagaatattcctgattctgggtacataattttaccatgtttttgcaaccttcctgacattgattttcactgttgctgttctgcccatcattttgttcatttcctaaaccatccgaagaaactagtctctcaacagaaccagtagacttctcagccaaaacctggccacccttatgttggttaccagcaatgcacttgctgagaaaagcttgtgttaggcattggcttgtggtataggcctcatgctcatgttttggaaggcgtggcctgactggttttggtagagtccaaacttcatccttaactttaaatccctgacgcaacagcctaagacgaagcatggactgcaaggtgtcaaagagcatgacaatattagcggaagccacataaggaacaaacaagcttaaaaagtacttgtgttcgcatagatacaatctgcaaaacgaaacatgataatgtgatttgcacatgacaatgatcagcagtgccagttgggaacatgatctaccaaacagccatatggccccatccttgggggactggatcctgcctttgtgcgagaaccgcgacacgacgtggcggtcggcgaccgcggcgagctcgcacctccggcaatgggccatcatggcgacgagctcctccattgcgcggcggccacgcaccgtgcggactaccagctgcgtcggcctggacccgttgataccggcgatgttggtgggcggctccaccccggcgcgcatcggcgcgggcgacgggggcgcggactgcgacatcgcgacctccttgttggcggcgtccagctcgtcgtcggggatcgacgacgtgccgctgagcttcttgacgatgcaccccacgcggccccgcggcgagccgccgtcggagtcggaggccaggtcgcagggccgcggcgtggcgggccccaccgcctcgatctcccgccaccgctggatcagcgacgacgcgcgcggcgccgcgggcgggagctccgcgccgcacctggccccgcctccgcaccccgcccccgccccngacgacgcgtccgacggcgctggggacggctcccggaacacggcggcgcgggcggtcacggggcgggtggccgacgcgagcgcggacagctcggcgtccctcgccctccgcctttgctcctgcggcgcgggggcctcggcggacgccgtggcggacgcggccgccgccgccgccgcccaccgatccagtatctgcttccgccgcctcggcgtgggctccgccgccgccgccgccgccgccgccgccgcgccaccagcagcatcgtggtggtggtggtggtggtggtggtgttggtggtcggggcagcgcgggcgcggcgactgcggcggcgggacgaggatgttgaagaaccccctggcgggctgcctggaggatgccctggaggggtccctccatggcgtggagtcgtgcggcatggcggccaccgaagatgttgccat

SEQ ID NO: 22535 - DNA, 1683 bp, Oryza sativa
  Clone ID: TF_OsC46309_1
cgacgatgcatcgggagagagagagttgtatttttttttttttttttttttttttttttttttttgctgtatcaatcatatttatcacgattatgattgctattatgtcaccaaatccattatttataccggtaaaaacttgtccctgatttttttccctttttacatagatgaagcagaacaaatcggcatcctaaggtaatacctcgggctgagcccttttatcaaaccaatacatcaaatttgtcattccgattttctggaggtgatttatgcaatgctgaggatgacaacatcatgacgttgcttttggtcacctgcccatgcctggcaatggcaatcctttgatggagaagaatgggaatgtgcaggccttctttcggaacctataacatgctaatttgaaccggttgttgtaacacaaggggcagaagacgcagaagtgttgccactacttgtcgctgcagtagttggattgttttctgtaactctctcattgcttgattctgtactgggaataacttcagaagtggatattgctgggccatcacttgttctaccattactacctctagtttccagacgctccatcatccttgatacggatgcaattccagcattaacttctcttcttacttcagaaccaagatctgccacagatgaatgacgcgaaaaaagtctctccttccatcctcgagtactttttgtaatagattccttgtacttcatagagacagcatttaagcgagacttcagagagtctgagaaagactgaagatctgaaggcccagctctgtcgttgtttactggagttgattgcccagtggaatgcctcctgttgaaaaacctagggctagatacaggggtactatttccagatgaaacaacagcatcttgatcagcatcgtaggtaagcatcccaggactttgattgcctgcttcttcatgggtgttagcatgcagtgataattcaccagttgtgtggacaggacttgattcattatccacttccccttgaacggacgatgaagaaactgaaccagcagaaggcatgtttggatgcgaagaaaaaactaagaactgtggacgaccatgagagccggaacgacccctgtgtccttctcttctaccaaggtggtgtgaccttcccattgcagcggctgctgctaggtgctgtaatatacgctcttcaagttcagcatcattaccaacaacaggtaaatgctgaacctcaaaatctccaagagcaggatgatgaaatatagttgtatttcgagtttgattggtccttacattcctttcacgctccactgcctcgagcagctcttgacacacactctgacaccattcaagaatgcattggaggtggaactcgtgtttgcaaccagtcaatgtggaagggtcactctcacagaacgcctcaaggcagatactacatgcatcatcacatgcatcctgaatcccaccctcaacaaaggctgcagctgatgtcaaaccctccatcttggctttctcatcagttccagatgccattgcaacggaatcacaacactgatatcaggggcaccgccgccgacgccgacgaggacgcccgatcggatcccgctgcgcgcgcgaggcgatggggagcacgaaaccctagctagctagctagcctcttcgcctcctcctccaacctcctct

SEQ ID NO: 22536 - DNA, 3576 bp, Oryza sativa
  Clone ID: TF_OsC67131_1
atgtccagccctggaaggagtgggttctcccctgggttggcgcagttgttatcatctagagatgaagcgaaggttagttcccagaagtcgcacttggtatcgtaccatgacgagattgggcaccaggatattgagaggacgctagagcatatatttgatctccctcacaagtcggtggtccggcctccgggtccgattgatgtgggatttgtgcgctcggtattgcggaatcaggcaaggaagtttgatcttggcgggaaagatagccgtaaatacgatgatggtgttctgattgtggataaaggtgctgggcaaactaaggttgttcttgatgattcgagcatttgtggcaagttcaagagcatttggggacctttgcttgttgagagctcggcatcattcagcagcgctagggctaacacctgcgtgtggaatggcaagtggatgtatgaggttaccctggagacgtccggagtgcagcagcttggatgggctactctctcgtgccccttcactgatcagaaaggagttggtgattctgatgattcatatgcatttgatggccggcgggtgaccaaatggaacaatgatccagaacaatatgggcagatgtgggcagtaggagatgtgattggttgctgcatcaacttggatgctggggagatcagtttctacaggaatgggaattttcttggtgttgcctttgatgggattcgcaaagtgggacctaggaaaggctactatcctgcaatttctctctcagaaggtgagcgttgccatctgaacttcggctcacatccattcaggtatcctgtagatgggttcaatccaatcaaggattttggaattcttcaccagagagattcctcatgcattcctgatgtgttccgtctactagaagttcaaaatctggaaaaatctgaatctgcatacttcgagaaactaaggagggtcaagaaatttgcacctttacgtgaactatttcgaccaatttcggaagggatatgtgcagaatttttcggtgccgctgaaggaagccaagggtgttctgaatatatcacctggggatctttcatcacccttcttacagatgttttcagggtacgggagccgcatgatttcttatgccttgaccaggttcttgaactttttctacagttcccggggtgcagttcattactgcaggagctcattgtggctctttcttgtatgtgcaaagctgctccacttgtgttgacagaatgcccattttctggaccatatccatttttagcgctggcttgccacattcttaggcataaagatgtaatgcatctatggtggaagtcagaagattttgcattctcatttgaaggatttcttacgatgaagattccaaacaagcaggacttgcagtaccttgtaccttctgtttggtggcctgggtcttctgaagatgaggttagcatgacattatcgatgacaacactctccgatgcaattaagatcattcacctttggcaccgtaaacccgaagagaagaaagatggatcatgccgactgtcttatccatttttgctcgatttggaggcgcagacagctcggagcctcggagttcttcccttctgctttcctggaagactgcatcgccatggtggtgaagtcagaaaggttaatcttttcccttgtgtaaagatcaggtaatagttaaaacaaaaaaagattcaataacaggattgcagaaggaggcttctgcacaaggtgggaagccagtaccacccaaagaaggattcacagaatcgtgaaatttttgtaggttgtagggaaaaattccattgtaaatacgagatatgaaacagaaaggaggtgtcagatctacatcaaccttttgtaattatgtagttaaaataaagaaatactagatggtttatattggagggacctctagtttttttccctcgtatatcattgaataagagcctcactatttttcttaaaaaaaaaaaaaaaatcactgttggcctgagatttaaagaaaatgccaagtacataccatcaacttcgaaaggcccatgcaagtccatgcatgaaaaatctgcacatattgcctctgaatgcagtgcattctattttgtgtcccagcaatcacaatccatttctttactagaagaaactgataggcagataagagaaaaatcatgcatggagcaagtaagacgcttgaaggaagcccgcaatagttatcatgaggagttggtggattgtgtcaggcattgtgtttggtatcgtgccactgttttttcttcatggaagcaaaggggaatgtatgcaacttgcatgtgggttgtggagcttcttttggtgctcagtgattcttcttccattttccactatattcctgaattctatgtggaatcattggtagactgtttccatgccctgcggcggagtgatcctccttttgtctctcctgcagtatttcttaagcatgggctagcttcatttgtcactcttgttgtcaaacactttgatgatccaaggatatataaagaattcatgtttgtatttgagaacaatcgggaggctataaacagaatgccaagatcacttctgtcagcttttggtaatagatcatggatacctgttaccaacatacctttccaactctgcaaaggttttggctttgcttcatccaagaatgctgaaccttcatcatctgcaactttccagaatgtcctactcagggagacatgtattcatgaagaagaactgtttttatcctttctcaatcgacttttcaacacattaagttggactatgaccgagtcctccatgtccatccgtgagatgcaagagaagcgccgggttgccgatttgcagcaaagaaagtgcagtgttatttttgacatatcatgtagtcttgcaaggatcttggagttctgcgccagagagatccctcatgcgttcctcatggggccagatatgaatctgcggaggttggctgaattagttgtctttattctgaaccacatcatattagcagccgatgcagagttctttgacatgactctaagacggccagggcaacatcaagaaaaaacaaattgcactatgatcttggctcctcttgttggcattatcctcaatcttatggaaagcagcagtacttcaggccatagggagttaaatgatgtgattacagtgttcacaagcatggattgccctgccacaatccattttgggttgcagtacctactgagctacaattggagcaatgttctccgaggtgacgcttcccttgcaaagctagctcagcttgaagaattctcccattactttatgcacatcactatgtcagcggatggcaatgaagagcaaggtttcagcactgccagtaatgaagaggacaactgctgcatatgctacaattccgattcggataccacattcgagccatgccatcacaggtcctgctacggctgcataaccaggcacctcctcaacagccaaaggtgcttcttctgcaatgcagtggtgacttcagttaccaggatagctgattcgcgcatcgaatctcggtcacctttggcaccgtaa

SEQ ID NO: 22537 - DNA, 2185 bp, Oryza sativa
  Clone ID: TF_OsC44374_1
gcacgaggagagaactagtctcgatttttttttttttttttttaaatgaaacataccgcccggctggtttctcaaatgaagcgttataaaactgtacaatgacatacaagacatgttaacattgcggtctggtactatttactgtttagtaaaaagtacattttatatatggtttcaacattttgacgtatcaaagctttacaggttacaattttaccactgccttccctcgtcttgctaagaagcaaaacttgttcactccagttgcgccggggtacatatacttttgcaaaaattcccaatttttacattatgcaagccaatagcgtggcggggatcacacacaccagggctttgcactaggattgatcattcctccagaaaccgaccaggcccataaagatttgctgcaaatctatgctaacgtcgcaactgaccacagaccagttctctaaactatttctcgaacatatagatgaatcagacatattgcgctcacataatctctgcgaatcttctcactttgacatcagtgcaggggaagacggcatgacatgataaagaaaaaaaggattcacttggattttcataagcaattgcttgtccattgttatatgttagcagtttcccatttggtgtctaaaacaactggaagaaaagacttgtagaaccatcaccaaatgaccgaatatcagcaggctttaccaatgctctacacagggggcaagtccgttctcgctcaaaccattcagagacacagtcctcacagaaaatatgtttacagcggaggaggacaggaacatgcatcttttcctgcaccaggttccagcaaaaaacaagttctttaaacaagatagagtgagagttcaagggggtatcctgttctgctgtcgcataagacccataatgcacatctttacgtgacaatgctttcactgcagccaagaatgactgaaccttttcaactactgaagttaacttgaaggtcaggtacagtccagtggttaaagatgagaaaagactcccatattccttgttcagaaagaaacggtaccaaacaggagttggcaacaaggcacgatataggagcagaaggtattccacaagggttagcatttgaccggtagttacgacctctgctattcttatagtacataagtagcatgcacttaatggccattgctgcctggcgaaccattgtatctgcaagtggcatttggttagaaatgccaacatgatgataaaaatcgcatgccaaaatggcggtatttcttttggcggaagcatgaacagaggtctgagaagatcatcattcctgtaccaccaatagacaccaaacacatgaatcatgaagattactgtaatcccgacaagcacagcaatttttctctcgcccttcaaagcagtttgcttccgcaatatatcatttgacttgaacattacagcagcaatccaaattgtgacaaagaaaccgcttataatcacacaatggcacgagcacaagagaatgagtattagaccttggagatgctgccgtatgaagacgacgagcagcagcagcgagaatggcagtatctgctcgatccacctcgcgacatggtgcacgtcataccgctggtaggcgcggtccccacccccgttcccggacgcgccgtccgcgcccccaccactcgcctccgcgtcggcgccgccacccctccccgcggcagccgaggccgggtcaacgtccccggcggcggtcgcctcgatcgagtcctcccccgacgaggccgcccccgcgacgcccgccgcgtcggcctccccggggccgccctggatccggatcgagacctccccgtccccagccgcggccgcggagagcagcccatcggcctccgacgacgacgacgaagaagacggcgaggacgacagcgccgagggcggccccgcctgcggggcgccggggccggaggggacgacgccggagtactcgagcagcgcagcgagcggggcctgcaggaggctggaggcggagaatctgaagccgtagcggcggaggcccgacggcgaggcggccccaccggcgcccgcgccggtcccggcaccccggcgatgatcggaggagcctcccgccggtggctccatcgccggcggcagcggcggcggcgaaaccctacaaggcggaggcgaaggaggaggagacgag

SEQ ID NO: 22538 - DNA, 570 bp, Oryza sativa
  Clone ID: TF_LIB4833-026-R1-N1-C5
ccggccactttggcaaggatgccgccgccgccgccgccgccgccaccgcggacgccatggaacatgcactcccctgcagcgatcttcaccacctgagagtgggcaagacggcagagcagagctgctcggtgtgcctcaagaatttcgaggagggcgactacatctggtcgatgccctgctcccacactttccatcagctctgcatcttgggcgaccgctcctgcagggtctgtcacccggctgctcccccatccacggaggagaaaccggaggcccctcggactgttaattgattgaatgaattctcgcggaatcagtgcttgtttaactgatcaatgtcgtggcgtgcaacaaatctgcatttctctgaaaattgcaacaaacctgctactctctgaataatctgaattttttgtctccagttttcctgggaatcccttatggaatatttctttttgtctccagttatctgtgaatcccttatggaaatttgtaaccggatgtttaaattcacatagttatatatatttacttctgctttcacaaaaaaaaaaaaaaaaacccgcggcc

SEQ ID NO: 22539 - DNA, 2502 bp, Oryza sativa
  Clone ID: TF_OsC37567_1
ttaccccctgcttctgcttgcgttcgcgcacgcatggatcccacaaccaccacgacagattccgagtgcgacttcatcaagaagatccctagttggatgataaggaattcgccaatgcattgtatggaggccggccactttggcaaggatgccgccgccgccgccgccgccgccaccgcggacgccatggaacatgcactcccctgcagcgatcttcaccacctgagagtgggcaagacggcagagcagagctgctcggtgtgcctcaagaatttcgaggagggcgactacatctggtcgatgccctgctcccacactttccatcagctctgcatcttgggcgaccgctcctgcagggtctgtcacccggctgctcccccatccacggaggagaaaccggaggcccctcggactgttaattgattgaatgaattctcgcggaatcagtgcttgtttaactgctactctctgaataatctgaattttttgtctccagttttcctgggaatcccttatggaatatttctttttgtctccagttatctgtgaatccctctcaaccttctcaagcttctgttttgcttgagagagtatgtcatccgcattacttgttgtagacataatggtaagattttctatggaagccccatgttctagcaccgcggaagcaatagcaatttcagtttcgcctccaccatagtcaaacaacttgagaacttgtagatgtgactttaggcaagctatgtctttcaatgcagatgaccaatcatcagaatgaacgtcacattcctcctcaaagtataccttatcttctctccaaaggacaagttctttcagttctgtacaagatctgaagaaattcaacaatgcatgtctgccctttctctctttgaaagcaatactcagctcaagttttctaagacttgtaataggcacatggcccacatctaagtaaacattgtcgatgcttctagtctgacttgacaagttgaaccatacttctcgaagcataggagctccaagaatacttatccatgtggaagacgatgtccgacttgagaaagatttcattccctgtgctgctccaataatgaccttctcaagttttggtgcccattgaattgtaatgtgactaacactggaccgccaaatttggaggaacttaaggctctctgatcggattcgctcctttccctcactgaacatgccaatgtcaagctccctaaggctgacacattggcaaactagagcaaacaaattctcgtcgcttattctgcagcatgccaaatctatgacagcaagacttgaaacatgatcgaggtacatatcagggatgttgaaaaagcagagatgcagagtcctaaggcttgagcaattaagactttgaagtgggaactcaatagggtgggatggccattgacagtttgccatcaccactgtctccacatttttctttcttagaacatcacaccactcctcaatcttctgttgagcaccattgttgatgacagatgaatcaattctgaaataactaacagggccaggatgagagaggagaatcgatgttattttacctgacaagtcgattctttcattgggcatgccaccttgatctttcattgcacgaacaaggtccagatcatgaaagatgagaggttttcccagccatagttcattccaaggactagagacaactgatccatgtagagtgagctctttgccaacctcaaacgcgatcatcccgtcgcttccatccacgctgctgggaagttgctgaactgagctcgaaccggctccctgatcctccacgcatgcatccccatgggcttgaaccgaagcagcgacatagccatcaccggcgcggttcccctcctcgagcctgcggccgcggccatcctcacgcgcatcgcggcggaggcggacgctacgtccctgatcacgcccggcgccgatgcgtagttggtgggttggtgcggcgtccttgcgctggccaacgcagcgcgcgtccccaaatccatagccgcgggcatcctcatcatgcgcgctgccaccgctggggccttgatcaagtccaccgaggccgcatgcttggcctcgcgcggcatgcctcccctgatcgctgccctcgaactcgaacccacagctatggccaccttcctcgcgcgcgacgcgcttacttccactgatccctgttgctacggatggtgcggcgcccatggcatgcctgcggccgctgctgctgctgctgcttccgaccccaaaatcgaatgcatgttcgcggcggttgtccgcgacgccgctgctggtgccttgctgttgctgcgtcgcctgcgcttggccgcctccaccgctggcgctgggctcgcgattctctcccaaaacttggagtccatggctgccgaagcggtagtacatggttgaactcggagccctcggaagggagccgagggcagcttgtatagaagcgcgctccccggggtgggcggtggcgaaggccgccat

SEQ ID NO: 22540 - DNA, 2988 bp, Oryza sativa
  Clone ID: TF_OsC382714_1
atggcggacacggggagcctggagaagatggggcgagagctcaagtgccccgttcttggcagcctgagccttctcagttcggcggtatccatctcctgcaaccacgtcttctgcaatgattgcctcacggaatcgatgaaatccacgtcgagctgccccgtgtgcaaggtcccgttccgacgacgagaaatgcgaccagcacctcacatggacaatctggtcagcattttcaaaagcatggaggctgcagcaggtaccaatgttgtctcaacacaggaggctcctgtggtaaaacttgcagatggatcagattgtgtcaacagcgggaaaaattccaaaaggtcacaaaaatcattgacacgaaaaaggaaggtaacatccgagatggaaaaaaatacagcaaaggatgctacagcttctgcatcccaacctactacaaagccttccttctctactaacaaaagaatacaagtgaaaccattccctgaatctgagacaccaataagagctgagaagattatgaagcctgaagagccaaaaaataatctgaataatgatgttgaaggaaagaataaagcagtggcatcgggtcaacctggaagtccttcattgtcaccctttttttggctaagggaacaagaagaacaagaaggctgtaccgctgagacgttaagtgaaacgcaatctttagacacacccttgcgtcataatgcaccctcttttagcgatattaaagattctgatgacgaaatccctttaaatacaactccaaatagcaaagctgcggctacagaactctttgacagtgaaatatttgaatggacccagagaccatgctctcctgaattgtattccactccattgaaaaagcagagtaaagctaagagtaaactagatcaaattgaagagaagggtgatgaagaagatgtgcatattggtggttcatttgataagctgggtaatgcaagtaatgcagctcagcttgtcaatacaaaagcaacaaagcagaagagaaagaaaacaagtcccagtaacaaaaacagtgcaaaattgtccaatcgtgctgagccctgcataaaaaagtctgatgccaatcaacaaggttcaaatagacgtaaaagtgctgccctaaaatcttgtcagaaaagcagcagtgctgtagggaggaatacttcaggtagaagaaacaaggcctctagcaacagcaagccaattcatggctctagtgataactccccagagtcatatcttcctaaggagggtttggatgttgaagcacctgacaaacccctttctgaaaggatccaaaacttggagaaaactagtcgacgaaagggaagtgcaaggaagctggaaatggcagggaaaactatttcagatactacagagaagaatagtgagccaagaagtaagagagtcagaagaatgtctgaccacgctatagctaaaccggttgaagttccttcaggatctggaaatgaaacagaaataccacagcttcacaccctcacaaaaggcagcattcaacgcaaatcctccaacgctagaagacatagcaaagtttgtggagaacaggaaggtaagaataaacttgagaacacgacaatgacacctattattttacatgggaaatgccaaaataaagaggcagtatgtacagctccttcagtaaggactgcatctgttaagtacaagcaagcaaaatttagcgaacaaccagattgttttggaacggagaactttggaaaccttcaagcatgccctgcacgtaatgttttactgaagaagtgtgaggtatctactttgaaggtttcctgtgctttctgccagaccgatgtcatcacagaggagtctggagagatggttcattatcaaaatgggaaacaagtccctgcagagttcaatggaggagccaatgtggtgcactctcacaagaactgccttgagtgggctcctgatgtctacttcgaagatgattctgcctttaatcttacaactgaattggcgagaagcagacggatcaaatgtgcttgctgtggaattaaaggagctgcacttggatgctttgagatgagttgtcggagaagtttccacttcacctgtgctaaactaatcccagaatgcagatgggataatgaaaattttgtgatgttatgccctctacatcggtctacaaagttacccaatgaaaattctgaacagcaaaagcaacctaaaaggaaaacaacactcaaaggaataaccggcttttccaggtcatctcaaataggatccaatcaagattgtggtaataactggaaatggccatctggatcaccacagaagtgggttctctgctgctcatcactttctagttctgagaaggaacttgtatcagaatttgcaaagttagctggcgtgcctatttcggcaacttggagtccaaatgttacccatgttattgcatcaactgatctctctggtgcttgcaaacggacgctgaagtttctcatggcaatcttgaatggcagatggattgtctccatagattgggttaaaacttgcatggagtgcatggaaccaattgatgagcacaaatttgaagtcgctactgatgttcatgggatcactgatggtcctaggttaggaagatgcagggttattgacaggcaacctaagctgttcgacagcatgaggttctacctccatggggactacacaaaatcctacagaggctacctgcaagatctcgtggttgcagcaggtggaatagttcttcagaggaagcccgtatcaagagaccagcaaaagcttcttgatgacagctctgacctcctcatcgtttacagcttcgagaatcaagatagggcaaaatccaaggccgaaaccaaggctgctgatcgcaggcaggctgatgctcaggctcttgcttgcgcttctggaggcagagttgtgagcagtgcatgggtgattgactcaattgcagcctgcaatctgcaacctctttga

SEQ ID NO: 22541 - DNA, 442 bp, Oryza sativa
  Clone ID: TF_LIB3432-023-P1-K1-D7
cggacgcgtgggtttgtgatgctctgcactgtaggaattgctagcattgggagatagaatgggcaccgtaagcactggcctttcagaagacgcgctgtccaagtgtctagacagaagcatgtacatggccactacttcaggaactcatgaagattgtgagagaaaatgcagcatatgccaggcaagttcatttgcatgagtagattgcgcatgacactgtttgcagagttggattgtactgactactatgtacgaaatctttctgtgtgcattcttcaggaggaatattcagatggtgaggaggtgggcaagatggtctgcaaacattactaccacttctcctgcataaagaactggctccggcagaagaactggtgtcccatttgtaaatccgtcgctctgaataccaactagcactagcagggtgcttcttcagaaacca

SEQ ID NO: 22542 - DNA, 1862 bp, Oryza sativa
  Clone ID: TF_OsC45320_1
gcccaggtatttttttttttttttttttttgatagggcgatacaaaacatctgtgctgttcttttcttatattatatcatcaataaatatacagtgggataacattcacataacacggcagaggcaacaaggaaccagtacttccgagaagtttcgtctccgtggtgcctcagggcttaagaggtggccatcttgactcaaagaggtctccgcccgtggcagacacaagaaacatatacaacttgaaagtatttattctgtgtcgcagcaaacctcaaatacacaccagttaccattcattctggagcaactcccttccatatgcatcacagagactactggagctgatcctcgttatggatagtacatatatcctgtgagtgtgctcttcaaagaaccgtgcatatcacttgtcatccagttgtttttgtagaaagtcgagaaccgagagacgccgctgctcaagactggcctctccagattccagcttcaaattctcaaggcatttaattgcttcctcaaaaccctcaactgccatgctttcgttcccaagatttctatcgacatccgcaactttggcaagagaagttgctacatcaatgacctgggaagccacagctgagtgttcttttactgcacttctgcgaacgtccaacgaacgcgcataatagcttcttgctgagtggaggtccccatcataatagcaaagatctccaattttatttagtgaaactgagagagtatggaccaactccagatcctttttgggcaatttcgagaggaattcagcactttcttcatagtaagtgattgctgaaggagcatctcccaaggtccgacagcagtccccaagcattcctaacacagctccaagttgagaacacagttcttggttgtcttctttagatttcaactcttccctgatgtcttctgcacacatactgagccttgactttgcactttcaatgttctgtgcgcgaaaagccctcatcgcttgctggaccagaaaagctcctctctccatggagacatgctcgtaaatgaccttggtcttgtcacttgcggcttcaccatcgcctgcagcatgtgatctcttgattcgggcatggccatcaatgaagcggtcgacaaggccttgaagctcatcatcaggctcgatcccttggatgtcagcaccacacaatggacagtccttaaagcgcaatatgcatgccttgcagaacttgtgcgagcacggggtgcatttgctgctttgatgtagcagagcgtggcagaccacgcagctgagtgggccaagcttgaaggtgttgttggagtcatagccaaaggggcactttgctggcaccacacgaggatcggtgttagcattgccagttttttcattatcgtcgtcgtcggtgtgattgttggctgtgacaggacatgaggtggttttgttgtctgattttacggggcatgtggcgccagcagaggcgagtttggcaaacgggcatagagagctcataatcggttggtcttaggtggattattatttaccttctcctccccggggggaggggcgcaggctcgggcccgcggccccggccgccgcgccgccgggcggccgcggcgccaggctgcctctgagcggcctctgcgctgggagccgttgacccgcccctgcgccgctgctgcctcgggagatgccgagagggagagggagagggaggaggaaggcggagacgacgagaccgaggaggcacggccacgtgaagggggccggtggcagcaggcggatgcgcgccggcagaggtaggcctcgtgcccgtgccccgccgctgggggtggggcgacgctggggcctcgtgctcggcacgcgtcgc

SEQ ID NO: 22543 - DNA, 650 bp, Oryza sativa
  Clone ID: TF_LIB4309-027-R1-N1-G2
cagtcaaaagaggtgggattagattaataatctatatgagtaactgccagtgtctcttctgttcagttcagttcaggacataaatacagggaaagaacttacaatgggcagccgctctctttttactccagtcctacccatcgcaaactctttccatcttttttttaacacgccctttgctgctcgcgctgcggccaacagcaaggcaacaaatatgccaccctgtagtagatcgatagatacacaagaagaagacgagagaggacagacaaaaatggaagaagaaaaagaatgaagaagaagcagcagcagagctcttgtttcccctttttcctgaacaaagcttcgtgcagcaaaacttcgctttttccatcagttttattcccttccctactgtatttccacaactttacattactgaatatgcccgaaccacctccgcgatcggcgctcggcatagtgggcatttgccaccactgcgaattagctcgtttgcacattttgagcaagtacacatgtgcccgcatctgtataatagagaatcaatttgcgcatcggagcatacgcaacaggttcccttcctcactggatcccattttgatccatcgtcagatagatccgtcggataccctttcaggtcctgcaaagcg

SEQ ID NO: 22544 - DNA, 534 bp, Oryza sativa
  Clone ID: TF_uC-osflM202026e07b1
gtctactcccgccatggcgcggcacacggctcctggtgctcgccgtcccaacccacgtctcaccagacgacttcgtccgcttctgcggcccttacatcgagcacgcctccgatatccatgtcgtcagggatgatggggtggaggaccggtatagcgtgctcgtggagtttgaggatcagaagagtgccgatgggttctacttggacctcaacggttggaggttctcgtcatccgaggtagaggtttgccatgttctgtttatagttgctgtccaatatacaccatcaaccaagcctgcggtgactccaccagttggatccactgagctcccaacatgtcctgtctgtattgaaagattggatcaagacatcagcggaattatggcaacgacttgtgatcattcgttccagtgttcatgtgtttcaatgtgggtcaattcatcttgtccggtttgccagttttgtcagaagcagtctaagaatcctacatgttctgtttgtcaaacctctggaaacctatggatctgtataatat

SEQ ID NO: 22545 - DNA, 6299 bp, Oryza sativa
  Clone ID: TF_OsC34959_1
atggccgaggaccacgacgcggaaggggtccggatgacaggcgagggcgcggccgacggctgcgacgcccacagcctcgccggcggagaggaggagatcggcgaccagcgccgccgccgccgcgcttcctccacgcaccggccaccaccgcctccaaggggatatctccgtgggcggtggccatcgtcgacctcgccgcccttagggccctccacgccggcgcacgaagggctcgccacggaggacgagcggagtggagctccagacgcgccgccagcggtaggcgagcgcggtggtgcgagtcgcgtccttgacggggaggcgggcgacgcggaggtcgtcggggagagtgctaacgctgtcctggccgtcatacccctcggcggcggaaagcgtggcaccgatgccggaggcgggatggccgaggaaccaccggagacggcctctgacttggaggcggccttggacgtcgcgaggacagcggcgagcccctcgacggaggtcgccatgaaggtcgtgtcgctgtcgcacgacgcggagcaggggatgaggcagttcgtcaccgaggtcgtcagcgtcggccgcttccgccaccgcaacgtcgtgccgctgctcggctactgccgccggagaggcgagctcctgcttgtctacgactacatgccgaacggcggcctggaccagtggttgcacggccaggttcatctaagaagacgttgtcctgtccttcgggcaaccatatacctgcaacgatgtctcggaatagcttctagtccactccagcgtgttgccggcatgctgggtgataacgcctgggagaggatccagctgctgtggaacttccaagaggatgtccaagatatgaagagcaagatgactgacctcaaggttgcacttagctatgcagacaagcactctagagagactgacgacgacgcattggtgctacgacattggctcaacaagtacaagtctgttgcctacgacatggaagacacgttggatgagttgttgactaatgcgatgatatgggaaaataacccatgcacggttaaattgttcttctcatcaatcaacccactcattgtgcgcatcaccatgtcaagtaagatgagaaatattcggatgaagttagataagattgctgaggaccagaagaaattcccctctatgcaattggctaacccaactggacaagacagtaccgataagtggagagaaacctttattggtcacacagacgaaattgagatggtagggagggcaagagagaagaaagagatattaatcaaggtgttgcagaacgatggaggccaagaaatctctatcattcctgttgttggccttggtggtatgggtaagactacattggccaaagctgtttacactgacaaggagacacatatgtttgatgtgaaagcatgggtccatgtctcaatggaatttcagctaaataagattgtgtctggcattatatctcatgtagagggcagcactccagctaatattgctgatctacaatatttaaaatctcagctggatcgcatactctgcaacaagttatatctcataatcctagatgacttatgggaggaagggtggtctaagttggagaagctgatggaaatgttgcaatctggaaagaaaggaagcaagataatagtgaccacccgtagtgaaaaggttgtaaatacattatctaccattcgtttatcatattttcataccgttgatccaattaaactggtgggtatgtcaattgatgaatgttggtttatcatgaagcctcgcaatatggaaaattgtgaattctctgaccttgtagacattggaaaagaaattgcacaacgatgcagtggagtacctctagttgctaaggctcttggttatgtgatgcagaagcaccgcacaagagaagaatggatggaaattaaaaatagtaacattctggataccaaggatgatgaggaaggaattctgaagggatttattcaagatactgatgggcaaccacttcagaaggttgctatggaatatgttaatgaattattggggatgtccttccttacaatcttcacttctcctacagtgctggcttcaaggatgttattcaagcccacactcaaacttcatatgcatgatatggtacatgagcttgcaagacatgttgctgaaaacagaaatactaaaagggacaatttgaatttccactatcatttattgttaaatcaaaacgagacatcatcagcctataagtctttggcaacaaaggtcagggccctgcattttaggggatgcgataaaatgcatcttcctaagcaagcattttcacatacattatgtttgagagttttggatttgggtggacgccaagtgtcagagctaccaagttctgtttataaactaaagctattaagatatcttgatgcttctagccttcgtatctcaagcttttctaaatccttcaaccatctattgaacttgcaagccttgatactttcaaatacttacctaaagacattgcccacaaacattggttgcctccaaaagctgcaatactttgacctatcagggtgtgccaaccttaatgagcttcccacctcttttggggaccttagtagtcttctcttcctaaacttagcaagttgccatgaattggaggcgcttccaatgtccttcggcaatctgaatagacttcagtttctgagcctatcagattgctacaaactcaactcactgccagaatcttgttgtcaacttcatgatctggcacatcttgatctgtcggattgctataaccttggaaagctcccagactgcattgatcaactctctaagcttgagtatttgaacatgacaagttgttccaaggttcaagcgttgcccgagtctctatgcaagctcacgatgttaaggcatctaaatttgtcatattgtctaaggctagaaaatctgccctcatgtattggtgatttacagcttcaaagtttagacattcaaggctcctttctccttagagacctgccgaatagcatttttaacatgtccacacttaaaactgttgatggaacattcacatatttagtatcttctaaagtagaaaaactgagggagaatctgaaattggaaggctgttgtaagctggatggaggaagcactgacctatgcagtcggattacggaactaaaaaagacacactgccatgaattagagatacaaggtcttgaggattttaagcatttggaagggatagagcatgctatacttctcaacagcttgaagcttacaaagttgattttttcatggcaaccgaagcagtatacaaatgaaacggctcatcacaaaacggtgcttgggatgctcgtgcctcctagaagtgtccatcaccttgctatcaaaggttattgtggcatcgagttacctaagtggatgttggatattcgttcctacctacctcatcttaccaccatctttctgcacggtctgatggaatgcaaccgcctccctccacttgggtgcctaccacacctgagagcattgttaatgaccaaaatgcctaaaatcaagagtgttggtccagaattttatggagactacggaagctgccagaagctaagaatgattatcttggcttcaatggacaatttggaagagtggtggacaactagatcatctaaacaagataacgaattatcattaatccctgatttacagatgttgtgggcttccgattgtccaaagttgaaattcctgccttatccaccaaggagcttgacatggttcatagagaatagcaatcacgtgttgccagaacatgggtttgggaaccttacatctgctacttatccacttcatctttccatcgagcgtgcacccaattctcgcgaaatgtggcgtagggctcagcacctttcttcaatcgagtctcttactctcatgtctatagctggccttagagccctgccagaggctattcagtgcttcacgtccctctggagactcagtatattgggatgtggtgagttggagacgctgccggaatggctaggagattatttcacttgtctggaagagatttcgatcgacacttgcccaatgctgtcttcactgccggaaagcatacgacgcctcactaagctgaagaagttacggatcaccaactgccctgtattgtcagagaagtgccaaggagaggacaggcacaagattgctcatattctagagcccatattcctgttggctgatactgttagcagggttcttgtaacagcaaactggagatctaaaccactggatttccgttggcacttgtctctcttgaagaaacgaaagggttggctcagttgtcgttcatcactctcagtggctgcttaccaggctggattaaatctcgatatctgtttgtcagtaagacaagttagcagatggggatcagagaagttcagaactggtggaggtgctcatatccgcgagtcagtaccacctaatcatatggaggattatccaagtgggagatcaaaagcagctattggatttctcagaagaggtggtggtttctcttcgagaaatcaaagcactgaagagaggaccattcagaactatgatggaccaggaatcaccacaagactcaatccgatgaaaaccaggctgtctgataatcaggagagaccaagatacctacgtgactcattcagatcttcaacctcaatggccattcatggaagctcttccaaagttccgcttaggaaattcggtgacgaaaaacgaaggcaaacgttgttggcaggggtagacattgctgaaagtagcagcagaaatgctgggggcaaacatctggagggtagtaataagagaatcgttgtcgatgataggagttcagatgttctgcatactgaaacagaaggcttggctactgaacaagaccaattgatagcacccaatgctggagtttctgattctgctagttcgtcagatatttctgaacatgcagttgaatccttggtaaggagtgctgctccaagttctagaacccgtagacagaaggacaaagaattgaatttgggtcaatcaggagtttgctcttcgtcatgtactaacaggcctactatatcaagatatgctcctgccgatgtgaagcgaccgtgtaatcatgctagcggagtacaacagcatggtcataacaatctggactgtacttcagtacctaattttctgccatcaggttgctcatctggttctgtttatagcaggaggtttgatgcaatgagaaaaaggacttctgatgggggaagtttttctagatcaaggggcttaagtggaacggctagcttagacgattcacctcctgcataccctgccattgctggtcctagaatcagaacaactacaactgaacgggcttcacaacaaaatgcactaagaagcagaaggaattttcaggattcagcagtgtcagtaaggacaagaagacctccttggggtgctaggttcaggatctctgaggaaagagaggatggcatgatttctcagcgtgattcttccatagggaatcaacagtcagatcaggtgcattcatcttcggaagaggcctctacagagagctcctcaagaccattctctgcagaattacctcatgcaatttactcatctagaggagagggatcaaatgctttcactgcaaggagaagaagatcaagctccctttatgaggaaagacctccacagacattccatgatcttttcagagaaagaaatggccgaagacacatatccatagaaggaattgcagaggtattactagctctggacaggattgaacaagaagcagaactgacttatgagcaattgatggtgttggagacaaatatattgcttggtgctttcacctcccatgatcagcatagtgacatgcgcatggatatcgacaacatgtcctatgaggaattattagcattaggagacagaataggctctgttagcaccgctctttctgaggagcaatttgtgaaatgcctcagaagaagtatatatataccagtggctacaaaagcaaacgcgcaagttgtagacgacatcaaatgcagcatatgccagggagtctactgctactaagagggtgaagaagttggacggctgggatgtgagcatcagtaccatgtgtgctgcattcaccagtggctcatgcagaagaactggtgtccaatatgcaaagcttcagctgaaccttctactgtgagctaatcccacctgggagattcaagcctgtaaatatttatcatggatttggcgtccatcttttt

SEQ ID NO: 22546 - DNA, 2387 bp, Oryza sativa
  Clone ID: TF_OsC88477_1
ttttttttttttttttttctctctctcccccccggccctcttctctcgcaatcgcatcgcaccccctcccccccgagcttgactccggaaaccctaggcagcccagccatctcagctctcggcgacggcgaggcggcgctcgctgggggtgcggccgcggcggctgagcttttgccagatccggaccaccgcccccagttccggcgccgcggcggcggcggaggcggaggcggaggtgtgggagtcgttggcgattcggccccgggggtgggtgggagagggcgccgctctgatcggtgctccgactccgagtggttctaagctaggaaggatgatcatgttacgttttgctcaagattttgcttcacactgataagatctcagcatttggatgattaacgcatattgaattctttctcaataaacatgggagctaattgctgtatagctgcaaaagagaggcctcagccatgtgttactccaattgaagtgtcagcattcaggaacgtaagacactctccatcatggagcttccggtgggataaccgcacacacatagaagacataatggaaatgcccgcattgttttccaaccatagtagtggaagcattcggcctgaaacaaagagtggctcaattgcgccaactgatggcttttctaacggaggcagcccttctgatatgttcaacaagctcaagtgccataaatctgacaggaagagggagtcatctaagattgcgagatctgaccttcgagcaggtagatccaccacaagcaattcttcccctgaggcaaagctttccagaaaatcgctagacacagtaagtgtggcttcagattcgaagatgtcaatctctgttccttcaacgccgcctgctatatccagagcagatccttcatcatcctccagggggcattctctaccaacagatgcagattcaatgaggaaagcacgtcgatcaccagggtatcaactgtatagacaggtctccgacagcaagattccatctctcaggtctctcaacgagggcgcctctcctgaaggaaggccatcctcctccatgctctcagtctgcagcaacgatttatctgcagtaggatcacatggcgagtcatctgatggttggtcaatgcgaacattttctgaaatggtcgcatcatctcagagagagagatggtcagttgatagtgagctcttaggttctgtttcgagtaaaatgacaagatcaaatgcttctaataatcctactacacattcacctgaccaagaggtgtgcaagctatgtttaaagctattaaaggaacggtccacatggaatgctcaggaactggctgttgttgctgttttattgtgcggccatgtttaccatgctgactgtttggatagcttaactgcagaagctgacaaatatgatcccccttgtcctgtatgcacccatggtgagaaatgtacagtgaagctatttgggaagttggaatcaaagacaaagaacaagatacctaaaaatgtgatagttgatgttaatctagatgggagctctaagcatcagaaggaaagtaggagagagcccagattaggcacaagttctagcttgaagggctcgtttagtcgcccgtttttgagaaggcatttctctattggctctcggccatcccagtcaatttcagagagcgagtctgccagaaagaagggcttctgggcaaggcactggagggaatagcataactgccagtcatcatcgagaaatccctcttgaagaggagctgtactcccaagcgagagcaagcatgcgggagctgaagtcaagccgaatcggtgcaaatgatatgacatggctgttgaacgacctccgcattgaaggtttctcctagccatagtcatattcggccgcaagcacttgtcgtgctggaaagggtctcgatagtagaataacagttgatatagtatactatgcaactgaggtttatttcagagcccagtcgcagtttagtagcgagtaatctaacagaaaaaggggatgatggccttcagagttgagaccgaaggtccattgctgtgttgcaaggttatatataatccagcgtcccagcaatctagttactatgttttgtggttttgtattattggttatgtgccccctttattttatggttgcaaattcatatagtttgggaacttgcgtacatatttggaatcttaactcgggagatgctatttattcatgacaacgcatcacagaaggcatgtaacggttatgtaatgttgtttgtcatcttcgcagacgtggtaatatgatggtcatgcatgtttttaacaaaaaaaaaaaaaaaaaaaactgagactagttctctctccctcgtgccgattcctcagcccgggatccac

SEQ ID NO: 22547 - DNA, 1886 bp, Oryza sativa
  Clone ID: TF_OsC84895_1
cttattgcatggcatcatctggcgccgagccgcgacacgtcacacaatagtttttatcttttgttacatgccaaaatttgattgatcgatatatttcttttttaaaaaactattgtaattacatcgtctttgattctgacatttgcttattctgacgatgagagaaacaaatctgtacatcaagaagagaagctctgtatctatcatatctcagctactcaagtaactagccgtacgcccggtcccaccgccatcgccggcgacgagctcggtcgccgtcgccggcgggctacgggtaggggtcggtccagcacacgtccccctccgccgcggccttccaccgccggttgaatatctgcagctcggtgtacgaccgctgcctcacggcgagccggtcggtcgccgccttcgtcgccgtcgacgaaccgcttcgccgccggcttgccgccgccgtcgccgagcgtggggatgccgcggtggaggacgtactcgctgtcgacgatgccgacggcgagcctccggtcgccgccggcgcagtacccgagcttgaagtcgaggccccacgcgtagatgaggtcgttctggatcatgtgccacgcgcaccgccatgccgcccgcgagaacaccggcaccatcatctccacccaccccgtgcatggcggccccgtgctgttgtcgtcgcatctcccccctcccctcgtcttgtagaatctcctgtgaacttggcctttgcgggcgcggagtgtgaggcggtggtggatctgggagcggtggtcgagcgcgggctgggagatctcgaggcgttcgcggcggacgacgcggaggtagcggatggggtcgaagccgtccacctcgatgtcctcgtcccagaggaagatgtactcatactcggccaccatgtccgggtgtaagaacctcttcccgaaccaccatttcgtctggtccttcgccgccacgtgaatcgcccggtccgaccacccgagttccctccacccgtccatctcgccgtcgtagtggaacaacatcaccgtgaacctgtcaccggggaacttggagacgagcttgtcgacgacggccttctgctttatgccgacggggatggcgaggaggctcttcgccggccgggcgacggcggcgcgccgttcggggttgccgccgagcggctccatctcgaagttggacttgtcctgcacgatgcccttcggcaatggctcgctgcctgaaggcctgcactgattctcgcagatgctgctgccggcgagttccgctcgctggacgccgccggcggcggcgccggtgcctgcctcttgcacctcgctggtcggagccctcgtctccgtctcttgcacctcgctcgtcggagccctcgtctccgtctcgcttacgaccatttctctcggccgtaactccttgtgatcaagcgtgacgattgcaccgccggcgaacaccagcacgaagaagatgagcgccgccggcggcgcgacgccggagaaccgcttgcgcggcgtggcactcggtgcagccggtccctctgcgtcaacgtccgtgtgcccaccacggcaccaccacgtcttcttcttcttcctggcttcctgctcgcctgcctgccctctagttatcgtggtcggcgtcaacggaatggagacgtgtgtgttgaacggcgccgttgggtggatgatgcactgcgttgttgctgctgctgcgcgtgtggtagacgccccttgcttcgggtccgcagaagggagatacacgcggtggaagttgttcatggtcagcttcctccggcaggtagggcacttcttctgagcctggattgaggccttgatacactgcttgcaaaaaatgtgaccgcagatggtcgatgacggttcgaccagctcgttcat

SEQ ID NO: 22548 - DNA, 1657 bp, Oryza sativa
  Clone ID: TF_OsC74850_1
ttttttttttttttggatgctaatagcacaaaaagtttcttataaaccccaggtgcttcaattgcatccagtttgaagaatttggctgaacataagtacgtgctagccagatctctcacgagtctcttctgtgatttgcaaagtcaaattgttctgtttaccgccgcgtgctgcttctgctgcctcgtcggcaccctgggcggagcattagtacgtgcttgctgcgtcttttatctctcacaacagtgatatgcaaagtcaaattgatgtgtatacagtggctagtagcttcagtttcgcagcagtgacatgaaccgagtttaaaactataatatactcttagtcataacaacagcattggataattctgccatgttatgagccgtctgatagtgaggcatgaaacatagaattggtaccaggcttgcgattataaccgacaaaaaacaaacctcccacaacctttcctgctattggtgtgaagtgtctccgcctttcctctgccattgttgcctagcaggttgcccttgcccatgtggttgtcttcttgaagcatgagatcgatgtctccttcgatgacctgaactgctgttgtgcttggtggtaccaccagtgctgtttgtctggttgagtggctccgttcctgaggttgaagttgtggtgtcttcacaagaatcatcaacggtgtctccttcggaagcagtaggcgcgctgggaggacgagggatgtacattccaggctgtatggaaaggtctttctttggttcaatcaggccatttcgttcttgttgtagattgaacagcgatgcgaacttttcttgacggatcttctctgactcagaatgaagtacttctttttcatcttcgtccagatcaatcgataaagatgccagttgagaagtatttgcacctagcagatcacgaacatgctcaatatccttctcatcaaacactttgcggcaaactggacatagtcctttgtgctgacttacattgtgatgcttagctgagctggacaaatccaatccttcagaagcatgaataacttcagtagttgctgctgtactactcttcttcgagtcagtatcatcattctgtagccattcccaccatctcataatgcagtcactgtggaagcagtggtagcacgacatcaacttcataaatggcaaagcagaaccatcattctctttgactaaaggatatagacaaagtgggcaatccccagctggatgattcatatttgagagcatctccacagcttcctcacacagcgtcacaagcatcgggtagcaggaaagttctcttgccttgttctggatgctgctaataagatacacctgtcgattctcatcaaggcccttactttccacggcataaacatgaggaggtgcttttggatactgagaagatgctttaattccaagaaatagctccacgaactgctgcgaggagtcgtcggcggtgcgggggcggacgtggacgacgaggtggggagggaagccgcgcaccacgcggcagtcgtcgccgtacaccgacgccaccgcctccacctcctgccgcacctcctcctccgcctccgccgccgccgccattgcttcggtgaagattttccttttttccctcgccccgttctcctgctgccccggctttttac

SEQ ID NO: 22549 - DNA, 656 bp, Oryza sativa
  Clone ID: TF_OsC116722_1
cgatgtaacaagaaagatgattttgactgtgcttcaaacttggtagagtgggggtacaacagctgcgaactaacgcatttagccatagcaaataacaaagctgcaattagcaaccatagtgccactagcataacaagactgaatttgctccagactgttcacagcgaaaggggatgcttgaaacaaaattttcaggttaacataaataatatacaacagcagctaagatattttgaggctagtagttctttggggcaggtttcactaaacccagtccagaaccactccccaaatgcttgaaatctctcgcctctagacgctcatcatgggcagcgaatccagttcctcctttttccaaaggaacgaaattcctctccttgcacggtttgttgcacaccaagcagaccttatcagttacaaggaacttgtcagagcacttcttgcagaagacatggccacacgtgctgatcgtcaccagggacatggtgtttgttagggtagacttgcaactggggcacatgtagctcttctccaccgacttcttgtttttctggtcggtgttttcttcagtgaaggagatagggaagagcgatttcaacttgagcttctcctgtccctcggggcagattgtgtcagtggagggagcttctactttg

SEQ ID NO: 22550 - DNA, 517 bp, Oryza sativa
  Clone ID: TF_OsC57414_1
cccgggctgcaggaattcggcacgcgcgtggcaaacccgcgctctctctctctctctctctctctccccctccctgccgctgctgccgccaccgccgcggcggcgccccgattcggtgatcccccgctcgcccatctccgccgtgacgtatcggcgacgcggagggagccccccaccccccacctccggatctagggtttcgaggcccaggtggcgttgcgctgcgcccccgctcctccgcctctcctccgccgccgagggttcgcgtgaggtttctgcgtattaccagctctgtacttaatttactagtgagaagcaaaatgaagtgcaatgcttgctggcgggagttggaagggcaagctgtatcaacaacctgcggtcatcttttatgtacagaggatgctaagaaaatactgagcaatgatgctgcatgcccgatttgtgatcaagtgctctaaaaagccatatgagacctggtgatacaaattcaaatgatgattggacacatatgtcaatg

SEQ ID NO: 22551 - DNA, 457 bp, Oryza sativa
  Clone ID: TF_LIB3432-009-P1-K1-C1
atttgactcaacaaaagacatcagtgcactgcactgcggacacacgatccatctggaatgcctatacgagatgagatcccatcaacaattctcttgcccggtctgcctgaggtctgcttgtgacatgtcccatgcatggcaaaagcttgatcaagaggtgcattttccttctcccattgcacagcttatccattgacactgaccatgtacatatacatacatacatacatgcatagaacaccatccaaataactcttcactcaggttgcagcatcgccgatgccagtgatctatcagaagaaaatgatatggatcctatgcaacgactgtgggacgacatcgaacgtgcaattccacatattgggacacaagtgccccggatgcagctcttacaacacccggcagacaagagccgcccctgctgccgcgtgctccagagtctgaattctgaagaaca

SEQ ID NO: 22552 - DNA, 1163 bp, Oryza sativa
  Clone ID: TF_OsC252488_1
atggcaatggaagccggagcaccgcggggagccgccgccaccaccagcggcggtggcgggggcgcgccggaggcgggggcggagctggggagcagtggcgcgccggtgacgtgggggcgggtgtggagggcggggcaggaggcggcggcgcacgcgctgctgctctgcttcaccgcgctcctcgccctcaagctcgacggcctcttccgcggctcgtggtgggtgctattcacccctctatggttgttccatgctgttattgctcgatgtagattttcgttacctgctccttcatcaccacaaagttgtcagatggcttcctgccattccattgttgccacaccattgctagttgcttttgagctgcttctatgtgtttatctggaaggtcatgatgaaccttttattgatttaaagcttgtattccttccactattagctttggaaatcattacacttgttgacaatttcaggatgtgtggtgcactaatgcctggacatggagagactatgacagatgaagcaatttgggagaggcttcctggcactccatctaacgcaaaatttttcccactccgagctgttttcttacctatacttttgcttcaagtgactactgtatcgtttgctatttggatattctttgaaaggcttgttacaaaattacgagctaaaaagatcactgacggatatatttctttctcatcaaagattgatgaattgtttatgatgatgcaacatggttcaaggctcatcgcttggtggtctattgatgaagatagcaaagaggagcaagctcatttatgctatgcaaataattctgggtatagtaccttttgcagctatccaccagagatggtaaaagagatgccgaagaaagttcttgacaaagaggtgaaaaaacgcaagataaaattttaggtgcaatcctaaatggctaagcttagtccactgcagtgtgataagctaaaaaatgcactgatcctatgtcggatatgctttgagagagacatttgcatagttctgcttccatgccgccattatgttctttgcgaagcgtgctctgataagtgccggtcatgcccaatttgtcgagtgagtattgagaacaagctacctgtttgtgatgctatgagttcagctgattcaataagtgatacagt

SEQ ID NO: 22553 - DNA, 2115 bp, Oryza sativa; identical to SEQ ID NO: 13317
  Clone ID: TF_OsC380357_2

SEQ ID NO: 22554 - DNA, 1882 bp, Oryza sativa
  Clone ID: TF_OsC565_9
ggagcgcgtcgcgtccgcaggggccgcctcctcctccggatcgtggggcgatgagcatgcattcttcaagagggatgagaatgagataagtccgtactcatggaatatcacagggacatataaaggaagttggaactttgctggttccacaaatggttcttctaggtttcttgagtttacaaaattgaagggcgatgcggttttggaactattaagtacaccgacaaagataagcggggtgcactatgttcagggatctgttacattccatgatgttctagacaatgctcatgatcgtggagttgctcagataaggttagaaggcgtgtacatatggccttttcggcaacttcggatggttgcaaacagtggtgcagatggcgagccacttcaagaagaggattacttcttatcaaatccatatcatttgctgcggattttctcctctcaagtgttccaagaaacctctgaagagaagaaccggaggaagaattctcttacttacgacatggagaagcattgtagcgtcgaaatagctgctaaggtggtccgtgtgtcctctaacctaaatgagggagagcatgagaaataccgtttggagggattgatggagagtacagcagtggatgatgatggagagtgtttctcaccgatcttattaaatgcaacatcattgaatgttgaagtttattacaacaaagcagtcaattatacactgatggtcacttttatctccttcctccaagttttgttactgattagacaaatggaacatagcaacacccaatctggagctgccaaggtttcaattctaatgatagggcaacaagctatcatggatgcatatctttgtctactgcatctgactgctgggatattggttgagtctctctttaacgcattcgcaacggctgctttcttcaagtttgtcgtattttctatatttgagatgcgatatctccttgccatatggaaagccagtagaccattgaacagtggagaaggctgggaagtaatgaggagagaattgtctgttctttacagccgcttttatggcattcttttgggagggatccttctcatgtatgagttgcacaattttctgcgcccacttcttttcctgatgtactccttttgggttcctcaaattgtcacaaatgtcatccgggatacaagaaaacccctgcaccctcagtatattttaggcatgacgatcactcgccttgctattccactgtatatatttggttgccctagcaatttcatgcgcattgagcctgacaagacatggtgcatagctgtgacaatattcatgggtatccaagcggcagtgctcctgctccagcactattttggttcacgctgctttattcctcaccagattctccctgagaaatactgctaccacaggaaggtagaggataacacaaatcagcccattgattgtgttatttgcatgactacaatcgaccttacccaaagaacaagtgaatacatgtggcaccttgtgagcatatattccactcaggctgtttgcaacgttggatggatatcaagatggagtgcccaacttgcaggcgctccttgccgccagcttagatgagcactactttgtaccatatagttaacaagtaggtagctcagcatattcaaggtgggaattgaggtgcaataagacgagttgcaaccatgggtggtttctcgaagatagctgtagaaaatctgttacgcttttaatctcaagtgatctctgtgttgtacacaaatcattgtaccaattctcccacggaggaaaaaaaaattttacttaaaaaaaaaaaaaaaaaaaaaaaaaaataaaaaaaaaaaaaaaaataaaaaaaaaaaaaaaaaataaatataa

SEQ ID NO: 22555 - DNA, 821 bp, Oryza sativa
  Clone ID: TF_OsC68848_2
agccaacaattaatcttatgtatactgtatagttctcatagatatatatgtacacaagttccctatagtaatgtatcgtactaccgttcatagcttcacgtaatgcacataacacagaatgtataattttttcagtacaattggaacatcaaaatcacagctgacagcatgacatactttacagatggagcttttctttttccatcagaacttgtaacgaagaacaaacacccattgctcattcccatgtctactatttgattgttggaattgctcaaactgcatagaggcggataatctggttaatcttggctcgacaaatggggcatacccatttctttgattctatatccttcaagcaggacatgcaaccaggcatgtgaccacacggaatgcaggcaccttccacaggagcatccaaacaaataacacaggttcccggtggagtgttaccgctgttgcttgcattagcatcactttctgcaggttttgcatcatttcgttctctgcaggttttgcagagcttaccgctgtaccaccgtcagcagaaggcatggttacgtcgactggcgtggaatctattgacggatactgaataggaccatcgtagaaggttcccacggcaagtggaggcgcagttgggactggaagagatggaagcgcctcctgcggaaccacgaaagtgctgttctggcttttgttgtgtttggacgaactttggccagagcttgttccaggcacgtcccacccattgtatgtgctactgcttgatgtaacaactggtacttggccacttgtctttgaaggcgcagaagtatctg

SEQ ID NO: 22556 - DNA, 977 bp, Oryza sativa
  Clone ID: TF_OsC15124_2
caaatgagttactaattgctcaggagttggcacactctagggttcctggtagaaaaggccgctcagctggcaggggcagggacgaggttggaacttggagtcttgatttagaggatatgaagatggagctacaggctagaaaacagagggaagctgccctagaagctgctttggctgagaaggagcatcttgaagaggagtacaagaaaaagtttgatgaggcaaagaaaaaggaactatctctggaaaacgatttagcaggaatgtgggtacttgttgctaagctgaagagaggggctttaggcatatctgacttgaatgttgatgatcgatctattaatctagctgacattactaacggtacaaaggaaaacaaagctgacaaaaatgtagctgtagttgagaaacaactttcagataataccgtgaagtcattgactgcagaggaatacagaaatccagaatttgaacctcttcttgttcgtctcaaggctaaaattcaagagatgaaggagaaggaaactgattccttgggtgacaaagatggaaattcccatgtctgcaaagtatgttttgaatctgccactgctgcagttttgcttccttgtcggcatttttgcttgtgcaagccttgctcgcttgcctgttcagaatgccctctatgccgtacaagaatcgcagacaggataattaccttcacctaaagtgcatgttatcttaaaaggtaacttgaagcacccaatctcttcttgtaaaatcatcagtggtatatgattcttttttcccctagcaaagaaggtgcctttttatgttccttctgtgtttgtatcccaattcttttttttttttggtttgctctatagctttcccagttcaacctgttctttgttgtacgagaagttacaagatataacttctctgcaaatatgtatagatatgcgactcgacagtataatacatttgcttttttttttcct

SEQ ID NO: 22557 - DNA, 2221 bp, Oryza sativa
  Clone ID: TF_OsC102400_1
atgccgcaccaaaccaaagccacagtccagcagcagcgaccaccagcagcagcttccgtcgtccgcgccggcgcccaagaagaggatgcctctgctgcaggctctctccgtgccatcctcgcccagatccccctccagattcgccctcctcaaggcctccatcctgcccaacaagtgacaatgcgagtgagaagcagaatggaacccatgaaattaacggtgaagagccggtgcggcgtgtgctcccacggcgtgaagaccggcgcggcggcggtgttcacggcggagtgctcccactccttccacttcccctgcatcgccgcccacgcccacgccctcgccgccgccaccgctctctcctgccccgtctgcgccgcgccatggcgccaggcccccttcatcaacaagcgcaccaccaccaccgacgaccacaagcgcaagtcctacgacgacgacgagcccctcctcgcgcccaaggccgccgccggcgccttcaaccctatccccgaggacgacgaggacgacgccaccgagttcaggggcttcttcccggcgcgccccaggagcgggctggccgtcaccctcgccccggacgccgccctcgtgtccgctgggcggaggcacggcaagtacgtggtggccgtgagggtgaaggcgcccgccctgcgctcctcgccctccacgcgcgcccccatcgacctcgtcaccgtcctcgacgtcagccagggcatgatgggcgacaagcttcacatgctcaagagaggcatgcgcctcgtcatcgcctctctcggccccgccgaccgcctcgccatcgtcgccttctccggcgccgccaagcgcctcctcccgctgcgccggatgacgcgccagggccagcgctccgcccgccagatcgtcgatcgccttgtcgtctgcgccgccgcccagggccaggaacagccgcaggccgtctgcgttggcgacgcgctgcgcaaggccaccaaggtgctcgaggaccgccgcgaccgcaaccccgtcgccaccgtcatgctcctctccgacacgcagcagcagcagcagcagcagcaggatgcgatccggcgcccgccagccgcccctccggccacgcgattcacgcacgtcgagatccccatcgggccaggggaggagccggcccggtcggcgctggtggcggaggaggacgacgaccagttctcggagcacgccttcgcgaaatgcctgggcggcctcgtcagcgtggtgatgcaggaggtgcagctggagctggcgttcccgacgggcgagatcacggcggtgtactcgtgcggccacgggcagcaggcggtggcccttgggggcggtggcggcggcgcggcggtgagtgtctccctgggcgagatgtacgcggaggaagagcgggagctgctggtggagctgcgcgcgccgctgagccagagccacccacactcgctgtccgtgcggtgcagctaccgtgagccggcgtcgcaggagacggtgcgcggcgcggagcagcagctggtggtgccggccctccacggcgggagctcgtcgcggcggctgcacgacctgttcgtggcgacacgggcggtggccgagtcgcggcggctggcggagctgaacgactacgcgacggccatccacctgctgtcgtcggcgcgggcggtggtggtgcagtcggcggagcaggggctggttggcagcctggacacggagctgagcgacatgcggtggcggcgcgggcagtcggcaggcaggcggcgtggcggcgagtcggaggagactccggtggggacgccgcgggcgcgggggggagagccgctgacgccgacgtcggcgtggcgcgcggcggagcagctggccaaggtggccatcatgcgcaagtccatgaaccgtgtcagcgatctccacggtttcgagaacgccagattctgattctcatcatctatcaatctcagctcagcttgtaatcaatgataattttcttttctttttcattttcattttcattttcttcttatgtgaaatgaatcaacaaacacaagatatgtctccacgacgaagaagaaagaagaaaggcagaattaagaagagggaggagtccctgccggagcgcggcggacgtaaattacatctactccctccattactgttttctttttctcttctctttttgtactcctattcaaaaatttgaactagtttagacagtctcatcctctct

SEQ ID NO: 22558 - DNA, 1689 bp, Oryza sativa
  Clone ID: TF_OsC88980_1
atgtcggcgcgcgacagggagaggagaggacacagcgacgaaagcagcgaagtcggcggcgcgtcgctgcccgcaccgcatcgatcgcctcgccccggtgagccatgtcggcgcgcgacagggagacggccgtggcgctggcccgcctcgccgccgcgctggacggggcggtgctcggcctcggcacggcggcgctcgccgtcgcctcgtgggtcaagtggctcgccgcgtccgggcagctgcggcgcatcgcctccgcgccggcggccgccatacccgacctccgctcgctcctcgcggagtacggcggccggcggcggcagacggcgaccagccgatcctcgcggaggtgcggggccacgtccgcgccgccccccgaggcaagtacctcgtccccccaggctccggcgagcactgcgtcgtcgcaaagcatacccagctgtgcttgttcaatgaatggagaggcatctttgggtggacctttgatctgcatgctctctttttcaaatcaattaaggagcagattataacatcatttagatgggttccctttgtatatgttgatcctgaaaacttgactggaatggtccatgtgaagttagacttgtagatcctgaaaacatgactggaatggtccatgtgaagttagacagggcaatgcaaccattacctcttacaactgtgtatcataaacttaccccagtcgactcaactccttacacattgtttcagactattattggcaatggttacccaattgcgttgttggatgaggaaaagatacttcctgttggaaaggagattacagcaataggctatattcgacctcataaagcaagtgttgagatcagctcatgctcagaaataccttttttcttgtctgaccttaccaaggatgagatggaagccgagttgtcttctcgtgctaaaacactcttttgggctagtgttgttcttggaacaatgtcagtttgcttgctgggctttgcgacttacaggagctggaagaagatcaaagagcggagggaggcaaggcaagcccaagaggtatttcgacaaactactgatgaagttacagacgatcagtctagcgatgaagaggctggtgaaatgggagacgggcaactatgtgttatatgcttaaggaaaagaaggaaggcagcttttattccttgtggtcaccttgtctgctgctgcaaatgtgcactgattgtggaacgtcagttcgacccattgtgccctatgtgtcggcaagacatccgatacatgataaggatctacgacaattgaggcttcttgatgttttgctgataacccttcgacactgtatggtcacccagattgtctgcgagcctgaagacctcaactgatcatcctgcgtgcactagtctaagctacttggctaacaaaactatgttaccctgaattttgtgtatatatatgacgtgttagtcactcccaggagaactcatatgggcagagatcaccggatacttttcatagtcgcatagaatcctgtagctagccaaactgccagagtcatgagtgacgcctatagttgcaattacagtactaccaagtttttgttggctctcccttctcatgtctgtgcattctgtaaagatggttttgccgctagcaaaagtatgatggttcggatttttaaaaaaaaaaaaaaaaaaaaaaaaa

SEQ ID NO: 22559 - DNA, 744 bp, Oryza sativa
  Clone ID: TF_OsC63513_1
cccgggctgcaggcccataacaggaaaagaagtcagaacaggttggaaggacctggactttcagtttctcaaaaggtttgtattgtattagcactgttggtggccaatatatatggtcccgcttgcagtctttttctgctttccgtcgatggggtgattctgaacagagaccactagcacgtcgcgcttggggcttggtgcagcatgctgaaggcttatacagagcttcttcattctttaaccttttgttatttctttatggtgcaagatataaaactattgttgaaaggattctgaaagcatgacttgtttatgagagccccaacatgaatagggcagtaagctttgagtacatgaaccggcaactggtttggaatgaattttcggaaatgttgcttttgcttcttcccctcttaaactcatcctcagtaaagaagtttcttctacctttctccaaagataaatcagcaagttcttctggcgatgaagcagactgccctatatgtcgctccagtcctagcattcccttcgaagctctcccatgtcaacacaggtattgctattactgcctgcaaacacgttgtgcagccacaaactcgtatagatgtgcaaggtgtaatgagattgttgttgcaattcaaagacaaggatcaagttagtttagagttgaatccatatacatacagtgtaacaaaagccaatacagcttactggattcgcgacatctcacatgattttttccca

SEQ ID NO: 22560 - DNA, 1651 bp, Oryza sativa
  Clone ID: TF_OsC32218_1
ctagtggatcccccgggctgcaggactaaaatgatgatgaacaagtaataggagaaggcaaacggttttgtctccaagttgactgtcagttgggtatcgtttcatagcttaaaattttgagcctgcatgaacttttgcattgtctatttgattcttcaatttattgtgcacttgtgcagtaaagcccatgtgatctgtacttgatggtttctaacaacatatccatgacatcttcttcatttccttacatgctagtacatttgtatttgcttagatattgttacatttttttcagatcattctgtgtttccccattttcgcaatcactactgcactatgaaactgtattactggactacccacaaaactatacaatatgaaataattctctgattggggcgctggagattcgtcctagaccggccggggacgacctcttcttccctttcctctcctccgccgccgctcccccgactccggcgagcccccttccccccacccatcggcgcggaggacgttgccgggatgagcgtctccccttcaaccggacgcgatctcccggggcgctcccgtatgcccttgcgctgctagagatccgggctcttctcggatctcaggagtacaagatatagtgtaccagctctctctcattcaacatgtggagttttgcgtcaaacgccatagctggaagcataaggaaaaaagcacagccctcaaaatgcagtcaatccaatcctgattgctctgatgatgatgtttcttcatgtgcaagtagagaggaaggccttgaatgtccaatatgttgggaatccttcaaccttgttgagaatgttccctatgtcttgtggtgcggtcatacaatgtgcaagaattgcatcttgggtcttcaatgggctgtcgtcaagttcccaacccttcctatacaactgcctctcttcatctcatgtccatggtgtaacctgttatctttccggctagtttacaagggaaacctcaagttcccacgcaagaactattttctgctatggatggttgagagcatgaatggcgagagagcaaagttccattcccctagtcatgaagagcgccattctttatgcccttctggtggtggcccaagttccagtcaacaccatcgaagacctgctccacgaacagaaagcgccagtggcagagaaaggagtgttgctggcaacgttttcaatacttacagcatcagtgcatctctccaaaagataatgttgtcttttgttcagatgacagccaagtttccactcgtgataattttccttctgatagttctatatgctgtccctgcaagcgtagcagttctagtattgtatgtccttgttacagttttgtttgcactgccgtcctttttgatcctctactttgcttatcccagtttggattggctcgttagagagatcttcaattgagttatattgtactccatgtcattacagtttataactcagcagcagaaaatttagcatttgcaatctcatgtgctctgggggaggatgtcaagtgtgatttcttatccattcgattgaggccttcagggacagtagttgtaagatggaactctaattattgcattgatatacatgaatcactcaggttttactgtaaaaaaaaaaaaaaaaaa

SEQ ID NO: 22561 - DNA, 684 bp, Oryza sativa
  Clone ID: TF_LIB4833-034-R1-N1-D8
ccggccgcgcgcgttctcccctcgcccgccgcctgcgcgcctatctccgccgcgcgagaggtggcgcggtgcccagcgcgcgtcctgctgcttccaccgcgtcctcgcctgcctgcctgccgatcccacaagtagaattttgatgttggcaaaatcagggtctttgagatagcttacccttttgggctagagaatgtggaatttcgcgtccagtgcttggggatctggtttagggaagaagaacactcccaactgcaccccgtccaatggtgattgctctgatgatgaggcatcttcgtgtacaagcagggaagaaggccttgaatgccccatatgttgggagtccttcaacatagtggagaatgtgccatatgtactatggtgtggccacaccatgtgcaagaactgcatcctaggacttcaatgggctatcatcaaggttccgacggtgccaatccagctaccattctttgtctcctgtccctggtgcaatctcctgtcgctccgcattatttacaaagggaatctcgcatttccacgcaaaaactacttcctcctttggatggttgaggggatgaatggtgagcgagccagatcgcgctctgctattcatagtgagcaacaaactacatgggctctcagtagcagtagggcaagtggaatggaagttattcgaatcccatc

SEQ ID NO: 22562 - DNA, 822 bp, Oryza sativa
  Clone ID: TF_OsC25814_1
ttttgaccttttttttttttttttttttttgaaaagggaaacaaaagcttgcaataatgatctcctttacataatatttatacactctgcacacaggagataagatcaaagaaaaaaaaaacatgctgctgcatagcttcgatcctccccttccccacacatataactatcagtctacatcacgccgtccaccgggcgcttcagcgatccggcagctgatgcccaccgtcaaccactatgctaggcagctcgctctccacgccgccggtggtcgccggcgcggtcaccgcggcggccacatgagaagcgccgttctcggcgctcgccatgtcgtcgccgccgccgtgccgaaccaccacctgccgcagcagcagcccctgcagccgcagcaggtagctctgcccagccggctgcgacgacctcacgtaccgcgccatcgtcgccgctgtcacctcgctggccgacggccggtccggctcggaggatggccggaggttgttgagcgcgctcaggtcgaggttggggaagacggagcaccggcaacgggggcacttgacattcagccggagccactggtcgatgcactccacatggaaattgtgcgcgcacgggagcccacggacctgcataatggattgggaaaagaagtctttgtcagtccttaaaaatgctggagaacgtaacttcataaaccatctctagtcttgttttaccctcgaactaacaaaaatgctccactttacttctaaccatgcttttttattctttatacaagttatattcttcgttgaaattgtggcatgtacacattattactctttt

SEQ ID NO: 22563 - DNA, 1016 bp, Oryza sativa
  unsure (1)..(1016): unsure at all n locations
  Clone ID: TF_OsC192480_1
tgttgctgactgtttcntttgggtttcttctccgatggtttccnngtccgctatgtcttgctgaccgcacgagggtgctctgctcgatctgcctcgatggcatggaggccggccgcgccgtgcgcatcctccccggatgtagccgcatcttccaccagtactgcgtccaccggtggctcaccatctcaccgcgccgcctcgtctgcaacgggtgggtcacgctgcagtcgccggggacctcgccgtctgccgccgcccgccaagcctgctctggattcttgagatcctggcgttgccaccctaccgatcatggctcaggtctcggttcttgacgagttcttgttgaattctcagcgattgttgtcgtcggtttctaggctctggacagcggttcttgctgatttcttattcttttcggaggattcttggatgggactgcatgtaaattgacttggtgctgtaattcgttggtagaaatcagtacgcttatgcatagtttcacccctttttctactcttaacaggtcaacaactttgtccggattcagtctaggtgatgaatgaatggaatagctaatactgtgaatacaccaacttgttgcccatttttattgtgaatacacccaacctgcttcacctctgatagtggttgcccatttttattaggatttcctgatttttatcaccatgctgctcctcttgttctctaccaaaagaggttgctatgtatgggttttcagttcgtagtgtcttgatttctgagttgttatatcttccgtactttctgtttgcttcaacctgttagagttattttatttcgtgtgagttcctgattagattgggcgtttatttgtaccctgaattaattgtctactgcttaccttttcctgtatatatgtattgtgtgcttgtaaaatttcccctgcaccctgcttacccttttctgtatatatttattgggtgcttgtaaaatttccccctttgaagaggtgactgtaggaaaaaaaaaaaaaaaaa

SEQ ID NO: 22564 - DNA, 1018 bp, Oryza sativa
  Clone ID: TF_OsC88712_1
cccacgcgtccgcacgatggagcccgtgacggcggcgtcggcggcggcggcggcgagcgaggagcaggtgacgcggcgcgtggcgagccggatcatccgggcgctgcagcaccagctgcggctgctgcaccgcgcggggcccgagttcttcgtgctgggcgcgacggggaacgtgtacacggtgacgctggcggcggcgccggcgtgcacgtgcccggacccgtccgtgccgtgcaagcacatcctcttcgtcctcctccgcgtgctcggcctctcgctcgacgaggcctgcgtgtggcggcagtcgctccgcccgtgccaggtggcgcggctcgtcgccgcgccgacgtgcgccgaggcggacgtcgtggcggggccccgcgcgcgggagaggttccaccagctgtggtcggcgagggccgccgccaaggccgaggagagccgccgccgccgacgacgcgacgaccaggccgccgcagccggcgcgtcggggaggctcgacggcgcggcctgcccggtgtgcctggaggagatgtcgccgcctggggcggcggcggcggcggcgatgctgctgacgtgcgcgatgtgccggaactcggtgcacggcgagtgcttcgcgcggtggaagcggagccgggggaggcgggcggcgacgtgcgtggtgtgccgggcgcggtggcggcagccgagccgggagcaggagaaggagccgtacatcaacctgtccgcgtacatgaacgacgccggcggcggcgacgtcaacatggtcgccgccgacggcgacgacgggggactgtgcgccgggtagctcagttcggtgacgtcagctgacgtaaacgtgacacggatgtaaattaacgaagttgtacattgtatatagtgctaacaatctcaattcgttgcgtttcatgacatttttttcgttgtttttcgtagaggctgaccttgctacttcagttattcatataatcatattcctgtacataattgatatgttaataaaaggaacatttatttt

SEQ ID NO: 22565 - DNA, 2046 bp, Oryza sativa
  Clone ID: TF_OsC4354_1
ttttttttttggggcccaaattttttttatccgggtaaacaaggggagggagaattacattttcctttcctactcttctcaaccaaagagcactacaacactcaaacaagacaatattcttatttacattcagacaatgcataaacttgagaagatgctacacaatctaactggagcatctatcgatcaccaaaaaaaaaagttaaaaccaccgatgacatacttacagtacataattgtaaccggcaaaatgatcatcaactaccttttcatgcttttggttagacatgatatgctttatattttctccatattcggtaaacctttctgaacttgtgcaaacctcaatcagcttaaagttgtgattgagactacatggcgcgacattgcacaaccaacatgtacaaatttgtaacgttcatctgagttagcgaagtttaaacatcatatacgggcatgcgttcttcaatgggcacacggcagattggacatttcttgcacttatcagaacaagtcttgcataatgttctgtgccggcaaggaagtaagaccatgcatatctccccctcgtagcaaatcctacaaagaaccttctcattttgaagcctttcaaattcctgctttggtacatttggtaatttctgattgctctcccaaagctgcttcggagcctccatacccctgctccgagacgagcctccgacaaattcgtgactacctcaagtggatagccacaaacgtggggtgtccccagtgggcttgctcttctttgctgccttcatcaatagaccaccaaccaagaagccttgaaccacgatgaagaaaagcaaagcaatcacggacttttgatgagattgtaaggtaattaggactaactggtccatttcgtaatagtagaacaaccttctccaacaatcttgctagagagaaaaggacaccagcgccttgtaaaataaacagtggggagaacagtgcaaatatcggaatatactgagcactaggaggcgtaccctccaagcgcatacaaagcaaaacttggaaaatcaccagtggtattttcattacgtgacctcctatgtcaggaagaccacagagcctctcttgttcatgatcttctagtgatgggaggagaagaccactctcccaatcacggtatctaattgccgctgatgatgagctagcctccccaggattaggagatttatgaatcatgggattaaaccatccataatttataaacaaatcccaccatcccaaagcaccaacatcaccagacagcttcaaaagtgtgaaggttgtagcagctataagaaacaccatagaaattgcaacccaaaagtgaggaagtgtctcccaaatagcttcatcgctcatactttcttcatctcctggcattaaagctctacacattctgaaattgtcagcaagaataatcacttcaaaggccagaagaggaaggaatacaatcttcaaatcaacagtcggcttacttttaactctcaaactttcgagatatatgcaaagcagcagctcaaacgcaataagcaacggcgctgcaacaattgaatggcaaggagcccaatgacggccatgaggaagcgaaggggctggcattgaaaaccttccacgggcaacaatgccatgaaatagccatagagggatgaatataatccaccaggagtaggctgtgcggccgtcgactttgagcgcgaggaggagcgtgaagcagaagagcgccgcgtgcgccgccgccgcctgcgccgtcttccccacccccgcccacgtctgcgcccgccgccgctgcatccctcacctcctcaccgcgccccaaaccccactggaaattaatctcttccgctcccgcgtccgcctctccctcctccttggtcttctccccgctgcgcctgcgccgagccgagccgccgacgaaggagtgggagacaaaagtgaggcgacgaggacgaagggttccttcctctctctctctctctctctctcccctcttagactctagcccttttccggaaacgtgggcggacgcgtggg

SEQ ID NO: 22566 - DNA, 498 bp, Oryza sativa
  Clone ID: TF_jC-osroLIB3475009f05b1
cttactcgtatggatcaaaaagctttagtaaaccaagtacctacccacagagtagtacatcatcatcgtcatatcctcactatgaaactgcacagagttcgagccctgctgtaccttcttctacttatgacaatcaggtttgcccaatctgccttgtgaaccccaaagacatggcgtttggctgcggacaccagacctgctgtgattgtgggcagagcctcgaatcgtgcccaatatgtcgcagtccaatctccacaagaataaagctatactagcaatggcagtttggatcatttgcgaatgggtggcatactggagaccaccttgtgtcacattgggcgatggattgtattggatgcttcaagtgcaatccatgcaaagcctttgaacggcttgcagacaagcccgttaagtactgggtttgcatcgacaaggatcgcaaggccagcaatccactgctccaagattgtggagcaggggatgtctcaagtattgaaa

SEQ ID NO: 22567 - DNA, 355 bp, Oryza sativa
  Clone ID: TF_LIB4371-053-QB-K6-F7
ggctgagcgagagccaatccaagatgcaggtcgcatggaagcaatgcgagcagggcatcctcgtcagcttctctccttggtcgaagccctcaaagcacacagcgcagtcgctctccctcgcctcgctcacctgcgcttcctgcagctcggccatggccttgcttgacgcaggcacagagccgaacccaccattcctgtacatatcgtcctcctctatgtcaggaacctgctacagactactactccaggaagagcaggacccacatgagggccaaagcccaatcctcgttaccatgggtccgcgtgggttgcgtagcccagctatctgttgtccagctggcttctgtgtgtgtcg

SEQ ID NO: 22568 - DNA, 580 bp, Oryza sativa
  Clone ID: TF_LIB3434-055-P1-K1-B3
cccacgcgtccgtgaataacaaggttgtcttgcccaactgcagccatgctatgtgcatgaagtgttaccgccaatggcgctcaagatcccagtcctgccccttctgccgtgacagcctcaaaagagtaaattctggtgatctgtggatgctcacagatgaccgagatgtcattgacatggcaacgattactagagagaaccttaggcgcctgtttatgtacattgagaagctgcctcttgttgctccggacaacatcttctatgcctatgattctcatgtaaaataaccagagctactcataatgacctactcataattgttttcggagagtgacgcatgtgttattcattcatgcataggatgttccttgtcgcaggatgtggctaacctcaggagcagactgaactttgacaagagaacttgggaattctgactagatccaatgctgtggtcagatgttgtaaatgcttgtacagatttgtaatttgcagcgtaaaaaaattagtgaggaaaaacgttgtgttccacattgaactcctagtgtgaaaatccaagtacatatatgctcattaccatgac

SEQ ID NO: 22569 - DNA, 985 bp, Oryza sativa
  Clone ID: TF_OsC183489_1
ctagccgcacacgcgagcggagccagaggaggagacggtagcggcacacgcgagcggagccccagctggagacggacccacccggctccaccacggctccagctctctccactctcactccccgattcgccggcgagcaggcggcggcggcggaggcaccatagctcaaggcttcctctccgctccgcaggtaccaagatgaaggtcaagattcttcagtggcattcggtggcttcttggacatgggacgcccaggatgaaacctgtggtatatgcaggatggcattcgacggctgctgccctgattgtaagttccccggcgacgattgcccgctcatctggggctcctgcaaccacgctttccatctccactgcatactgaagtggggtcaattctcaaacatccagaccaaagatgaaggtcaagattcttcagtggcattcggtggcttcttggacatgggacgcccaggatgaaacctgtggtatatgcaggatggcattcgacggctgctgccctgattgtaagttccccggcgacgattgcccgctcatctggggctcctgcaaccacgctttccatctccactgcatactcaagtgggtcaattctcaaacatccacaccactttgcccaatgtgccgtagggagtggcaattcaagggctaatggcatcaaccaaagatgattaattgtgttcgtgtagactagtacaaaagcaatcatgtaacatctagcaggttgtgtatattttttccctgtaattcctaacttcatcaaagcatctctccctttgaggagcaactgatagaccctaaccatgtgaccccatggatcagtggcatggaattcctttggtgttttcaggttgcttgaatttctgggaagcttcctgttaggctgtgcctggtcacctggccttgctgccttgcatatgataagctgtatcccagtgaggcttgactcggagtaaactagtgccat

SEQ ID NO: 22570 - DNA, 809 bp, Oryza sativa
  Clone ID: TF_OsC46775_1
ttttttttttttttttataagaaacttcttgggtattgagttgttgacttcactttcctagtgtcgtgccgctgtactgtagctgttgcgagttacaatgtgtaccaattaaccaatacatgaagctgggaattttccttccctaattgggcatcgaaagcaccatattcctcttaaaaaaatataacaccgtatcctactgcggctttttgttagcgttcgaatacctcctgggtaaaccatttggaagagctggaaggagtcaaagtgacttctccctgtcccacattattccgttactccttgtaatgacaaatataacaattaactcaccacacctacatcagaagaggatacaagttttattgtgattatttgaccgctatcttttatcaacattagtacatactgcactcctataacagcctattagagtcctccatggatgcggccttcgacgaaaaccttttatgcatcacagatggtgaaattagtacagttttactcttgtatcaattggccttcgacagatagggcaatgttcgacttgcggtccacattcagcacatgtctggtgtccgcaaccaaaagccatgtcccggggtttggagaggcaaactgggcagagttgaggttctgctgctctagcatccacgcttggtggggatgtaactgatgctgtgattgctgaatctacaggtgcctcatccctaggatgagaaggcatactccggaagctatttgctcgagatggtgctgctctcgagattgtattatagcttgcaaagggagggggcagtggaactcgc

SEQ ID NO: 22571 - DNA, 879 bp, Oryza sativa
  Clone ID: TF_OsC1795_20
ctatggcttctccttgggcttataaaaggactttttaacgcaagcaatcctcgccaccttgaattgctgctcatcggcgaagtaggccgccgtgtcgacgttgaaccagaagttgtccactctaccctgtctagttatcatggacggtgatgatggcagctcagcgaggatatcggcgccgttgatgcagtgccccttgatgacgacgacgagaggacagggggctctgcacacgtgacagcgcctgtcctcgctgacgaagcggacctggacaatgcatctcgcgcaaacacagcggtggccgcatggcccgatcgccacccactctaatggctccacacacaccgcgcagcagttggtagtagtagcagcagtgccgccgcgggctacgtcttggagctcgatgtcgacgacgacatggcacactgccttggtgctcatagtattgggtggttgtttcacgtggtatatgttggatcgaacacaagtaaccaagtccccttttattattgccgaattcatgtttcgacagttggcgcgccaggtaggggttgcgtcgagtttcctatcaacgagcgcgatggaatcaatttcatgagtcgccgacttcgctttcgctttgggagttttcacttcctttccgtcgaccacttcttcaagctcctcttctctgacttgatccaaatcagtcagggggaaactcaatcgttggctcaccttcgctgccgtcgactggtgtttccgcttacacggctgacctattatgccgccattagtgggcatcttcgctttcaccgtcgaccgccttcgtcgccgccgactggtgtcttcattgttattgatggacgactttgttcccacattggccacttccgccat

SEQ ID NO: 22572 - DNA, 420 bp, Oryza sativa
  Clone ID: TF_OsC37567_2
atggatccgacggccgggacaggttcctccaccaagaagatccctagttggatggtaacggagctgccaatgctatcgacggaggccaaccgcttgccacagatccctagttggatgataaggaagccgcttatgctatgtatggaggccggccgctctggcaaggccgccgccgccgccaccgccaccgcggacgccatggagcagagctgctcggtgtgcctcaagagtttcgagaaggacgactgcatctggtcgatgccctgctcccacactttccatcagctctgcatcttgggcgaccgctcctgcagggacatgaacgccaatgaggagtgcaaggagctttctttggtagaggatgaagcttctactgcaagagaagcaagcgagctgggaagaactagaggaagcttttag

SEQ ID NO: 22573 - DNA, 1161 bp, Oryza sativa
  Clone ID: TF_OsC49416_2
cccacgcgtaacgccactcctgcgagagacgcgcaggaggcaacatccactccaattcaacccaatcacccgcggcgagccgagcgggcggcggagcacgacgacgacgaggtttaggtaggggttcttggcttgtcggcgtcggcggcggcggcggcggaggatgaggaggagtcagcgatgcggaggaggttccaggactccgtcaaggccctcgaggccgacatcgagcacgccaatgagctggcgtcggagttcttgcgggattacgacggggcggtgatccagatgcggatggcgtacagcgccgtcgcgcacttcctcgtgcagtggatcgactgcaagctcgccggcgcgctcggcctcctcaagatcatgatctacaaggtgtacgccgatggcaccacggctctgccggagtgggagagggaggccagcatcaggcaattctacggtgtcatcttcccgtcgctgctccagctgccgagtgggataactgaattggacgacaggaagcagaggaggctgtgccttcagaagttcaggaaggtggaggagagggtctcggaggtggatttggagagggagctcgagtgcggcatctgcctcgaggtgaatgccaagattgtgctgcccgattgcgcgcactcgctgtgcatgagatgcttcgaggattggagacaaaatttcgtttacctgaatgtggtgttcaagaaagagagaaaaagattacctttgccatatattggctggttgtgttcctcaggatgtaaagtcagttgtaaatctcctgcacttctgatagagtaccacaatgccctctccacagagtctttaaccatcttcatgcatcaagatgtagtccatccaatcaaacctgcatccagaatgactttatttataactgcagcaaacattctattgaactatgtcctgctcttgagcaggaacaccaaatcaaagtcgtgccccttctgccgcgcctgcctcaagaaggtgaatccgagcagcctgtggttgtacaccgacgaccgcgatgttgtggatatggatacgttgactagggagaacattaggcgcctgttcatgttcataagtaagcttccacttgtagtgctccatgtggttgaccttgacatttacgagtaccgtatcaagtga

SEQ ID NO: 22574 - DNA, 695 bp, Oryza sativa
  Clone ID: TF_jC-osleLIB3474039b05a1
aggatatccaatggcacatatatgttaaacaaatagcaagtatcaatacacacttttcttgactgagcaaagtagcagaagaaactaggcatgtgaattcttttacaacactccgaccggtcactgcagcaactacaacatttgaaaattttaaaataaaactattctaaagaaacaatcacgcaccaccatatatagtcattttgttatcagatgtaccgccggaacattctagaacatagaccaccaactctttttggtacccacatgtacttcagtggcacttggggatctacagtacagttgccttctaccactcctagcaggatttgtaaagcataaaactagagcgaaaccgataaggcttacgactggagcagcagcaataaaaagccatccactgcgcctgcgtgcactgcttggttgctcatcaacacgaacattgtgttcacttgtattagtctcttcgatagcaccaacagccatctgacgagttacctggacctcttgttcatcagaattttcttccacaacctgaatgtctcttacattggttgtggcttgcttggacctttcatactctgcatcatctgtaggaagctcatatcggcagacaggacatgtatttctagaactaaaccatggcaagatgcacgatgaatgataaagatgcatgcatggtagctgttttgctc

SEQ ID NO: 22575 - DNA, 704 bp, Oryza sativa
  Clone ID: TF_LIB4371-036-R1-K1-F5
gattccgccgcggaagcaagctcgtccggtttccatcgtcgtctgggatcgggctcgctaagacttttcttgatttagtaagctgatccccctcagttcgttgtgaattgtgacggattcgggaaaaattcaggcactcttgatcagggtttggggtttagcagtctcggttattccaaatatcataagaatcatgagtactgcaagtactgcacgctctaggaagcgagcccatgatggatccagacaaaaagttgatgttataaacttggaaacaactgctccagtggtgaacactgggagccagcatgaggctctgatccttaggggtacacggacctcacccatcgatgttgaagctctagatgataaaaggaggagcagaaaaattatgaggcgctctgtggctgtagtggatccggagaaggatactggtccgggaggttatggcgttgctggagctatattttcccggggcagaaattttcagggtgctgtacatgttatatgcctttctccgatagggaagaagggaccagcaagccgaaaaatgtggcccaaaccagtacgacgcatgccaaggttgctccaaaggaaccaacctttacctgtccttggtggtgtctgaacaaactggacaagccatccacgacaaattgcggtcatatcttctgcgagaaatgcatccaggcatggctcaaggc

SEQ ID NO: 22576 - DNA, 501 bp, Oryza sativa
  Clone ID: TF_uC-osflM202003c01b1
atttttcattatttttaggtcagtgtattgcttaactggcccctcgtcggcacagtggttggcagtgctctcagtctcaccttcacctaccatgcgtcacttgctgcagtcgtcggagcacctgaccgccgcgacggcgacggcggcggcgtcgggcggccggggcgtccacacggacacgttcctcatcctcgccgccgtgctctgcttcctgctctgcgtcgtcgggctggcgctggtggcgcggtgctcgcggctgtgcaacccgtcgtcgttcgccgtcgaggcggaggaggcaatgcccccggcgccatgcaaggggctcaagaggaaggcgctgctgtcgctgccgaccgtgtcgttcgccgaggcggcggcggcggaggaggaggaggagcggccggagtgcgccatctgcctcgccgagttcgcgcgcggcgacgaggtccgcgtgcttccgccgtgcggccacggcttccacgccgcctgcgtcgacgtctg

SEQ ID NO: 22577 - DNA, 1259 bp, Oryza sativa
  unsure (1)..(1259): unsure at all n locations
  Clone ID: TF_OsC349_4
aaccaacactggacaatgtagatgagtagtcgacaggataaaccggccgacgacattcacaggctcgattccatgtcctgganagctcagaaaagcaatcaagagcatgcactggactaaaaaggggaccacagcttaaggcaaaatagagagagaaccgctgaatacaataatagcaagttgatatgtgacccacagaacattaatatgaaggatcttatgccatacagtaccctctctacaaatcatccaaacacaatccctgtatgggacaagtacgcacgataaacgtccagcgatagatgtaaggcatcaaaagaagctaacgatggagctgttcggcagatgatacggcttgtgtttgtagcgcagccgtggcaacaaacaagcgcagacagcaggtggggatagcagaaaaaaacttagtaaatacgaactgctgcttgatttcagcgaaaataagtttgaggagattcgctgagctaccagcatgatatgtttctaccgaaaatacaagcttctgaaacattaacaatgcagcctacccatcgtaatcattagttatcacttagtgctaatacttgatacgagaaacttgaagccgcttttgctcccgaaagagaattgtctagtgaccatacttctggaactcccactcgctgttgtctagagggcacacttgacgggtcttgagccaacggctgatgcagtggaagtggaatgcatggttgcaaactccccaagcgacggtgcactcctcgctggtggcgctcgcctggttcgcctggcactcgatgcagaggtccatgatgtggttgcggcagatggcgcagttgtccacgacgatgtcccaggcccagagggagacagcgttccacttcttgatctcgaagcgcttgcccttcttggccccggaggaggaggcgccggcgatggaggggggcacggccacggcgacgtcgcccttgtccatggcgaaccctagggtgggaggggagcgcgaggaggaggagtagattgggacgagacgagaagcgaccgcgcgacggcgttccacttcttgatctcgaagcgcttgttgggcttgcgggagtaggggccggcggcagaggaggatccctcgccggcgccggcgggggcggggacggggggcggcggcgcgttgatgtcggtctccatggccgacatcgtgagctctcgatcgacccggattcaggaattccaccagaccaggttgggattggaagatgagatttttt

SEQ ID NO: 22578 - DNA, 457 bp, Oryza sativa
  Clone ID: TF_OsC1795_44
aaaccacctcccctgcggtcacatcttccaccgcgcctgcctcgagacatggcttgactacgaccacgccacctgcccgctctgccgctcccgcctcctcgccgactcctcctcgccgccggccgccgccgccgccttggcccggacttagcgagtggattcgattcgactcgattcgattctccgacgagccgccccgcgccggctacgcgccaccgtctccgggtggcctccccgtgtgggcgtaggaaactagagagagagctctttgccttttttgcactttcacccctcactttgtcccttttttttccgtttcgggcggtttgtgcctgtaccgtgtaaatacctcgcagcaagagagtgctcctacgggtgtagcactttttgtgagctttgtgtataaaaccttctcggaatagcaaccaaaaaaagaaaaaatcgcatttacactgtt

SEQ ID NO: 22579 - DNA, 726 bp, Oryza sativa
  Clone ID: TF_OsC134110_1
aagttaaattggtttttttataacttgtaaaagttaaaatttaatttacatttttataacgatataacacatgttaatacatcatctcaaatatttttaaattttttcataactgtttgactaacatacgaacaaccagaaaacgtcccctccagttgaaaatccactgtccacgcgcccacacgaaacctagctaataaccatctatctttcggcgacgatctcccccgtggcggggctactactcctccctgccacggtggtcttcacggccgccgccgccgccgccatcttccgctccccctccggcgcccggccaaccacgtcggcgcggcacacggggcaccaccggctcttcctcagccacgagtccacgcacggcgcgtggaagctgtgctcgcaccgcggcagccgccggcaccggtccccggcctccagctcctccaggcacaccgcgcagtccccgccgccgccgcccttgacgacgtcgtggcacggcagcgcgccgatctcgtcggcggacaggcccttccctcctcctcctcgggctccaccgccgttcccctccgccgcgcgcccgggcgccgcctcctcctcgccgcgcgacgccccgcgcccgcgccgcagcgcccagaagacgacgacgatgtggacgaccagcatcagcgcgacgccggccaccaggaggaagatggagatcaccgacgacgacgacggcgacgccat

SEQ ID NO: 22580 - DNA, 1139 bp, Oryza sativa
  Clone ID: TF_OsC17323_1
gtcggattccggttggaccaaagggtccggatccccgggccgcacgcatccgcaccagatcatcatatcatgcgcaccgcctccaccgcgacacgccgtgtgagcgcgggagcacctctcccgacgagccttcccttctcctcctcgccttcgcgtcagcccggcatggggttcccggtctgctgctactccgagctgctgctccccaagcagctgctccacctcctcctgctgctcggctacatccgccgtttcctcctctgggcgttccacgccgtcggcctcggggacctgctggatctcggggacgagcagcaggcggtgctgcaggaccacgcgcgcgagcaccgcgcgccggcgcaggcgctgccgccacagcagcagcaccgccgcgccgagttccggacggtgccggcgatggtcatcgaggaggttctgccggtggtgcggttcgacgagctggtggccgcggccccggcggtttgcggcggcggggactgcgcggtgtgcctcagcggcatcggcggcggcgacgaggtgcgcaggctcagcaattgccgccacgtgttccaccggggctgcctggaccgctggatggagcacgacgaccagcgcacctgcccgctctgccgcgcgccgctcatccccgacgagatggccagcgcgctctgggccgccgccggcgtgcccgacgcctccgacttcgacttctcctacttcggcgcgcccctcacgccgatgcccacgccgactctgctacggccgcacgagctgctgctcactggccttggcggctaccagtaaccagtgaaccgccgctgttggttcacggagttggcaatatccacctactgcacagcagggcaccggcgacccggaatgcgcagtttttacaacgactgaattggtcgtcgtgttcggggaagaccaagaacaggaggcgccttcaactgtacataggcaaaaatgagtaaagcaaaccccccaaaaaaggctagatgattagtagatttttatttttgtttttgtttttgtacagaagattccatcttccaggtttgagaagtagtgaatctttgtgctgattaaatttgttcagtttggcgttttggatgcaacaatctgtggcattttggacc

SEQ ID NO: 22581 - DNA, 567 bp, Oryza sativa; identical to SEQ ID NO: 13442
  Clone ID: TF_OsC337952_1

SEQ ID NO: 22582 - DNA, 1592 bp, Oryza sativa
  unsure (1)..(1592): unsure at all n locations
  Clone ID: TF_OsC25814_2
tcagcgatccggcagctgatgcccaccgtcaaccactatgctaggcagctcgctctccacgccgccggtggtcgccggcgcggtcaccgcggcggccacatgagaagcgccgttctcggcgctcgccatgtcgtcgccgccgccgtgccgaaccaccacctgccgcagcagcagcccctgcagccgcagcaggtagctctgcccagccggctgcgacgacctcacgtaccgcgccatcgtcgccgctgtcacctcgctggccgacggccggtccggctcggaggatggccggaggttgttgagcgcgctcaggtcgaggttggggaagacggagcaccggcaacgggggcacttgacattcagccggagccactggtcgatgcactccacatggaaattgtgcgcgcacgggagcccacggacctcgttgccaacatggaattcctccaggcagattggacactcactgcagtctgtaggaacagctttcagtctgaacttcgggagttcttgaatcagtgcctcaactgcctctctctgcagaaggaggaccaatttaaaatcattctgctcaatgacactggatttcagtgttactttgctccttaatacaaatccagaagtcttcagagacttctttgcatctctgagatcgctagcaaataaatacatggaaattttgtctagttgggcagctgttaaataaagaccaggatgatatgcagtatcttggcccattcctctcatttccaagccaacggcctcaaatgcccaatcaggcacacggatcatgtcaaccaaaaccccatattcagagactggtattccctgttgtgccctctgctggagagcatgccttcggcttagccactttccaacagccacacacgcaatacaggcgagaccacagtagctgaaaagcagccatataaggaagccccatttttgtccttcctcgggtaaatggaaatgtcgaagatgaccaaattttacaaatagacatgtgtagacattgtcaagtgctaatcccatgccggcggcaaggccattatcgacgaacatgagaaggcggaagatgaagacggtggtgtagtcaaccacgatccatatgtgcaacgggtgggcgcagagacgatacctcttccagttgatggagaccatgattctgaaaccaatcaagcaaagcaacagatgaatagattcttcaaagcatattacagccatagcggggaaggggggagtagagaataaacttagtaccacttgaaatcgaccccccgcatcgccatggcctgctagctagatctggccggaggagcgcggcagcatccacgcccccgcactccgctcacttcagtgagcccctcacttcaactccagctagggtttctcgcgaggagagagagagagagagcggcgtcgcactcggcggcggggcggggcgacgcgaggaggagggagtacggcgtccccctcccggcgtcgacgcgagtagggcccccgcgcggcggcggcggcggcgccgggaaggtcgcgagcggcgaacgcgccggagagaggnggaggaggcggcgaacgaagaagctttcagc

SEQ ID NO: 22583 - DNA, 1239 bp, Oryza sativa
  Clone ID: TF_OsC29695_2
atggcgacgccacgatccccaagcccccgtggcgacgcgcgcctggactcggcaccgctcctcggtggcggcggcggcggtggcggccgtcgccacggtggcgcgctgcggcggccgtcgctccggggagcggctcggttcctgcgccggagcggtcgccgggcgatgcgcgagccgtccctgctggtgcgggaagcggcggcggatcagctggaggagcggcaggccgactgggcctactcccgccccgtggtggcgctcgacctcctgtggaacctcgccttcatcctcgttgccgccgccgtgctcgcgctgagccgcgaagagagcccgtccatgccgctccgcctctggatcgttgggtacgccgttcagtgcgtcctccacatggcctgcgtcgccatcgagtaccgtatgcgccgcggccagagcggtgaatcccccatggccgccgacgaggagacaggaaccgatggatcgtcgtcgtcaagtgacgaggacgccggcgagcgtgctccccgtggccgcaatggcgattatgttcgtattgcaaaacatctggagtctgctaatacaatgttctcctttatatggtggataatcggattttactgggtatctgctggtgggcaagttcttactcatgatgcacctcaactttactggctttgcatcgtctttctggcatttgatgttttctttgtcgtcttttgtgttgctttggcttgcatcattggaattgctgtttgttgctgcctcccatgtatcatagcaattttatatgctgtgtctgatcaggagggagcatcggaagatgatattcgccaaattccaagatacaaatttcggaggatggatgagcctgaaaagcaatctgtcaacatgactggatcttccggtggaataatgatagaatgtggcaccaaccaacctattgaaaaagtacttgcagctgaagatgcggagtgctgcatttgcctgtcagcgtatgatgatggtgcagagctgcgtgagctcccttgtgggcaccatttccactgtgtctgcattgataaatggctgcacatcaatgcgacttgtcccctatgcaagttcaatgttcgaaaaaacagtagcagcagtggtagtgaagaagtataaatctccacgagagaatccaagcataatcggtatttagcttctcgtcccacgcgacttctgtcacaactgtggtacttttcatgtcatatcccctagagt

SEQ ID NO: 22584 - DNA, 1113 bp, Oryza sativa
  Clone ID: TF_OsC7412_3
agtaaaagaatggctagcaatatataatataataatataaccattgtacatttatggatcatacaacagccatgaggcccccacagggaatgcagagcatagcggcacgggcaaacagagtacagtggagctaagccaggagaggactgaagaacgcaaaagatcatagtgctggtccctcgcatgtgtccgaaagttttatctgccttctccccaacattacaagatgcgaccatatgatgcccgctatttgctcccatcaagccccataatggcagcaaagattggtcatgcctggttgctgtccgatgtggaaacttccgcgctgcacatcgggcaaaccttatttatttgaagccattggtttatgcactcaggatggtatgaatgcttgcaggggagtgcaatcaaagattcaccatcctcaaattccacacgacaaataacacattgctctgtgttgccatcttggacaccttctgccttgtaagttactgaaggtagagaagcaagtgtagcagcagagaggcctctgtgtcctgtaccaaccgcttctcccaatgcaactaattcctcataagaatactcatctgggtcaacctcttgccacgcatcctgtggatcattcgcatgctcctctacaggctccacaggtctccaatcgctgatccccgcgagagccataagtcgcgcggctacttcgcgctcctcggcatcctgcagagctcgtgcataagcctcatcgtcctcgtactccgcggggtctagctctggctcgacttcctcctcatcatactcctcgtcgaacccctcctcctcgaactcgcttccctcagccccctccccatctcgctctccctcgccacgaccctccccaacggcgtgctcgtggtggtggacgcggaggtggtgctccagctcctcctcgtagtcctcctcggcctcgtcctcctctcgtagctcccggcatccgagctcccgtaatcgctgccctcgccgacgcctccgcccatgcgaagcatcatgtacgcccgctcctgctcctggagcacgcgggccagggcgaggtcggcgtcgacctggctgagcgccgtgaacggccgccgcgcctcc

SEQ ID NO: 22585 - DNA, 2687 bp, Oryza sativa
  Clone ID: TF_OsC76986_1
ttttttttttttttttcagagacgttaagctcatctggggctggaattttttttctctttacaaaatagtcctagtaaaaaaaatgtggaaggaaattgacaaaaaaaacctcgtgaggtcctgtaattacagggggctacgcccctacgatccaccggtacagcaccatgaacgccgtctcctcctcctccgcccccggcggcgacatcctcaccgcctccgcgtcccacagccatggctcctcctggctgtggctatggtggctctggtagctctggctccaccgggagctccaccgcccggagaaggacgatagggatgacgcggaggtggccagccgttccacgtactcgcgcagccagccgcgcgtcgcgcccgccgcctcggccaccgcctcgccgggaggcggtggagactgctcggctgctggcttgtcttccttgactgcggcggcgctcctggttgtcatgggcgcggcgcgggagacgacggcctcgacctcctcgtcgatgtggtagtcgaacgtgccgagcgagtaggtggggcgggcgttgccgccggtggccgtcgacgcgctgcggttgctgacgctgcccatctcgacgcggaagctcctggaacggtccctgctcctcggctccggcggcggcggctgctcggcggcgaggatggcggagatcgaggggtgcgggagcgtgacggtggcgcggcagagcgggcaggacggggtggtgcggagccacgcgtcgacgcaggcggcgtggaacgcgtggcggcacgccgggagcagccgcagctcggcgtccagcgtgaacggcgacaggcagacggcgcagtccggtgagctcttggggagcgccgccagcgacgacgccatcgtgaacagcggcagcgactcgatcagccgctgcttctcgtcgcccaccacctccttcttcccctcacaaaccccattacgccgcaccggagaagcgtccgccgcctcgacgttgtgcacctcacggcgcgtccgtgggagcggcggcggcggcggcggcggcggcgacgacccctgtaccgcagtgttcatgctgtattatttttggaccgggtcataaagggcggagccttttgttgggccaagaagcccatcagccggtttctccgccgcggccttcctctgcctcctgcgaacagcccacgcgacggcgaaggcaaccaacaccgcaaggaagcaaccggcggccacaccgccgacggcggcgcagacgacgctcttcttcctggactccgatctgcttccgtccaccgtgctgaatacctgcttcagcgggatcggcgggtttggcccggcaaggctgtgggttccgtacttgtggagcttgaacacctcgaggccgttgagtatggcgtcgaagtactccggcctggagctgaggtccgggtgcagcgccaccagcagatccatctggccggagcccgccgtgacgacgaggtaatccgtgtacaccgccctcccgatccctccgctccacactatcacgtccatctgagactgcgccgtctggttgttgatgtagatgaagaatgatctctggttcaccttcgttatcgggtactggatctcgcagaagtggaacctgaggaggtagtagaagccggcgtcgacggggaggatccaggtgaggttgtagttgaggttgatctgcgcgttcgggcccatcgacctcgccgtcgcgtacacgtcctccggtgcggcgtacttcggcaccgacggcgggttgtaccggacgctgacgttgctgtccttcgcgaaggtcacaccgaaggccgcgccgaagatgtagggcgcgtcgttgtcccacgtgcggtagaaaccgccggcgtcgtcccgtggggtgatggcctcgccgccgacgttgaggcggtacatcgtctggaacgccgtgtcggcgcggaggggcatcgggttcgggcgcccgccgttggcgaaggcgggcaccggcgtcgtgaacatgtccggcgtgggcacgacctcgatgccgttgacgaacgcgtagtggtgggacccgtggccgggggcgccacgcggcgagggggcgaaggtgacgttgaggctcgtggcgccggagctgacgttcagcgagaactcgcggacgatgtacgcgtagccgaccgcgagcgcggtctgcgacgcgttgaagtcgcggaggagcgtgatgccgcccgcggtgacgccgaacagcgcgtccgcggcggcggcggcggcgccgaggttgccgtaggcggacgggtagaagtagagacggaggaacacgcggccgggcttgacggggaaggagtaggtgtagctggagctgaacacgcgcgccgtcatgtacggcacgggggaaggcagcgaggggtcctggtacgacgcgtcggccgcgacgccggtcaccgacggcgcgaacgtggacacggcgtcaccgtcccacgcccggccgtccccgtcggtggcggaggcagacgcgccgcagctcaggcgaatttgtccggggacggtggtctctgcttcgccgctgccgctatccgccgcggcaagcgacacgatggccagcagtaagaagagccatcggaacagagtcgatcctgccatgggcgggacgagtagatgctgttcttgctggacttgcgccaattgggtaggccggcgtaaagctcaaat

SEQ ID NO: 22586 - DNA, 392 bp, Oryza sativa
  Clone ID: TF_uC-osrocyp036f12b1
tttatctgaggccgttggcttggaaatgagaggaatgggccaagatactgcatatcatcctggtctttatttaacagctgctcaaagagaggcagttgaggcactgattcaagaactcccgaagttcagactgaaagctgttcctacagactgcagtgagtgtccaatctgccttgaagaattccatgttggcaacgaggtccgtgggctcccgtgcgcgcacaatttccatgtggagtgcatcgaccagtggctccggctgaacgtcaagtgcccccgttgccggtgctccgtcttccccaacctcgacctgagcgcgctcaacaacctccggccatcctccgagccggaccggtcgtcggccagcgaggtgacagcggcgacgatggcgc

SEQ ID NO: 22587 - DNA, 1507 bp, Oryza sativa
  Clone ID: TF_OsC20421_1
tcgagacctaatttcccaaagaaaaaaaaaagaaaaacaaaatcccatctcccaccgccgccgcagcccaccaccagccgccgcctcggccgcgagatcgccggccgccgccatgtcgaatccggccgcctactacgccgccgtcgcgcggaagcagtacttctgctaccaatgcaaccgcaccgtcctcctcccggcctccgccgccgccgccggggcgctctcctgcccggagtgccgcggggatttcatcgaggaggtcaacgtccccgcccccgccatcatccccttccccttcgccttccccccgatgatgcccaccgccacctccgcctccgccgccgccgccgccgcggcctcgccgacccagtcctcctcctcgtccgccgccacgtcgccatccagcgacctctccgccttcctcaacagcatgctcggcccgctcaacctccgcaccgacgagcggatgccgggaaccacctccgccgcgggcacggcgacccccgaggacgagcccgacgggttcgacgcggtcacgttcttccagaactacctccagaatctcatggacggcggcgccaacatccaggtcctcctcgacgacgccagcgtcggcctcgcccccggcatcggccgcgtcggcggcgccagcttcggggactacttcgtcggcccgggcctggagcagctcatcgagcagctcaccgagaacgacccgaaccgctacggcacgccgccggcggccaagtcggctctctccacgctccccgatgtcgtcgtgaccgacgccatggtcgccgcggcggatggcgccgagtgcgccgtctgcaaggaggatttctcgcctggggaaggggccaagcagatgccctgcaagcacatttaccacgccgactgcatcatgccatggctggatctccacaattcatgccccatatgccgctttgagctgcctactgatgaccctgattacgaggggcgtaagaaatcaaacccacagccaactgctggcgttgatgccggagctgcatctgggagttctactgctgctgaggagcgagaggagagtggggagagtgcgaggttggtcgaacggcggtttaacgtgtcgctgccatggccttttagtggattgggatcgcaaacgccgcagcaggatgggagcaatgggggcgctggtgccagtggctcgaaggatggaggcgcatccagtgacaaaaaataagcataaatgtgcgattgattggaggttttcctcttggatctggcgttcaaaggtctacaatatttatgtgtcgctgccacttatatactatagacatcaaaagaccaaagaaatttacagtctttttatccgctggaacaattgttcattcttgttctcgctgcccgttaggtcatgtacacaaggcacggaaactgccgaggcaggaaacgtgcgttgggagtttgagacttttatgtgtagatttgttaattaaattcatcaaagtaccaaacttggagc

SEQ ID NO: 22588 - DNA, 663 bp, Oryza sativa
  Clone ID: TF_OsC409067_1
atggatccgccggctcgcagattgatggattctcgggcggcgcagttggcggcgccacttcctgatccatactcggcagaaacatttgaagacctactccgagaattgggagtcgaccctagtatccacaccatagtccgtagcgccgggagatggatggatccggcagcggcagcagcacgagttccagtgagattccaccgcacgctccaacgcctaggaatcgaccccaatagcgatgcccggagcatccgcgacatgctacaagagttctatcgagtggtgtaccatggagaggtgtactgggctggccgagtcatcaggcctcgtccttcgtccatgccaacgcccgtgataggacgacgtcgccgcgccgccgacggggatgccccgatgcagccgccgagcaagtacgctcgagtacacgccgtgtcgcgcgatgtcctcctgggcctcgcgctgacgaaggcgtgcgacgcgaggcaggaggagtgcgccgtgtgcctcagcgacttcgaggagaaagacaggctgaggacgatgccgtgtaaccactccttccacgagatctgcctcttccgttggctcagcgatagctgcctctgccctctctgccgctacgcgctgcccaagcagcagcaggtccgtttgtaaagctgctga

SEQ ID NO: 22589 - DNA, 513 bp, Oryza sativa; identical to SEQ ID NO: 13451
  Clone ID: TF_OsC343295_1

SEQ ID NO: 22590 - DNA, 801 bp, Oryza sativa
  Clone ID: TF_OsC17119_2
aaagaaagaagcacctcgacattccttctatttactttatacttaaacaaagggaaagcattgcatacttacatttgcatgcgagtatatacatagatagcacggcaaaatcctagttaatccagatcaccctttcttaaatttgagaggagttattaattaatccacatcatctatgagcacacgcggaagaggaggaatcggatccgtgccgcgttgctccgggccctcgccgtcatcgtgggcccggcccatgaccagcacgctcagcaccacgcgcctccccctcatcaccaccctctccccatgcaccatcgccaccaccacctcctcctcctccgcctccgccgccgtcgccggcggcatctcgtgccggcacagcgggcagctgccgtggatccccagccaccgctccacgcactcgccgtggaaccggtgcccgcacggcatctccttcctcctcccgctcccgcacgtctccctggactcctccccgtcgtcgaggcagatcgcgcagtcggacgcctcctcgccgtcgtcatcctcctcctcgacctccctcagcgccgcgatcgatgccctggacgccggggccacgccgccgccaccgtcggcgctggcgctgccgtcctcgtagaagacgtggtgcaccaggtacgcccgcccccgcagctccggcgccgacgagacggacgccccgacgagcaccggcggcacgcccgccaccgtccgcccgctgtccctgtccgtcaccggcgtcacgatcgacaccatcgacgagggagcattggtgagcgacat

SEQ ID NO: 22591 - DNA, 1226 bp, Oryza sativa
  Clone ID: TF_OsC206824_1
gctgcaggaatcggcacgaggatcgacgacgactgattcggttcatgatccatcagaaggaatgaatgggagtcggcagatggagctgcactacataaatactggatttccatacacccgcgccgcgggcttcggcgcgtgccttgagggcctcacatatgctcatgctgattttgctattgcagatgctttccatgatcaggctaatccatactgggcaatgatgcatacaaactcgtacaagtatggatattccggtgcaggaaattattacagttatgggcatgtttatgatatgaatgattacatgcatagggcagatggtggacgcagaatctgggataatgctacacctgtaaacaacactgaatccccaaatgtagtcttgcagggtggagaaactcctcatgcaaatacaagctctactactgaggaatgtatccaacaacaagtacaccagaattcaagcagtccacaggtcatttggcaagacaacattgatcctgacaatatgacatatgaggaattgttggatttgggtgaggcagttggaacccaaagccgtggtctctcccaagaacgcatttcattacttccagtcaccaagtacaaatgtggtttcttttcaaggaagaaaacacgccgtgaaaggtgtgtaatttgccaaatggagtacaggagagggaatctgcagatgacgcttccctgcaagcatgtgtaccatgccagctgtgtaacaagatggcttagcataaacaaggtttgccctgtttgctttgctgaggttcctggtgacgaacccaagaggcaatgagtcaaggccgccaaaatgttcttgcgcccagactcagcccacactgtaccccaacggatgcatggtttctcctgcttggcagcgctcccctttcccccttgtcttgcgtcttggattctgttcgcaaatataggttataaccagatgtagttggatcttggaacctgttctgagaggtttgccgtacactggagagttcgaatgtgaactgtaaccctgtgctagatgaagcatgctggatcacgcgcgcttgcgaggtgtttttgtccactgcaaagagcattgcactagcctgtgttatttgaattcaattaagattttgtggacagaaaaaattcgtgtgttacatcccctgcttttagcctgtcaaaaaaaaaaaaaaaaaaaaaaaaaaaaaaaaaaaaaaaaaaaa

SEQ ID NO: 22592 - DNA, 414 bp, Oryza sativa; identical to SEQ ID NO: 13452
  Clone ID: TF_OsC350539_1

SEQ ID NO: 22593 - DNA, 1042 bp, Oryza sativa
  Clone ID: TF_OsC3972_1
ggagtgtgtgttttctttggaatagcgtggggagattggattaaacggcttgccaaattagcaagcaccaaactgtggcactgctctgcttcaacaaatttaatatactactagtaatctgcaaaaaaaaaaggattcacaacttcgcaggcttggaaggtggaatcgacctatatagcagcaaactattcctacttgtgtttttttggggggagttctccttggcgcctatgtacaaatcaggacgcctatgtgcccgtgtgccgtagttgaggcagctctgtcatgccggttgcaacgaaattgaccggggcggtggattggcgggctcactggaaaccgcccaagccgttgagcagcagctcgtgtggtcgcagcagcgtcggggtgggcgccagcggcagcggggatgggtagtacgagaggtcgtagtcggaggggtcaggcaggccggaggcggcgggcaagagctcgtcggggatgagcggcgcgcggcagagcgggcaggtgcgctgctcgtgggccatccagcggtcgaggcagccgcggtggaagacgtggcggcagttggacagccgccgcacctcgtcgcgcccgcagatgccgctgaggcagaccgcgcagtcgccgccaccgcacaccgccgccggggcggacgccaccagctcgtcgaaccgcaccacggggagggcctcctcgatggccatcggcggaatcgccctgaactcgggccggcggtgctggagcgccgacgacgacgcccaaccctccgccatcccgccgccgcgcccctgcagcatcatgtcctgctccgtggccgccaggccgggcgggttgtcgatgaggtcgccgaggccgactgcgtggaaggcccagaggagaaagcgatggaggtggccgaggaggaggagcacctggagcagcagcctcgggaggagcagctccgagtagcccaccgggaagcccatggcgatcttggatacagccgaattgtgagctgagctgaggtgagcttgcgtctgtgccgcgtgcgccctcgtgc

SEQ ID NO: 22594 - DNA, 1324 bp, Oryza sativa
  Clone ID: TF_OsC12910_1
ggacttcaaattgctgtatagaatgggttgtctgttaataacaaaaaatttttctaccttgatttatttcctgctacttttctttgcccacgctgcattgtgtggagtgagagcaagaacagttctggacatttgagcaacaagttgaatctaaacaaagaatataatgaaaatctatgtaaacaaaatgaatctgcatcttgttcaattctctcaagtacactaatgtttcgtagcagaaccgacggatttgcagatggggcaccaattcttttgccgaagccattgttggatgcaagcaagatgatagtaatgcttgcacgccatctcggccacctcctcggcaggtaaatattcctcctggcatattatgcatttgatatcaccatcttcatgacttgttgaagctgagggcacatagtggattctcttcagacaatttgacagttcatcctctggaaggccagtgctcacggtaccaattgtttcccctagagcaagcaattcctcataagacatgtcgtcgatgtccattctcattcctctatgcctatcactggaagcatcctcatcactttcatccacaccgaagcgccagtaaatcagcgagtctatcaaactgtgctccaaatgagatactgctatcaccacgatttctggcattgcttccatttgtgcctccatccttccttgtcttggaactgatcgatgcaatgtcttgaaattgatctactactactactcaaggaacctgcactagatgtgtttgatgatgatgggctactccctccactcaatgagcgcttcctcgacgaatttactctttctttcaaatggtccagaagatcctgtccagcagtttctcttctaggtctgttgccggtttcgctacaggtgccggctgcattcctcctgctgccataagccattcttccttgaggtaacagcctgttggatccactgacaagtagtgatctctgaggaatcactgcttctttggttggcctgcgcattttcttctctttgtcacggaaaagcttactgctacagccagtgcgcgtacagcaagcggtcgctttgtggcgcgggctatcttccctatatacaaggattgagccccctttggtcaatagaaggccaccaactgttctcctccccatggtttcgtccatattcaacctcccaatcttcttcttcctcttcctctgctgcgtgctccagctagaagggtagagagagagagagagagagccgaacaactcaactcgatgagagaggaggtctcaaaccctcaacaatgtctcgtgcgcttgcggacgcgtgg

SEQ ID NO: 22595 - DNA, 1566 bp, Oryza sativa
  Clone ID: TF_OsC29912_1
cacgcgtccggaagacagaaacgcctgccccgatccccatggcggggctcgccggcgacgactcctcattcttcggggacgacggcgacggcgatgagttctgctacgggccgttcgacgtcgaggatctctgctacggcgcctccgatgtcgacgacgattgggaggagttctgcgacggccccttcggcggcggcggcgtggaggagttctgcgtctccggtttctccgtccgcgacctctccgacgcgtcatcctccggcgcccgcgagacgggcgacccccacgacgacgatcccctcccccaaaccctagcccgctccctcgactccgacggcgacctctccgccaccctccaccagatcgtgtccgcgatgcgcctctccgaggacgaagaggaggaggaggaggaggagctactggtcctcggccacggccacggcgtcggcatcggcggcggcggcgacgtagatgggttcatggtgagcgccttcgatctcgacacagcgatggccattgggggcatcctcgaggacatccacgaggtgatgggcgccgatgaggtacgggaagaggtggtggtggaggaggaggaggccggcaatggcggggggatcatgccgaatggattcgagttcgggccgccgccgcgggccatcagtggcaccgccgcgggattccggatgatggtggacgccgatgacactgactccgatgacttccagtttgtcgaggtactcggaggaggacaggtcagggaggccggtgccggcatgagcatgcggccctcgcgtgcgtcccaattggtggtggagagcttgccggaggcgacgctcagtgaagaggaggcctctcgtggctgcgccgtgtgcaaggactcttttgcgtcggggcagatcgtcgccttgctcccgtgcaagcattacttccatggggactgtatctggccatggttaactatcaggaccacttgccctgtctgccggcaccaagttcgcactgaagatgacgattatgaacaacgtatggctcggcgcgtgattgttctagcagcagtggagcatcagggtgcaccggcacagggctgtggagacagcgcaaccatgggtgctgaaggcgcaagtgaatgtgtggtagaaaatggacctgagaaaacttcattttgatgcggtcccagtatttggtatgatgatcaggcagctaagacaagaaactgaactgacgtaggtagagggaccccccaactcccttggaatgttggcaggaaaactgtaccggcatccaacattttggctaacactcagcatattgttgtcctatgatatgctgtaaatgtacaaaactaagtagttcgatccactcattttctcgtttttcggctggtatgaatgatgagttgtcggttatcttcaaggctcttgccctaatctgattagctacagttcctttttcttgtttttgaagctgaaaacagaattccccttcgaatgcatgatttgtaatggttgggatttgttgaatcttttatcagatcgcccaggagattgcttttgacatgtgatagct

SEQ ID NO: 22596 - DNA, 1273 bp, Oryza sativa
  Clone ID: TF_OsC185398_1
atgaacaaaagatttaacccacagtaccgggcatggcgcccacccacagggccacagggccacagggccgggccagaaagcggaatcgtcccaccaacaagagactacgtggtcgaggaggaggacgaggagcgccacccccacccccaccaccgcctcctcctcgacgacgacgcggcggggttcgaccacgacgaaaccctagccgcccccgcgcccgccccgggctccccgttctccttcgcctccgaccccgaccccgaccccgacatcgacctcgagctccgcctctcctcccgctcccctcccttctgggactgcctcgaggacgacctcgccgacgaggagatggtcgggggcggattcgagtgggaggagatcgccgacgccgctgtccctgcccccggagccgtcgctgctggtggtggtggtggtggtggaggaggagatgggggccttgttggggacggcgacgtgttcgggttcctcgacgagagggagatcctcggcgcgatggaggggctcgacagcggcgacgacgaatcggggttctccgacgagccgttcgacttcggcgacgagggggacgacataggggacatcttccggagcgtggggtgggaggtgctcccggtgccgctggacgaggacgacttcgaggtgctgccggggcacgtcgcggacgccgcggcgggaggggcgccccccgcggcgcgcgcggcggtggagcggctccaggtggtgccggtcggcggcggcggggaggaggcggcggcggcgtcgcggggttgcgctgtgtgcaaggacgggatcgcgcagggggagctcgccacgcagctgccgtgcgcgcacttgtaccacggggcgtgcatcgaaccgtggctcgccatccggaactcgtgtccggtgtgccgttacgagctgcccaccgatgaccccgagtacgagaagcggcgggtgaagcggcgttcttctggtgactccgtggcgcaattgggtactcctatgcaaatttgagctaggattgcttggtgatatgtgttggttgccattctgtggaattgagaaacttcactctctaactgctcattgggatgcttcgagagtgtcatacctctttgatctcaaactttttagtgcgtagctgtcatgattggtaattgaacggtaagaaccattgctagaatttagaactgctgtaaatacgttgtgctgctccaataatacagaaaattgtttcaatgtttccccaaaaaaaaaaaaaaaaaaaaaa

SEQ ID NO: 22597 - DNA, 1523 bp, Oryza sativa
  unsure (1)..(1523): unsure at all n locations
  Clone ID: TF_OsC12034_1
aggagaaagtattattttgttaaccattattaaaaaaaatcagtctcccaaagctgccacctttgctggttttcttggtttgttcagtttgttgcttgtgtgtcccccagttgcatataaacatgggcatgtcacacctcacaacccccctttgctttggccattttctcaagcacctaatttgcttggatccttcttgcacttgcaacttgcaaaacaaccaaaggaaatactagtagcatcatcaagcgaagaaggtcagctcaaaagggcgttgtgtgcttcgcctcgcgaaatgagagtcgcattgctccggagatgatggtcgccggagtaatcaggagcaaccaggatggcggcggcggcggcgggacggtgtccggtgcggcgaggattagcccggcggtggtgttcgtcctggtgatattggctgtggtgctgttcgtgtccgggttgctgcatcttcttgtcagattcttgctcaggcgcggccgtgggcgagatggcggcggcggcggcgacgcggaggcggcggagggtgtggaggagtcggcgttgcaacggcagctgcagcagctgttccacctgcacgacgccgggctggaccaggacgtcatcgacgcgctcccggtgttcatgtaccgggaggtggtggtcggcgtcggcggcggcggcggcgcgggcggcggagccaaggagccgttcgactgcgcggtctgcctgtgcgagttcgccggcgacgaccggctccggctgctgccggtgtgcggccacgcgttccacatcgactgcatcgacacgtggctgctctccaactccacgtgcccgctctgccgcgccgcgctcggcgccgacgccgccgctctgttcgacgccgcgttcgacgagatggccgacgaggaggaccggaagcagcaggaggacgccgtgttccccgtccgcctcggcaagttcaagaacctctccagggcggtcggccccgtccacgaccgcgacgacgccgccgccgccgccgccggcgtcggcgtcggcggtggcattatcacgcgagaggaaggcgagtcgagcagcagcagcttggacgccaggcggtgcttctccatgggctcctaccagtacgtcctcgccgaggcgagcttgcaggtgtccgtacaccggaggcacggcgacggcaatggcagggcgaggctgagagggctcgccggcgccaacccggccggcaacgacgccgccgccgccgccgacgggaagaagatcggcgccggcagcaagggcgacagcttctcggtgtccaagatttggcagtggccgcggcaaggcaaggggaagctgccggtgctcgcctccgacgactcgccggcggtggacggccggctgccgtggccgaggagaagccccggggcttcctgatgctgatttcncatggtgtgtttgcaatttgcaaaactttttctagagctaattctgctcatctttttaacaccgtattaatcaatctgttcatagccaattcgttccattct

SEQ ID NO: 22598 - DNA, 1938 bp, Oryza sativa; identical to SEQ ID NO: 13524
  Clone ID: TF_OsC5703_1

SEQ ID NO: 22599 - DNA, 2037 bp, Oryza sativa
  Clone ID: TF_OsC1528_2358
acagaaaggggtatggtatgcatggactgcgctgaatggagaaatttcttcaggtagcagaggattaactggggatctacatatatgtacaagctggctgaaatacagaggagcgaggcaggctcactcgacgactacaaaaggtatatacatgtctcggtatagtatcgttcaggtcgttaaattaaatgcaaggaatcgaccgcgtggagcaggcagaaacagaatcgtatggctctcttcttcggcttcggcaagggcaaggcaatcggcgattgcctggatgaacacagctgcttcgcgcgtgccgtgggcccgtggagcagagacgaagacaatgcttgctgttgaaaggtcttcaggcggcaccttcgcacacgtccccacggcacaacgggcagaccctgtgtacttctttgagccacttgtcaacacacagcaagtgaaactcgtgtttgcacgggaggcttcttatctgatctccatcctcatattcagttaagcagatgtgacactgttccatgtcatcactgcattgggctgtctgctttttgtagctcttacatggtaatgaattaaccacagattctggagcctgggcagagaccatggaaagcgaaagtgatgcaggttgccggtgaatttcatccaatacctcaaataatgcctcggttaacatgacaattcttgatatacttgcacgggcactagattcttcagcaatcaagaaggaatcacaggtgcatctgccaatttggtggatccccaaaggacaagcaacggtactttggtcagtaccgctatcaaaaacagcacgccgatgctccctaatccgagatcttgaatactggcttactctgattgaaccatggcgtctccgatgaaagaaccgtgcctcctcaatctcatccgcaaaaagttcatcaccaaggtctagccatctgctgtaaaatcccagatcatcggtatcagaatctaaatatcctcttgaactacgtctggaaaatgtgtcccacagaacccttctatggctcctcctcatttcattgctgcttgaatctctaacacgcgctggaccatcgtttgagaaaatgctcatcatgtcatcatgtaatgtatttccaccaatctcaccttgtgtcccactaaatatggggacatcttctctgctagggactgtatctggaagtgattctccaattgtagatggtgcagttgaagtagcaggcaacacagatgttaagctagattgagaagtatctgatctttcacttgacataatagttgtggatgaagtcccatgagcaatctctccagcctccaagtcagccatgatcctttcagatgccctctgtgaggaggagaaaccagattcagaaacggggccaccaacttctggaatgcaaactgtgtcagtctcagcattgtttgctgcaggttctaaaatatctcgtccaatatgactgattccttctctagacgttatctcagcataagcaacttcattactgaaatttcccctaggcatgacttcctttcctgatgaactctgacgaacacttgtttcagcgatttctgttcccagggcatcttccttgttttcgtgactgtttaagtgattgaacctgagatgatgacttattgtgcttgaagatggatgcactcttggatctgactcacttgatatgcggatatccttagcagcgacagaagcccgaaagtccatctcagcaaccgctcgagctgcttgccaagattccacctcgtgagctcgcgaggaggacgcggcggtcgcgccgccgccgccgccgcctccggtggccgccccagaggatccgccgccgaagcaccccgcgagcccgagcccgaggccgcgcgccgccgcccgccgccgcggcggcgcatcggcgcggctgctgcaggagaccatttggctcgcgcttttctggggttttttttctctctctcccagtttttatccattctactcttgtcggagaacgagagagagaaaaatgagtagcgcggaaagcgtgg

SEQ ID NO: 22600 - DNA, 1231 bp, Oryza sativa
  Clone ID: TF_OsC1867_1
gtcgattattatggtgcggggtgtcgagcagggcggccccgccatggacgagtcttcgtcgtcgtcgtcgccgtcgccggtgtccgcgcctgcagggcaggcagccatgacggccggcggcatcgccaccgtggcggccgtgctcatcgtcttcgcggcgctcacgctcgccttcgtcctgctccagtgctactgcgacgagcggcgccgcgccgtgacgacgacgtcgacgagcgggcgcgggcggcggccgcggccgcggcggcgctctgggagcggcggggacggtggaacgggaggaggggtcgacccggaggtgctccggtcgctgccggtcacggtgtacagccgcagcacggcggcggcggcggcgaaggaggaggaggaggaggacgacgacggcgtcgagtgcgcggtgtgcctcgcggagctcgaggacggcgaggaggccaggttcctcccccggtgcggccacggcttccacgccgagtgcgtcgacatgtggctcggctcccactccacctgcccgctctgccgcctcaccgtcgtcgtgccgccgccgcctcttcctcccgtcccgccggagccgccggcgagctacaccgtgagcctcccggcgagcgtcctgctcggcctgtccgaccatggcgccggcgcggtgaccatgacagcggagggccgcagcacgctggtgatcgagatccccgaatccgcggcttcgacgaccccgcgcgacgcggcggcgaggtcgtcgccgagcttggcgcggctgaggtcactgagaaggctctggagcttcgggcggcaaggggcggcggggtcgacgtcgtcatgctcctgcgccaccggaggagacaacgacgacggcgacgtcgagcacggtgtcagcgtcaccgtcgccatccgcgccgtggaggcggcaacgccggcacggccaccggaggccgaggccggtgcaagaaccgccgccgcgcatgtccggaattgacggcggcgaggtcgtcaagtattataaggcgatctccctgtacatatcggtagaaccgaactggaatcgccattaattcctacgattttagaaaatatcaatttcatttttaagattagaaacatttaagtagaaattatttgttcatcagtcaagtagcaaagagaaatgtatggatggcagtgagaagcatccctctccgtatgttccaaaaaaaaaaaaaaaaaatctctccctcgtgcc

SEQ ID NO: 22601 - DNA, 1245 bp, Oryza sativa
  Clone ID: TF_OsC4209_1
aatacaccggccatccgaggagagaaaggcaggcgagagcagcagcgagaatcaataaacggagacaaagaagaaatacaaaccgactgatacggggactaaactaccataacaataagagaataactaacacacaaccatcgagtagaccatcagccacaccatatcaccccgcgcactgggcgctacgcccaactcaacggacgtggagggcacctatagcgcggcgcgcccgggagtgcgcagtggacgacgggggtgggtggcggtcttccctgttggctggtctcgtttgtttttttttttcaaactaaagaaaaagcaatcggtctcattaaatccaccatgtgaatatcaccaaacaaggcatagcatagcgaaatagaatacacagggggagagaaactactgccgccatcattcgtaccatcaatcatcatcgactttagctagcaatctcttccagcacaaatgaaatatctcttgtctcagaacgtcagccagggacgcaagtactccatctgccatcacgtaatgtgcagcagcaattcagtggcctccgtggcggtagagcagcagagaacggtagacagcagcaaggtggaggaacacgatcagcagcacgaggaagtcatcgaagaatccaaacagccccagcacgttttcaggaagaatgtcgatggggctcaggacataaattgcactcagggctaccatcatgaccatcctcgccctgaagacaagtgggagggtcctctggggatccagtagttccctgaacagtcttctgatgaaaaagggtaggtcttgcaacctctgagtcaggttgcggggtgttccaccaaatatgcggttgtaatgctgaacctctcctagaacatgctgaatttgcggatcatcatcattatctattgatacatttgctggtaccagaagattaataaggcgacggcaaatgggacacttgcaaggctgtacagaaggtccatgattccaaacacggataatgcactctccgcagaaccaatgggagcagttggcctggcaggggatccggaagcggtcgtggcagaccgagcagacgtcgtcctccggcggcacagccgacgccgacgaggagctcatccccttccctccgtcgagcggacgcggtgtccgcggtttttttccgagtcgccgacaggaggagagaaatttgggagggcagctggttgagttgctttcttcagccacggccacgatccg

SEQ ID NO: 22602 - DNA, 594 bp, Oryza sativa; identical to SEQ ID NO: 13472
  Clone ID: TF_OsC387972_1

SEQ ID NO: 22603 - DNA, 723 bp, Oryza sativa
  Clone ID: TF_jC-osroLIB3475P014f09a1
cccccacaaaatctaaacctttaatagcatggatcatttccacaggacatacaatcgtattcttttaacggatccaacaacagtacaacacctgttaaaactgctccagcaaaacggtatgctagcaagcctgtcaaacattttcagatacaatcatcaaaacgccaatgtggcgagagtcagggtgggaggagggacgctgatttccagaatggtggaaaccggcttactccgcaaaagggagatacacgcggtggaagttgttcatggtcagcttcctccggcaggtagggcacttcttctgagcctggattgaggccttgatacactgcttgcaaaaaatgtgaccgcagatggtcgatgacggttcgaccagctcgttcatgcagacagggcaattgaaagttggttccttcggaacggccttctcgggttcagggagtgcattgctaggtgtgtcaattatatgtatcacagggctggtgctgatgttggaggatctctgatgaccatgcctaggatacctgcccagagtcagagatagtagtatatccacatgctcatcaactgcatcccctgcttgtccaggggtagtttcagaatcatcttctatggtcacaacaggttctgtccttggagcctgctgcctcacttgagggaacgagcttgcagaataaatcacaacatcatcattgatatcatccacgataatgggacaactac

SEQ ID NO: 22604 - DNA, 673 bp, Oryza sativa
  unsure (1)..(673): unsure at all n locations
  Clone ID: TF_LIB4309-041-R1-N1-C4
aacatccaatcgaaatgtgatatgtggattgacacaagctaccaattttttctgaaaaatgagaaaagaattatatgctctacagaaacaaaaaaataataaaaaatctttgcgccgctggaagtttcagcaaacaatctagcgactttgattttcgtcaagctatgtacacaaatctaggtgatccagtccccgtgagtctccactctccaacatcacagaaacgttgcagcattatgatcatgaatcctcatggaacagcattacctttgagcagactgggcaagcttgacttctctccatccactcataaatacaacaaagatggaaattgtggttgcattgtaatgtcatctttggattctcataatcatactcttctaggcatattggacagtcgtcctcaaagtcgaaaagatcatgtacttgctctttgccaatgtgcagaccatctgaatggtgttttactgatgatccatcatccttcacagctgtggaaggcccatcatccttgacagctttggaattagatatgctatcagcattcttgctttctccaaggctaccagatttgtggaacgttgntgaagcttgtcatgtcctactactagtgggtgatgctctgtatgatggctgaaatcgagatcatcccaagggcagggccttggcgggc

SEQ ID NO: 22605 - DNA, 646 bp, Oryza sativa
  Clone ID: TF_LIB4506-014-R1-N1-H7
ggcagtaatacggtgtatatactcatctctatttatgtaaaattcgtgtagggtcaaggtgagttctcttatataaagagatttgctcaagcatacatacctcgcaagagcctatacatggggataatatatgcacactcagtacacacacgcacgcactcacacactcatgtactcttcttcgctttcagttgatggggaagacgtggagattgattcagcaccacatagggctgctctgctcgcaaacgcgagcaacacagacgcacgcacctaaaacacctgcctgcttgcttgcctgccttcttgtctgcacagagttgaggcatcagcatcggctgcctagaatagctggaaaaagaggctcgttgagccatcaccgaacgaccggaggtctgctggtttcaccaacgctctgcatagcgggcatgtccgctccctctcgaaccattcagagacacaatcctcgcaaaagatatgcttacagcgcaaaagaatgggagtatgcatcttttcctggcatatagcacacatatctccagtagcactaacctgttcactagttgcgtatgaaccgtaatggaagtctttatgagataacgctctcaatgctgtcaaaaatgattgaaccttttccaccactgat

SEQ ID NO: 22606 - DNA, 1141 bp, Oryza sativa
  Clone ID: TF_OsC8285_1
gttgcgtgcgagctccgatctcctaaacctcctccaattccctcaacgaaatctctctctcgatccgactctgctctctatccggcctcgatcacccccaccaacatcctcctccgattccctcgccttctccttctcctcctccaacttctcgatgacttccactatactaagctagctagcccccgccgatccccgcggggttttagtttagctccgcgccacccaatcgccgcaggtgatctttcccggtcaagaactcgcgattcgggggcggatacggaggaaggaaatctgtggtggattcggatcgagctcttcgttttcttgctctttgtataaattgcgatcaggggcggcggaaacaagggttcttctctgtctctcttcattagcgccggcgacaaggtgaggtgaggtggtggtggaggcgatcgaaatggggtcggtgctgtgctgcttggccgacgacggccgccccgtctgctgcttccgcctcccatggccgatcttcaacgccgctcacaaccacaaccacaactcgggttccattgctcgtccaagagcggatacacgagttgcgcctgatcaaggaagaattagtctcactgctccatcacagcatgattcgatggatactttccgctgcccgccaaggcccttgccttgggatgatcctcgattcagccatcatacagagcatcacccactagtaggaggacatgacaaagcttcaacaacgttccacaaatctggtagccttggagaaagcaagaatgctgatagcatatctaattccaaagctgtcaaggatgatgggccttccacagctgtgaaggatgatggatcatcagtaaaacaccattcagatggtctgcacattggcaaagagcaagtacatgatcttttcgactttgaggacgactgtccaatatgcctagaagagtatgattatgagaatccaaagatgacattacaatgcaaccacaatttccatctttgttgtatttatgagtggatggagagaagtcaagcttgcccagtctgctcaaagaaaaaattggtagcttgtgtcaatccacatatcacatttcgattggatgttacagatgcgcgtttgagtgattgcatttgcttctga

SEQ ID NO: 22607 - DNA, 1319 bp, Oryza sativa
  unsure (1)..(1319): unsure at all n locations
  Clone ID: TF_OsC99441_1
atgggtgcggtgtccatgtcgacaacgacacgcctccccctcgtcgccgccctcctctccgccgctgcttgcgtcgcagcagcgcagccggccaccgccgaggccgccccggagacgcccggcgtaggcatcaaggtgtcgttccgccccagnnnnnnnnnnnnnnnnnnnntcttcaccatgatcttctcgctcaccttccttctcctcatgtacgccaaattctgccatccatcctcccccgtcgccgcccccgcccccacggtcgtcccggcggcggcggcggacgacggcgtcgccaagccggtgatcgagtctctgcctttcttccgattcgcggctctccgcggggccaggcaggggctggagtgcgcggtgtgcctggcgcgcttcgacgacgcggacctgctccgcctcctcccgcgctgccgccacgccttccacctcgactgcgtcgaccgctggctcgagtccaaggccagctgccctctctgccgcgcgcgcgtcgacgccgaagatgccgcgctcggcctcaagtacgcctccagcgcacgcttcgtcccggccgggggggcgtccgagtccgagcgctttgacggcgaccaagacctcctgggcatcttcgtcgagcgcgttccgtcgtcgcggatggagccagcggcagcggcacactgccctgatctggaccgctacaagcaccgcatcgtggtgtcggacgcggtgttcaagagccgatggagcgagatcaactcctccgacctcatcgcgctcgacacggagctgcttcggtccatggagacgatggaggtggagatggagatggagctgtacaaggagacggaggaggaggagacagatcatgatcatcagcggaagacactgctggcggcaagcggcggcaggtcatcagtcgacgcggcggcgagggcgaggatgatatcatcgtcgtcgtcgtcgggatcagtgcggtccatgtcggagatggtgagcctgccgaggctgcgggcggcgatgagggagcgcctggcgcacgaggaccgctgggtccccatcgctcgtcgtacagcgcgctggttcgccggccgcgagagccgccacgacgaggctgccccggtggttgactcgccgccggcgtcccattccaattcccttgtctagtcgtctatctcatctattctaacttcaaatcaaacaaaaagtcaaaacccgcgctgtgggtcccattggtcagtgtctttgttttgttttgttttgttttgttgtaccattattccctgtctgtccaatactattatcatgctggcctggtggggtgggtc

SEQ ID NO: 22608 - DNA, 1063 bp, Oryza sativa
  Clone ID: TF_OsC326943_1
cggcacgaggcagtaagaaagcaaaggcaaattaagcagctagctggttagctgctgctgcagggagaaagaggaattgggtttggaagaagctgcatgcatggcggcgggggcgacgctgtcggtgctcctcctcgtcgccggcgtggtgctcatgctcgtgctgcacgtcgtcgtcgtcttctgggcgctgcgccggggcgtgttcctgcgcggcgcgttccgggtggaggagcgccgggaccagcgggccgccggcctgacgcccgacgagatcgccgtgcttccctgccacgagcgcaaggaagacggcggtggcggcggcggcggcgagtgcgcggtgtgcctggaggcgttccaggcgggcgaccggtgccgcgtgctgccgaggtgcgagcacgggttccacgcccggtgcgtcgactcgtggctgcgccagagccgcgtgtgccccatctgccgcgccgaggtggaagtgtccggctacgccggcaagccggccgcggcggtggccgaggcaagtcaggcgaccacgctggagatcgttactgaaagattgggaggcacagaacgcctcgaggtctcaaatgtgtgtgaagtccatccgcttgattcggttgatcgcatgaaaggagacaactccaacgtcttcctcgtcgccggcctctcgctggtggtcgtcgtccatgtcctcgtgctcctatgggcgctgtggtggggatacggccgctcgcgcctcgccctcgcccgcgcccgcgtcgtcgggcagcacgacgtggcgcgcggcggcctctcggcggaacaggtcggcgagctgccgtgccacgtggtcaaggagggtgccggcgagtgcgcggtgtgcctggaggcgttccgggcgggcgaccggcgccgggtgctgccgaggtgcgagcgcggcttccacgcgcagtgcgtcgactcgtggctgcgcgtgagccgcctgtgccccatctgccgcgccgaggtggccgccagccgcggcaaggaaggtgacgcgccggtggccgaggccgcctccttggagatcgtcgccgaacgatag

SEQ ID NO: 22609 - DNA, 1214 bp, Oryza sativa
  Clone ID: TF_OsC18246_1
tttttttttttttttttttttttgttctctcttgaacttgtaaccctgaaagtgaaactactcgtatgatcgttattgctctcgccaataaacaaactcgaatcatcctactaagctacgtttgtccacagctagcaaaattgagctaaacacctactaagtaccctattacagctgatgagtactcgtagcaaaatcaaatcgcaggaagcacgcgggactcgccggcgacggacaggaagccaatgtcgccgccgccgccgccgtgcctctcgacgctctcgccgtcgccgcagtaatcctccttggcgtcgtcgtccgggccctcgacgcgcgcgacgacgggtgcgcggcagacggggcaggtgggcgcgcgcgtgagcagccaccggtcgacgcactccctgtggaactcgtgcccgcacgacggcagcacgcgcacctcgtccccggcggcgtactccgccggccaggcacaccgcgcacacaccgccctcctcgtccgtcgacgacgtctcctcgtcggcgacggcgccgtcgcggggcatctggaccacgtgcgccgggatcccgtcgagcgcgcgcttggtctccttggacggctctggccgcatcatcgatgaccctccgacgccgtctcgccgtcacagaagcaggcgtagggctcggtgagcattgtcgcccccttcaagcgctgccatccccttcgagcgtctccgccgcggcttgctccaagcgctgccttcgctgcctccacacgctctgagcggagccgttgccgctccttctacctcggctgtggcaacagctccctctgcacggccgcccccttcgagcgtcgtcgctgccgccgccatcgctcattctgctccctccatggaaagtggaaaccattgcgccagatgaagttggggataagatgcttttctgggcaacgctcggctccggatctaggaacatcttcaaaagtgtgaagagaacatggcattcttatattctgcatatcgaagcttagaagttacggtcatatagatttttatcaactacggatggagattcacatatagacttcaataattgttttctcgttgtgtgttggctttattatttctgttcttattattgtgtgagcatttgctctctttaagagaattttgtaataagtggatgtagattctttgaagtaaaggccggaatttttattccaccatatt

SEQ ID NO: 22610 - DNA, 1327 bp, Oryza sativa
  unsure (1)..(1327): unsure at all n locations
  Clone ID: TF_OsC104843_1
aaaagcttctcgaacaccacacggttgggaagagagaggtgagcccacgggaccgggcggactcgccggagccggaggttgccggaggcggcggcggcggcggcatcgcgctcttctccttcgctgcttctccggggaaagaggcaaggttcatcaatggcaactccaaatacctattcagtccatatctcctcagaaacccacaggattgaggcctggttggcatctgatgaagctttagctaggcagttgcaagaggaggagaatgcacatgatgctattgctacaagagaatttgctggtaacgcatccttggaaccatcgtcaccagctgttgagtacagacctcccaataatgcagctcaggttgcaacggaagacaatgttgaccctgataatatgtcttacgagcaactacaagcattaggggaagcagtaggaaatcaatccagaggattatctgatgacctgatatgctatttggtgccttttaagaacaaatgcagcttcttctccaggaagaagaatgatgaggaatgtgtgatctgtaaatcgacttataaaagccgacagaaattgataagattgccctgcagccactgttaccatgcagattgcataactcgctggcttaagatcaataaggcatgcccagtctgcaatgaggaggtatttgggtgaatcacagcgcttgtggcaacgctggtgatgtttgcgttgtgttcagacacgttatgctcctacaccctatgctatacaccggtgctcaaggaaaatgcgttttggtatactcgtactactaactgaaccatgccatggcccatggctgtgatgtgtccatccaactgagttttatcacaaatagataaatctgtgtgtgtactagtactatggttgccatttttctggtaatgcaacctagcagaagcagctaaatagatactctatgtattgcgccatcttttacatgatctctgctgtggaaagaagcacaattgtgaatgttctacacccctactctgccatcttcagttaattcagcaatactgcatttgctctacagcttgtgtgtgtacagtgaacatggttctttcagccaaaacttttgttagcatatagtgatgttcttttcttttcctttcttattttgtaaggtagatgaagcagacatatcataaaccacagtcagaaactttccagcaaaaaggaaaaggcttatgttagtagacttgcttgctttttcctaatgtgtgttatttctttttctttagggtaatgtgtgttactacctccatttcngnttncaaaaaaaaaaaaaaaaaaaaaa

SEQ ID NO: 22611 - DNA, 692 bp, Oryza sativa
  Clone ID: TF_OsC85903_1
actgggaaaaacaagatcaatgattgcacacaagggaatgcccacaaaggtactaactaattaggctttcctttcccatacacatgcagatatacacccccgaagtgaactttgtgctctttatttacaatcttgacatcaaatgttacatcagaatatacttatgtttctactgtactgcagaaacttgtcactgcaagcatcaggtctccacttttctgtcatcactttggtgaactcaagggtgatgaaagcagattatcgctttcattgcaaatcaacaaactacaatccatgagcacgtcttttatgtgcatatgagcagatgaaacaagcaaacatgctagagaagaagacgtgttctatacagtgaatctcgagctagctatacctcttcctgccatcctatcaacacgtcggcgaccaaagggcaagccaaaaaatgatcgaaccacacccccaatctcggtcttgcagagtgggcacactgcatttatcttgagccatttatcgacacattgcacatgaaagaagtgggtgcaaggaagctcacggagctcatcatcatctccgtacttagtaagacagatgcagcacacagcatcttcagctgaaacaatcctttcctttttagttcctgggcccaggatgccaccctcgctaagattctctgagcttgaagcatggtcaac

SEQ ID NO: 22612 - DNA, 636 bp, Oryza sativa; identical to SEQ ID NO: 13482
  Clone ID: TF_OsC394643_1

SEQ ID NO: 22613 - DNA, 642 bp, Oryza sativa
  Clone ID: TF_jC-osflLIB3477P007c06b1
caggctttttcccaaggaaggcataccatgataactgtcctatatgtctatccgctttcagacgccgagaaacactcattacattggcttgcaagcatagttaccatgaaggttgtattgctagatggctcaagattgacaaggcctgcccagtttgcaaatatgaagtgtttggaccttcctagcgtgtgaggaggcgatcaacaaggctgaccaactatgactcgatgagacggcatatagtggttgcagcatctgctctgcagtattaattaaaaagggaaaccttaactcccaaaaaaaacagagaagggaagaaaaagaaagcaaaaaggaaaaaggaaaaagaaaaagaaaagacaaggagaaaagaaatttgaaaacagagatgcttcgtcaagattgtgcatttttttcatgtttttttttggctgtgtacaagcgtaattttgacctgatcgactcaaggcagtcgctcgaggcctttaatttcgtaaagcttcatatgcatgagtgtgcaattgtgtgcctatagtagtatagtacatgttttctgtttgaaacggagtcaaagatctctctcctgccgaccacccatctaaaaaaaaggccatgtgtacatcaatacatgtactgatatat

SEQ ID NO: 22614 - DNA, 633 bp, Oryza sativa; identical to SEQ ID NO: 13486
  Clone ID: TF_OsC105234_1

SEQ ID NO: 22615 - DNA, 1583 bp, Oryza sativa
  Clone ID: TF_OsC157607_1
atggcttcttcctccccttcctcctcctcctcccccccttccgccgccggtgcctcctcctactggtgctacagctgcgaccgcttcgtgcgcgcccccgccccccacgacgactccgccgtcgcctgcccggactgcggcggcggcttcctcgaggagatgagcgcgcccccgccgcgcgccgcctacctccgccgcccgcgcgcgcaccacgccaacgacctgcgcctgcgccgcacgcgccgcgccgcggcggcggcggcggccggcgaccgctcgccgttcaaccccgtcatcgtgcttcgccgctcccccgccgccgccggcgacgacgactccctcgccgccgccaccagcttcgagctcttctacgacgacggcgcgggctccggcctccgcccgctcccggagaccatgtcggacttcctcatgggctccggcttcgagcgcctcctcgaccagctcacccagatcgaggccggcggcctcgcccgcgccagggagaacccaccggcctccaaggcctccgtcgagtccatgcccaccgtcaccatcgccgcctcccacgtcggcgcagactcccactgcgccgtctgcaaggagcccttcgagctcggcgacgaggccagggagatgccctgcagccacatctaccaccaggactgcatcctcccatggctcgcgctccgcaactcctgcccggtctgccgccacgagatgcccaccgacgccgcccgcccgcggcccagcaatgccggcacagaggaggagacggtcggcctcaccatctggaggctgcccggaggcggcttcgccgtcggtaggttcgccggagggaggaggcccgaggagagggagcttccagttgtgtacaccgagatggatggagggttcaacaacggcggcgcgccgaggaggatctcctggggttcgaggcagagccgatcgacggagaggagtgccattaggcgcatcttccgcaatgtgttctcgtgctttggtcgcagccattcatcgaattctcaggcctcgtcttcgcattcgaggccggagttgaacgatgcgtctgaccggagcgccgtgttcagccatggctcaagaagccggagcacgagctggaggctcgaagatggccatgccgacgccatggtgcaaagataggcctcaactgaagtaaggaaggtcgtcgattgtttccatttcgcgcatatgtatttagaggaaaagaaatttgtagtagaacagaattgagaattggtgttgtacataggagcagcatcacatctactagtagatgataacttgcagggaagaagatgcccacgatggtgattctgaaatgagcatttgttgtttagagtgatgaatttgctcttgctggtagcaaatgtcgcttggaattctatgattcattcaaattcattgtggcgatgattctttgcatctgtgagaacggaatgaatgaaaccattttgatgtttgcagtcttgccggactccaataaaaatcttgctctccagaaaaaaaaaaaaaaaaaaaaaaaaaaaaaaaaaaaaaactcgagactagcctcgtccgaattc

SEQ ID NO: 22616 - DNA, 1534 bp, Oryza sativa
  Clone ID: TF_OsC253211_1
ctacaatgttccagtgctgctgctgctgctgtcactgatatccctgtggaagtgggtgctcctctgcagaatattctgaatctgcaaatgcacctctccagcaccacccagtgagtccatggagaaggacctcctcaatggaagaacatttctgtccctcctcactgcaatgcactcatctcccttactgatgctgacatgccatgcattctggttcttcgtcttcttactactgacctgttgatttgtactagtagcatctactgcaggatcagaagctgccgtattggcctcctgctgtggtgcttgtgcaccttcttcttccgcgccagtgatcacctgaatgactaccacctcaggtctcacgaactgatccaatggaagctggctgtcgttggtggctatggctgccctgcagagtggacagttggcgttgccctggagccaagtgtcgatgcagtcaacatggaagacatggaggcagctgggcaggagcctgaccctctcctcttcttggaactcactgatacacactgcacactcgctggaatcagcagtagtgtccttgatggccttcctgtacctgaacgccggcaatgattggatggccgcctcctccagcccacgcggctcggccactgccgggaggctgctggaggcggcaccgcgtcgacggcgggagatgaggccagccgtccgcgtgtcggaggagctgctgctgttccagttgaggcagcagcggatgacaaagatgtagtaggtgagcaggaggacggaggtggtgaggatgcccaggacggtgagcaccagtattgggaagctcgtgatggatggatggtgaggcacaaaagaagaagatgctgaagaagtggagtcgagtgccaatggccgtggcggcggtggcgggaacagcagtgatggcatctgttgcaccgggaagatggggtccctgtctgcatccatggtttgctgcaaacacgagcttaagcacacaagcaggtgagctactgagctagatagaccaggtttgatgatgctgctgatgcaacatatatactggttttcaggtatgaatggtgagaccaaatggtgatgctcaatgtagtggccaacgaggtaggagggaagaatgaaaaggcagcacccgatcaggttggaaaatgcagtggagttgtgaaagaaattgaggaaggaaagaaacccaacctgcttgctgtcggtggagtagagcgccagcaagagcaggacagcagcagtaggagcaatagttgcttgcacaacagcacaacacaaggaaaatgaactagatggagatgctgtgtatgatgatcacggcactggtggtgatggcggcttgatgttttggatgcgattgaagtgtggccgagtgacaggaacgcggctttggagctccaagaatgggaagcaggagagcttgagggcactacgtctctccagtactagagaactgaagcttctcttgtcttgctcgtggaaccttcttgctgtcggtggagtagagcgccatggttga

SEQ ID NO: 22617 - DNA, 1397 bp, Oryza sativa
  unsure (1)..(1397): unsure at all n locations
  Clone ID: TF_OsC29884_1
ccacgcgtccgaatcatttgagcttgtgggtctcctcaaccatattcgattcgtgagggaggggatcgagctctgttgcggtgttgtagatcattatcactcttggtttgtgattctcggaagtcggaagtgttcttcgcaagctcgattttcttttttttgcgatatttttttgtatcgttaaatctcgaatcccgacgggggaggtggttgagtccgagttcgatgctccgggggcctcaagatccagtctcgacgccgttnttgagctctccgtgttgatgtcgtcgcagccggtggcgcgtgtcctcccccgcggcggcggcggcgggttccgcgccttcccggagtccgccccggcttccctccgcttctccgtcggccgccgccgcgccgctcgcctaggggcgcgggcgcgggggtgcccccccgagggggagttcccgccgtcggcgcacccgcaacactacccggggtggcctgggtctctgggcgcgccgcacccttgcggattgcagccggccatgctgacgccgtacgtcgagcaccagaaggctatcacaatccgcaacgacgtcaacctcaagaaggagactcttcggattgagcctgatgaggagtgcccgggccgcttcctcgtcgccttcacctttgacgccacccttgctggaagcatgactgtttacttctttgcaaaagaagagctcaactgcaatctaacggcggtgaaagaagacctgattaagcctgttactgtaagcttcaaagagggtcttggtcagaagttcagacagccttctggcactggaatcaacttctccgtgtttgaggattccgagttattgaagcagggggacatggatgtatatccacttgcagttaaagctgaaacaaccatgcctgttgatcaaaagttggaaggagaagatcaaaagatgaaaactccaaactcacagatcacacaggctctgtttgaaaagaaagaaagcggtgattatcaagttcgagttgctagccagatcctttgggtcaatggaactaggtatgagttgcaggaaatatatggaataggaaactcggtggaaggcgatgctgatgccaatgatcctgggaaagaatgtgttatttgcctctcggagccaagggatactaccgttctcccatgtaggcatatgtgtatgtgcagcgagtgtgccaaggtcctgaggtaccagacgacccggtgcccgatctgccgacagcccgttgagcggctacttgagatcaaagtcaacaacaaagctgaagagcagcagcagccgtcacccgattcaccgatcaaagtcaacagcaaagccgaagagcatcagcagcagccatcccaatcgctgccaatcccacacagggaagaggtgtag

SEQ ID NO: 22618 - DNA, 828 bp, Oryza sativa
  Clone ID: TF_OsC35881_1
ccgcgaggtggcgctccgagttccggcggtggggctccggcggggggggtgcgctcgggcggcaggcaagaaacaaaaggcaatctgtatagaaagatatagaagacgagatgaagatcagaaaatggtgatttcagagattgatgataacatcgaggaggaatgtggcatatgtatggagataaatggcaaagtagttcttccaacttgtagccatgctatgtgcattaaatgctaccgtgactggagatcaagatcccagtcttgtccattctgccgcgatagtctcaagagagtgaactcggccgacctatggatatatacagataacagggacatagtggacatagcgacggtccgaaaggaaaatcttaggcggctcttcatgtacatagacaagttgcccacggtcatccctgaaactgtttttgacgtttacgattcccacgtaaaatgaccttgcactcatgcacaaattctttactggtgtgttactactagtgctgtagaaattgtggagcccttggtgttcatgctgccccgcttgtagaagctgtaagcagctaagctcgccgaggaggctcgctatacaaaggtatatatgtaaattgtcttggctgtatggtgtgtacctttgtgaggagttaggagaatctgatgccagtcagtctgtaagtaaggaagaaccagcaaccattgactttgtttcttttaattgtaagcatttcactttcacccaaaaaaaaaaaaacaccccccgaaaaaaaaaaaaaaaaaaaaaaaaaaaaaaaaaaaaaaggggggggggcctcgtgccgattcctgcag

SEQ ID NO: 22619 - DNA, 447 bp, Oryza sativa
  Clone ID: TF_OsC428898_1
atgctgttcttgaaagagctgcccatctggcaggcgttcgggttctccttgctcacaggggccctcgccggcagcaccctgtacgccgtgtgcgtcctcctcctctgctgcgtcgatcgccgacgtcgacatgccggtgcgccgccgcccgatccgaagatctggctgccggaccacgcgcaccatcgccggcggcgggatgagtcgtcggagatggagtgcagcatatgcctgggggagctggaggagggggagaggtgctgcacgctggcggcgtgcaggcacgagttccacaaggaatgcatctaccgctggctcgccaaccgcaacacctgccctctctgccgccacatccccctcccccctgcttcatcaccaccacctgcgccgccgcctcaccatgcttctcctcctccttccaatgtaccgcctgctgctcatgtttag

SEQ ID NO: 22620 - DNA, 2126 bp, Oryza sativa
  Clone ID: TF_OsC49150_1
tccccgggctgcaggaattcggcacgagcgggctcccccgtacgtctcgcctcgcctgcgccgatccccatctcgcgagcagagcagggaagagggaagaggcgccgtcgtcgcgctgcatcctgtttgcaggataggtgatgataaagcataatagttgaccaaactcgctgtacttctccttaatcaattatgttacaaagaaatatggtgtggacacatcaagttgccagtcctgaaaaccaagttcaacctgaaaatttctatcatggaggtgctgggagcaacttatctaacctgagtgtgcaagttgctgttggagttccaggaaatactgatttccggagtcactatgagagcattaatcttcagcaccagcatgttcagaatccatacccacatgtgggtgttgcttcaagttctgtgttcccatctactatgtacaacccctgcatatcaacaacagcagtggacagatatgttcctcctattcaaagttttggattgggcaatccactactactgcctttatatcatcaacttgctcaaggatccatggatgagaacggcagcagtggcaatttttgtgacagcgtcagggaatttatcaagaggaaaaatgcattacttgtgggtggccatcattttgttaatagttttgcaagctcaagctcatctgcttatgtgcctccaaatcctttacataggtcatggaacgcttcatttgaagcaaatatcctacccagcactggagtttccaatccaccagagtactcttctgcagattcactgaacaattccaattcgatggcttcacatccagaattggtgcatcatggcaattatgtatttccagctggtcacatgagccaatacaatgcatggattgcacaggcaagcagaactggtggagtaccacagtgggaacatggcaatgcagcggctaatcctccaggtggatttgttcattctggaaccatagacatgccaaatggaggtcttcagggataccaagctggcccttttgccaattattatgggcctctgccccatttccaccaaaatcctctgaatagcatgcagcatcctgctctatttaatcatatccaaatgcaagtacctcatcaacattgcctcagtaacaatttattgcatcacccttctggcaatggcctccccttggatccaagaattctggcaatttcatccaattctgggcatacctttgggcctacagctcagccatctttagcaaaccaagttaatgctgggagttcgagaattcagccatatgagttcctgtttttcaaactggacaatactaaatttaaaggatatcagaatttagttgaaaaatatcacctgatattgttcctgaatgctccgttcgtggatctttcgagattgtatgaagcaggagttattgatgaacatagagatatgcggcttgatgtagacagcatgacttatgaggagcttgtagcgttggaggagcggattggaaatgttaatagtggttttacagaaagctacattgaggaaaatttgaagtcaagttcttatgtcccggacgctgattgcatgcctgatcagtcttctgtggagaaggatgcttgcataatctgccaggaggaatatgaggctaaagaactcgttggaacccttggttgtggtcacaagtaccatgcgatgtgcataaaagggtggctgatggtgaagaacctgtgccccatctgcaaaacaacagctttgccagctgatagaagaaacggatgatggatgccaataacatttattggtcatttgcagcaacaaacattcagctcagttttgtacataagacatgctggataatggttgtgcctgtatttccgttgttgtgatacctaaagctgtacagtgagaatcgctcatcttgtagattgttttagaccctaaatgttccatgatgcgcgaacagctatcatcatggcatagctattagatcgctcaatttttccctttttattgtacatgatatttatctttattcttttcccaaaaagaaaaaagagaacttgtagttcttctgtactttgtgaaacttccaagaactaaaggagtttctcaaaaaaaaaaaaaaaaaa

SEQ ID NO: 22621 - DNA, 1056 bp, Oryza sativa
  Clone ID: TF_OsC60245_1
gcggcggggatggcaggtgcgcccatggcgtcgcccccgccgtacgacaacccgacggctgggttccccatcgcgatcgtgatcgccatcgggttcatggtcacctcgctcatcctcgccagctactacttcctcgtcgtccgctgctggctccgtggcacgggcggcggaggcgccgccggggccgggctgctgcaccgctcgcgccgcgagagcgcggcggagcgcgtcgccgcggtgttcttcaccgactacgaggccgaggttggaggcgggctcgacccggacgtcgtggcggcgctccccgtcgtcaagtaccgccgcgccgcctccgggaagtcggcgtcgccgcaggagtgcgccgtgtgcctgtcggagttcgtccgggacgagcggctcaagctgctgccgagctgctcccacgcgttccacatcgactgcatcgacacgtggctccaccacaacgtcagctgcccgctctgccgcacggtggtcaccggcggcgcgatcggcctcctcgtccgcgacgaccagtatgacgcgtccagccgggaactggccgccggcgagaggcgcatcgacgccgccgcgaggatgggccacgggatcagctcgtgcaggttccccaagaccggggccgagcaggagccgatccggcgatccttctccatggattgcttcctaggcgatctcggccggaagccaccgccgccgccgccgaaggatcccgcaggctcggaggccgggccgagccaccccgacgcggccggtagcagcagtatcgtcggcaccgccggcgccggcgagaccagcggccggtttcggcggttgctgtcgtcgttcgggctcggccggagctcgcggagcacggtgttgcccatccacctcgacccatgaaccacctcgggttcgtgcaacctaattaactcgctcttaccgcttaattaattgagagttactagccatttgtgccacttgtgtgcgtgcaatgtgtacagcagatagcagaattggggttggaattttgccgttccattgattaaaaaaaaaaaaaaa

SEQ ID NO: 22622 - DNA, 757 bp, Oryza sativa
  Clone ID: TF_OsC200433_1
ttccatctccgcagcttgctccggccgccaattacaagcgccccacacccagctgcttcgccttcacgtccacttcaccggagttgccatttccaatcccaaaccaaaggacttcattggattgcgaggggagtggagttgctgtgctgctgctgccgctgccgtcttcgacggtgagaagccaagaaagaggcggaccatgaacacgcccaactcgtggctgttcgcagacaactccaagtacagcacgcgggcgcggctgctgttcatggggctctccttctccatcggcatcctctccttcctcgtctacctcgccatctggtacacctgcacccgccgccgccggagccgtcagctccgcggcggcggctcggcgtccgcggatcaggaggcgcccgaggcgaacagccacggcatgagcgccgccgcgatcgccgcgctcccgacgttcgggtacgaggcctcggcggcggcggcggcggcgctggattgcgccgtgtgcctcgggcaggtggacgccggcgagaaggtgcggcagctgcccaagtgcgggcacctgttccacgccgagtgcgtcgacgcctggctgcgcgcgcactccacgtgccccatgtgccgcgccgccgtcgaaggccccgccacggccgccatcgccaagaaggccagctccggcggcggcgccaccgacacgccccccgtcgtggcaccagccccaccggcggcggcagaggcactgccactgccacctgtctag

SEQ ID NO: 22623 - DNA, 3219 bp, Oryza sativa
  Clone ID: TF_OsC1713_5244
ccgcccccgccgccctcagccaccgcctccgcgtcaccgtccgacgtcgccgcgctcgattgtgcaccgtcgtttccccttttgctctgcttcaccgccgccgcgctcgattgtgcgccgccgtggtccgcacgcacctcctctcccctttcgccgcgtgccttcttccgccgccgcacgtgtgtcgccggtgaccatctaggctgagcggcgacgcggcggcagcaccaccgccggcggcgcctccgccgccctcagccgcctcccccgctgcctccgcgccgaggctgcagccctcagcaactgcccccgcctgtctggactgtcacatgtacgccacgtagaccaaaaccaccgcagattgggttgaggggggtaatttgttcggtttgtatagggtaatttgtccggtttgtatagttgagggtgaagaatgtccggttttgtggttcaggggggtaattcggacgaccgcgatagttcggggggtaattcgtactttttccttgcatggcgccagcctctttggcgccgtccccctgccgacgtggcggggcgatgctgagggaccgcgcgttcgacgccgggtacaaggacgacgtcttcgtctgctcgtcgctgctccacctctacgcgagatggggcgccatgggcgacgcggtcaaggtgttcgtccgaatgccgaggagggaccgcgtcacctggagcaccatggttgctggtttcgtgagtgctggacagccactggatgcgattcagatgtacaggaggatgagggaggatggtgtgaagggagatgaggtggtcatgattggggttatacaagcgtgcacagcagccagaaatgtccgaatgggagcttcagttcatgggcatctcttacggcatggaatgaggatggatgttgttactgcaacaagcctcgtggatatgtatgcaaagaatggactacttgatgtggcgtgccgagtttttggtctgatggtgcaccggaatgatgtctcatggagcgcgatgatctcaggttttgcacagaatgggcaatcggatgaggcacttcggttgttcagaaatatgcaggcttctggtattcagcctgactcaggagcacttgttagtgctctgctagcttgctcaaatattggattcttgaagctagggaggtcagtacatggtttcatcgtgaggaggtttgattttaattgtatcctcggtacagcagccattgatatgtactcaaaatgcggctccctagcaagtgcacagatgcttttcaacatgatcagtgatagagacttgatcttgtggaatgccatgattgcgtgttgtggtgctcatggacgaggccaggatgcgctcactttgttccaagaaatgaacgaaactggaatgagaccagatcatgccacatttgcttctcttttgtctgctctaagccattctggtcttgtggaggaagggaaactatggtttggtcgcatggttaatcacttcaagatcacacctgctgagaaacactatgtctgtctagttgatcttttagcacgttccggtcttgtggaagaagccagtgacctgctcacatcaatgaaagctgagccaaccgttgccatttgggttgctctactttcaggctgtctgaataacaagaagctggagcttggagaaagtatagcagacaatatccttgaattgcaacctgacgatgttggcgttcttgcgttggtctcaaatctctatgctgctacaaagaaatgggacaaagtcagacaagttagaaagctaatgaaagattctggaagcaagaagatgcctggctgtagctcaatagagatacgcggaacacgccacgtgttcgtgatggaagaccagagccatcctcagcgtgaagagatcgtaagtaaggtggcaaagcttgatttagagatgaggaagatgggctacattccgagaacagagtttgtgtaccacgatctggaggaggaagtgaaggaacagcagctcagctaccacagcgagaggctggccatcgccttcggtttgctgaacacaggcccaggaacaaggcttgtgatcataaagaacctcagggtctgtggtgattgccatgatgccatcaagtacatctcgaagatcgcggaccgggagatcgtagtgcgagacgccaaacgcttccaccatttcaaagacggagtctgctcctgcagagattactggctaccgagaaccagcatggcaagaggatgcgtgttgctgtatgtatacccaactgatccccctaggcggggaccatcagaagaagttcagccacgcaaggcggccacgtccgtccgtccgtcacgggggacccggcggcgtggtagtggtgcggtgcccgtcgccttcgccattcccggccgcgggcgtcatctgtcgcggcgaaaacgacccgggaggtggcggcaaaggcttttgcttcctacccgctggggcgcgcgcgtcgccgatgatcacccaagaccgctgcactgcacctgccccatgtgggagcagcatccagcatggccagttcgcaacgctacaccgctccgatgtcgtcgtcatcctcgccgcctcctctgcgccctcatctgcgtcgtcggcctcgccgccgtcgcccgctgcgcccgtaaccgccgcaacagcggcggagccggcgccggcgccggctccgcctccccgtcgcacagcccggcccacgcggggcacttcggcggaggagggagcggaggtggcggcgtaacgacgacgacggcggcgacgaccgccgccaaggggctgaagaagaaggcgctgaaggcgctgccgaagctggcgtacgcggacgcggtggcggcggcggcggcggcgaggggcacggtggtgggggaggaggaggaggggaaggtggaggtgctcgccgagtgcgccatctgcctttccgagttcggcgagcgggaggaggtccgcgtgatgccgcagtgcggccatggcttccacgtcgcctgcgtcgacacctggctccgatccaactcctcctgcccctcctgccgccgccccatcgtcctcgacgacccctcgccgcccaagcgctgccgcaagtgcgaggccatagtcctcgaggccgtcgtcgccgcctcctcctcctcctcctcctccgccgccaccgccaccggcagcggcggaggcggcggcggtggcggtggccgattcttgccgtag

SEQ ID NO: 22624 - DNA, 1050 bp, Oryza sativa; identical to SEQ ID NO: 13501
  Clone ID: TF_OsC342884_1

SEQ ID NO: 22625 - DNA, 630 bp, Oryza sativa
  Clone ID: TF_OsC355497_1
atgccgccgccgacgcggacgcggcgaggcgtcacgctcgccgagcagatggccgcgtcgtccaacctccgcgacctcctcaagctccgcgacaacgacgacgacgacgacgacggcggcgggcaaggtggtcgccgccagccgcggccgctgcccgacgcggtggtggtggcggcggggcggcgacgcacgctgctcgacgtcatccgcggcgtcgacgacgacgatggccacgaccacccgcccaccggcgtccttgagggacaccgccccgcgacgtcgacgaggacggcggcggcggggggagcgcggggcgggagggtgtcgctgatggcgctgctggagcaggcggagcggcagtggacgacggccgccgccggggacgccagccggaggcgcgtcgcggacgaccacgcggcggcggcggaggcgggcacgaacaagggcttcgccggcgccgccgccggcgtgggagggcggtgctgcgtgtgcatggcgcgcggcaaggccgcggcgttcatcccctgcggccacaccttctgccgcgcctgcgcccgcgagctccgagtcggccgcggccgctgcccgctctgcaacgccgccatccacgacgtcctcaacctcttctga

SEQ ID NO: 22626 - DNA, 895 bp, Oryza sativa
  Clone ID: TF_OsC32419_1
cacgagccggccggggctgcccggccgcctgcccctcaacctcatcgcgcaatctccatcaccgtccggcgtccgcgagcagcggtgcagagggcgtccttactcgttccgcgcgccccgcccaggtcaatctccccgtaccctcagcctcgactctctgagtctccacgcgatcgacttcgcccgcagcctgcgccgaccctctcgatctccatccatcccacgaggggagcaccggtgggtgccgtcgtcctccgaatttagggggttcatgtccctgttggtacacgatgaaccctgcaagccgaagacattatgattctctcgtcgcgcgatatggtgaccaagatgcactcgccgaccgtttcggcggccaaaacgacggccctgacgcctggtggtccaacctgcgtgtgcggatgtctcaggatcatctactgaggcacgaggcgcggaggcgagccgccaccttggaggttttcgaggatagagaaaactcgcatgatggtgcctttggttgcggtgaccgggcctctgctaaggccatggtaactctgcatcagcccaatttgggcgagaccagggagcaggattgcgccgtgtgccttgagcctttcgaggaaggcaacacgcttagaatgatgccatgtttccattccttccatcagcgctgcatcttcagttggctccgcattagccgcatctgcccggtgtgccgtttcacgctgccctcccaggctgattttgagtcggagaaggctgagaaagaacgagttagtgcttcacctgaagatggcaataactgattgatgtagatcaatctgcttagtgagttactttgcttgtgtcctgtctcacaattgagttgatcttatttatgcttcatggttgatat

SEQ ID NO: 22627 - DNA, 1202 bp, Oryza sativa
  Clone ID: TF_OsC91373_1
gcacgaggcctttgccgaggagggaaagcgggagtccacgccgccgagctggaggccgggccatctcatcaaaccaagcgagaagcttagctccgccaactagctcgcgctcgcgtgtagcggataagcggagtatcgatcgatggatcggacgtcagccgtgccggggagagtgagcgacccggggtccgcgtggttcggcggcggcgagaggagctcgtcggccgggccggggcgcaacgtgcggctcatcgccaccgccgtcgccgcgttcgtgtccgtgctcgggctggccctgttcctccacctctacgtctgccacgtacgccgccggaaccgcaggcgcgcggcggaagcggccgcgctggcgaccgcgaacgcgggggcgccgcccaagcaggtcgggctggacccgtcggccatcgcggcgctgccgaccgcggcgtacgggaaggtggcgggcggcgacgcggcgggcggcaccaccgagtgcgccatctgcctcggcgccatgcaggaggcggacgcggtgcgcgtgctgccggcctgccgccacgtgttccacgtcgcctgcatcgacaagtggctcgcgtccagctcgtcgtgcccggtctgccgcgccggggtggagccgccgccgccgcctccgtcaacggcggcggcgaggtgcgtgcacgagaagcaggacgcggagaaggaggaggcggccgccggtagctcggcgccggtgcgggtgctcggcgcgtcgctaatgaagatgctgagcagggagagaccgtcgccgaggaggcagccgggagtccacgccgtggaaatggaagacttggaaagccagctgccgcggccgcaacagcagtagcatatgcggcgaataatcagcggccatttttaagccattttttgtttcatttttcgcttcgtttatacatcaagcgttccatgttggttcagtatgaactacataagtgtgtaagtgtttttctttattaggagaacgaaagttctccattaggtgtttggtgcttgtagctgtcaaaggaaaggagcagacccgtctcttgtatttgtacaaagaagggaaagtggataaagctctgatggaatttctctaggcaaagtgggagttgcggttgagacccataaaaaaaaaaaaaaaaaaaaaaaaaaaaaaaaaagggcgccgctcgcgatctagaactagt

SEQ ID NO: 22628 - DNA, 3955 bp, Oryza sativa
  Clone ID: TF_OsC4340_1
ctaaggcatcctcgacagaggttgcactttttagctgaaagtaacattccatgggtttcattatcatatctttatcaaacccctcaaagggcaaccaagtttatttcaaattggaaatgcgaacgtaggtacatctaagaattttacaatcccgcataaacgaatgccgtgggattgtggagaattattgttgaagtctcggtgttttaaaagatgtaacaggacacaaactgaatttttctagatgcttgagagctaaacagaagaaccagagtggagagagcttcttgcgatctctaaggcatcctcgacagaggttgcacttttgagcttagctttgtctacaacgggctgagacatagcgaggtgaggaagaagcgtaaattcctctgagcaaccactctcaaggtaaccacccttgatgcctccaccaacgacaacacactcgcgagtaacctttgctacccccgtacccaccgccgctgagacgcagacactcccacggggaagctccgggacagcccgcgcaccaccaccaccaagcccacgctcccgcagcgcccacgagatgcacccctgcgacgacgccgccgcggccgtggaagccatctccgccgccttccgccggagagctaaggacacttcccttactgtggtcggctgcggcgatgctggctgatagggggaatagttcaaaggggacgggtttgagtgcgatttggctatggcccccacccataacaacagttttctttgcttttcccaatgaagatactagagaatccgcatcagcaacatcacgtatatagtgaactccaggcaaatttcctccaatcttagcaggtaaccttgaagcttcacagccagtagaaataataagtgacccatacttcagaattttccctgatgaagtttttaaggtatgtgttttgccatcaaacgctacaactggatcctcatacaatacctctatgccgttctccttgtaccattcagcagtctgcctctgcccacctgatccaacacaggtatgaaagccaggtagacgagcaggcttcttgtctggagggaaaagatagccctttgtcagtgctggtcgctcatatggcggatacgcctccttggagacgatgcaaaggcggccatcagccatgccgtgctcgacgaacgtcctcgccgcgtaaccggccgcgttgcctccacccacgatcacatactcgcgattctcgttgtcgaaccccgcacccgccgccgcggagacgcagaatctccggcggggaagcaccgggacagcccgcgcaccaccaccaccaagcccacgctgccgcagcgcccacgagatgcacccctgcgacgacgccgccgcggccgtggaagccatctccgccgccttccgccggagagctacggccacctctccaagggagggaacaatcgctctgcttccaaccttctgtgccttaggccatagtgcttgagtcttgctatcctttcccccacgtccgtctggccctacggcgatcagattccttttatttgcatttgtgttgagagatccaggggtagctacgcccttgcaccatttgccgacgctttttcctgttccctctccaccaagatttctaattggtatttggaagtcatctgaaagagaattgaaattgtgaacctgctggggtccagtgccaggagccattctagtagcatcgttcccaaatggtttggcagaaagtcctttcttgtgttcatgttggaagacagaatcatcagcatctaagtcaatcacatccgcatgcttgtcgtccattttgtcttttatattcaggtcatttttagcttcaggtgatggcccaggcttgtcgcatggatcctgcaccacttcatcgagcttcatcggataatctccacatccagcagcaagacccgagaaaccattattaactgtggtatttcctgaatttgtctggtcagctttaaatttctttgcagacctcaggtccctaatcacaccattttctttttcttcttgttccttctcaaggtcttgtactcttgcctttaacttcttaatgagttcttttgccttctcaaacctctgctgggaacgagattctgatcttcccagaacattgcattggatcatcaattctttgtagctcttgttccgaagagcaagagatctcgtcaaaacatcaaccgcattcgcagcatttccatggttaccaagtgatgccaacttaaggatctcttcctcctgaaggttcatatctgtcgacagcttcaatgctgcaagttccttcgccaatgagaggcccttctcctgcaacctgccacattctgatgacttccttgacaattcctctgttttcgcattgagcagatgctgaacacattctttctccctcctgaccgattccttcatcacctccgcctcggccgccttctccctccacatagcaacacaagatccacccaaattcggggggccagcagcagcgctcgcctcggcgttgagcttctggatcccgtcgcgctgctcgtcgagcaccctgccgagggaggcggccttttgctccagccgcgcgacctcggcggcgagctcatcccggtcggcgccgccatcggtgggctcgtgccgcgagggggaggaggaggcggtctgcgtggggcacgcgccggtggattggaagaagaggcgggtcggtgggtgggcggcgccgcatggctgcttgcagatggggcaggtgagcttcttcttcccgcccgggcagtactccagccattgctccaaacagagggcgtggaagacgtggccgcaggcggggaggcagtggaggtgctggtcggagagcgggcggaggtcctcgtagcagatggtgcagaccggccatgcggcggcgccggtcatggcggcgtcgtcgtcgtcggcggcggtggcatccggcggatgcgaacggtggcctcctcctcctcttcttgtggttggatttgggagaggaggggaaaagaagccgctcgcgccaacacccacacaaactcccaggccaatcccaacaccaactctaacaccagcattgaaccatgtgagttgcccgtcatcatcgtcggagtaccaaccttctggatgctgtatacttccattgacatcttcatcaccagcagcgttcgaagtcggcgatcggcggcggaccaacccgccggcagctttctgttcttcgggggtggctagccgaagagcgcacgtgaggacggcgggctcgccggcgcagcatccggcgacgtagacctcgaacgcggaggtctccgcctccgcccccgcggcggggatgcagtcgattgcccaggcgggggaggaatcgggcttggcatcagggcaccgccgaagagagccgcggagcagcgcggcgccgcggtggtcggcgacctcgaaggccgcggagggtggggggaggcgggcggacgcggtggacacgtaggtggcctcgccggaggccgggtcccggcgatcgaggcggagcgggagggaaaggggcgtcggggcctcctcctcgtcgccgccgcggctgctgcgcagcgcgagcgcgaggcggggcggtggggtgggcccccgcggcgagaggcggacgtagaagaggcgcacctcgaggctgccgccggagtcccgcggcggcgacggcggcggcgggtggtggtccatcatagtcattccataaggcactgatctttggttcaaagcttcccacttgaatagcttcgccaacattatcaccgtagaattgccaccaaattttccttgaacttccttcgtactcaaaaactcttgaatataaatatggcaatgtagtcatacggctttgcgtgtgatgttaggagtgcttcaacacagtggtgagcacacttccgagcatgatccacatgctcacctcgaggcattctatcatacatgttgagggga

SEQ ID NO: 22629 - DNA, 1130 bp, Oryza sativa
  Clone ID: TF_OsC339987_2
atgtgctgtcattcccatcccgatctgaccgggctcctcctcctcgtctcctgctctcttcaccgccgcagaccaggtcagcagttgagcaccatggcaagaaagttgagaggtcaggcggccagcagcggcacccaaaattccaatggactctcaaattccagtctcgagctcccctctgaacaccatttcttggcagcgcgcacaggcatgaacggctttgctccgaccggctaccagcagccgccgccgccgcctgcggccagcgcttcgccgggcggatggatcgcgtcgacggccatcttcatgtccatcttcttctccaccttcctcctcgccatggcggtctccgtctactgctgcctcctgtgcagagaccgcgtccgctcggaccgcgacgacaccggcgccgccgccgagcgcgcgcgtggcggcggtaccgtcgccccgctccccgtcgaggccctccccccggcctacccttatgtagttggaagctccgaggatggtggcgcgacggcggcgagcgggggcggcgggcgggagtgcgcggtgtgcctgggcgcggtgcgggagggggagatggtgcggcggctgccggcgtgcgagcacgtgtaccacgccgactgcatcgaccggtggctcgccgcgcaccggacgtgcccgctgtgccggcgtgagcttgacccgggcaagaatccgcctgatcagttgccgcgtgcccatcctccatcgccggcgacaaggagggcagaggtcgacgaggaggtgggtcgccgccatcgagcccggccaccgaaagtcctcgtcactgagccgcccctcctccttgtcactgagccgcgccgctgccgctcgtcttcctcggcaacgagccatccaccggccccacaagacccaccgtctcgcgagtccgccctccgcgtgcctagccggcggatccgccgtctgcaggccttgccgttgtcggttccgccgtcagcacgcctcgttgccaccggatccgccgcctcgcgagtcaccgaagctccgcccgtcgaccaagccaccgcgcgccacgagcttcatcgtcgtagctcccgaggcccggcaggcggccggatggagagatggagaaaggaaggagaatg

SEQ ID NO: 22630 - DNA, 573 bp, Oryza sativa; identical to SEQ ID NO: 13559
  Clone ID: TF_OsC339987_5

SEQ ID NO: 22631 - DNA, 742 bp, Oryza sativa
  Clone ID: TF_OsC99948_1
gcacgagggcctcatctcctcttcgtccctctctatctttctttctgatttctcattaatttcgcatcaagctagcttgtgatcagcaatggacggcgagatggattggatcgcggcgcgcttcgtcctgtcggcgataatgggggtgcacccgctggtggccgtcgacgacgccggggccgatgacgagcacttcccggtggacgacgccgcagccgtccacggccacgcgtcgccgcctcctgtcgcgctgccggcggcggtgctggcgccggaggaggtggccggcgcggtggtgtgcgcggtgtgcacggaggaggttgcggcgcggcaggccgtggtgcggctgccctgcgcgcactggtaccacgccggttgcatcgggccgtggctgcggatcaggaccaactgcccgacctgccgcgccgagctgccgcgggagcccgccgccgccgactggcgtgtcccgcggcgcccggcggtggcggagacagccggcagccgcctgcggcgggaggcgtcgtatacgatgctcgcaggcacgttgcccagctaatcaatcatcatcgatcaatagattaatttattatactatgtacatgtgtaaattaatcggcatgtatatacaacgaaggtgaagtgaaaattgtacagaggcaaactcacgtaaacccagcgcccgctggatagaacggaacgatctatgaaagataacatttttaacttaaaaaaaaaaaaaaaa

SEQ ID NO: 22632 - DNA, 2571 bp, Oryza sativa
  Clone ID: TF_OsC1548_1
atggcagagcacttagcttcaatatttggtacagagaaagataaggtcaactgcccattttacttcaagattggggcttgccgtcatggggatcggtgctcttgtcttcataacaggcccaccatatcaccaactgttgtgtttgcgaacatgtatcagcgccctgatatgatcacgcccggggttgatgctcaaggccagccgatagatccccgccagatgcaggagcattttgaggatttctatgaggacatctttgaggaactaagcaagtttggtgagattgagaacctcaacgtctgcgataaccttgcggatcacatgataggcaatgtttatgtccagttcagggaggaagatcaggcagctgcagctcatactgctctccagggccgcttctactctgggcgcccgataattgttgacttttctcctgtgaccgacttccgtgaagcgacctgcaggcagtatgaggagaatagctgcaaccgtgaaagccacaacgaggcaggagccgcagcccaagcccaagcccacgccataggagggagcgacatgatcgtgatgactatcgaggacgtgacgattactctggtggtggtggaaggaggggtggaagcagcagacatgaaaggcatgatgatggaggaaggcgtaggcacggtggtagccctccaaggcgtgcgaggagtccagtcagggagagcagcgaggagcgcagggccaagatcgaacagtggaatcgtgaaagggacgaaaagcaggggtgaccggctttgtccctcgctcgcgcgcgcgtgcgatcgaacggccatgcgacgactgacgaagcgtcttttgccatcattccgtggcgctggtcgagcatgccaccggcggatggcgcgctaccgtcaagccgggacggggacccccgggggggggggggggttccttttaatctgcagcaccggggatgcactttttgatgagaccgaatttacttttggaaaagtcgaaatattcaatactatgcatagttgctttaaatttagtaatgatctgggaaaccaattaaaaacaatatttttcaagaaagaaaataaaggtgggatgcaaggaaaatccaaaagtatgtacaacccctgcatgtcgacaacatctatgaaccaatatgtttctcacactcagagcttcggattgccatcaaaccaagttgttctaggaagcatggatgaagaatcagcacagcatggtaattatgcatttccaactagtcacatcagccagtgctttcaacctactagcaatacatggatttcccagtctgcaaatggtattgctgatggaataccacagtgggaatatgtcaatggaatgaataatgctccaggtatgacagaaacagtgaatggaagcttccgtgaatatcagaatggcccttcaaccttatgtcgagggcctttaccctattttcatcagcatgctggcatgcatgctcataatctgcttgatcatacacaagtgcaagctccttaccaacaatgccacaataatcctgtcttacatggtgtaaatcattctggcaaccggttccatttgggtccaaggattccagttcttttctctaattctgaacgtacttttgggcctccacatcatccactcttggcaaatccagtgaaccacagaaatatacgaatcctgccacctgagcatgctacaataatggatttttcaagattgtatgaagtgtcaaatgttgtagatgagcatagagatatgcggctagatatagacagcatgacatatgaggagcttttagcattagaagagcagattggagatgtaaatactggtctggcaaaaagctacattgtagagaaattgaagactagcttatttgtgccaggatcatcctgcatgtctaataagtcttctgaatcttccatggagaatgatgcttgcataatatgccaggaagagtatcaggttaaagaatgcattggaacccttgactgtggccacaggtaccacgaagattgcataaaacaatggttgatggtaaagaatttatgccccatctgcaagacgacagctttgtcaaccggaagaagaagtggataacgaacaggaataatcttattagttatttacttccgacaaatattcagctcaattttgtatataagaaacggtagaccattctgctacctgtatttgttgctcactttgttgtgatccgggagtaactcagcttcctaaactgtacagccataacattgatcattttcttcggtgtagaatattttaaattactcagttcgcccccatctgtatcataaggcggaccgacaaaaaaactcacaatgtcatttctaggcaaacattgtatctaccatcagattaaaaatcagaacagaacatgtgctcttctgtacaaaaaaaaaaaaactaattccgtaactcgggaggaccaaaaagattcttatggtcgtcggagcgtgattgcatcgattcgccttttgtttgtttatgcattgttcgccccaaattatctgtcgcacgtccatttgattgccttgattcgtc

SEQ ID NO: 22633 - DNA, 2096 bp, Oryza sativa
  Clone ID: TF_OsC12376_1
ttttttttttttttttttggatcaatttaactttgtattagcgctggtttcggggtttttttttttttttttttatcaacaaatgagattcaggtgtcaatgtattatttgacctcaagatcatttccatctaatacatttgcataggcaatttacaatccagtaaattcacctgatgacaatccctcactttccttagtatacatgcctcgtggaaaagcatataaattaaacaggtcgggactccgaaggaatacatttgcaatgaactcagcagcacctaataaacaagtagaagagagaattttatatcacaaccagaagatacgtccccgaagagagaaaagggctaactgagaacagcaaaccaagaaaattagacgagcagttgcagcccgagagcctcagttcagccgccttctcttgttccggtgtagtcccacaccatccacatccaaagaacctaaggcatcatttcttcctctcctcctcagggatctcgaagaccctgcattacttggttcccctgtgctttcagtaaaagcagcatcctcctgaattacagccatggtgcttgaattggaagcttgatctgcagctagtgcaacggcaacatgattcccatcaactggcagcagctcggtatttggtggatttggtggatttgatgaagttgatgctccataagggctcggcctaaccattcttctaaggtcactcacagcgcttgccaatctttccgtgcttgcaaggtcaacaaagtgttgcaataaatcaattctttccgaggaaaatggacttgagctacgcctaggcagatccgatgtgctgtttgctggcagcccactctccgcagcagaagaagcaacaaatgtagagttttcggcttccctctgcaacctccttgccctcattctagtagtaattcgacctaaacggctagcatgatgagcatgatcaatcatttcctggacagttgattcaggaggcccctcaaacctactcacactattcataatctgctgatcaagtatgcgcctccaagaagacaatatcccatgtgcctcgccaagccttctagaaatcgggcgcaaatggtggaatttctgccggaagctctcgagccgattgccatgtggccttggtgggattgtagggcctgatacatttccctcctccgcaaccttcttttccgcgtccgaagtcgaattccctctcccgtaaattggagtgatgttcccttcagtgacctcgcctttgcagacagggcactccttgtgagttgagtggacatgcagccattggtacaaacaaggccagcagaagagatgtccacacgaagttaccacaggctcggaagccatctcgaagcagatgttgcactcaaacatcgcaacgctcttgccacgttcggctggctcctcctctgaggcacccacgatagcgccatcggcgaccaccttgttctcttcaaccgtatcttgcataggctcttgcggtggcggttgtgctgcagcgtcgttctccagggcaggggcctccgagccgagaggcggaaggtccgacctgaaccgtcttggacggaggcagcgactctggcggctattcaggcagatcacggggggacggtagcggtcgacacgctccgggcggaaggaagaggaggccgtcgacgacgatggccggtctacccacccaagcagctcgctgggccgcagcagaagcggcgggtgggagaagccgaactcaaggtcgtcagcgagctcaggtatcgcctccgggggcggcacgggaggcggcacgtagggcgggtgcgcctcgggagccgacgggtcgtacggctcgggcagaggtgtcggggggcgcacaagctcggcggggggcggtgagtacggcgggtggagcggctccgtctccagcggcggcgcgtcggccgaggccgccgaggaggaaggcgaggaggagagcatcggggtgccgagcgcgaggtcggagccgagatcggggcggcgcaggcgcggggcgcgggggaggccgaggtagaggttcagatccatccttctgctgctccgcgcggcatcgtccgcggccattgc

SEQ ID NO: 22634 - DNA, 858 bp, Oryza sativa; identical to SEQ ID NO: 13531
  Clone ID: TF_OsC50914_1

SEQ ID NO: 22635 - DNA, 5337 bp, Oryza sativa
  Clone ID: TF_OsC389823_1
cgttgttgacatgcagattattgatgctcttacttgaccccaagtcagggcagctgggaacctttgcctgagattagcttcatcttcccaggtcgcttcatctttcttatggagcctagtatccagaacttggactggaaactgaatactggaagttggaccaggtagctgactctgaacaggatgcttgaacccacaagagcctttcaattgagagacatgaaagacaggatgaacagcacagtccaatggcaactgtaacttgtatgccacttgaccaaccttggcaatgatttggtatggcccataatacttaaaagatagtttgtgattagctctcttggcaactgaagattgcacataaggctgcaacttaaggaaaacccaatcacctacctaaaactcctgaaaactcctttttttatcagcttgatatttcataacctgtcgggctctattcagatgttgcttaagcagttgagccatcaacttcctttcagataaccattgagctaaatcaggtatactgcaagcatcttctctgatgccgaaatgagtaggaggatagccatacaaaacctcaaaaaggtgacttatacagtgaagaatgataagagcagttataccaaaactcagcaagatgtagccattcagaccatttagagggagtagcatggacaaaacagcgaaggaagatttccagacactagttaaccctctcggtctgtccatctgtttgaggatggtaggctgaactgagatgtaacttagtgcctgacctgatgaacaattgctcccacaatgtactggtaaaaattttatctctgtctgaaattatagcttgtggcaacccatgcagcttataaacattaagcatgaagactttggcaacatccatggcttcaataaaatccatggatataatctgccaagctccatcaggaacgggtaaaggttgcagcagtcctggatatttagctctgtctggcttggattgcaaacagattgaacaagcattcaactgttgttggatggtatccttcatatgaggccaagagaaaagagatttgattctgtggtaggtaacaggaaatcctaagtgtccccccatgggactgtcatgcaaggcagagatgatttgctgttgcattgaagaattattgccaacccacactcttcccttgtgtttcaagagccccttgtgcagcttatactgagggtgagaagcaggattaacggccaattctgtcagaagcttaactgaaacaggatcttggtcatatccctagattatgtcttgcaaccacacaggagaacattcagatagagccaagaattctgacacttcggcaggaacattccttgaaagggcatcagcagctacattgtgcttgccctttctatagacaattttatattgcaacccaagcaatttagtgaaagccttatgttgccagggagtgttaagcctttgttcagcaaggtgcatgagactatggtggtctgtcaagatcaggaactcttggaattgtaagtaagggcgccaatgatcaactaccatcataatagccaaacattctttttcataggtggaaaggccttgtgttcttggtcctagaggcttgctcacataagctattgggtgctgattttgggaaaggactgctccaatgcctaggtcactggcatcggtttccaaagtgaaaggttgctggaaatcagggagagctaacacaggagcagaaaccaaagattgtttgagcaattggaatgcttgttctacttctgcagtccaattgaaaggagcatccttctttagcaattgtgtaagaggtttgctaatagcaccaaaattcttaataaatttcctataatagcctgccaatcccaggaatcctctcagctttttaatagtagtaggtctgacccaatcgacaatactctggattttagaaggatcttttgcaactccagccccactgataatatggcccaaataggatatatgttcctgggcaaatgcacatttactgagtttaaccttccactgatgattagataacagctgcaggacttgtctcaaatgagtaagatgagtaggcagatcaggactgtatatgaggatgtcatcaaaaaacactagggcacatttcctcaacactggactcaaggtgtcattcatagcaccttggaaagtgccaggggctcctgtaaggccaaaagacatcaccttatattcatagtgtccactgtgggtttgaaaagctgttttgtgctcctccccttcagccattctgatttgatgataaccagctcgaagatctaacttggaaaaatatctagcaccagccaactcatctaagagctcatcaataactggcatggggtaagttcctttctgagtgatattgttaagctgtctgtaatcaatacagactctccaagaaccaaccttctttttaaccaagagtgcaggtgaagaaaatgcactgctgctgtgctgaatgactccattttggagcatttcttgaacctgtctctctatttcatccttatgtccaggtgtatgcctataaggtctgataaacactggtttggagtttgggaataagggtatcctgtaacctgaccattgagtcattcaactgaaattctagccacttgtgtacccaatccaccctcattgggctaaaccgttcaagccaatccatttcaagtatcacatcgtaggcacccaatgctaaaagtctaaagttgctcttgaaatgtattccttgagttaaccaatcacagtcaattatgtgcagtgagcaagtgaggaacccaccatcagcaaccttaactctagctagtactggcatagccttaacccctgataatttgagaccaatctgttgatacacaaacgagtgagtactgccagaatctatcagcataagaacttcaatgccctgaacccatcctcttaacctgattgagtgattggagtcagtaccattaatagcttgctatgatatagccattaaggtgtcagattcaggtggttctgaaacagcctgctcagactgagatgaaccttgtaagacgtccagcaactcttggaccacatgtaactgaatggaggaagcacatttgtgatctctgccccacttctccccatagacaaaacaaagtcccttggatctcctataagacttgagagctgacaatctatcatattcccttgaatgattgcttaattcagttcctctcctatcatttgaaatgattggaggccctcctttagtggttggtggcagaggcaatggcatagcacctttgactgactgtttctggtatccatcagattttttagattcttttggcttatcaccctccaatgcttcttcctgtaaaagagcaagagtacaagcaacattcaaatctccaagtctttgaagcagaatagcagacctaatcgcatgccttagcccctcaacaaatttagtgacaaagtagactggtttcaaagatgggtcataagccatcatttgatgcatgatgcaatcaaactgctctacataatcagctactgatcctgtttgacaaattttaatccattgtctaataagggcttgctgcctatctttgttaaacctagtacaaattttttcacatagttcagaccaagtaaccccttctagttgagacctaactgcttgcagccaaaaggcagcattaccagtgaaattgagtgttgctaccttaacccaattacccggatgtatgccatagacatcaaaataagcctcacaattagacttccacatgattgggttatctccatcaaattttgggcaagtcatgggggctaccccaccagtcataccaactgacaaagcagactgaaacgaattcatggcagaagcatccaaatggaaaggaattggagagacattgtgagacgcatacgtaccattggccgggattggctttggggtaaaaccctcagcctcctcacgattcaaaatttgaacgcggtggccatctagaccggttgagccatttggtcgaacacctggtgagtccagggttcccgctggagttgtttgctctgttttgttggctgaagagctctccagttgatttacttgcatttgcagcagatccacggtggattggagtacatccaccttcttctccacagctgggatccaagattccaccgcctccttgaacaaccgcatctcctacgcctgcctcttctccccttcctccctcttgcgctcagttttctccatcttctttagaaggagatcaagttttgcttcgttctccatgattttagcggtctacttcgtcacaaaacgtggtttcttctctatagcttgggcaaagtgtagttaccagtagtagaagtcctctctgtcccgaaaaccggagtcaaaaccgccgagggaaatgaaggagaagacgttagcgatggtttcgggcttgcctagcgcgaggatgatgcggcaaagtagggcttcgtgggtttaccagctgtcaccaatgacttgtgctgttgccggcactagcacgttggtgagcatggaggtgatgcatgataccactgggaagaaggaagtggttgtctgttatatgaacgcccctctaccgtacatgattgaagagaattacgggggatgcttctttgaagacgacgttgatcttgcacaggttctccaggaccaggaaatagtctatcaattaatacaaggaaattatggtactggttcatccaaaactcattcaaatcctagttctagttatagccatggatgtgaattgggtgaacggaaaccatcaggagttgcaagttatgaagcgcaactagttgttgatgaagctttagctcgagagctgcaacagatggaggaccaactagcaagtgcatcaattgatgaccataacataatagaacatggaagaaagccaatagcttcttcaacatctagcggtggtaatgcttctgcaagcagacctcctcaggtagtgatggaggatggcattgatccagataacatgacttacgaggaactgcaacaattaggggaagctataggtactgaaagcaaagggttgccggaagatgtgatagcgctcttgcctacttcaacatacaaaattaggatattctcaagaaaggaaaagcatgacgaatgtgtgatatgctgtatgacttacaagaaccgagataggctgactaaattgccctgtgagcatcagtaccatcaaacttgtgtcaccaaatggttgaagatcaacaaggtatgccctgtttgcaacaaggaggtttatgggtcgggcaagtga

SEQ ID NO: 22636 - DNA, 348 bp, Oryza sativa
  Clone ID: TF_OsC388462_1
atggggcgggaatcggcagagcgggcagagatggctgacccggagccagtccgagatacagctcccatggaagcaatgggagcagggcatcctcgccagcatctctccttcctcgaaatcctcgaagcacacggcgcactcgcgctccctcgcctcactcgataccgcctcctgcaacgcggcggccacggccgtgctcgacgcggggacaacgccggcaacccaccgccgtcgtcgctgtacatgttgtcagtggtgccagtgccacggctctgttgctccatgtatatatatgatgctgaagctgccggaagaaatccctgtccagtgttatcctcccctctctga

SEQ ID NO: 22637 - DNA, 2213 bp, Oryza sativa
  Clone ID: TF_OsC82536_1
agggcatccgccctcctctcctcgccaaatccatgctcaatcacctcaggctaccgcagctgccatccacgcccacgagcccagacgcattcacccttccgcgccgccgacccacacttctaccaaggacacgctaccgccgccgccgccgcaaatcctagcgcctcccgaggctgctatcgccgcggcttcgctcgccgggtgccgtggtgtatggtgcagccgcggcgaccgtggatacgtaaccaacgacatcgaatatcagaaattcgtccaaatcttagaaaccagcctccgcaaagggaagaactcccacggggtcaccatgaccagcccctataagctcgtgatagcgctccagctagcccgcctcggcctctacatgatctagaccgagttccctgcatcctctcctgacgacatcgacgctgtgagccccaacgccgtcgagatcgggagcaggcccttcgggggggacggggcaatttcggtcatctgtgcactctcgagaggtgataaggagatacaatagatcccactggttggttcgagaatacagcatgacatcggtcacagaaggcattgatgcaattgcaactactagagtggttgtcactggaagatgttagcgactctaaacatgctttgactggtcactccttcagccgggcattcagtgggagtggtgccgcactggatattgttgtttccagtgtgcgagcttacctgagtgccctgaacaagatgtccagttttgttggggctatcaaggctagtagtgaagtatctgaaagccaaagagttcaaaccacagaatgagtcttgacttccttttgggttttcatatccgatggttctatgtttcacattcccagcaaggagtatgtgcttgttgaaacatggtttttccgtccagaaaaaacatggttccgtttagtgcatctggaggatgttctgggtttcttggtggagcctgacttaaggttgaacatccaggacgttttgggatatgcagtgtataattcatatttgaaaaccgtatttacaataagacaataataaataattgtttgacaaaaaaaaaaaaagagacagctaaaaaagctgatgatgatttagaacacatccccacggaacttcaagaatatagcatgacctcggtcacagaaggcattgatgcaattgcaactactagagtggttgtcactggagatgtcagcgactctaaacatgctttgactggtcactccttcaaccgggcattcagtgggagtggtggcgcactggatattgttgtttccagtgtgcgagcttacctgagtgcccatgaacaagatgtccagttttgttggggctatcaaggctagtagtgaagtatctgaaagccaaagagttcaaaccacagaatgagtcttgaccctccttggttttcatatcggatggttctatgtttcacattcccagcaaggagtatgtgcttgttgaaacatggtttttccgtttagtgcatctggaggatgttctgggtttctttggtggagcctgacttaaggttgaacatccaggaagttttggggtatgtagtgtataattcatatttgaaaaatgtatttccaataagacaataactaaataattgtttgaccctgacgttgatggccgtaatgtacggccacacccggcagccagccgacgccgagctgctgcgaaggccgcaacgccgccgtgctgctgctgctgctgatccgccgccgcacatccgcaacgcaagtgtggtcgaaaacaccgagcctgatgtcctgttcgcgtatactccacacgatggtttgtcaccggagttcgacgatgacagcggcggcgttgctgattattttgcagccgatgatgacgaagcttacagcaacggtggcttcggcgcggtgccggcgttgtccgaggccatcgttagcatgccggagttgtccgtcggcgaggcgagggagaagcagtgtggggtgtgtctagaggggttcgaggagggtgacaagctcaggaagatgccatgcgagcactacttccatgagagctgcgttttcaaatggcttcaggtcagccgtctttgtccctactgtctcttcgccatgcctgcggctgaggaggaggaacataacaatgatgatgaagaagaagaagacgaagcaatgatgtgcatccgtttcttgttcccagagtag

SEQ ID NO: 22638 - DNA, 1313 bp, Oryza sativa
  Clone ID: TF_OsC200748_1
tgcaggaatcggcacgaggctcacacttcgcccgaagcaaacgagaacaagacgaccgcctctatccaatccaatatcccagtccaatcgaaagatttgcgttttgatcgtggtgccgtcaaccgaaggatttgcaagatggcagaagctgcaatcacaaggtactggtgccatgaatgcgagcaggccattgaggaggccatggtggatgagatcaagtgcccatcctgtggtggcgggttcgttgaagagatgaccgatgaggagattgagagactgaccaacaggcagccagagccgggtttctcgcaatggaaccctattgagcatccaggagaaacgatggacagcgacgatgaagataatgatttaggtcgtgagtttgagggttttatcaggaggcatcgacgggcatcaactctacgacgcgtgcttgacagcatccatgatgaccttgcagatgaccaagaaagggacagttccattctgatcaacgccttcaaccaagccctcgctctgcaaggctcagtgcttgatcctgatgagggccaaggtgaccaaggcggttcaacaaatgatgatggcttactggaggagtatgtcctcggagcaggtctgagcctgctgcttcaacatttggctgagagcgacccaagtcggaatggtacccctcctgcaaagaaagaggcggttgaagcgctgcccactgtgaaaatcgaagaggttgtcagctgttcagtctgccttgatgatcttgaggtggggtcccaggctaaacaaatgccatgtgaacataagtttcattcttcttgtatcctgccatggcttgaattacatagttcctgcccggtttgccggtttgagctgccttctgaggagacaaaagacttgaacgagcctagcaacattggtagagtggaggacagccatgaggaagtcagagctgatggccctggaaacgtcagcgagagcagtaacagaccctgggctattgttccttggttgaatgagctattctcaactcgtgaggcacagaatgctggaggtgtttctacggatcaacaatcaccgcacacttctggaaccaacccaaatgcagggcacagttgatttctgctgctgttgcgatttgtgaataatgatagtacatctgagaatagcgaagtgacccagattggtgaactgttgttttccatacctatcatctcccttggatggatcacagcatagaaagcttgccaggcattgtcatatcatctgtgctcatttgctttgcttcagtttactgcagctaaagtcggttctgcatgttg

SEQ ID NO: 22639 - DNA, 1836 bp, Oryza sativa
  Clone ID: TF_OsC72063_1
ccgcgcgggggggtcgcctcgccccagctcggggggtgtcctccgcttcggctccgcccggccggccggcgcccggttccctcttgcttccggccgtgccttatggaagtggctttcctccggatcgaaggggggggtgctggttccttccctccggatcacgcttggcgtcttgcgctcaccccgcccggttccgttttccccgcccgcttgcggtggtgcccgtctcggtggttgtggtgtgtttcctacccttgccctgatgcgcttctatggtaatcgaccgaaacaaaaatggaaatggtaaaaaatatggatttgaaaacggcaatggctttgctgttagaccgatctgttccgtatttattgtattcttgctgtaagtaccgtttcatatatttaggtgcttttctgggaggtgtaaccaactaaattcctatgctaccttctggttgatggccgtccctcctgttgaatcagaaacaagaagtgaagaaacagataatttccctttacttgcagaccacatggaaaatactggacatcatgcacatgcagttgatatcccatgggattcttcaccatcgacatctcgccgagataatcataatggatttgatcaattacctcgtatcttagaaggttctcctgggacatctactccatctaactctcagaatggtcctctagcaagaagagatgataatcgtggtcgtcgtcagcctagtcccttgaattctggttgctggatctcagttgagctagttgtaaatgttagccagatcatagcagctatttgtgttctgtcagtatcaaggaatgagcatccacactctccgttatttgagtgggtcattggttatacagtaggttgtactgccacgctgcctcatctttactggcgctatctccatcgcaacctcccaaccactgggcaagagccaacagttcagaatatccctccaaacaacacccctgaagctaattcatatggagtaaccggcacaaatggagtctcaagaaacaatgaggcaacagtaaatccaaggttccaagcttttgctgatcacttcaaaatggctctggactgtttctttgctgtgtggttcgttgtgggaaatgtatgggtatttggtggacattcttctgctcacgacgcgcccaacttgtacaggttgtgtattgccttcctcacattcagctgcatcggctatgctatgcctttcatcctctgcgcattgatatgttgctgcctaccctgcataatctctatcttgggatttcgggaagatctaaaccaaaacagaggagctagtgcggaaacaatcaatgccttgggaacatgcaagttcaagtcaaagaaaactcgtgatggagatggaaacgaagttggtgtcggtgttgtggctgctggaacaaacaaggagcgagtcatttctgcagaagatgctgtctgctgcatctgcttggccagatatgtcgataacgatgatctccgagagctcccttgtgcgcacttcttccacaaggattgtgtggacaaatggctcaagataaacgcgctgtgccccctttgcaaggctgagatagatggtgtctccacaagtgctccagccattggctttgggcgtcgccacagcgacaacagggtaggaaacgacattgaatcacaactataactctcttcccacttcgttggcagcgtggatcacgcctttgatgaggccttccacacatcaacctgtaaattatagaggtagacatcaagatgtaaagggtcctcttacgatccaacaaagttcttttctgaatgactactgcctccactgtcagtat

SEQ ID NO: 22640 - DNA, 1199 bp, Oryza sativa
  unsure (1)..(1199): unsure at all n locations
  Clone ID: TF_OsC38650_1
cccgggctgcaggaattcgcacgagggcgagtgacaccccaccccacgacgccaccgagcccgggagggagaggccgacgcgacgcgacaagtccacacccacacacgcaccagcaccagcccaactcactcctcctcccccagattccgccgctccctccccctcgccgcgcggcgccgccgccgccgcggtggccaccagcaacgtcgagctcgccgtcgcccaggccggcggatgagagccagtgaaccatgggaggattttgctgttgcctctgcactgacgatttcgaggagtacgctcatccaaataaccctatctataggcaaggtgtatgcctaaggaattttttccacaacttttttggcgggtatactgccacattccagaggctcgaatctagacctagcaacccagctcaaggggctgctccattggcatccactaatccaagtaccaatataactgacaattcattatccgaaacttatcaccttgtgtccagacctccaccgtatgatactgatcctagatatgcccgtgttcaaagagagggtttggtatctaggcgtgaaaagtctataaatctaacacaagaagagtcactggctcttaggcgaaatggcagcagctctggcattgaacatttagctgctcagaagaaatggagcagcactgaacctgagggtgaatataaagtccatcgctctgaatccaccaagagtttatccgcaaaatcgtataacagcagttttgcagttgtcacttcagaagatgaagatgtctgccctacttgtctagaagaatacactccagacaatccgaagattatagctaaatgctcccatcattatcatcttagttgtatctacgaatggatggaaagaagtgatacttgtccgatttgtgggaaggaaatggagttttgtgaaaccccatgagagatttctcgctggttgtatcagtggaaggcaaaagatctacagtgtgatatgctggagagtctgtaaataatactagttgtccagatagatctcttttttgagatcaaattcttatgtgtactgaaatcatggcctacaaaaaagaaaatgcgctagaatttgatatatgaatatatttttgaatgcattaacccccccccccccccannnnaaaaaaaaaaaaaaaaaaaaaaaaaaaaaaaaaaaaaaaaaaa

SEQ ID NO: 22641 - DNA, 696 bp, Oryza sativa; identical to SEQ ID NO: 13437
  Clone ID: TF_OsC341901_1

SEQ ID NO: 22642 - DNA, 1187 bp, Oryza sativa
  Clone ID: TF_OsC8961_1
aataaagaggaggctggtggagaacccctcccgcattgggttttgacccctccccctctcacttgccctgcccaagcccaagagaggaatccaagctgctgcattgacggcggcggcggcggcggcggcgaggagatcgggagcaatggcggaggaggcggcggcaggcgggctgtactactgccacatgtgcgcttcgacggtgagcgccgtggcggcggcggagggggaggtggagatcaagtgcccgtactgccacagcggcttcgtcgaggagatcgagtccgcgcgcggcgtcgccaccggcggcggcggcgcgatctcctccgtctgggcccccatcatcgacggcatggttggcggcggcggcggcgacgccgtccgccgccaccgccgcagccgtcgcctcgcggacgccgccggcgcggacgacggctactaccgcgacctggccctcctcgacttctccgagagccggcggcgcaccgccgcgctgctgctgctcatgcaggagtttcgggagcgccagctccagcgcctcgagtccgccaccgccacgatctccgccgccgcggccgaggccggcgccgtcgtcgggacctcgagagacgcggagggcgtggcgctggccgactacttcctcggccccggcctggacgccctgatgcagcgggtgggcgacggcgacgcggggcggcagggcacgctcccggccaagaaggaggccgtggagtccatgccgacggtggaggtggccgccgggggcgactgcgactccgcctgcgccgtctgcctcgaggactacgccgccggcgagcgcgccacggaaatgccgtgccggcacaggttccacgccaagtgcatcgtgccgtggctcaagatgcacagctcctgccccgtctgccgcttccagctccccaccgacgacgacgacgactcctccaagtccgcacgcggcggcgccgcccactccggcggcggccggcggttgtcccagccgtcgccggcgtcgacgggggaggcctgggcaggttgccggccgtgaaacgttatatttgtagtggtttttatcatgctgaaattctacaacacttctacttgaaccgagtctctaattttactttgtatttgacggcagtttccttcgcgcaatatatatgaatagattgttgtatccactattgccg

SEQ ID NO: 22643 - DNA, 1352 bp, Oryza sativa
  Clone ID: TF_OsC101000_1
cccgccgttgccaaccacccccttcccctcccccctcgccctcgccgccggcggccgtctcgtcgtcggtgagacctagagagccaaacagcgcgttggttgttgagctcggagagggagagagagagagagagaggatggaattggagtcggagcagcacggctgcgagcattacacgaggggatgcaggatcagggcgccgtgctgcggcgaggtgttcggctgcaggcattgccacaacgaggccaagaattcgctcgagatccatctcaatgaccgtcacgagatcccccgccacgaaatcaagaaggttatctgctctctctgcgacaaagaacaggatgtacaacagtactgttctggttgtggggcatgcatggggaaatacttctgcgaaaaatgcaacttctttgatgatgatgtctcaaagaaccagtatcactgcgatggatgcggcatatgcagaactggtggtgtggataagttctttcactgcgacaaatgcgggtgttgctacagtaatgtcttgagggattctcatcactgtgtagaaggagcaatgcatcacaactgtcctgtctgcttcgagtacctatttgactcgacgaaggacatcagcgtcttgcactgcgggcacacgatccatctggaatgcctgaacgtgatgagagcgcatcatcacttcgcttgcccggtgtgctcacggtcggcctgcgacatgtcggacgcgtggaagaagctcgacgaggaggtggccgcgacgccgatgccggagttctaccagaagaagatgatatggatcctctgcaacgactgcggcgcgacgtcgaacgtgaacttccacgtcctggcgcagaagtgccccggatgcagctcctacaacacccgggagaccagaggctgcggccgccctgcagccgcgcgctccacggtttgatttcagcagcaggagcagcagcagcagagacgagttggcatccatctcacaaactaaggatgaaatcgagagcgacaaacaagatgcagagacggcttcctctgaacttagccgtcgagcaaaagctgcaaaatcgatcggcgtcgagtttggtagacacactttgcgccaagaggagtatggtgattttggcgcagtatgcagcgagttgaatagcccatatatgttgtgttttctctctctctcttttttgtgaggatatatgttatgttttgaaactccaactattattattactaaatgatactcctaataaaagagagacaaaaaaaaaaaaaaaaaaaaaaaaaaaaaaaacaaaaaacaaaaaaaaaaaagaaaaaaaaaaaaaaaaaaaaaaaaacctcgaggggg

SEQ ID NO: 22644 - DNA, 1185 bp, Oryza sativa
  Clone ID: TF_OsC49416_1
cggacgcgtggattagagttggactcggcaacgcgacgagcaccaaaagcgagggaagaaaaccaatccgaatccggagagagaagcgcaggaggcaaaatccactccaattcaacccaatcacccgcggcgagccgagcgggcggcggagccggcgacggcggaggttggggcgggggtcctggtgtggtcggcgtaccgggcgggggcgcaggacctggtgcaggggatcgactgcaagcgcggctgcgcgaactccctcctgaccatcatgatctacaaggtctcgcccacagccctgcggcagcggttcttcggggctgacgtcggaccggctgggtaaataagtaagtaactaactaactaactaatctccgggttcttgctggtaaatcgaatgcaggtgtacgccgatggcaccacggctctgccggagtgggagagggaggccagcatcaggcaattctacggtgtcatcttcccgtcgctgctccagctgccgagtgggataactgaattggacgacaggaagcagaggaggctgtgccttcagaagttcaggaaggtggaggagagggtctcggaggtggatttggagagggagctcgagtgcggcatctgcctcgaggtgaatgccaagattgtgctgcccgattgcgcgcactcgctgtgcatgagatgcttcgaggattggaacaccaaatcaaagtcgtgccccttctgccgcgcctgcctcaagaaggtgaatccgagcagcctgtggttgtacaccgacgaccgcgatgttgtggatatggatacgttgactagggagaacattaggcgcctgttcatgttcataagtaagcttccacttgtagtgctccatgtggttgaccttgacatttacgagtaccgtatcaagtgaaactgtactcttttgttcataccggtgggtctctgtacatatcaaattcatcggtgctgatctgtgatagctcaacctgaggctgcaaattagcagagttgtttgtagctcaacgagttgataatatttttgtgaaaagaagatgctgaagtgtactccaaaattgcatatgcacttgtctgtcagtttaaaattatgtggggggtaccaaatggaacgctcctaaccagttattttggtcagtgttaaaaatatgtcagggaattaatctcttccac

SEQ ID NO: 22645 - DNA, 616 bp, Oryza sativa
  Clone ID: TF_OsC2447_2
agtacacagccataattcagagactgttagtttagttctttttttcagaatgtatattagtacataacttgttattgctgtaacaaaaaaacgtgcggctggaacatagctccacacaaagactgggaagaaaaaaaggcctcctatgtgtacaagactatacttatgatacggaccgcgggcacgggtattcgcctgaaaatacaccaggtgcgctgcgagttctattttacatatgtatatggtctatatgcacaccagccctgcatagcgggcatgatgcgtgcctgaaaagccagttgtcgatgcatcgtgcgtggaacgtgtgctggcaatgaggcaggacccgaacaaattgcgatgctccaaaatcctgaaggcaaactgcacaacagttatcagtttcctgatcaggattggttgcagcgctgaatgtggtctttgggattctgttaattagatctcttgacatgcctcctgtatttccggtttcaaaaaggtcattggtgtcaatgaatggtgtactcagtagactcatctgactctgcaccgcgcgctgcagtgctgggctgaccttctcccacacaatccttccactgaagaggctagagatgat

SEQ ID NO: 22646 - DNA, 1122 bp, Oryza sativa
  Clone ID: TF_OsC76986_2
ctatacgcctacgatccaacggtacagcgtgacgaagcccggctcgtcgtcgtccaccccgcgcggcgccgacatcaccgccgcctccgggtcccaccgccacgagtcctcctgccggttgctgtggtggctctggctccaccgcgcgctccaccgcccgctccaccggccggagagggacgaggcggaggaggcgaggcggtccacgtactcgcgcagccatccccgcgaccccgccgcctccgccagcgcctcgccgggggccggcgtcacggaaccggtcgttgacttggccgccgcggggcgcgcgatgcgggacacgacggcctccacctcctcgtccacgcggtagtcgaaggacccgagcgagtaggtgcgccggtcgtcggccgcggcggaggagcggcggttgctgatgctgccgatctcgacgcggaagctcctcgagttgttgctgctccgcgagtcgaggggatcctgttgcgccgcgttggaggcggcggcggcggcggcggtggggagtggcgggtgcgggagcgagacggtggcgcggcagagcgggcaggacggggtggtgcggagccaggcgtcgacgcaggaggcgtggaacgcgtggcggcacgccgggagcagccgcagctcggcctcgggcgcgaacggcgagaggcagacggcgcagtcgggggagctcttgggcagcgccgccagcgccgacgccatggtgaacaccggcagcgacgcgaccagccgctccttctcgtcgtcgcccccccccccccccccccccccccccccccccccttggctcctccccaccgccgacgcggcggtagcctccccagcctcgacggcggacgccgtcgtcgcgcgttgggccgccgccgacgccctgggcagcgggctcggagccgggtgcgacggccgcgcgaggcagcggaggaggaagtggatcgacacggaggcgaagaagacgaaggcgaggagcgcggtgatgatgagaagcgacggggagaggttgagcgaagacgacgacggcgccggcgacggcaatgagggcggaatggtggcggcgagcgggtcgccgccgatggccggcggcgcgggcggcggcagggaggccat

SEQ ID NO: 22647 - DNA, 669 bp, Oryza sativa
  unsure (1)..(669): unsure at all n locations
  Clone ID: TF_OsC64502_1
nnggnnnnnnntttgtttttttttttgcgtgttttgtggtttccccataatcatcgaacttcatatgattatatcaacacaggccatcatcaatttacagctttcaggtggcactatcaccggacaatcaaaggcgcctccgaaacatagcaacgcaggcacacaaagaaaccatggggaagcaaacttcccctactgactatttcaaagaaatagaaaagaatgtttttgtgcgcccttccaacatttcaagaatatcagaggcgatgaggatcacactactgattcaatacttacaaggtgtatgtacagagtattgggtggcctagaccgccgtgtactttcagattgccatgagggttgttaatccaagaaatacaggccagtctgacaattatgttgtctcgtcaaactccattttctttccacaaacagggcatgcttcacttctttccatccactcataaatacagccaaggtggaaatgatgtgagcactgcattactatcctaggattctcagaagtataatcttcaagacaagttgggcagacatcttcatcttcagcggatggggaaaagtatgtgaaataatttccaggttccttcgcttggcagcttctctccatgagtagagctgcttcttttcatttttgtgtcatagtttccc

SEQ ID NO: 22648 - DNA, 1547 bp, Oryza sativa
  Clone ID: TF_OsC2127_2
atgcgcggcggcggcggcggggatgcgggcaccagctcgaggggcggcggttccggcggggcccccgcgcgtccgcggcggttccctgaggcggcgcagccggagatcatgcgggcggcggagaaggacgacggctacgccgcgcacgtcaccgaggcctgccgcgacgccttccgccacctcttcggtaccagggtcgccgttgcttatcagaacgagataaaattgcttggtcagtctctttattacttgctaacaactggttcaggccagcaaacacttggagaagaatactgtgatatatctcaggttgcaacctcgcacggacttccgcctacacctgctagacggattctattcattttgtaccaaactaccgttccctatcttgctgaacgcatcagctctagaattgttgcacgtggtattgccctcgaggactctcagcttgatgaccattctgaaagtgatagttctagtataggcactgcagcacaaccatccccaattaggaacagtccttcaagaagcttgagtttttctcatttgtcaaggttgagaggcagagtccataccttgtgggaatgggttcttcggaaatggccttcgatgctaccatttgctcaagattttatacagttaactatccggacaaaccttatgttcttctattttgaaggattgtattatcatttaccaaagcgagcagctggcattcgttatgtattcattgggaagccattgaatcagaggcccaggtatcaaatcttgggtatttttctgttaattcagttatgtattcttggtgctgaaagacttcgaagaagtcgaggtgtccctgttctaaatgaagatggaaatataatcagcgacatccgccatgggaaaactgcagatttggctactagttcagagcttttaagattatcggtatcaagcacttcatgttatgcaacagaattctatttaaaaaagaaagcaacaaagcatccagtggtaagagcaaatgcaccctttgtctcagtacccgtcagaatcccactgccacaacctgtggccatgtcttctgctggagttgcattatggagtggtgtaatgagaagcctgaatgccccctatgcagaactccgattacacattcgagtttgatttgtataaatcattcagatttctagcaaatgattactagcaaggggtcatatcattctccagtggattcattaaaatgatactgaatccccacattttggcgagaactcttcttctgaagtgttttagtgtaccaaaagaggagagtagaacccatccaatgaggctgaagatcaatgctgccattcaactgtattgtagagctcaaataacaaaacaatcaaacagaacaaaattttcattagagctcaaacggatacccatgtatatgtacattgtagacacaacttgattttgtagggtagaacagtggctgactggaatcattagagcaaaatgtatcgacctgaaattctgccgggaaatttaactatttgccaatattagattcgacaatt

SEQ ID NO: 22649 - DNA, 618 bp, Oryza sativa
  Clone ID: TF_OsC2127_9
attgggaagccattgaatcagaggcccattatcaaatcttgggtatttttctgtgtagttcaggtatgtattcttggtgctgaaagacttccaagaagtaatttatcaacaatagctagttcgattaaccaaatctcatctggaggctatccttcatccacgcgtccgggtgtccctgttctaaatgaagatggaaatataatcagcgacatccgccatgggaaaactgcagatttggctactagttcagaggcatccagtggtaagagcaaatgcaccctttgtctcagtacccgtcagaatcccactgccacaacctgtggccatgtcttctgctggagttgcattatggagtggtgtaatgagaagcctgaatgccccctatgcagaactccgattacacattcgagtttgatttgtatatatcattcagatttctagcaaatgattactagcaaggggtcatatcattctccagtggattcattaaaatgatactgaatccccacattttggcgagaactcttcttctgaagtgttttagtgtaccaaaagaggagagtagaaaccatccaatgaggctgaagatcaatgctgccattcaactgtattgtagag

SEQ ID NO: 22650 - DNA, 713 bp, Oryza sativa
  Clone ID: TF_OsC392272_1
tcaatcttcaaattctcgatcggctagctgctcattggtgccgatcgagcgtcgcgcgcattcttgtcctagtcgccggagcatggcgaccaccggacgattgctgctgccccacgacatgtacaggaggctgcaggctcccacggcagcggccgcggcctcgctctttattttggcgccccacctgcacttccagaggccgaccgcaggacgattgccgctgccccaccggaagggtacagcaacggtcgcttcggctccgtcccggcgtgcagcgaggccatcgccgccttggaggagacgtcggccggcgaggcgaaggagaaggactgctccgtgtgcctggaggccttcgaggaggagagcgacaagccgatgaggaagatgccgtgctgccatgccttccatgagagctgcatcttcgagtggctgcaggtcagccgcctctgcccgctctgccgcttcgcgctgcccacccaggcggaggcggaggcgggactgtggccattgcccacgcctggttctggttcggggacatgatcagcaccagcttcgcgcgtgcctcccattcccatcccatccatcgcatcgcgctcggccgctcggcgctcgtgcgccgcctccgccttccacctccatcgcgccgacgccatcttcgcccgtccgtcctcggcctccatcacgccggcgccgcctccgccctccgcctccat

SEQ ID NO: 22651 - DNA, 1420 bp, Oryza sativa
  Clone ID: TF_OsC48373_1
cgagcaatacactacgaagtgtatctcgaaattaattaaccacaagattaacaggatcatccgtagtaagctagttagcttgaaaaatcaaaacgggctgcagttacaaactgggtaataaggggatcttgcggtagtgctcttcactcctttcttacatgcattcaactacgagtaattaacctttattacaaagtacatactaattctatccgatatgcatgcatgcagcagatcgatcgatttctatacacaaaactcttatactatatagcagcacacagctccaatcatatacacacacagatgaggacacacaatataatcacacacaatataagcagctagggtaggtaacaacaaattaaagaacaagctggagagaagaagaaaacaaaaacggccgtacgagtggaagcaaaacctcgcgtcttctcaactcataagtcatcaccgacaccaacctttcttgatttcctccatcttggacagcgatgcacgccgaaagatgcttgtcgcgttctcgatcaccccggccggcgtacgatcgattgcgcgctcgaccctccgtctatagctgtgttctcgtctctcccggcgacggcgacggcgaggcgtcacaccgggcagtcgtcatccttgggctgatcgttcttggccggctcggcggcggcggggtggagcagcacggcggcgcggcagagcgggcaggtggagtggagctggagccacgcgccgatgcagtcggcgtggaaccggtggccgcaccgggggaggaggcgcgcccggtcgccgtcgcggaactccacgatgcacaccgcgcactccgccgccgccgccgccttcccgttccccccggcgtcgccgacgtcgggggcggcggcggaggaggagtacacgaacacgggcagggacgacgcgatgtcctcccgatcctggtggtggcgccctggcgacgtgtcggccgacgacgacgacgacgacgccccctcctcctcgtcgtcgtcgccgccgctggccatcgttgacgttgacgacgtcggcgggccacgcttcccggagaagaaccgccagaagtagaagaacacgaggaggaccatgagcaggttgatcccgacgaggcacgccgtcagcaccggcccgtgccgcgtccagtgcttgctcgggtcctccaccaccgccgccgccggcgccaccatctgcaccgtcggcgtcgacatggcgccgatgatgaccgaaacaataaggtagcttctgacaacacaagcagcaaacagtagcagctgccaatggtgtgcataaaccacaaaaagccactgcttcagaacagaagaagctggagattgcagatgttctttagaagaaaagataggggaagaagaagagatagaagataaggaggagcacaagagggaagaaa

SEQ ID NO: 22652 - DNA, 2644 bp, Oryza sativa
  Clone ID: TF_OsC91370_1
aagatcaaggaaattgcaaatcctttttttgagacaaaggcaaaagctttgccttattacattgatacccaaggaagagtacacatccgagtaccaacccaacagataacaccttacgaacactccaaactcaaaccaggctacaaagcacctgaaacactggacaccaaatcagtaattgcaaatctaatatgtggttgggggccaaagtgaatgaatttttactaacactccaatcgagcagaattttaattattgtaaccataagtccaatcaagcaggaatttttcccaagggtcctctggtctcattatctgatggcaggtgatgtgtaatttggaccggataccgaaacaaaaatgtacaggagtttccaagaagaaagcaatctatcatattcacaaatttgagtgaattgagtcagtgtctagcatgtctaacactgtttcattataaatttataatatttacgagcttgaacaacctatattcatgtgccccccttgtccatctctgaaggtattgctgaagttttgcatattggacaccagttcttctgtctaagccattcatgaatgcaggacacatggtattgatgctcacactgcatcctaccaacttcttcgccctcaatgtattcctcctgacatatgctgcacttggcgtcatctagtacagctctgttcgcttcaagatctgaatttggtaacttatacacatttcgcttgagacacttcacaagctgctcatcagatagggcagtgctgacagaaccgattcgctcctctagtgctaatagttcctcataagacatgttgtcaatatccattctcatatctctgtgctggtcatgcaggccaaggccgctaagaaacaagttagtttctagcaccagcaattgctcataagtcaattcatcatcttgttcaatcctgtccaatgctagcaacacctcagcgatgccttccatgtttatacgcctgtagttctctctctccaccagcaaaccatgaaacatttgtggagggctttcgtcagggcggtaacttgatctgctccttgctgtctgattacttgagccttgacgactagatgagtatatctcatgtggtaattccatagaaaaaggcctcatcgatctccgtggggcagcttcacccaaggagaaatgagcccattctggttggcgatcccttgcaagagtttcacgaagagcaaacacgctatcctccctttcatttggcacccttactctggcatgctgagtagaaggtcgcctaatccttgaagaatctgcagactcctgaatacttctgctactagtccgtgtttgctgagaagctgattgttcagcagttctgactctaggaccagtgataccagaatacatggcaggtgaatggcctaaactagagtgtccatttaagccccttggtctagaagaactctctccgtcaaatgccctgtttctcataacctcagccctcttattatgaatagaattagctgaagaacagccagaaggcaaaacatcagatattgatgtgcagccaaggttttttagagtacgtctctgtaccccagggccagcagcatttgatgatttcacaccattggtagaatttcgaggtatagtggaccgattaacaaaagcagaagcagtttgaggtctaatctgacacaattcttctttacccttctgctgacgtgatttagatctcaaagcagcatttctgactacagaaccaattgcatgtgcagacacccctgaagaaacagaagaatctaatagttcaggatcaagttctgcaggctgatcttcagtagttgatgtggacaacaaatcttctggctcatcctgctgaccatatggatgcacatcctcctcaacaacagctttcttgctacactgcagacggttggcctcagttcttctgctactactttctgcattatctgcctctcctaaaaatgtccgtccttgtttttcctcgaaatattttctgacgggagcttttgaagagcttggacatgcagccttagtgcctgatgaacgaaatggctcacgtaaatatcttggcttctccttactgtcagcccacctggcattcattgggttgagttttgtcttgtttggcctctcctcattgccttgatcttttaaggagacactagagcctcttctaagaaaaccagttgttgatattgatctaccagaatcttccaccttacgaagcccggtctccgcacatggcgcgctgatcccccgcacgtgtccacccccacgaaggcagatccggccgttggcgccgcgtcgagattcgtgcgcggcgtgggactcgtccacgtcggcgccacgtgttaaacgccccccgccgccgtggaaggttcggcgcagctgccgctttctcacgccgcgggtttccatttctttttcttcctttcgccatgattgcttctcaaggacaacaatggaacaaccagctttagcatttggacccccagcttccttcactgccatgaaaagttttgtggaacagttgcaaccatttgacaaggtctgtctgagaacatgaggcccttctattgcccggctttctctcatcgtgttgccttgtatccccttctctctcccaaacgccat

SEQ ID NO: 22653 - DNA, 1998 bp, Oryza sativa
  Clone ID: TF_OsC4561_1
ctgcaaacaatagtagttaaattctttaccgtgtagtattcacttcacagatcgttcaacacaaatttctcgtgaatttcttcgattccactccacactctccgcgtgaatgaatgaatcaatctaatggcgggaatgcacaagaagaacgaagagctatgatgcttccatggatggatcatttcacaggtgtcctcggatccacagcagcgtccgccgcgcgaacgacggcgcctcgtcggccctcgagctgagcccgttgccggcgcctgcgccggggacggccgccgtggcggcggcggactcgaggtcccagtccgcgacgctgccgctcgcgctcttctcgctcttgtcccacgccgacacgttgtactccgactccgtgacggggctcacgacgtccgggcgcagcggcttcggcgccgccgttgccccgacgtcgctcgccgcgcgctgcagcacggaggagagccggaacgacgacgcgcgccgggaggacgcgccgtccttcctgatccgcggcgcgccgcgcatccatatcttggagaaggagaagctctccttcttccccaccttggccggcggcttcggcggctgcgcctgcgcgagcttgccgccgggcagcgcgtcgaggccgcggaagctctcccgcttggagtggcagtcgcactccgacatggcgacccggtggcccggcatctgcgtcgtggggcgcttcttggccggcggcttcacggcgacgcggagcagagacctctcgtccatgacgtactcgtacgtccccatggagtagcaacgccgcacgtcctgctcggggttggcgctgctgctgccgccgcagccgccgccggcggcgacttcggtggcctgactccgaaacttgccaagcttgacggagacgaccacctcgtccgccttctccgccgcctctgcatgcttctgttccggctctgcttcttcctcctgctccatgacgaggctgagatgagccgacgacgccgcgtcgaggcgatcggagatggagccctccgagccggactcgagcacgaacagcagcgggctgcagccaccgccgtagggggagaagtcggcgaggaggctgcggcggcagagcgggcaggtggagtgcgacagcagccacgtgtcgatgcagtcgacgtggaaggcgtggctgcacttggggaggagccggaggcggtcgtcgtcggcgaactcgcagaggcagaccgcgcagtcgaacgggtccttcctgccggcgccgacgacggcgccgtagaggaacaccggcagcgtgtcgatgaaggactggtccacgccggcgtcgtggaggtggaacagctgctggagctgcccctggaaggcggtcacgttcgcgtcgccgctgtcggcgtcgccggcgtcacgcggcgccgggcggaggatgaaccggacgagcagatgcaggagcccggagacgaagaaaataacagccaagatcaagattatcagcaggatgctagggctgatcctgctctggaacgccgtgtcaaatgacaccggcgacgacggcggcggcggcggctggagctgcagcaatggcggctgcggcggcggaggaggcggcgggaggtacggaagcgggagctgcagcggcgacgtcggcggcagggcggtgtagttgatgtgcgcatgcattgtgtagtggctcatggcggcggcggcgtgcaagcgagggaagaacaacggggaggaggtacgacggcgacgacgacgacgagctcaccagtcaacaccaacaatggcggcgtggccttaattaggctctcgtcgcagcgcatctcctcttcctccgcgaaatggaggcgacgacgcaagtgaagagagaactcatcatcatcatcatcctcgtacgtcaactccggtggagcttgatctttgcagatgagggaaaggaacgaggtggtggtttaattggcgtactgcaagaacagggtgtgtagtgtatgtcgagatcgagag

SEQ ID NO: 22654 - DNA, 1811 bp, Oryza sativa
  Clone ID: TF_OsC49241_2
gaatcttagctgattggtgctttggactgcagttaggagctgcaaatgtagtgctgatggggacaaatctgactttgtcgtttgatgatgttgaggcaagttttgctccaggagtgaaaggttcaggttttgaaggcgttgtttatactgctgaacctttggacgcctgcagtccgttaacaagtaaagcagaaaagggtccaccatctccatttgcactgatcataagaggcgggtgcacatttgatgaaaaagtaaaaaatgcacaggatgctggattcaaagctgcaatagtatacgacaatgaaaatagcggggttctgatttcaattcatttagcattgtttagactttgggggcatatggttctgcattatctaactttgaagtttacagtggctggaagctcaggtggtattcacatttatgcggtgttcatctcgaaggcctcaggggaggtgttgaagaaattttcaggccatactgatgtagaggtgtggatactacctgcgtttgagaactcagcctggtcaatcatggcaatttcattcatatctctgcttgccatgtctgcggttctagctacttgtttctttgtgagaagacatcatataaggcgggaccggcctagaattccagaagcccgagaattccatggaatgagcagtcaattagtcaaggcaatgccaagccttatcttcacgaaggtgcaagaggacaactgcacatcatcaatgtgtgccatttgcttggaagactacaatgtcggagaaaaattaagagtgttgccttgccgtcacaagttccatgcagcttgtgtggacctttggctcacaacttggagaactttttgccctgtatgcaaacgtgatgcaagtactggaataccagatcctccagcctcagagactacaccattgctttcttctgcagttcgtttgccttctcagtcatcttcgttccggtcaagcgtggcagcatcgcctccaagaccaataagtcgacgaccttcatcacagtccatatctcggatttatgctgcttctggtacccccaactctcctaaccccataaggtctttcacaaactcaactgccatgagcataagtagaagcaatgtggacttatcaaacatgtcttcccgccctcgcgcctcacacctcgcctccgcacattctttggttggcagtcacttgtctccaccaatcaatataaggtacgcatcgccgcatatgtcccactctggctatgcatcacctagtccacatgttagctcatcctatgtctccaactctgggtatggatcttcaagctactatctcggttcatccagccagcatcggtcatacctaaggcgctgtggggaatcagggcctagcttgtctaccatggcccctcagtcgccgcaacagtcccagttaggtcatagtggggcatacggtcttagtctaagcaggagcatcctcaggccagttgtccggcgatccagcctgagactctgtgctgattaagatgcaagcttatctgccatggcatcagctcaatccttgccaggatgctaatttctctgggatcagatcagcttctgtctgtactaagacctggcgtgacttgtgtatacatttgaggcatgtactataggctattggttgagagaaaatggtcgtatttgtttgtgtttctcctgctgccctgcccttttggttgtagtgattgttagcgctctatttgtttcaccctagagtgtatagtacaattgtacagcaactttcttttaaactaagcaatatcatccgcgcgttgcccatacc

SEQ ID NO: 22655 - DNA, 662 bp, Oryza sativa
  Clone ID: TF_OsC280106_1
cctcgtgccgaattcggcacgaggcctcgtgcggcacgagggtggatcgagtagcttagctagctgtgatggagatcttggtgagtgcactgctcctgctcctcgtgccacccttgtccgccctcctcgccgtcgccgcgccgagcctcgcgtggccgtcggggtcgtcgtcggtgaggaagctgatcgccaagaaggtggcgccggagcaggcggcgcgcgacgagctgctgcgcgtggcgcggtacagcagcgctagcgccgccgctgccgctagtgctgtccaacaaccaggcggcggcgagagtagtcgtccggcggcggcggcggcggatgatggtgggcggccggatcagtgcgcggtgtgcctgagcgacatcgaggagggcgacgaggtgagggagctccggtgccggcacctgttccaccgtggctgcctcgaccggtggtggttgtcggcgcggccgcccgccacgtgcccgctctgccgctgccggctcctgcagagcccgtcggcggcggcggacgacggcgacggcgacggcgaggaggattcggactcggacatggtgatgttcatggcgtacctgcgaagcagtagcacctggctctagccattaagggcatgtttagttccaaaaacttttcccaaaaacatcaca

SEQ ID NO: 22656 - DNA, 1130 bp, Oryza sativa
  Clone ID: TF_OsC180148_1
gattttttcctccccctctctatctctcgcgtccatggcgtcctcgtctctcctcgtccggctcgcctccgacgagatgccccaaaccctagatgcgtcgtcgtcgtcttcgtgctacgacgccttcgtgccggtgttccacccggatccgtcgtcggggttctcggcggcgtcggtggtggcggccgccgaccgcctccgcagccagttcctctccgtggagcccgacctcttccacgacgcgctcgtcgcgccaagccccgaccacctcggcttccccgatgaggaggaggaggaggagatccggtgggattgcctccaattggatgacgacgacgaggaggaggagggggtggcggatctgcggcttgaggcctccaacgcggcggaggaattcgattgggaggaggtggcatcgccctccggcggcgccgggatggatcagccggagcccgagtgggaggtcctcgccgacgtgccgccgccgccgccgccgcccgccgacgagggcttcgtgtacacctccgaccgtgacgtgtacgaggtgctcgtcggggagggtttgttcctgaagagcaagccgcccgcggcgaggtcggccgtcgaggcgctaccgtccgccgtcgtcgccgccggcgaggacggcgaaggggaggagtgcgcggtgtgcagggacggcgtcgccgccggggagcgcgtgaagaggctgccctgctcgcacggttaccacgaggagtgcatcatgccgtggctcgacgtgcgcaactcgtgcccgctctgccgcttcgagctgcccaccgacgacccccagtacgagagctggaaggcctcgcgagctgcggctgcctgaattgctgcgcggtaaaaaaaaaaggcaagcctttcttttcttgcacagactttatagagttgtatgtcttgggtttcaaactggtactatgatgaaagaaccccactggtatgatgaaagaaagcgtagaggtagtcgcacgagatggttttgcacctttcgatttgtgtactttttttcttataaagagggatttgtgttgtgacttaaggttgcgaggatattacataagtttatcctatatatatactgttgtatttaaaaaaaaaaaaaaaaaaaa

SEQ ID NO: 22657 - DNA, 539 bp, Oryza sativa
  Clone ID: TF_LIB3599-059-Q6-K1-A9
cccacgcgtccgcccacgcgtccgcccgccgcgcggacgctagcgcgtcacggccacacccctcgccggtggacttcgacgcggacttcccctcggatttcgatcgcccgatagagcattcccgcagtgggttggaaccattggctgttgctgcaattcctacaatgaagtataactgtgaagctttccattcggaagatgacacccagatgttttgttgtaacaggtgctccatatgtttaagtgaatacaaggagaaggacattctaagaattgtacctatttgtcatcataactttcacctttactgcttagatgcatggttgctgaagcagactacttgcccaatatgccggatctcattgaaagaactgcctgatggaaaatcgaccgtatcctctgctcctaccatgtctcaaccccccaccctccctgagagttctgttaatccaacatctcatttcctcccagttcatcaagaacacagaagccaccaggatggcccagatatgccagaatctgtagaggtggttattgaa

SEQ ID NO: 22658 - DNA, 1283 bp, Oryza sativa
  Clone ID: TF_OsC120717_1
tgcgggaattcagcacgaggagcggtgaaaaaatggcgaccaaagtgcacgcccgccgcctctagcgccgaccgcctcgcgttccccttccccactccgtcccggcagctacctccgctttccaccacgccggccgatccgcctccccaaccctatcgccggcaggcgcgccacgccaggttccgggctcggagacaccgcacgctccgcccgatgggcacccccgggccggagctcgccgctctcgcgattcgccgcagcggcggccgcctgttcgagcggtagggagggactcgtctccccgcctctccttgtcgtggactcgtggtagcgggggtgggaggagccagagaggctgggggcagggagggaggatgctggggtcgggcctgaatctcgtcagcgcggcgctcggcttcggcatgaccgccgcctttgtcgcgttcgtctgcgcgcggttcgtctgctgccgcgcccgccgcgcggacgctagcgcgtcacggccacacccctcgccggtggacttcgacgcggacttcccctcggatttcgatcgcccgatagagcattcccgcagtgggttggaaccattggctgttgctgcaattcctacaatgaagtataactgtgaagctttccattcggaagatgacacccagtgctccatatgtttaagtgaatacaaggagaaggacattctaagaattgtacctatttgtcatcataactttcacctttactgcttagatgcatggttgctgaagcagactacttgcccaatatgccggatctcattgaaagaactgcctgatggaaaatcgaccgtatcctctgctcctaccatgtctcaaccccccaccctccctgagagttctgttaatccaacatctcatttcctcccagttcatcaagaacacagaagccaccaggatggcccagatatgccagaatctgtagaggtggttattgaaatccgacagtgactacggcggaatagtgcaagacaagaatttgcagtttaaattctttgtacgcccttcattgcattgtttgtcgcagtttcaaaatgtttgaagtcaaaattatatgtggtccctttgcaagttgtagactagagaagtcagtcatacaatccacattatcatatgttctttttaatatatgttgtatattgcaagctaagtaaaaataccgataagatctactgatataggagtagagcttatttactgttgagtccctaatttttttatgagtgaatttcagcagggacacctcttacc

SEQ ID NO: 22659 - DNA, 537 bp, Oryza sativa; identical to SEQ ID NO: 13573
  Clone ID: TF_OsC344717_1

SEQ ID NO: 22660 - DNA, 637 bp, Oryza sativa
  Clone ID: TF_OsC4737_1
gcccagcccaccggctcggtgccacgccttggctgaatgagctacctcctctcctacatctccaagatgctgtgcatcaagattccgtcggaggcgaggcaagccagcgaggacggcggcagcggtggcctgacggagtgctccgtctgtctctccaggatccgtgtcggcgaggcgacgaggcgtctgccctgccggcatgcgttccaccgggactgcgtcgaccggtggctcctctcatgcaggcggacgtgcccgctttgccgggtttacgtcgtcgtcgacggtaacaagccaggggtggcagcgaagcacaccggcgagccgccgctcgctgaagacatggtgatctggttctctgccatgctcgtccctggattctgacatgtatatctctgatgtctaagcgcaatgctttttatttgtttgtttcctgcctggaaaccggtttgttttttttttcttatattatgcaaattaacatgacgatttcacgcttgtagcgtttgtatgtacgcttacgctcacatcgtcagcattttttttcttttgcaagttttctattgggcgttgattacctattcaagagaactgaaaaaaaaataagtaggtatatataataaaaacggtttctttt

SEQ ID NO: 22661 - DNA, 1395 bp, Oryza sativa
  Clone ID: TF_OsC359_7750
gcacgaggattccacccctcgcccgcggattcttggaacgctttgctgctgctcgcgcatggtggaggggtggggctagtgctagcgatcgcgaggaggaggaggacggcaagattggcggccatgctgagggcggtgcggcctgcgccgtcggcggcggcggggcccgccgcaccgccgggcgacggcgaggcgcgcgcctgctacggcatcgtggtggcgtgcgtgtcgctgctgctgctgtgcgcgctcgtctccgccgtcggcgtcgccagggccttcgccgccaccggggtgctcgtcctgctgctcggcctcgccggctggctcgcgcccacggacgccttcgccgtcgcgctggcccccgagctctacgcggggaacgccggcggcggcggcggtagcgcccgcgcggcgccggcggtgcggctgcaggtgcgccggtgcgcgtcgtgcgggctcgccgcccaggccatcgacgcgctgcccgcgttcgcgtacgagccccccgccgccgacgtcgaggacggcggcgagggcaagccgcgcggcggcggcgcgctgtgtgcggtgtgcctggaggacgtcgtggccggcgagacggtgcggcggctgccgtcgtgcgggcacctcttccacgtggactgcatcgacatgtggctgcacgcgcaccggacttgcccgctctgccgccgcgacctctcgccggagaaggtcaccgcgaaatcctccgccgccgccgcgacggtctcctccaccgacgtgctgccgccgcatttcgtaggaatttggcacgaaataaatcagttcaaatcatcggagaaatcgctggtcgggatgcccgaggcggcggcggcggaggaggaaggcggtgatggctgctcgacgaggctagggtgctacggcttcatggcggtgaacgtcctgatggggctgtactgctccatcgcctacgccgtgagcgccaccgtggcgggcgccgtcgccgtcgcggtcgcgctcctcctgctggcgctcgccggcaggctggcgcagacgacgggaggaggctccgccgcggcggcggcgtcggggcggcggcggcggctgctgagctgcccgtgcgcgtgcgggctgatggcgcccggcgcgggggggatcggcgtgctgccggcgttcgcgtacgagcccggcggcggcggcggcggcgtgctgtgcgcggtgtgcctggaggacttgcgcggcggcgagatggtgcggcggctgccggcgtgcgggcacctgttccacgaggactgcgtcgacgtgtggctgcgcgtccgccggacttgcccgctctgccgccgcgtgctcccgccgcgcaagtccgtggcggccgcggcggcggcgtcggccgctgtgctgccgcctgtctga

SEQ ID NO: 22662 - DNA, 783 bp, Oryza sativa
  Clone ID: TF_OsC335815_1
atgccatcgtcatcgtcatcctcggtcgccgctgccccttctggcagcaatggcacccgccgcgacggtgggagcgggagcgtcacgggctgcctcccggctgaccaggcatgcttcgcgctttcgtcgtcggccagctcgccaggctacctgcacgcctcggccacaacgacgcgtcgcgatgcttctgccaccgtggcgcgcgcgtgctgcaccaccgcgtcgtacgtcgtcgtcctcgggatcagcttcggctccctcctcgccatcctgctcatcctctgcatcatccggtggtacctcgtgtggaggtcggcgcgaccacggcgggacgacggcgccgcggatgaggcggttgggtcagccaagaagcggtcggctgggctggatgacgacgccatcgcggcgctgccggtgttcgcgtacaagcaaagggaggagggcggcggcggcgcggtgggggcagcagaggaggaggaagaggaacgggagtgcgcggtgtgcctccccgtgatggccgacggggaggcggcgcggcggctgcccagatgcatgcatgtcttccaccggggctgcgtcgatgtgtggctcagggagcactcgacgtgccccgtctgccgcgccgaggtggttgttaggccggccggtgcggcgcgcgttgagaagttgccggagagcagcgcgtcgcgggcattgacatcgccggtgccggcaccggcgccgaggccgacggggacagtggtggacgacggcagggagagggacctcgaggcgcagcagtag

SEQ ID NO: 22663 - DNA, 1425 bp, Oryza sativa; identical to SEQ ID NO: 13574
  Clone ID: TF_OsC164176_1

SEQ ID NO: 22664 - DNA, 567 bp, Oryza sativa
  Clone ID: TF_OsC18246_2
tcaaatcgcaggaagcacgcgggactcgccggcgacggacaggaagccaatgtcgccgccgccgccgccgtgcctctcgacgctctcgccgtcgccgcagtaatcctccttggcgtcgtcgtccgggccctcgacgcgcgcgacgacgggtgcgcggcagacggggcaggtgggcgcgcgcgtgagcagccaccggtcgacgcactccctgtggaacccatgcccgcacgccggcagcacgcgcacctcgtccccggcggcgtactccgccaggcacaccgcgcagtcgccgctgccgccctcctcgtcggcgccgccgccgccgccgtcgcggggcggcatctggaccacgtgcaccgggatcccgtcgagcgcgcgcttggtctcctcggacggctcggggcgcaccgacgacgacccgccgtcttctcgccgtcgccgcccgccgccgtcgcagaagcaggcgtagagcgcggtgagcgcgatgtaggagacgctggcgacgaagagcaccgtggtggtcacccccagcgcccgcaccatgtgcgcccgctgcgcgcggtccat

SEQ ID NO: 22665 - DNA, 882 bp, Oryza sativa
  Clone ID: TF_OsC394647_2
atggcggcgactcatccaggcagcagcagggagcatgcttcagcggcggcaatgactctctgcttggcaaggtggcagggaggaggcaacgatcacagtggttcgacgtggagaggaggcaatggcgaggaggagacatcagcagcggctcgatgtggggcggaggcggtagcggtggctactatgctaggcggtggggatgaagccatgacggtggcggctcagcgccaagaggaggtgacggcgttagcggcggtggcgagctggaggtcgcagcgccacgaggtgaaggccgatggtgagcaggcggcaggggaggagaaccaagctgcgggggtcctggagcacatcccgggaccgggggagcctggaaactctatagttcaggaacgtgtcatcatttctaacccaatgaacaccctattgtttttacatatctacaccggtggcaaggcgtcatcagccggcggtgatgtctccgccgccgtggtctcttccatggccacgtcccggggcggcgagaggtcgcaccggcacatcgggcaagtccggtgcgagtgcagccacatgtcgatgcactccacatggaacaggtgcttgcacgacggcatctcccgcaccatctcgccggcgtgcagctcctccaggcacatcgagcatggctcgccgttcccggcctcaaggtcgccgccgccgctgtcgccctacgccaccagacgcgccatgggagcctacatggtgacccatggtaagaacctgtggtcacaacatgctttccaggttactgcggatctggagtctgggctatatgaatgcgagtgcaaaacatggatcacacaagccgcccacatgttgcgagggtgctctgccatctccaggtag

SEQ ID NO: 22666 - DNA, 1082 bp, Oryza sativa
  Clone ID: TF_OsC147962_1
cagatccaagcccccgcgacgaggcgaggtgggagagggggcagaggcagagcgagatgagcgtggggcgtaaaaattcaccacgccaccatacgcatttactccgcttgcagccctacccccacgcggcgtcacgagggcccaatgccattccgccgcttccccgctgagagatcgatccccaccgcgccgccgccgccgcagccgcagccgcagccgtcgccatgtcctcctcatcctcttcgctgctctcctcgctcgccacgctcggcctcgggtactcgatcgccatcgcgctgggattcctcgtcctgctcgcgtcgctcctcctcgcgtcatacttctgcttccgccgcgggggcggcggcgggcacttctccggcgtgctcaccccgagctccagctccagccacctctccatcaccgtcccgcgcgtgctcttcgtcgcggaggggtccgagtcccccgacgcctactcctcgggcgtcgcggccgcgtcgtcccccgtggggctcgaccccgcggccatcgcgtcgtacccgaaggtccccttctacagcggcgccggcgcggacgccgacgccatgtgctcgatctgcctcagcgagtacgcggacggggagatgctgcgcgtgatgcccgactgcaggcacaggttccacgtctgctgcctcgacgcctggctgcgccggaacgcgtcgtgccccgtgtgcaggtcctcgcccatccccacgccggtggccacgccgctggcgacgccgctgtcggagctcgtcccgctctcgcagtacgccgccgatcggaggcgcagcagggggttgtgcttaggttatttagagaagttcgggaggtgcaaaaccactactcgggaccacgcattgggggagaaccgtagcctcgtgacgtgcttagggaaaaggagaggtcaaggagaacttgctgtggtgatcgtcgccgccaccgaggtcgcgttgccgctccatgtcgccgatgaggtcgtgtcgccgctccaagtcgccaccgctaagatccgccgctgccagtggcccctcgactgtcgcgagaagggggcgggagggtag

SEQ ID NO: 22667 - DNA, 594 bp, Oryza sativa; identical to SEQ ID NO: 13578
  Clone ID: TF_OsC401067_1

SEQ ID NO: 22668 - DNA, 1716 bp, Oryza sativa; identical to SEQ ID NO: 13581
  Clone ID: TF_OsC337609_1

SEQ ID NO: 22669 - DNA, 1338 bp, Oryza sativa
  Clone ID: TF_OsC4182_1
tctgtgatatctctatagcgcgcgcgctcttttttttttttttttttttttttgctactaaatcgacagttggtgcaggtcaataaacacccagcacctgtcccttttctgaatcatttggcaatttgccagagcagaagtgccaaacaagtagttaaacatgagaaaaccatcttccccaatatctctttttaattctgtatatacacttattacaacaaacaatgcgattacgcagagcccagccctaataaggagcaatggtgtcgtcgtcttcgccattgacggcatggcatttcgctagccagactcaatctgcagaggatggtcggctgcccggaacacgtactgaactctgaatctcaatatctttcagaagaggagagctgagcttcgtcagactaggtagtcgtagtacaccagcaagaggttgtcagggactatgaggggcaggctgtcgatgaagctgtggaagtgcctcacattctccttctccagcgtcacggtgtcgatcacgtcgtcgtctccggtgagcacccagaggtcccttgatcggactctcttcaggctcccgcggcagaacgggcatgactgagatcttgtgtaccagtctcgataacagttgatgcacatggcatggttgcaatttggaaggaccatcttggtgcaagtctccaagcaaatgccgcactcatcttccctctcgtcgtccttatcgtcggcgtaaagcttccggccgccgccaccggaggccgcctccttgcaccatcctttctcgttgcagtctttctccatcaaattcccctcgagttgttgcaagaatggatatattacagcatagaattccttgaggcttgctctcctttcaatgttggtggatatagaggcatcctcatcaacatataccttgtacacaagaacctcaaggagacctaggtaactagggagggtatatgaaagggagcagctgcaatccatccactggatgaggttaaggatgattggagccatggagctgtaagacagcctcatctgcacacaggcacccccataggccctgtgtatagcatgcgccagggtgttggcatggtggatatcagcttcaagcgccttgagagagcccctgagggacaaaggcctgccaccatgaaacatgacttctgtcaagaacccaaaaccagaccctatgctttgcttcacccttatgctgaagtctgccacaaaaacacagacttgggcaaggaggagaggggctcaagaagcaacaaacaatcaagcaagcaagcaagctgctttggtttggggtctctgggaaaggagctttgggggaaactggga

SEQ ID NO: 22670 - DNA, 667 bp, Oryza sativa
  Clone ID: TF_OsC42947_1
ggccgcggcggcggggggcccgagcctggcggacaggttccggagcaggttcaggccggcgaggttcgggcggcggcgaggcgggggcgcgggcgcggccgactgccgcgtctgcctcgcgcggttcgagccggagtcggtggtgaaccgcctcccctgcggccacctcttccaccgcgcctgcctcgagaagtggctcgactacgaccacgccacctgcccgctctgccgccaccgcctcctccccgccaccaccgagtccccctcgccgtcgccggcgacggcgaccccccatttcgcccggatttagagagatctccccccttcaatccgccactgggccgtgtgcgcgtaggaaaattgagaggatcatttagctctagtgctagctccatttagtgctcctttttccccccactttcttaatttttttttcacctctttgcagtgtttttttttaccatcttcgagtggccttttcttttcttttctttctttttttacttctttgtgttgctgctgtaccattgtaaatatttgcagagtgctccgatcgatggagaggtgtagcacttgtgtacagggcttttggaaagcgaagagatgagaaggagagaaaaaaaaatcattgcccaaaaaaaaaaaaaaaaaaaaaaaaaaaaaaaaa

SEQ ID NO: 22671 - DNA, 1929 bp, Oryza sativa
  Clone ID: TF_OsC60386_1
gcgcctgggcgccttcagaactccactggttcttcttatctccctctctcttcccgttctcttccttctcaccgatcctggaatggtctcggagggttcttagctggcttttcgattggattagcagcagccgggtcagacggagcggaggccgtgccggagaagggagaaggaaagtttcaggtgaacatctaacatggatgatcacatgggaagacggacagttggtggccttctcttcaccaaggggggctcaattcttctcttcagagaagacagtgcgcgtcacaaggccaccaattgctgcacgcgacacggttgcagcagcaagcatttggccggcaaagacaagcaaacacacagggcagcaacagcagccaaggaagcatcagaaacccctcggagatcacagattttcaggaaacccagcacgaggactcctcagggaagtactgctactgataacatcagcaggaatgcagcaagctcctatagcgaaaacgacaataggccaagagaaactccagggcgtgatttaatcgctcgtctcaaagagagggtcaatgcatcaagaaaacgatcattgaacagagaaaacagtccatcatcaccaaatggattaagtgctacttcctcaagtagtagccgcacagtctcaagaccgtcgcatcgggcagcttcccgaataacggaaggcagatgaaggtgcaaatgcaggagctgtaaatgtacgcagagacagcagtggagataccaggaggaattcagatagggatgtcgatgatttcttgctagttgagcaggcagcaagagatagcactgaaggattcatatctggattcttggcaagatacagaagtaatcatcagggactactttcatctttggacgacagcatagaggatgcaaatgggtactggcgcttcaatatggaaggaagtgaagagcttgagaactacttcatattcaatgatcggtacagagggatgagaatggacattgacggcatgtcttatgaggaattgctagcattgggagatagaattggcaccgtaagcactggcctttcagaagacgcgctgtccaagtgtctagacagaagcatgtacatggccactacttcaggaactcatgaagattgtgagagaaaatgcagcatatgccaggaggaatattcagatggtgaggaggtgggcaagatggtctgcaaacattactaccacttctcctgcataaagaactggctccggcagaagaactggtgtcccatttgtaaatccgtcgctctgaataccaactagcactagcagggtgcttcttcagaaaccaaatgtacagattctccatgaatgttctacccagacacaatttgcattctttttttgatactcttttagatcgaaccattcgttcgcatcctccagaccttttgcattattggtctccttcagttcacaatttgcacttgtgcagtacgaacatggaaaggaacaggaaataactcctgaaaaatgaaaaaaaaaatatagttcctcaaaaaaaaaaaaaaaaatcccgcggtggccgttcagtagcccccccgcgcgcgccggtgacttggcggggggctcgtcgatggcggaaggaggcggtattgtgcggtggatctgctgcgcccgccatcggatgcttccgccgcggttttgggagacggttgtcgagctcggcggcgaaggagaacgtgggatcttgcagacgaggtgggatgcgacggatctgacgcaggagatgagtaccggcggggcggcgaccaagagaggcgccgccaccggaggcgacggggggaggaggggacggcgagggcgaggcgccgttgattttttgcaaaatgcccccttgttaactttggatcgtggtactggtttttgcaaaaatgcccctgcgaactag

SEQ ID NO: 22672 - DNA, 1493 bp, Oryza sativa
  unsure (1)..(1493): unsure at all n locations
  Clone ID: TF_OsC240623_1
cgggctgcaggttccgcacgagggtgagtttgcccttgcccaccggccaccaccgccgatccccatccatcccgcgagcgattgcggcttcgtcgctcgtcctgccgcttccgccgcatcctggtgagcacatcctccgccaccgctgcctgctccgatccccattcatcgcgcgagcgagtacggcttcgtcgctcgtcctgccgcttccgccgcatcctggtgagcacatcctccgccaccgccgcctgctccgatccccatccatcgcgcgagcgagcgagggtcgccgtcgctcatcctgctgcttccgccgcatcgacaagatgccaaatagagccacgcattggtgttatgcctgccgacgtccaattcgtgttagtggacaagatattacatgccccaactgcaatgatggttttatacaagaaatcagtgagataggtggttcattgaacacttatggtatctttgacccgagctttgatgagcgtcgagatagaagttttggaatggtggaggctatgtctgaccttatgcgacaacggatggcagaaatgggcagaaatcgtgtgttggatttccatggtacgagaggggcaagttcccatcaaggaaggcagccaactgttagaccaatgctcatatttggcagcaatgcacctgatcgtgtaagcagcagtagtgaagaagcagatatactcctcaggcaaggccgcagaattggcgcggaccgtccaaatttcagtcgtttcctagtcggtcccagtcttgaagctctattcgaacagctgctcctgcataataaccgtcaaggaccaccaccagctccacagtctgcaattgactccatgcctgtggtaaagataaacctcaggcaccttagagatgatcctcactgtccagtttgcacagacaaatttgaggttggaacagaggcacgggagatgccatgcaagcatctgtaccatgctgaatgcatcattccctggctggttcagcacaattcttgtccagtttgccgccatccactgccgtcatcttcccaccgttcaggcagcacccgttcatcgtcaacccactctaacgaagctattagccatggggttgccagatctgatgctgatcctgttcctgttgcaagaagcgacgacagcagaaaccatgaaatgcacggttctttctcgtttctctggccatttgattcacctactcctgattccagttcctacacgcacgaaggaggtgttggtgagcctacagttcatgacgatgctggccagatgacctattctgagtggcattacgactactgaacttcctgcagcaagaccccccacatatcagtgtccactcctcttggcttcnacctcttaaagaagaagtggatatttatgggtttctgttnggtgtntnaagctttcnctaaaacnaaccttgtgttgcatgtgccttctatccctntgctggggctgtgtatactgtactcaact

SEQ ID NO: 22673 - DNA, 962 bp, Oryza sativa
  Clone ID: TF_OsC47412_1
ggggcgaattcttacatattcacttctgcaagcagctagctttacaaataatctcaagcacatttgagaatgagataatctaaacaatggctacgttacaagtagaatccaaaaatcttaataagggtcaagcttgactatctgttgaaatctgcaaagcttctatactactccatctagctgttgagagagagagccttcaggctcgggcaatcttcgacgcacggcgtggatggcatgatgcacccagggcacgacatcacgccgctctcccatggcgcggcggcgaggccggtgaggtcgtcgcggcagatcgggcaggtggtccccttgaacagccacctggtgatgcacggcgggtggaacgcgtgcccgcacggcaggttcgccggcggcgtcttgcacctctcgctggccgtcaggccgtccaggcagatcccgcaggtgtcgccggcgcgcgtctccagccagaccagcccgcggacgagcgacacgggctcgctgaacaccagctccaccgccaccttcacgcgcgcggcgaagcggtagtggccgccggcgaggccgtcgtcgtggttccgcctcaccgcgcggtggatccacgcggcggcgtcgtcgtcgggcatgggcgtcgcccagttgctgcgggagaggtcgacgcagcggagctcccgcatcccggtgaacacggcccacgccatccgccgcgtctcctcgtagtcgaggaagacgtcgccgccggcgccgtccagcacgtgcttgcgctccgtctccagcgtgaacttgatgccgtcgtggcgcacgggctcgcctccgccgccgagccgccgcgaccagcaccgcaccttgacgtcgcagacgaagcgcacgtacgaggggccctcctccagcggcgccgtcccgtggtggccctccagctgcttgctgctgctccgtaagcgtattatcgtttccatcgccat

SEQ ID NO: 22674 - DNA, 772 bp, Oryza sativa
  Clone ID: TF_OsC2423_4
gaacagggtgcttgtttatgaaagttggaagtgccaaattgatcaattgcccaaaccaaaaacgatcagagcttatgttcaatcaatttcctaacaacacacaacttaggatgggattctgaaattttgtatgaaccatcaccattatttctgtctgaatacagagattagaccatttacccatctataacctgacatctttatacgctcttaatgagcatctaaaatacagatcgccacgacatggtacatcagcagaagccttatttcttcgttttacaaggccggcaggttgtgcttggagacccctcggcctctacttggggctcagtggttactctgactgatgtctcttcgttttcttcagcttgatgcgttggaccctcactaccttgttgcaatgtctgatcctcctgtcgcgtgttctcgtcaatgcggccctcctgatactgtacatccaaagagctgttctcttcaacggtctgtgcttccaaatccactggatcaatgctggcggttttgggggatggaaggagggatactcgacaaagagggcaagtggtgtttgtcgagagccagtggtcgatgcaatcgatgtggaaggtatggccacaaggaggtattctctggagccgctcatccggttgatagtctgctaagcagacagagacccgggtttccctggcacgcgtgggcggacgctagaccaaaacaggcaagacttggagcatctccttctttatgccgcactccatcctgggggtatctcccc

SEQ ID NO: 22675 - DNA, 741 bp, Oryza sativa
  Clone ID: TF_OsC355955_4
tcaaaatttgtggcatttgctgtgagacatccaaagaacgtgaatcttctcgtggatatctcttgttctttctcccatcctcttcttcctctttctttcgttgccgctgaaggcatcgtcggtgagctcccacagcgaagatggagtcgacgcacggggtgtgcgtgcgcaccgctctagcgtctcctgctctgcctgcctcggcgttggcatgttgttctccttctccggctcggacgcgccaccgacattgtccgcgatgccgccgaagcccaccgcccgcttgatgcggtcgcgggcgtggtgaccatgctcaccgacctgcggagcagcttggtcagcggcaaggacatggccggctgcagcaacggcccggtccgcgaggtcagcacgacagacggggcaggtgacatgcgcggcgagccacacgtcgatgcaggcggtgtggaacacatggcagcacccggggaggaggcagagcttctcgccgtcgtccacaaactcggcgaggcagaccgcgcactcgagcgccccatgcccggccttcaccgccctcgctgtcgcgtacgtcgagccccacgtgcctcctccgatgttccccaccgacgacgcgaacggccgcgctggcgtgcacagcaccgcccccacggcaacgatgcgcggcagtggtggcctcggagcagcgtgggcaatggagaggaggaggatgacgtgggcgacgaatgcgtagtgacgccccat

SEQ ID NO: 22676 - DNA, 2427 bp, Oryza sativa
  Clone ID: TF_OsC7776_1
agaagagctatgacgtcgcatgccgcgtacgtaagcttggatcctctagagcggccgcctttttttcggtttgtttacaaacgatatactttcttcaggttatcaagttatctagtgcagaatacatgcaacatcgtccaaaatgcagttcacgcaatgcagcgcaatccagttcatcaaaggcacgtaccacttttgatagcaatatccacctctaatttcagttattgccatttctgcaagcgtagtacaataggaaagcttgctgaagtcatccagatatattggcctggtcgacttcttttccactagaaagtagcagtactctagtgcaaactccacagaacacagggtactactctgatggaacgagtagatattgtatatttcctcgtgtatgttgacagtgagaactgtcttctccaaaataacagcaacaaaaataaccccatgcatcattacaatccacatatcaaagcttgaactttatacaagcacacggtcaccacaagtaactgtattctgccgtattacctcagaaagcagatcaccctaatgcatttcaatctcctgcacaggaatatctgtgtggtcagagcgacgagtatcagatgttccagatgagctcgctatctcagatttgcacaatgggcaaagtgcattaatcttcagccatttatcaacacattccttgtggaaacaatgtgtgcagggaagttcacgaagctcatcattgtgtgcatactttgcaagacagatgcaacaaacagcatcctcagcagatagtgaccgctccttgtcagtccctgcagctactatcccaccatcttggccttcagcttcatttcctgaactatgacggcgtttcttggttttgaatttgtatgttggaagagaattgatggattctgaggtagcccctcttgtattgtttgtatcttctctaaatcccataacagatatgatgcagggcaggcagcagcatatcattgcacagaggatgaaaggcatggcatacccaatacaactaaaggtaaggaacacaatacataacctgtacaagtttggagcatcggcagcagaagaacgcccgccaaatatccacacatttcctacgacaaaccacacagcaaagaaacaatccaaggccatcttgaagtggtcaaaaagagcattaatccttggattagcgagcactgcatttcgtgcagcattccttcgacgctctgatgcactagcagaaggctcagttgaattgttctgagaggagccttgaagtgtatgtgctggctcattttcaccattgacaatattgcggtgtatatagcgccaataaagatggggtagtgtagcaaaacaaccaactgtataacctatgacccactcaaataatggagcttgcggatgttcctttcttgaaagagaaagcacaacaatagcagctacaatttggctcacattgacaagaacttctattgaaatccagagtccagaattcaaagggcttctgtgccggcgaacatagttatcacttcttctagcacctgaagtatgtcctgcactaggtgcaccaactgctgatggtgcctgcaaagcaggtactagcgctctggttgcagatctatcaacaggatttggttctccatggttttctctagcaacactatgggaagtcgaagtagatggaccactgtcccttggaatatcaattatgtgctcatggccactaacacctgtagtttgttccatcctcgaagcatgcatatcggtatgaccgtgaatttcaagtaacgttgaaggctgaggtcatcaattcttagatgcaacaaagaaagaagcaagctgctaaatttctgagacctccagttttctcaaaactgagtgcaggaattatctacgattctacgcttcagcagagacttccagcttcaagtgaacacttagatttatatcacaaagagagctattcacggacttagagcaacaccgtggagggtagatcggtggcccgacagctgagattccccctaggcacgactcccaactccgccggatgggagggtacccgcgcccgtggcagaggacacggcgagcgggaggcagtggcgacgagggagccgcgcgcatgggcggcgcacaaccctaaccttaccgagtcgtcgccagatgcacagagaggagggtagctcgcgctcgcgcgcgcgcgcgaggcgcgacgcgggagcggcgcccgcacggtagacgacggcgcggccgaggcgcgccgagctccgctgcctgcgccgcggcggcgacggcggcggcggcggcgaggtgaggtgggcggagaagcggagaggccgagagggagagagagggttggggggtggggttggttggtgacgaggtgagcaacgaaggggtcttcaccccccacgcgtccacaga

SEQ ID NO: 22677 - DNA, 1689 bp, Oryza sativa
  unsure (1)..(1689): unsure at all n locations
  Clone ID: TF_OsC62963_1
cccggggcggccgtctccggtgccgatttggtgggatccgggccggagaagcactggttggtgaggagggtgaggggggatgggtgcgagggaggaggtgagggaggaggagggggaggagggggagggggtgggcgggaaggaggaggagaaggcggcggccgcggccgcggcggtgtcgtgctcgatctgcctcgacgcggttgtcgccgccggcggggagaggtccacggcgaggctgcagtgtggccacgagttccacctcgattgcattggatcagcatttaatgccaaaggcgttatgcaatgccccaactgccgcaaaattgaaaaggggaactggctctatgcaaatggttcccgacccacacaagatgttaatatggatgagtgggctcatgatgaagacctttatgatgttagttactcggagatgccctttcggtttcactggtgcccatttggtcgtttggctcaacttccatccttctttgaggaaggagaatcatcacccccagttacttttcatgacttcatgggacaacatatgtttacggagcatgtagctgctgtatcttctgcacctggggcagctcatccatgcccatatgtggcatacttgcatcctcttccatcattggcgtcatcatcaagctctcatgttcctgagagaactatggatggtcctgcatatcatgatccctggcaccccttggctgggccttcagatggtaggcccttgcaatcagtgcaacctgctgattttcatcataaccattgggcgcatgttcccaattcctatcctcaacccaacaacaataatggggtggccgagcagcaaggagtcccttttggaacaacgagggctgcaagagttgatggtgatacccaacgtcgaggatcatctatttctccatcatacttcagtaatggatctggttctagatctagagctcctaatgttcctcctatggtacctcaattcatgagggcgcacggcagcattagtgaacagtaccagcagagttcatcatccagcttatttgctggggctcatagatcaggaggcatgcgaactgcaccgccgccccctctaccagagaacccggcattttgccttttcccaccaggttcatctggccataactcgatggagactgatgatgcaggaggaaaccgattctatgcctgggaacgggatcgcttcgcaccatacccactaatgccagtggactgtgagacaaactggtggagttcacaacaatctcatggtacatcagaacccgcgcctgctccaaggagactatttgggcaatggattggtgttggaagatcatctccggaaaatcgatcacccgagggctcatcgtatcggcaaatgcacaccccaaggatgtagaccctcatgaagggaatttaagttaatacttaacatttgaaatctgaagttgcttgtaagaagatggaaaacccattgtatgaaattaagcccgggtcgtgccgtaagcctcgaagcaaatctgagaagaagaaacagaaaataacccggggtggacattttgatttggtttattgagttccatcacgtacatatttgaaatcaagttgggatattcggagtttcacctgtgatacagtttcgtattatgcaatttgtttaattcaaaaaaaaaaaaaaaannnnnnnnn

SEQ ID NO: 22678 - DNA, 400 bp, Oryza sativa
  Clone ID: TF_uC-osflcyp016a05b1
actgatgtcacttggtcattactcaatgagggtgtgttttagtggcatggcgttttatctgcgcgacgctgttctcctattgaacttgcgcgctcttatagcttcattttggaagcggataaaaacttatgccaagttacgaaaggcacttagttcactcgacggagcacttccagatgctacatatgatgaaatctgtgcatacgacgatgagtgtgccatctgtaggggaccaatggctcgagctaaaaagttatcctgcaaccatctatttcatctagcttgcttgcgatcatggctggaccaaggattaatggatggttactcatgtccaacttgtcgaagacccttctttctgtcatctcaagggcacacaagatctacagcagaggtaggaaac

SEQ ID NO: 22679 - DNA, 1973 bp, Oryza sativa
  Clone ID: TF_OsC260574_1
gccccccctcgagtttttttttttttttttttagcatgaaaaatctattgattgcttcagcatgacaacacaattttgaaagttgtcgttggctgatgcatctaaaaagacagtcatcgtctcaacaagttcaaacaacactcaaagaaaacgtataatgaaatcctaatatcaacaaacttcccttgccatacaagaattccaaattcacatggcagttcatcgattttataacagggatgactgcgatgcaaatttgccaccacatgaaggagcactctgagttgtccagatcgaaggagggaaagaatatgtgaaattacacctgaaacacgtgtattacaaattctgttgggattggatcagaaacaatgtcagaagctccatttttctcacagaagagaagatcatgtggtttttccaatgcctgatgcattggatctgcagacatcaccacgacaaagtggacaaaccctgtgtatctctttcaaccatttatctacgcatgttagatgaaattcatgattgcatggaagaatacggacacagtctccctcggcatattcaacaaggcaaatgtagcattgtgcagcctcctcagtttggtgttttaatgatctcctgtatacttttacaggaagacgctcgacaacctcctttggagcaggaacggacccaattgaagaaaacgatggccttgaggataaggcagcagactgttggtggatctcatccagaacctcaaaaagtgcttctgctaacataacgattcttgatatgctagctcttgtgtttgtttcttcatcagaatttcctggtcgactgctcgttctgctgcccaatctttggagagctcggacctgagatcgtatcctcctcctctcaagaaaagctgatctgcgctccagtagatcccgattattggcctctcttagagttgcagagtcggttgaagaatccaattgcagttcagaatttctctctgaattagtcctttgcatgattgctgaattttgcctggcactagcatttcctgatggccatattgccctatcgtaaagaagtgaaggggtgaataacccatctgagaatggagtcctcctaagaactctgtcacgaagacgtccaacactcaacgttcggctgaatcgaacactgccttcaaaaggttcctgaggtcccatccttctgttggaatatctcaagttagcattgtcggattctagcaaatttctcctagcctgatgggctgctctagcttgtgcggttacactatctctaagcatatccagagtcgaatcaatcccagcagttgatgcaccaccttgctgggagatgtttgcatcagaagaattgtccacatttccatggcctccatcaggattagctgaagtggagaggtccgatgagagaatggagcaggctaccgatgatcccaagctgacagctctactcaacccgaagttgacaccaaaacgtggccgtgaactgtcagaatgatttggtgactggttgacctccaccctgttgttgacggcagtggcattctgcaatacatcaacatcctgatccctgtttatatgtgatgaaggcaatgttgccccttcacctggatgagatttagggattgtgggagcatcctcttctgatttgtccatttgagcgattgaaggcaggcttccattctcctctcccttgctagactcgaacggccgccgcggcggccgtggcggtggcggtggcgaagacgccgaggaagcgtcgtcgcgcgacggcgtgccgtggccgcggaagcaggaggaggaggagctcggcagccgctgcagcaggcctctccccctccccctccccctccgctgccccttcccattccccttactcgcctcgtcgccgccggacgccgacgccgacgccgacgccgacgacgaagatgacgccgacgaggcgccggccttgctgcttccagatcccat

SEQ ID NO: 22680 - DNA, 1287 bp, Oryza sativa
  unsure (1)..(1287): unsure at all n locations
  Clone ID: TF_OsC32442_1
agggaggggaaatcacacaaaactatcggcctcctctctgtctcctccactcccccacgccaccgctcgccgccgccgccggctcagcttctcctcctcctccgccgccgccgccgccgtcctcgggtgaagcagcgcagttcggaggagggaggcggagggggtttgttcgccaacctagctcgctcgctcagctgccgagctcttcttcgctggtctttgagagatgaaattttagtgatatcagctgctagaggatagactgaagtaactttcaacaattatagaatgggtggttgctgttgttcatcgacaagatctgcatccgtcggagcaccagtttatatctatcatcaacaaaatccggcctctacaattgttgcaatagacaaaaatctggatacatccactcctgacacttaccgagcaccacctacacctttgccttatgatgttggtctagtgttgaaagataaccctgatttggagaagacaggcatcaagaggaaaattcatgaacataaggagtccttaatgatggatgataatgagtcattgcaaaaatgtgtctctgaagataagcctgatgaggaggatgtttgcccaatctgtcttgaagaatatgatgaagaaaatccccgctctatgactaaatgtgagcatcattttcatctttgctgcatacttgagtggatggagcggagtgaaacttgcccagtttgtgaccagataaccatgataaatgcgatgtatgaatagccttggtggccctggtggatcctctcttgaagctcatgcttattcagtcggtttggcagaagtcatttgatggggaagcacaatgagcaactgctctgctctcgacattggtttggtcttttttggtggaaggagtgaaattaaggagacaaatgacatgaaatgttctggccaacactgttttgtacctttgttgccaatctttggctaatttatagcaagtagcaacaggaggattaggaaaatgcttggatgcgatatacataccggtcacatgatcattcagtcattcggttcaaagtccaaacattaaaaatcagctctttttttgtttaaacttaggacgaatgttacttcacttctaatccagttagtgtctgtgtatatcatacataacataggtgaaaaagaaaaattggtcgtagtctctcagtctaggcttcatttgtataatacttctagttggacaagctcctgaatacatcccttcctatttcctataaaaaaaaaaaaaaaaagancgnccgc

SEQ ID NO: 22681 - DNA, 594 bp, Oryza sativa
  Clone ID: TF_OsC30400_3
ctagtaagattggtcttgggttggcatcgggaatctgcagagcgggcagcgatggctgaggcggagccaatccaagatgcaggtcgcatggaagcaatgcgagcagggcatcctcgtcagcttctctcccgcctcgaaatcctccaggcacacagcgcacccgcgttccctggcgtcgcttgccatcgcctcctgcagctcggccatggccttgctcgacgcggggacagcgccgaacccaccgttcctgtacgcatcctccacctccactactccatccatggcaatggcagtggcagtgccacggcgctgacgctgaagaatatgatcgcgaacctgatcaacaagctgctgcaagaagtcggcgtccagttctatgcggccccgacgaatgtcagacctcaagcgctcgcgaatgatctcatgagcttcttcctgcgttaatagcgtccgactacctgggcggtacatcaagttggtgcagtggatccggttgccgatcttgaaagtataacgggggatgccttcgaagctcaagttctcgatgggagggaaatctcttggtagtgctcttgcgaccgcggaggcatccac

SEQ ID NO: 22682 - DNA, 1198 bp, Oryza sativa; identical to SEQ ID NO: 13589
  Clone ID: TF_OsC863_1

SEQ ID NO: 22683 - DNA, 1190 bp, Oryza sativa
  Clone ID: TF_OsC863_3
atggctcaccgccggatcgcgctcgccgtcctcgtgacgctgctcttgtcggcgttccgcccttgcctggcgcaacagagcaacgacgacacgagcaaacaccaccggagcgccacggccggcgggttcacgccgaccaccgtcgtcgtgctcgtggctctcatcaccgccttcgtcctcctcaccgtgttctccgtcctcatcaaccgctgcgcccaggcgcgcgctcccccgcgccgggcgttccgcagcacggcgtcccatcagcccgtcggcggcgccgccgccgcgtcccgcgcctcgcgtggcctcgacaaggaggtcgtggaggcgttccccacggcggtctacggcgacgtgaaggcgcgcatggcggcgaagtcggggccgctcgagtgcgccgtgtgcctcgccgagttcgcggacagcgacgagctacgggtgctcccggcgtgctgtcacgtgttccacccggactgcatcgacccctggctcgccgccgccgtcacgtgcccgctctgccgcgccaacctcacggcgccaccggtgtcgctcgccgccgccgagagctccgacctgacggcgccggaggaggcggtgcaggaggaagagtcggaggagctcgacgaggcgtccctgatggccaccttcacgccggaatccgtcatcgacttcggcgcgacgcacgaccatgaattcgacagagcagggtaccctcactaccggaggacgcagtcggccatggacgccgcgccggaccggcacacgctgaggctaccggagcacgtcatgaaggagctcgccgccgaccgcaggcaccggcgcgccgcgagcctcgccgggtacccggacagcgtggagaggacgccgaggtggctgacgtcgctctggcgatcggtgtcgtggcagaggcagagccgggcggactgggacgccggagaggagcacggcggcagcaaaagggttcacccggtcgccggagctcaggacgagacacccagcgggtccggctccgatgggagcaaggagaactccgattctgacgcgttaaaccgagtttgaattttgttttctcctcttcttttttttttcttgtgcttcgttctaattgtgcagcggtgtagtaatacaaattaacgataaactaccttgcacaattttctattagcaaacaagtactctactactct

SEQ ID NO: 22684 - DNA, 1225 bp, Oryza sativa
  Clone ID: TF_OsC47750_1
tttttttttttttttttagagacaaaatctggatctctctattatgttaatcacaagggctccatgtccaagtatataaatctacaatacatacaagggggggggtatatactagtataatgcaagtatccgctacacatatgtactacgccaaaacgaatcaaggtatcaaaagaaggggagggagtaggtacacacacccacgtcagtcgggatcctcacgccgtcgccggcggcgtgccgtgcactgcacgcccttctcactaatcttttagcttaagcctaattaaccacgaacgagccaaccagatgcgagcttgggccagctcagccgacgacgacgtcgtcgacggcgacggcggcggcgaccaccgtgcgccggcacagggggcacgacgcgtgcctgagcagccagctgtcgatgcagcggaggtggaacgtgtggccgcactccggcagcctccgcgcccgctcgccgtcctccaagtcctggaggcacacggagcagccggcgcggtcgtcgccgccggcggcggcggcgaacgtggtgaccgggagcgcggcgatggcgtccgccggcatgcccgtggcggcggcggcgacgccggggatgccggtgtcgaacatctccgccagcgtcggcgcgctctccctgaagggcgcgtcggcggcgttcatctggctgtccaccgcgttctgcaccgccggatccaccttctcccgcaccagccgccccgtcaggaggctccagatcacgtcaaggacgtagagaacgctccagatcccggagtcgtgggagcaccacatggcgacggaggagtcgacgacctccatggcgaccaccgcgccggagatggccccgatcccggtgccccgcaccatgccgctctccgtcgccagcccgatcagcccgccggtgatcgcccccaggatcgtgcccactgtggcgaagacgaaggtgacgatgccgcgagctacggcgccggcgacgcgagccggcaggcgggacatgctcctgctgctgccggcgtcgtcgcggccgccggcgaccaccggaggggagtaggacgagaagctggcgtgcactgctacggcctccatggatattgttggtttgtgctggatttggataaggggaaatatcactgatcgatcgatcgagcttgctctagcagagtgcagagaagaggaggatctagctagctagctttctggtgcctcgtgc

SEQ ID NO: 22685 - DNA, 477 bp, Oryza sativa; identical to SEQ ID NO: 13595
  Clone ID: TF_OsC400246_1

SEQ ID NO: 22686 - DNA, 1909 bp, Oryza sativa
  Clone ID: TF_OsC50873_1
atggcggaagaagccgacgagacaaccgtcgccgcacgaggcatgcatgcccgtactcgctgcttctgttcgccgccgccgtgctccagcgcctagggttttcttcgccgccggcgagtgctccagctcctagggtttcttcaccgccggcgagtgctccagctcccagccctgcgcgtcctcctcgccggacgctgccggtgacgtctgggccaagctaggtctgtagtgccctccgattccgtgttcccggaggtggagctggccgaggacgacgccgtggtgtgctcccgggtcaccccggatggcggcggggaggtggtcgcgtggtgcaagattaggcgcggcggcgacgtgtcggcggcgacgatttggaatctgagcttggatgcaattattgtcgatggaagagttatccagcaagaagcagttgacatcaaaccggggagtgaaattgttccagggccccagaaagatgggtatctgttgtacacctttgatataactggcctgaatgactaggacaaaaataatatcaagattgtgctaggtattgagaatgcaaagtgcagcatatgcttaaatttgtggcatgatgttgttactgttgcttcatgcctccacaacttctgcaatggctgcttctttgagtggttaagaaggtcttcagctaattcgcgtgataaaagtcagagtgctgcctgtccacaatgtaggacggcagtgcaatcagttggtgggaatcacttcctacataatattgaagaggctatactgcaagttttttcatcgctacagcggtctgatgaggagattgcattgttggagtcatatgccccggtcaagacaaatattgtaaggcatgcattcatcccttttccatggtcttatgctggtgcgatgattcttagatccaccatggggataaacatctctcgtggttgaaagttacatttgtcatgaatttggattatcattctattttgaagatatccttgattgataaatgcactgccatgtttcagataacattttattctcttatttcccccaattttccttccatttggcaatactcgtggtgttggtttgtctgtactgcactttgacacattatatttaatttacaagacttgccaggtgcctaggaatgtctttagtattcaactttttgacaagataatagtacatggaatgaaaatctgtttacaattagtactggcctcttaataaactaattagtaaaacaataatttccccaaatggtgggctcattccgttagtcgggtacttataattgtagaatttcctttcagtgcaggttgatctagaatcatggttctctctctaagtcctattttgcttatcgaatacttgcctcttaatcagctgaaccatgttgatgcaattacttctaggacatacgtctgcaaccaatgctacagcaagatcatcgatttcctgctctactggttccgtgtatcaatgccaagaaattctataggtcctattttgcttgtcgatgatattgttaaatgttgccatggaatgttagcatctgatacatgggcttctcatctatagacatgttgtgcttgtcattacctctaaccatatcatgttatttaatttatatcacatgattgaaaatgcattttagcatgaatgactcataacgatttagaattttctaacttacaattagcaaaccatggcagcacaatatggtatttcaaattttcatttagttgcactacttgagaatgagtttagtggtttggttggattgtctaagtgcaaatgttgctgtcatttgtgggaatcaggaaaatataaaatgccatatataatatcctctatattttagttcatagagagtatagttccattcactcccaaagaaaatatg

SEQ ID NO: 22687 - DNA, 1216 bp, Oryza sativa
  Clone ID: TF_OsC105470_1
cggcgctggcatgcggggggtcacgagcgtgtcgcccacgaagcgggcggcaccgcaccgcaccgaggaggaggaggaagcccggcgaagtttcggtgggatacctgcctcgcgtcgccatcgaggagcagctatggtggtggcgagctagctcaaggtacgcacgcgcggtggaggaggaggaggaggaggaggaaggagaagaggggaggaggaggaggaggaggcagtgatggtcctgtgctccatgcgcaaatcgttcaaggactcgctcaaggtgctcgaggctgacatccagcatgccaacaccctggcctcggatttctcgagggattatgacggggcttgcctccagatgcggatgtcgtacagccccgccgcgcagttcttcctcttcctggtgcagtggacggattgtagccttgccggtgctcttggcctcctcaggattctcatttataaggtttatgtagatggaacgaccaccttgtcaactcatgaaaggaaagcgagcattagggaattctatgctgttatatttccctcactcatgcaactccacaagggtatcagcgatgtcgatgaccggaggcagaaggcaatctgtactgagagatacagaagaagagatgaggatgagagcaagaggcatgtttctgagattgatgtcgagagagaggaagagtgcgggatttgcatggagatgaataacaaggttgtcttgcccaactgcagccatgctatgtgcatgaagtgttaccgtcaatggcgctcaagatcccagtcctgccccttctgccgtgacagcctcaaaagagtaaattctggtgatctgtggatgctcacagatgaccgagatgtcattgacatggcaacgattactagagagaaccttaggcgcctgtttatgtacattgagaagctgcctcttgttgctccggacaacatcttctatgcctatgattctcataggatgttccttgtcgtaggatgtggctaacccccggacccgactgaactttgaccagagaacttgtgaattctgactagatcccatgctgtggtcagatgttgtaaatgcttgtacagatttgtaatttcccagtgtaaaaaaattagtgaggaaaaacccttgtgttcccccttgaactcctagtgtgaaattcccagtacatatatgctccttaaaaaaaaaaaaaaaaaaaaaaaaaaaaaa

SEQ ID NO: 22688 - DNA, 2328 bp, Oryza sativa
  unsure (1)..(2328): unsure at all n locations
  Clone ID: TF_OsC3910_2
gagcgacttaaaccatattcacatttattaaattcagtattgaatgtctggacagtataaatccaactatagcgtacaaacaaaaatgccagaaaaaagagggagcatactgatggttcagattgaagaatcatgttgctttttcccagatgtgctaatctgattttagtcgtagttacaacactgcatctctactcaaatgaccacattaagcaaataaatatctgatgttgataggaggcctctaacatggacatacaaatgaacgagcctaccaaaatcgaaataaagcatggncatgggagtttctcctcgggtatttgccaagtcaccatctatatatcctttgtttgttcagccctcaccttccccttactaacccaatggctcataccaagcatgtaacttgagtgcagttaaagatgtgtttacaacagacatatccagaaatttgcatgcagcctgcataagcctctctatctggctctttatagcattttcatatgccttctgcagtgaactttcaagttccctggtagttgtcactgaactaacagcaccacgtgcataaaaagtaggcgctgaaggatcggcagttgcatggccttttggcgattgattggaagtacttgcttctcctgattgtggaccatttgatgtagactgtggaggagttgaatacctgttcaaattgttcgctggaggataagcaaaggatctcccatatagggaagcagccgaagcagctgcttcaagttttgcttggcgcctgcttatgttctcacctgctgctcgttctgaacctggtgtgccattaccaggctgaactccaggatgaactccatgcggacgtgctgcagtacgcccattatctgggggcagaattggagctctacatgtagggcaagtgtgttggcgttctaaccatgacctcaaacaatggacatggaacaggtgcccacaaagcagcttttttgctgtggtcatctcctcacggcaaataatacatgtagcatcactcgcattgagctcatctgctgtggcatctggaaatctttcattcatgttggaagttatctttctgtagcgtacataatccgcgatacggattctgaagttgcgaaatgtctcatacagctcacgtatcaagtgcagtgggacaccatagttcaggaagatagctatgaagaagagcatatacaaagacaagtgtacaaggtcactgatgagctccaagtaaaatgtatacactgcctttttctcccattgaccttccattagcatgtcaccaaacgaaaaagaagattgcaacagacgccttcccgcttgtgtatgagcgacctgagccgagttggacaggaagaggcagtcgacgacgagcaggaacagcatgaaggagacgatcctggcgtgcgacagcatgggcacggagggcgtggtctcgatgtactcgaccctcttctgcgcgagccagtgcagcgccttgacgagcagcagcgcggcgaccatggcgaggaaggagacggagaagtcctgcctgaagatggtgaccgcgaagaggatctccaccacctcccgccacgcctgctcgttgagccgctccacctcggcctcccggagcgtccccaggaagagccgcttgacgagctgccaggcgacgcacatggcgacgaggcccgtgttgaggagcagcacgaagcagatcttggaggtggagaggtacaccatcgccgggtagaactgctccctgctgctgaacgcgtagtacaccgccgtcgccgtcgccatcaggctgaacgccgcgtacgtctgcagccgaatcatctccgccgccgccgccggcgatcccgccacaggtgtggtgtacgcctggaagtgcttccatgctaccgcagcagcaacagctgcttgtgccagtatgaatggcaagcttgacttgccactcctccaaaccttaaggctaagcacaccaagggccaatattgcaaggccaggtgcaacaccgaaagtaagacttacggtactcctccaaaacagaaatccaacaaggcccatggaaaataaaattccacgccgaatcatctccgccgccgccgccggcgatcccgccacaggcgatgcgattgcgagcacgatggtgatggcgggtggattctccggctctaggaggaggaggaaagattgggcggagacattgtctgcggggatttttttttgattcgtggataaagccgccgcgattttggttcgagagggtttgcggaaaaaaaaaatcttgttgttgttgttttatttatcttttcttttcggtttttgtgtttttttcct

SEQ ID NO: 22689 - DNA, 2651 bp, Oryza sativa
  Clone ID: TF_OsC59119_1
gttagttgatgttgatgtcgcccctcgtgtctctgttccagtgctggtagcgcgtcccgttaatctctcatgctcatgctcatggcagccgacgtctccattcccacgccgcctctctgctctctgctctccctccacacctactgattcttcttccccttcccttctccgctttccctgccttgcaaatccgccaaagggctcatcttagtgttcctcttgcgtgattccgagctaaaggtgccgtctttccccccaaaccaccaccattcatttagtgttctggtggggatccagtgcaacaaactgggtagtaattttgtcgcttttcggagtctgctcatttttggggttcaatctgataagaggatggctttctcttcctccgaactccgtcaggggacttttagctgatcgatgaattgctgttcaagtgaagcggttttaagttccaaagtggcgcttctgaattcactcttctcgtactatagtattgccaaaggagaattgctctaataagatgaactgtacaaaaggagggggatttccccttttgttttgcgcagtcatttgtctcatggcccaacagggggcttgcaatgtggtgctaatagcgaataacactaccttgtcatttgatgatgtcgaggcaacttttactccagaagtgaaagattcaggtgtaaatggtgcaatttacgctgtggaacctctggatgcatgtagtccattgagaaagaaagcagccaatggtcctgtttcaccatttgcactggtcatacgaggtggttgccaatttgacgataaagttagaaatgcacagaatgccggatttaaggctgtgatagtatatgatgatgaagacagtggtgtcctggtttcaagtaattttacagtggctgggagctcgtccgggatctacatatatgcggtattcctctctaaggcttcaggagaggttttgaagaaatattcaggtcaaagtgatgtagaggtgtggatactaccagtatatgaaaactcagcttggtctatcatggcaatttctttcacatcactgcttgctatggctgctgttctagctacttgtttctttgtgaggagacaccagataaggcgggacaggggaaggattcctgtaacccgggaatttcatggaatgagcagtcaattggttaaagcaatgccaagtcttatttttacaaaagtgcaagaagacaatagtacatcatcatcttgtgccatttgcttggaagactacagttttggagaaaagctaagagtgttgccttgtcgtcacaagttccatgcgacttgtgtggacatgtggttgacctcgtggaagacattctgccctgtgtgcaagcgagatgcaagtgctggaacctcaaaaccccctgcatcggagtccacccctttgctttcttctgttattcatctgtctgctgaatcaacagctttgtcttcttttcggtcaacggtggcagtatctccccctaggccaataagacgtcatccttcatcacagtccacatcccgcgcttactccatttccagtgccccccgcaattataaccttcaaagatattacactaactcaccttatattagtacgagtagaagcaatgtagatcttgcaaatatgtcatcacaatggtctcacactccgcaccaagcatccatgcattctctaagaagtggccatttgtctctaccgatcaacatcaggtatacaataccacatgtttctcgttctgactatggatctgccagcctgggtttatcccatgattcctgttctcaccatggatctccgagttattatcatagctctttgggccagcaacgttcttacctgatgcaccgcaccgagtcagggccaagcctgtctactatggtgctccagtcgccacaatagagtcagtagcagtacaatggcgaatcaggagaagtctatcagctgcggtttaactcgatcattacgtcaggcctatgtacagcattgtcttgattctgatggaagcttgtctgctgtgacatcggatcagtcgctaccaagatgctgattgatcttacgaagttcactgtttcatgagcatttgtgcaagcccctgctagatttgttcctgggagatgcaaataaaacagaaaaatcctatgcgacacaaaactggcaggttcatgcaaagttcattcatggaactatttcgtgccagccaccattgtgattcaacaaggttacttacattgtctgtacggaggggaaattggtgatcttaaatcgaagaaagacttgctgagttttgctgaagaagcaaatatccatgagtctacaaggaatagtttgactttgcgtattgtttgaggcttgtattataggtgatgactttagagttggtgtaatggtgtgtttcttttacattagttattttgtcatgcgtataaatgttacagcttagcaataatctgttagtcggtgaatgttttgtagctctctaatatttattcttttttgcgaaactttctaatacttattctgatcttggatatttgtgcaagtgtgtggggggggccccgttcttcctttcaagatcaactgtacctgaaaattctagagcatgtttacgctatgttaaaaaaaaaaaaaaaaa

SEQ ID NO: 22690 - DNA, 391 bp, Oryza sativa
  Clone ID: TF_OsC273200_1
gctgcgcggtgtgcctcaccgagttccgcgacggcgagacgctgcgcctgctgccgcggtgccgccacgcgttccaccgcggctgcatcgacacctggctccgcgcccacgtcaactgcccgctctgccgcgcgcccgtccagatcagcgacaagtccgccgccgccgccgcggcggcggcggccaacgccgcgccgggcgccgccgcggccgttcccggcggcgcgcccgcgccgaacccgcgcaacgcagctgccgccgaagccgacagaggagagctccagggctcgccggagcgcggcgtcaggcgagccgcgtcgatggtgacgctgccgaggcggccatggccggaggtctcgctccggtcgccggcgtcgaacagtgggcgcat

SEQ ID NO: 22691 - DNA, 472 bp, Oryza sativa
  unsure (1)..(472): unsure at all n locations
  Clone ID: TF_OsC359_5960
cggcggggaggagacggcggagacccacgtgtgcgccatctgcctcggcgagttcgcggacggcgagaaggtgcgcgtgctgccncggtgccggcacgggttccacgtccggtgcgtcgacgcctggctggtctcgcacggctcctgcccgacgtgccgccgccaggtgatcggcggcggcgggagcacgccgccgccggacagcgacaccatcgccgtggtcgtagcatgatgtgagagacaaaagatatactactccagtagtcttcgtagctagctgggctcctgcctggcctctttggcgccaatcccttctaaaaaatatctcgctgatcgatctgatctctccggatattttccggcgaacggctagtgactagtgactcatcagcttgttgtggcgaatgtattgacgggtgcccaattggcccaaattggtcactgtatatacacgttcaacatcgccgtcccg

SEQ ID NO: 22692 - DNA, 508 bp, Oryza sativa
  Clone ID: TF_uC-osflcyp009g02b1
gcttttcgcgcgcggcggcgaaggccgtcgtggagagcctcccgaccgtggtcgtcgacgcggcccgcggcgacacgcagtgcgcggtgttgcaggacggcatggaggccggcgagcgggccaggaggctgccctgcgcgcacctgtaccacgacggctgcatcctgccgtggctcgccatccgcaacacgtgcccgctgtgccgccatgagctgcccaccgatgaccccgagtacgagaactggaaggcgaggcgagcagccgccggcggcaatggcgatggcgacaggtacggcatcattaggcaactttcaatgattgattgaatattaataattaaaagaggaagagagattaatttgatattcaggagttaggcggcccaaaaaaggatctttttgatcgagaggggaagggaggggatcgaatcaatgtgaaattgtggcattttttttttggtacagagtgatgataatacagtgcattttcaagtcgattatggtagagt

SEQ ID NO: 22693 - DNA, 546 bp, Oryza sativa
  Clone ID: TF_OsC270054_1
gcacgaggccgtgaatcaccacaccgaacaccgccgccgccgcccatgtcgtcccacgaccccagcagcgccaccgcggcggacgccgtcgccggcgggagctaccgcgtgtgcgacacggtggtgctcgtctgcctcgccttcgcctcctccatcatcgtcttcaccgtggccgtctgcttccgccgcgccgtcaccctgcagggctacgcggcctcggcgtcggcgtcgccgtccggccgtggcggcggcgccgccgccgcacccgccgctgtcggcggcctgcgcgggctggcgccgtccgcgctcgccgcgatccccaagttcgcgtaccggaggggcgccgcgggcggcggcggcgggtgggcgcagtgcgcgatctgcctcggcgtggtgcgcgacggcgaggccgtgcggcggctgccggagtgcaagcacctgttccacgtggagtgcgtcgacatgtggctgtactcgcacgccacgtgcccgctctgccggcgagacgtcggcgccgccgccgccgcggccggcgacaaagtctag

SEQ ID NO: 22694 - DNA, 1114 bp, Oryza sativa
  Clone ID: TF_OsC52635_1
cgtgattgttagatttaggtctcccccatatccccattcccatctctctctctcgagtctcgacggcggctgctgctgcggcgtcgcctgcggtgcgatgtcgtcgtctccggcgcatgctcagcgcttctactgccaccagtgcgaccgcaccgtccccatcccgccgcccacctcccccgacgccgacgtcctctgcccgttctgcggtggaggcttcgtcgaggagcttggggaggacatcaaccccaaccccaaccccaaccctagccccttcctgccacaccaccccttcttccccttcgcctccccatccttcgacctccgcaaccctagcgacctcgcggccttcttcgggcccccctccccctccccctccccctccccagccgccaggcacttcgacccctccaacttcctccatgatcacttcaccggcctcctctctggcggcgccaccatccagatcgtcctcgagggctcctccgcctccctccccctcgggggcgccgccgccgggcccggggggatcagcctcggcgactacttcgtcggctctggcctcgagcagctcatccagcagctcgccgagaacgaccccaaccgctacggcacccctcctgccgccaagtccgccgtcgccgcgctccctgacgtcgccgtctccgccgacatgatggccgccgatggaggggcccagtgcgccgtctgcatggacgacttccacctcggagctgccgccaagcagctcccctgcaaacacgtcttccacaaggattgcatcctcccctggctcgaccttcacagctcctgccccgtttgccgcttcgagcttcccaccgatgaccctcaccacgcccacccaacccttggatctcaccgccccgccgcacccgcctctgcctctgcctctccctctccagctccaccacctaggctggctgagagaaggttcaggatatcgctgccatggcctctccgtgctgcgtttggcggccaggcggagagcagcaatcctaccaatcaggatcctgttggtggttctactgatgcttccggttctggcaacaacaatgcaactggaggtcatcgtggctacgatgatcttgactga

SEQ ID NO: 22695 - DNA, 702 bp, Oryza sativa; identical to SEQ ID NO: 13608
  Clone ID: TF_OsC359_6976

SEQ ID NO: 22696 - DNA, 2656 bp, Oryza sativa
  Clone ID: TF_OsC15014_1
cttcgaggaggaagcaacagcgtcgctccacgaaaccatcgctgcggttgcgtgctcgcgcgaagaagaggagagagaggaccaaaccctcgtctcctcctcctccggtggtggggggagaggaggcggcggcggagaggacgagccgtctactggatcggccgcccacgaggagattaagccaagtttgatcagattgttcacgtgttatggctggacatcagtataataattcccagatgtcccggatggatcatatggacaggctaaaccatgagtccgcaccttttggccaaaagttatttatgcatcctaggagtgatccagctaacggagctggatcgtctggctatgtgggtaacacaatgagatcgaatgatcttccgtcttcaagttatgctggccaagcttatggtcagcagaatagagcccccatccatgcttcatattctggtcatgcacctgctggaagctctagtggtagctatgcaccatacaatactcaacatatgcctgcttcaagctatccacacggatctgaggataatttcattccaagttcccatgtggatggcagaagggttgcattgaagagaagaaatcccatcattcatcctacagatggattcggtgttggaaattattatgctgggagttcttccaatactcagttctctcggcccatgcctccaaatcctattccacctcctgaatcctgtgttcgaatgccctcacacttgggttcgaaccactggaatgatcaccgctatgttaatcatgaaggatctcaacgggggtaccggaacccttgaagcagcagttcagaactgactacactgagtattttccctgaagatatctacttgatcgaggtcgaaggaaagagaggctagtcaatagccaaaactcatctctgcctcctccggcggagggggctaacggagcggagtcggcgggttctgtgggtataccaatttgatcgaataagaggcgatcaaccagtaattcatgagaaggttaacgtctggtgaatggaacccgattcaataattcataatctgctcatacacctcctataatctcttgaaggaatgatgcgccatacattaccaaacagatatctttttaaagccggggctagggatctcaggatatttctatgcccagttccgccgtgaatgttataagcttggcttttcataaagctattagtttagcttgtcacatttatggaagttttattcgaccttattgttgtgcttgtttttctcttatttaatcttctggtatctctcctacaagtcatagcccaatatgtcaaaggtctttacccttttccacgtaaatatttgagatccagtcgaatgattatccctgttaccatctggaaggcggatggaggaatgtgaggggaagacatgatcatagtactatccatttggaacaaagtccagctgcagcttgcccgtcaagcagcatcaatgtgccaccataccatccaaatgcaaatggtccttttggaagtgcaccagtacaacgtgacagagctcctttatctgtgcatccaagaattcttcctccagggcctgatggtagtagcatagcattcagagagaggccatactatcctgctccacagagcaccaacataagtgcacctgtgccaacgcttcctatttcttgtgacagtgcaccatttgctcatggtgggtacgcccctagatcagctcatcgtaacaacttacgcacttatcctcctccagcttttgcatcttcttccaaccctggagcagtctcccatgagccagctattcctagctatccacctgctgcccctagctatccacctgcaacctctgcagcatcatcaagtgtccagccatttcatgctgaagctgctgcacatttgaggcatccaaggcatgtatctgtagggggcagtggtagtgcaaggagtagaaggatgagggattcctatcatggttttcatcatttgatgattgaagacaataacttgggaagatcagcagctgagcggtttatgatgctggatcagttagttatccatgaatcaagagaagcattcgatcctcactgggacatgagactggacattgatgacatgagctatgaggagctgctggctttggaagaacgcataggccatgtgaacactggcctcgctgatgagaaaatttctggctgtgtgatggaggtagcctgctgcagcagtagtcatttgcaggatgatcaggacaatgaaagatgtgtaatctgcctggaggaatacaagcatgaggacacacttgggaggctgaaatgcggccacgggtttcactgcaattgcatcaagaagtggctgcaggtgaagaacacctgcccagtttgcaaagctgctgccgcagatgaaggcagctgatgaggggaccaattgatcttcccctccatttatataatgatgcagttcaaggtcaggccaaattatgcctgtctccattgctccgcaatctgtgggctcttgtgaataagttatctcggtcgatatggaattattttgtgagctattagactattataaactcaagcaaaacctatgtgcaatgtaaatctcccaagttagttaatttcgctcaaagcatccaaaaaaaaaaaaaaa

SEQ ID NO: 22697 - DNA, 851 bp, Oryza sativa
  Clone ID: TF_OsC72920_1
atggaggtcgcggccgcggaggacgcgctggaggagagcggcgtggcggtgtacctccccaggcttctcgccggcgtcatctccggcgctctcaccggcctcttcgctctcgctggggccttgaccggagcggtgaccggcgcgctggccggaagggcttcagacagcggcgtgctccggggagctggattgggggcgttcgccggagctgtgctctccattgaggtcctcgaggcttctcgtgcttattggtgctcggaccggctgggctctcatggcacatcctccatggtcagcatttcagattttggtcatgatgatctgtatgatatttttggagattgttcatccaaagggctttcacgggagtcactgaataaattaccacactatgtggtcactgaccaaacacggaactcgtttggtgaagacctctcttgcactatctgcctgcaggatattgtaaccggtgaaacggcgaggagattgccgaattgctcccacactttccaccagccttgcgtggacaaatggctcgttggccatgggtcttgccctgtatgtaggcaatgtgtgtaacaacaggagggtaaaaaaagcccggcattctgcaggctctccaacttataagagaagactagttgtgcaaatgtttgctcttttgatcgcccaccacagagtgatttatacacagtagctctgtaatatactctactcttatataggcgtatcttttacccgcgcgaaaacaggcggtaaatcagaggagttgacactgttttttacgctcagtgtcactgtaaaatggaataaaggtttctctgtaaaaaaaaaaaaaaaaaaaaaaaaaa

SEQ ID NO: 22698 - DNA, 1756 bp, Oryza sativa
  unsure (1)..(1756): unsure at all n locations
  Clone ID: TF_OsC56795_1
ggggcgccgtgcagtgcaggaagcggtggagcaacctcgccggggactacaagaagatccaggagtgggagcgcgcggcggcggcggcggcgccgccgcgggagccgtcgttctgggccatgcggaacgacgcgcggcgggagcgccggctcccggggttcttcgaccgggaggtgtacgacatactcggtgactgctagaaagaatcagtctgtaaatgccaattatctgctgaatttccactatgatccaatttctcggccacagcctagaggccccagaacatatcctacaagaagacagaggaagatcagaccatacaacaaagatttgttcctacaagcaaattttaagtttgttgtgttggatactggaagctatgaaatagaattaatggatccagataagatgctccagtgggaagatattgtatgtgtaagatattatagcccttgtgaggtgcaatgccctatttgcttggagagcccattgtgcccacagattacatcatgtggtcatatatattgctttccatgcattttacgttatttacttatgggaaaagaagattacaaaggtgaaagctggaagaagtgcccactgtgtttcatgatgatctcaacaaaggagttgtatacaatctatattactcaagtccagcattttcatgttggtgacaatgtgacatttacacttttgagccgctcaaaaaattcactcactccttctattaagaacctcactgatgaatctactatagacgaagatccttgcagtgcattctccaagttcattttgacgtctgatgtggaactttctgttagagaggcaaaaacagatcttgttaattggttgcatatggcagatttaggccttgtggatgacttggagaaacttccatacgtttctaccgctttggagcagctagaagaacggatgaaatattggagtgagtataaacttttggaatatataaagattgatcaatccactacaaattctagtgggaatggtactcaggtgactgctagaaagaatcagtctgtaaatgccaattatctgctgaatttccactatgatccaatttctcggccacagcctagaggccccagaacatatcctacaagaagacagaggaagatcagaccatacaacaaagatttgttcctacaagcaaattttaagtttgttgtgttggatactggaagctatgaaataggcgtccgggatccagataagatgctccagtgggaagatattgtatgtgtaagatattatagcccttgtgaggtgcaatgccctatttgcttggagagcccattgtgcccacagattacatcatgtggtcatatatattgctttccatgcattttacgttatttacttatgggaaaagaagattacaaaggtgaaagctggaagaagtgcccactgtgtttcatgatgatctcaacaaaggagttgtatacaatctatattactcaagtccagcattttcatgttggtgacaatgtgacatttacacttttgagccgctcaaaaaattcactcactccttctattaagaacctcactgatgaatctactatagacgaagatccttgcagtgcattctccaagttcattttgacgtctgatgtggaactttctgttagagaggcaaaaacagatcttgttaattggttgcatatggcagatntaggccttgtggatgacttggagaaacttccatacgtntctaccgctttggagcagc

SEQ ID NO: 22699 - DNA, 1688 bp, Oryza sativa
  Clone ID: TF_OsC24423_1
ctcgaggaagcaacgcctcccttgggaaaggaagagagagattttctcttcctctcgccgccgccgccgccgccgccgcggcgccggccatggcgacctccggcggcgaggacccatccggctctgcctcgtcgtccgccagcgcgctcgactccctgcccttctcctccgggaacccacgcatcgaggagacccgcggcgtcgtcctcctccaccccgaaccacccgccgcctcgtcctcgtcccttctcccggtggggaggaagccgcgggtgtgcgtgcctggcgtgcccaaccacctgacctacgccgacttcggccgcttctgcgcatcctgggcctcccacatcctcgagacgcgcatcatcaggattgatggggtggaggatcagtacggcgttcttataaaattcgacactcagagcttcacggatagcttctacatgagctttaacgggaatcggttctcatcactggagggtaatgtttgccgtgttcgttttgtggaagacgttcactacactcaattgattgagcacgcacatagctcagttacaagctcagctgaacaacctacatgcccagtatgtcttgaacgacttgaccaagatcctggaggcattcttacaacaatatgcaaccattctttccactattcgtgcatgtcaaagtgggcagactcttcgtgcccagtttgcaggtattgtcaacaagaaccagagaaatccagctgtttcagtttgtggaacatcagaaaatctttggatttgtgtaatctgtggccatgttggatgtggaaggtacaaaggtggtcatgctattgaacactggaaagaaacgcaacattgttattcacttggtccctcgtgctgcggccaactatgtgcatcgtttgattcaattagaaacagatgggaatctggttgagtacaatttctatggtgatcattcagttgatggtatgtgttcaacatgcaatggtgatgcggggatcagtgaagctctgctcgacagtaaaatggaagctattgttgaggagtacaatgatctcgtcacgtctcagcttgaaaaacaaagaaattattacgaatcactcctgctagaagtcaaagaggataatgagaaagaaattgctgctgctaccgagaaagcagtgggcataaaagtacaaaagttacaagcaaagcttgataagtgcatggaagagaccgggtttcttaatgatattcatgaaaatcttgtaaaaaacatggagatgtggagggagagaattcaaaaagtaaaagaaagggaacaagctgccattagattgaaagatgaaaaaattgagaagctggaggaggagctaagggatttgatagcccattttgagcgccaaaataccgtggcagaagcttcagagtcaatgtcaagcgatataaacggtagcacaattctctcggtaccatctgaatcatctgcaagcagcaacagcagcatcagaaattaggattgagatttgttaccgtaagctgtatttcagcatcagaaattagtctgttactggccttaccgtacattctttgctcccttattatctaataatgacagttatgtgttaccatggttatatacttgttggcttctcaaatgcatagtacaaatcaagcctttgtacagtgtgtttttctggacaaaaaaaaaaaaaa

SEQ ID NO: 22700 - DNA, 1453 bp, Oryza sativa
  Clone ID: TF_OsC158099_1
ggggtactcacaccgatgcgcgccgccgtcgccgccgccgagctgccaccgccggatcgtcgctaggtgttccgcgccgcgccgcgccgccatgttgtacccggagcggccgagccgcgtcaacgggacggccaccgtcgactgctcggcctacccgctcgactgccacccggtctgcccaggcggcagctgctacgagatcgccgagcccccgccgccgtcgccggtggtcccgcgcgtcgacgtggccgtcgacgaccaccacctccccgtacgcctcctcctcaccgtctcactcctctccgccttcctgttcatctcgctctctgtctccacgatcctgctctaccgccgccgcgtcgtcctgcgccgccggcgccgggccgcgaccgcgccgctccccggcgacgacgggttcggcgacggggatgaggaggcggggggcggcggcggggatgtgcaccacgtgtggtacatccgcacggtggggctggacgaggccaccatcacgtccatagccaccgcggagtaccgcgccggagttgggtggggaggggactgcgcggtgtgcctcggcgagttccgcgacggggagttggtccgcctcctcccgcgctgctcgcatccgttccatgcgccttgcatcgacacctggctccgcgcacacgtcaactgcccgctctgcagatccccagtcgtcgttccctccgatctccccgccacggctaccgaaggtgaggcggagggtggtgggcaagcggaagagcaccaggtgtttgatgaaatctcgctatcggaatcacgtgccgatgtctccgaggattctgacacctcttcggacactcaaagtgaggacacagcagcttcaccagaggatggtgggagggtgatgcccaagccaatacggcgctcggcgtccatggactcaccgttattcctggtggttgtgcctgaagcgcaggacgatgccatgcggggtgatcgaaaatttccgaatggtcaagagatgaagttattcagcgtgaaagagaaggatgcaacagggacgtcttcttcctcttgtcaggcagggcggtttgggattggcagatcgatgtcgagcagtgggcaggggttcttcttctcacggaatgggcgctccagtagtgctgtgttaccactatttaggaaggattcaccagatcaaggtacctcatatcagctcttccactttcctcgcttctttataagtatcagttttggagcccaaagcaagatatgggatcactatatcaacattctgatgtgtcttctcttaaagctctattccaccttccaaattctgttgtccactgactactttggttgattgagttgatgagctcgtgtaaatttgtacctcccaggttgcctgtatcatagttttgagcttgggatctagtgaatttgaaggaacaaaaaaaaaaaaaaaaaa

SEQ ID NO: 22701 - DNA, 1595 bp, Oryza sativa
  Clone ID: TF_OsC359_8020
gcgcggatggcgtcttctccggtgtcgtactggtgctaccactgcagccgcttcgtgagggtgtcgccgtccacggtcgtctgcccggagtgcgacggcggcttcctggagcagttcccgcagccgccgccgcgcggcggcggcgggagcggccggcgcggggcgatgaacccggtgatcgtgctccggggagggtccctgtccgggttcgagctctactacgacgacggctccggcgacgggctgcggccgctgcccggcgacgtgtcgcacctcctcatggggtcgggcttccaccgcctgctcgaccagttctcccggctcgaggcggcggcgccgcggccgccggcgtcgaaggcggcggtggagtcgatgccgtcggtgacggttgccgggagcggggcgcactgcgcggtgtgccaggaggcgttcgagccgggcgcctccgcgcgggagatgccgtgcaagcacgtctaccaccaggactgcatcctgccctggctctccctccgcaactcatgccccgtctgccgccgcgagctaccggcggccgcggcccccgagtcggaggcagatgcgggactaaccatctggcgactcccacgcggtggattcgccgtcgggaggttcgccggtgggccaagggagcagcttccggttgtctacactgaactggatgggggcttcagtaacggcgtcgggccgaggcgggtaacgtggccggagggcgacggccatgtcgatggcggcgaagtcgacaacagggtagttttcctcctcgagttcgtgcccgatgagatcaaagatagcgctttcgtctctcctgacagtatccggagacaccgcaggggactagccgtgcctatctccgaagtcgatatccggcgtcttgtcttgacgtatgttgtggcttctgttgttccctgtatgttgactgtggtgggatccgacaaggccttatcggctctgggcatccccagccgaagtttccttaggttcctcggagtcctgatatcaacttgttgaggtagaggtagtgggagaatcgctgcaccgctggtcgaggaccaagtagtagtcgtaactcgaccactagaagtggaaatagtgggagaatcgctgcaccgctggtcgaggaccaggtagtagtcgtaactcgaccacttttcttgagtagtccagccatggccggtgctatgagataggtcgccggtcttcgttggtaggttgggcgcgacgactctgcatttgtcgaggtcgttctcgataatgcggtgtacttgaccacaacctactcgagtgctcaattgttcctttgtagatacatgccggatgtatctctgatgatgtagatggataatctgattagatttttggcggcgacgtggtttcaaagtaatcaatcgggccaaggcctcacgatcgacaacattgaactgttgttctccgcggcggtgacgtcttgaagcttgatcgatctcgtcggatcgaatagttgatgacgatggttccgatctcgtcggaaggcaaactccggtcgggttagacctccccacagccgaagtcgtcgagtagcttgttgtcggagaatccat

SEQ ID NO: 22702 - DNA, 1378 bp, Oryza sativa
  Clone ID: TF_OsC299188_1
atggattgaacatatacacggccgtcacacatctgtctccttccctcgtctcctcagcaatgattcggtccagaaacttgcagagatcctctgctagtacttgcacagagcctcagaccgagcactgaggaagcttaacatctgcctatcttctttctagttcttcccttctttctctctgttgttgcagtcttgcagctgcgccgatttcgtgttctacgaggcaatggcatcctctgctcctgcttgggtcccctacgagccaacgagagattgctctcaagggctgtgcagcatgtactgcccccagtggtgctacttcatcttccctccgccgccgcccttcgacgtcgccggcaccagcgccgacgactcctccggccctgtcttctcccctctcgtcattgcaatcatcggcgttctggccagcgccttcctcctcgtcagctattacaccttcatctccaagtactgtggcaccgttagctccctcagggggagggtcttcggctcgagctccggtggcgctgcttatggcggcggtgccggtagcggcggccgccacggccacgggcagtcgaggagccacgagtcatggaacgtctcgccgccgagcgggctggacgagaccctgatcaacaagatcacggtgtgcaagtaccggcgcggtgatgggttcgtccacaccaccgactgctcggtctgcctcggcgagttcagtgacggggagagcctccggctgctacccaggtgcagccatgccttccaccagcaatgcatcgacacttggctcaagtcacactccaattgccccctctgccgcgccaacatcaccttcgtcaccgtcgggttggcgtcgccggagccggagggctgtgctccaggcgagactggaggtgacaatacacacgaggtggttgtggtgatggatggcttggaaaatctttgtgaagagcagcaggaggcagtgagcagggccagcactgccgatgatgatcacgatgcgaaggacgtcgcagaggggatggaggaggccaatggcgcagccgagatcagagaagaaggctcgccgccaaagaggggcgcgtcgtcgtttgatcttcaccgtgacaaccgcatgtgcatcgccgacgttctgcaggaatccatggaagacgagctgacggcagccagggagagtggcctcctcgcaggcggcgctggcacgtcaagacggtgccatggcgagaacagcaagggaaggggaggccgcagccgacgtgcattgcagctgcaggacgccatggaggctctgccggggaagagattgccctccggtgggagatcctgcttcagcagcaagagcggcaggggaaaagattcagatcatccaatgtga

SEQ ID NO: 22703 - DNA, 2628 bp, Oryza sativa
  Clone ID: TF_OsC84313_1
ccgcgtcgttttcccccgtttctctcgcattttttccccgtctggggcccgcccatcgatcccctgaccccggctcgctccgcgccttttcctcgttctggcctccccaacctttcccaacgaacccgctcgagcgcgagccttctgcttcccccagatccgaaacctcgaccgacctcgggacacaagaagagagcaccttcgctcagtcgttgcttagtgcgccatctctctgtcgcgggaacggcagggggctagtaatgccacaatccttttctctatcagcaatggggaggaggacatggcagtggcacgccattgcggcgctcggcgtcgcgtgcgcggccgccgccgccgtggccgccgataggagagccttctcggtgacctcggccgccggcggcggcgccgcggcggcggcggcggtggtggcggcgacgccggaggaagtgggcatccttcggaaggtggccaatttcttgtggcagactgatggcaactcgtaccaccacgtttggccggaaatggaattaggatggcaaatagtgctgggatcactgatcggattcttcggcgcggcattcgggagtgtgggcggcgttggaggtggtgggatctttgtgccaatgctgactttgatcattgggtttgatccaaagtcatctactgcaatatcaaaatgtatgatcatgggtgcagctgtctcaactgtctactacaatctcaagcttaaacatcctacgttggacatgccagtgattgactatgacctagccctgctgatccagcctatgctaatgcttgggatcagcattggtgttattttcaatgttttattccctgactggctggtcacagttctccttattatccttttcctaggcacatcaactaaagcttttctgaagggtgttgagacatggaagaaagagacaataatcaaaagggaggctgcaaaacgattggagcaaaccagtgaagaaccagaatatgcaccacttcctactggaccaggcgctgtagctgatgcaaaaaggccatcagatgaagcggcatcacttatgaagaacatttactggaaggagtttggccttcttgcatttgtgtggatggcattccttgttcttcaggtcacaaagaactacacagctacttgctccagttggtactggatcttaaaccttctccagctcatgttcttattcatccctaaaaaatggaaaccactcaaaattacatattcaaaatctttcacattgtatggtattaagatcccagtatcagttggagtgactatgtatgaagcgctgggcctgatgagcgggaagagagttctatcgtcaaagggaaatgaacagactacactgaaatttcaccagctctgcatatactgcttcttcggtatcactgcgggggtcgttggtggtctgctaggtctcggaggtggctttatcatgggtccactgttcttggaacttggcatcccaccccaggtttcaagtgcaacagccacctttgcaatgatgttctcatcttcaatgtctgttgttgagtactacctgttgaaccggttcccagtgccctatgctttgtactttgtcattgtggcattcatcgctgccattattggccagcatgtggtcaggaggttgatcaattggttaggacgggcatcgctcatcatcttcattttggctttcatgatctttgtcagcgcaatttctctaggattatccttggagatcactggagcaaagggtgagaagagaaccttttgtgttttcctccagggagccatggaaccatcatctctgtcacttcggctcaaagcagccatatatgatctgttcaacagtaactcattgcaaacatatgtgccattcagaatccgccatatcaacggtggcggtaacccgaggccgagacaagaggaccccggactcaccgatgccgagttcaagaaggcgatggagcagctcaacaagcaggcatataggtccttagaccctcataagatggttgaatcaaacagaggaggcagaaaccatgcaaagagtgcaagatccaagccagctccaaacaacacggaagaggagaaagcatgtaccatatgtttggagacattcctggctggggagcaggtggtggccacaccctgcaaccacatatttcaccaagagtgtatcaccccctgggtgaaggggcatggcaactgcccggtgtgccggttcgcgctatgcgagaggaacaccgtctccgacaacagccagagtggcgttggagaggttgaggtagatctggacctgctggagatgatgagggccatggaggagatcttcagccgggtcacattctcaaacttcatgccatacaactagatgaatcagcatcaggtcatgaagacatgaactgatgaacaaatggtattccagtcttaatatcatggtgtgctactcacttgcatgatattccactacgaatttcatcaagattttctacctggcaatcttgtccaactgctttgtgaaaccaggtaatgcattgcaacagtacaaacaacaggatggatgaacaactgcatatgcattagaggtcaggcagcaaaactaattgtgcgagatgtgccat

SEQ ID NO: 22704 - DNA, 1486 bp, Oryza sativa
  unsure (1)..(1486): unsure at all n locations
  Clone ID: TF_OsC170841_1
atggccggcgaccgccgcggcggcggcggcgtcgtctcggccgacggggagcgacggcgggggatccggcgcctgctgctgccccgcggcgaggggtcgtcgtcgtcctcgccgccgcagccgccgccgctgcaggcggaggaggggaggcggaaggggttcgcgtcggcggcgctgcgcgggctgggttgcacgtcggccgcggcctcgcaggcgtacgcgcccggggccggggcggccgcggcggcggccgtgcggtcgtcggcggactggcacgggcggaggcggaggagggggaaggagaagaggaaggagaggggaggaggaggagggggcggtggaggcggccacctcgtgggtggagggatcggcgccgacgtgtggtgcgcgcctgggataccgttcgccgcggaggcgtcgtccgtggactgcgtggtggcgcggcaccagatggtggggagaggccgtggcggcgacgcggagaggccgcacagagagagaccgtgcctgtccaggagggtgaccgtgcaggagcagatatcgtcgtcgttcatggactcgccgccgccgccgcacctcgacgctcgtcgcgccctacgggcgccgacctcctcccatccggccgcctccgccggatgcgcgggtaccgccactcccccgtcggcctcgaggaagagatcatgatgtttcagacaagagttctgttgggaggaatgagcatgtatgatcggtaccaggattggcgccttgatgttgataacatgacatacgaggagttgcttgagcttggagataaaataggttatgtcaacactggattgcgtgaggatgagatagttcgcaaccttaggaaggtcaaacacccagcctttgactcctcgttccggtattcaacagaaatggaaaagaaatgcagtatttgtcaagaagagtttgaagccaatgaagagatggggaggctggattgcggtcacagctaccatgtttactgcattaagcaatggctttctcagaagaacgtttgcccagtttgcaagactgccgttaccaagacttgaagtccggactccgggcaacgacgattgtatacctgggtcaaactttcaaaacatgtttgtttgtgctctgtacagtcaattacatatgttattgtataaacacatcatccattcttttgcatttgcagatagaaatgccatattgaggcatcctttatcaaatatatgttactcttaaaaaaaaaaaaaaaagcggcgccgtccgcgtcggcggctagtgtctcgggctgcctcagtcgatccttctcgggtttgttgcttgntttttanannttantannnggatgtntannnttntctttnanggtnnnnaagnantaattnatannnagnaatttantgtttnatnntntnttgtnntatattgntnttnngnnngantanttatntttttnannnttnnatntttttttttnattnntntgttg

SEQ ID NO: 22705 - DNA, 1406 bp, Oryza sativa
  Clone ID: TF_OsC16293_1
acgccgccaccgccacgggggttgggagtttctttcccctcctccaagccaagccggacgcggacgccaccgccctcgccttcacctccatttatacctccggcgagcgccgcggcggcggcgacgcacgcatccttccttcctcctcccgcaccaccggcgaccggtaaaacggagagacccgtgggcgagcttgttcgaggcggggcaccaccaccatgtcggcccccgcggcggtggagcagcggctgcaggcgctgcggcagaagctggggaggaagcagcacttcgaggaggccgtcgccgacctcgccgccgcggtccgggaccaccacgccgccgcctcccccgccctccgcgatctgatgtattctacagtttgccgtgtggcaactgtccttcagactagatatacagcacctggattctggcgtgctggtctgaacctcttcttaggtacagagaagctggtaactaatccttcagaaaaggagcaactgaagactttcattctgagggcccgggagcatcttgatgagaaagagaacgaggaatccatgccaaacaacagggaaacagatacaagatttctttttgaagggcatcttacagtgggacctgaacctccacctcctgcctggcttgttgcccagaatttagcacgagaacttagcattttagctgaaccttctggagatcaaggtgcgaacaacaacggagagtccagggctgaggagatggcacctgctgctgctataatgaatttcttaaacaccatgacagtggatggagacctagaagccgctttggaagaatctctgcagaatgtgatggcgaatcctaaggtgcctccagcttcaaaggaagtcgttgcgaatctaccagttgtaaccgtgacagaagaaatcatagctagattgggcaaagagactcagtgtgctgtttgccgggagagcttgctggtggacgacaagatgcaggagctaccgtgcaagcatcttttccaccctccatgcctcaagccatggctggacgagaacaactcctgcccgatctgccggcacgagctgaggacggacgaccatgtgtacgagagccggaaggagcgggagcgagaagaggaggaagacaggaagggcgccgcgaatgctgtcaggggtggggagttcatgtatgtctgaacatctgaatttcaaccgaacgtgattatctctctgtaacgatttcctgaaattcagagtgcactggagttgaaaattcatgtacaaacaacgtttgcttcggttcaccaccgtatcttcgttgaatgatactaccactatacagccagcttattacagcatcattgttcgttgatgtgcatgtgatgaagtacttgagttgagacatcgctaaaaaaaaaaaaa

SEQ ID NO: 22706 - DNA, 504 bp, Oryza sativa; identical to SEQ ID NO: 13621
  Clone ID: TF_OsC32442_2

SEQ ID NO: 22707 - DNA, 1460 bp, Oryza sativa
  unsure (1)..(1460): unsure at all n locations
  Clone ID: TF_OsC87299_1
ntgcccccgctccccacctcgacccgctccacctagggtttcagcccacgcgtccgtgcccgcgtccgcccacgcgtccgcccgccgcgagcccgttctcggcagcggcttcccgttgcgcgcgcgtcccatcctcgccggcgcttaggcggcatcccgactcgcccccttgaaggaggagcccttagaacttgggcacctcgatggccgacggcggcggcggcggggaggccgggtccggtggctcggcgccggtctgcagcttcgtgaggaagccgccgaagaacatccggaagcgcccgaccgcgcccgcgggctccgacgacgacgacgaagacgggtccggcgccatcgccgccgcgcgcgccaagaaggcgccgtcgtccaccagcaagctcttcttctcctccgcggacggctcgtcggagccccgccggttccagtacgagtcgtcgcggacgatccaggcctccaccgacagccgcgccaccgccacgctcgagacggagacggagttcgaccgcgacgcgcgcgccatccgcgagcggcagctcaagcaggccgaggagtccctgaagaagaacccctccgctcctgcctccagctccggctctggctccggggaggtgtacaaggggatccacggctacacggattacaaggccgggttccgccgggagcacacggtgtcgtcggagaaggccggcgggtcgcacgggccgctccgcgcgtcggcgcacatccggctctccgctcggttcgactaccagccggacatttgcaaggactacaaggagacagggtactgtggctatggcgattcctgcaagttcatgcatgacagaggggactacaagtctggatggcagatagagaaggagtgggaggaggcggagaaggcccgcaagcgccgcatcgctatgggtggggatggtagtgattacgaagcaggggaggaggatgacgatgatgatgaagaagcgttgccctttgcctgctacatttgcagggagccttttgttgatccagtggtcacgaaatgcaagcactatttctgcgagcactgtgcattaaagcatcactcgaagaataagaagtgctttgtctgcaacaaaccaacactcggcatcttcaacgcggcacaggagatccgcaagaagatggcacaagacaagaagcaatagtgcccactgacagttgaagaatgtgacttgtacgttagagagttgaagaatctaaatgatgtggaattttagatgacaaagaaaactaccaattagttttgcattctgtttatgtaacaatatctgctagcctactctcacttgctcggttcagctcagccttttgtatggcaaatgtattgcttctgtgaggatgtgaattgtgcagagcccaaatagatgaggcaaacataaaaggttcttgatttccttatcaaaaaaaaaaaaaaaaaaaaa

SEQ ID NO: 22708 - DNA, 1454 bp, Oryza sativa
  Clone ID: TF_OsC45498_1
gcgagaggaaacgacgatatataattaagttgatggaatcaatcaaaattaaaggatgcgggtagtagtgaccagtgacagttagcagcggcgaactggcgatccgtttaataagctgtctagttgggattaggaagtcaaaggaacatgtgactgacatatagatcccatcgttcacgggtccacatccgccgccgcccttctttcctcgtgttctcctccctctgcggcgccgccgttgttgccgttgtctgctcgccgccgtctcgccgcggccctcccgcctgccctttgttatgccgcctggcggcgacgacggcggcttccctccggctccccggcttctggtcccccccctcctccgcccctctcatcagtaaccgcgtcaggagaaagtttacgttggaggatccgcttccgtctagctagttgtagttgttgctggccgccggcgccggtgaggtgaggtagacggcggcgcgacagacggggcagcgggaggcggtctggacccatggcacggcgcagccccagtggaagcggtgcgtgcaggggaggtgcgccaccgcctccccggcacgcagctcctctagacacaccgcgcactcctcctcctcctccggcgtcggcctccgccccaacctcctgaaccacatccgccgccgcccttctttcctcgtgtacacctcccactgcggcgccgccgtagttgccgttgactgctcgccgccgtcactgctcgttcctgccacctgcgctttgttatgcctcttgacgacgacgacggcggattccctctggctccgcagcttctggtccagcctctccttcgcctcccgcacgttgctgtccagcgtccaccacccgggctgctgctcctcgcacgcgctcctctgctgctgcaacataattgctattccaaggagggcgattgcaaattcaatatctgatcgacgattgtcaggcacaatgacggccgccgcgtcccgcacggcgcctccccgccgccctgccggagacgtcgccgccgcgcgcactccactccgggaagcatcccggccatcagtaccatctaccgagcgatcaacctctaaccttatctacgtatgcgagcgatcacagcagaagcaacaacacaccatctgcctgactgcctctctcaatcgcttttgatcctccattatgtgtttgtgtgctgtttctatcaacagagctttcctccaatgcatttcatgttcatggcgaacaagacagggaccagccactttggagcatcctggttgtggctgccattctgcattatttgtggcacccacccacaccaactggctgccttgctgtattagacgacgaacaatccaattctgagttgtcgcagaaaccaggatagagggggaggaaaatcttgggttcataccacggaccgaatttaagatggagaaaggacacctcat

SEQ ID NO: 22709 - DNA, 1098 bp, Oryza sativa
  Clone ID: TF_OsC186358_1
atgagcttcgtgttccgggggagcagaggtgacatcgaggccggaggcttcccggggttcgccccggagcgccgcgccatgcggattcatgcgggtggtcggccggtgaacagcaacctggcttttcttgtcactgttcttatgttgttcatggtactgaactcacaccagatgtctccgaactttttggtttggctggttttgggtgtgttcctaatggccaccagcctaaggatgtacgccacatgccagcagctccaagcgcaggcgcaagctcacgctgcagctgccaacggcttccttggacacactgagctgcgggtgcatgtcccgccgaccatagctctcgccacacgaggccgtttgcagagccttaggctccaacttgcgctacttgaccgcgagttcgatgatttagattatgatgcccttagggccttggatgcagacaatagccctcatgctccttcgatgagtgaagaagaaataaatgctcttcctgtattcaaatacaaggttcaggcacatcagggaagtgcctctttccgaaaaagtgatggaccatctcaaccatctgtttcttctactgaatctggcaatgagaaaaagcaggatcgtttcaaggctgatgcaactgacaacaccctggaggatgagttgacatgcagtgtttgcttagaacaagtcgttgtgggtgatctattgagaagcctaccatgcctgcaccagtttcatgcaaactgcatcgatccatggttgcgccaacagggaacatgcccagtttgcaagcaccgtgtaagcgatgggtggcatggtgaagcagatgcttctaacatggttgtgatatttttggttgacctgtaccctgttcagtatgaactcacatacaatcctttttactctgtttccgtggggaaattggcgtattatgggtgtttaaggctgaagatcagtagaggatttaagatccaagagtagtggtctggtctctatttagtcttaagtaaaaatgatcttaactgttagtatatcacaagtaaaaaggagaaactgatttatgagttctaccatcattaaaaaaaaaaaaaaaaaaaaaaa

SEQ ID NO: 22710 - DNA, 1579 bp, Oryza sativa
  Clone ID: TF_OsC31425_1
cggcacgaggcctccggcccgaggattgatcagaaagagagacaagagaagagctagggtttcatctcatctccagccatggcgtccgccgcctccccgccgcgctccggcgacgcctccccgtcctcccctctcctcccttccccgacgtcccccgaccgccgcagcggcggcggcggaggcggaggacgcctgcttccggggctgcgcggcgcggcgcggttcctgggccgcacggggagccgccgcctgatgcgggagccgtcggtggcggtgcgggagacggcggcggagcacctcgaggagcgccagaccgactgggcctactccaagcccgtcgtcgtgctcgacgtgctctggaacctcgccttcgtcgccgtcgccgccgccgtcctcgccgcctcgctcccggagtccccctcggtgccgctccgcgtctggctcgccgggtacgtgctccagtgcctcttccacgtcctctgcgtcaccgtcgagtacaggcggcgccgggaggcgcgcggcggcggctttggggcggaccagggggctgcggctgatggggatttcaagctcagtattgtgaagcacctggagtccgcaaacacgatgttttctttcatatggtggatcattgggttctactggatatctgcaggtggccaagctttgtcccatgatgctcctcaactttactggctctccattgtgtttctggcatttgatgttttctttgtagtcttctgtgttgccttggcctgtgtgattggcattgctgtctgttgctgcctgccttgcattattgctatcttatatgctgtaactgatcaggaaggagcatctgaagaggacatcaacaacctgtccaaattcaaatttcggacaatgggtgatgcagacaagctggttgctggaattgcagcacctgtgggtggagtaatgactgagtgtggcaccaatcctcctgttgaacacttcctttctgctgaggatgctgagtgctgcatctgcttgtgtccctatgaagacggtgcggaacttcgagaactcccctgcaatcatcatttccactgtacctgcatagacaagtggcttcacataaatgcaacatgtcccctgtgcaagttcaacatcatcaagagcaaccttggtccagaagacgtctaggtttcacaggacgagcaatctgttgaaggattgatatgctccagttgcgttctttagctatgggttccttcaggtgtaagtatggggtataggtgatgcacagctggttgatcagtattcgctcctgaatgaaatgttttagcagtttcttgatgccggtagagatgtacattccttctctctaagtcaattgtgtcgcagattctcattttagccttgtaggaagtatttgaattgaggattctcatgtacgttgtgttagcaagtgttgaataaatacatggaaatgcagaggtttgtaagaagaaaaatggttgtggaattggagctttgttaacagcacatgctgtctccttaatatcagtagacgcacattctaaaaaaaaaaaaaaattaaaaaaaaaaaaaaaaaaaa

SEQ ID NO: 22711 - DNA, 693 bp, Oryza sativa
  unsure (1)..(693): unsure at all n locations
  Clone ID: TF_OsC108211_1
cggtnccggcccattcccgggttcgnacccacgccgtccgnnttctcgtctctcaatctcaccaccggtgaggcgcgcctccagnaatctcccagtagcctcaactgcctctctcggtttcntcggtntctctctcccccccagctgcagacaccacggtggncgtgccggggcgagacgtgtttgtcgtaatggcgacggtgggcgccgtggacggcgttgaagttgtgagcgcactgatcggccagtactacgacgggctggcgctggagctcgtggtgttctccctcgccatcgtcgtcctgcggtacgccgcggtgctctacgcgaaccacctggtcgacagcctgagcgagctccaggcggcggtcggcgccgggatcggcggctcgtcgtcgggaggcggcctcgactccgccgccattgcgcggctgccctgcttcgtgctccctccccgccgcggaggtagtgcggcggcggcggcggcggagtgcgcggtgtgcctgggcgccgtggaggaaggggagacggtgcgcgcgctcccctgctgcccgcacgccttccacgcccgctgcgtcgacgcctggctgcgcctgcggccgacgtgccccctgtgccgcgccgacgtgccggtgccggcgaggccgacagctccacgacgcaggcacgtgcctcgtggcacagtggagtgac

SEQ ID NO: 22712 - DNA, 733 bp, Oryza sativa
  Clone ID: TF_OsC108278_1
cggtgtaaaattaagggaccttagatgaacttattccctcaagaaatagactagtagtcacatatgggcttgtttgttagagccttttgggccttgagtgtaaaacacaactagttctatttttttaacggaacaggcccaacagtccaagataaatgaaatgaaattaacaaacaatggctgaatgagttgcgactctctttctgttgaccgataaaattacaccagcgagaaaacgctttctgtacgtactacgaatgagaaagagaaagaaaaatcgaactagaattagaatgaacaatagagatcgtcgaggtgagatttctcacccgctctcgcgtgaattcgcgtgggatcaatttgcgagcaaacgtcactccactgtgccacgaggcacgtgcctgcgtcgtggagctgtcggcctcgccggcaccggcacgtcggcgcggcacagggggcacgtcggccgcaggcgcagccaggcgtcgacgcagcgggcgtggaaggcgtgcgggcagcaggggagcgcgcgcaccgtctccccttcctccacggcgcccaggcacaccgcgcactccgccgccgccgccgccgcactaccttcgcggcggggagggagcacgaagcagggcagccgcgcaatggcggcggagtcgaggccgcctcccgacgacgagccgccgatcccggcgccgaccgccgcctggagctcgctcaggctgtcgaccaggtg

SEQ ID NO: 22713 - DNA, 2253 bp, Oryza sativa; identical to SEQ ID NO: 13628
  Clone ID: TF_OsC384049_1

SEQ ID NO: 22714 - DNA, 1789 bp, Oryza sativa
  Clone ID: TF_OsC5813_1
ggaggccaggacagcaagaccaggcctgggctgtagctagctagctagcttgtagagaaagagagagaaacactggagctttagagagagtgcgggagtccgcgcggggctgaagaggaggaggaagagctagctatcctatggtgctagctgtagctagctccgacgactgaggtgaggagacgcaatggcggggagatgcgccggcggcggcgacggcggcggcgagggcatgctggcgcggctgcggagggcggcagccaggcggatcgggctctcctgcgcctccttcttctcccacgccgccacctccccttccccgcctcccaagaccatctcatgctcagcactgaatgcgcctgcagacagcactgatgaagaccaggaaaagctggaggagcccactagcacaagaatggctgacaagaatctctgtgcaatatgtctggagcccctcagcaccggcagcgttgatattgacaatggtgacaggccagcaatcttcacatcacaatgctcccactccttccacttcctatgcatcgcctccaacattcggcacggcaatgttacatgtcccatctgccgtgcacagtggtctcagctgccgcgtgacttgaaggtgccaccattgctgcagaacaaccagtctgacccaatcctccgcatccttgatgacaacatcgcgacatctcgtttcaacagaaggtcatccatccgtgctgcccggtacaacgacgatgatccggttgagccttacaccttgaccgagcatgtggatccatgccttcgcttcgctctgatcccatccccagtggcggctcaccatcatgctctcggacattacccttgtggccgtgtgatgccactgcagcagcattgccagtacagcagctcctccatgctctcaccgccacagattgcttcaccaagtgggcagaggcgcgcttacctctccgtcagtctcgcgccacagccagccatggacctagttctggttgccagccctaatgggccacatctcaggctcctgaagcaggcaatggcgctggctgtcttctccatgcgcgcaattgaccggttagccattgtcacaaatgccaccactgcaacccgcgccttccccttgcgccgaatgtcatcccatggaaagcgaatggcattgcaggtcattgaacacctctgctgtgttggtggtactgatcctgtaggggcattgcagaagggcctgaagatactagaggaccgggcgcaccagaacccaagcagttgcattcttcacctgtcagaccatccaatccgaagctgtttcggggtcgacatgaaccgtttcaacatcccggttcaccagttccatgtcggcctcggtttcggggtgcagaatggctttgtgatgcacgagtttgaggagctcttagcgcggttgcttggcggtgtcataagcgacacccagctcaggattggcgagcacggtggagtggtgaggctaggtgagctgaggggtggcgaagagaggaggatcccgcttgacctggtgtcggactgcggcttcatacttgttggctatagctatctggaaggtggaagggaggatcagttcaggacaggcgaagtcgctgtcggtttcgaagagaaaggcgataaccggtactgcggggtcagggatgccggtggtctgagtatcggcggtgagaggaggagcagctgctgcgccgagagatgggactaccttgatccgttcatggcgcggcgatgggcgaagcatttcaatgtgtatagggcctgagtt

SEQ ID NO: 22715 - DNA, 1076 bp, Oryza sativa
  Clone ID: TF_OsC158582_1
aggcgatgggcgcggtggattcctcgaggtgaggaggaggtgatgtgctcggcggcgacggcggcggcggcgcggcggcgatggaactcccgtggctggatctgcccttcacgctgctgacgctgctgctggcgacgcggctcgcctacgactactacggcgtcgtcgcggccaccttcacggggagcttctcgctccagatcttcctcttctactgcttcgcgcgctggtaccgccacaccatcgccgcccgcgccgccgcagacgccgacggggatggcggcggcggcgcggtggcggatgaggaggcggcgccgcccgtgctgatcccgctgctggagggccggggcggtggaggcgggggcgcgggcgcggcgtcgtcgctggcgaaccggtgcttcgccgtggtgttcatggtgttcgtgccgctggtcatcgtggtgttcgagcggagccaggccgacgtcgtggcgtacgcgctctgcctcgccaacatcctcgtcatggtcgtctggctctcgcccgacgccgccgcggaccccgcgtcggcggccaagtcgttcctccgcctcagcgacgacgaggacgaaggcagctgcagcggcagcggccacggcgccgccgaggacaagtgctgcgtctgcctcgccgggatgcgggaggcgcaggcgctccgcgacctcccccggtgcggtcaccgcttccacgccaagtgcatcggcaagtggctcacggcgcacccgacgtgccccgtctgccgcaccacggccgtgccgccgccggcgccgctgcccgccagcggcgaccatgccgacgacgccatcacccctgtctagctctgcacatagtctgacagacaaactcaggtaaattaatttcttgtgctattaatctgtaaaattgttgggaaatttttttcttgaagatgttgtatatagatatatagctgtatgaatgaattgcctccaatttttcatgcatcaattggaaagaatggtaagtagtagtaatctgtaaattcttttgtaacattgctctatgaagattcaagattgtgataaaaaaaaaaaaaaaaa

SEQ ID NO: 22716 - DNA, 2171 bp, Oryza sativa
  Clone ID: TF_OsC11064_1
gttctccctctcctcctcccacctcagccgccgcttaccggcggcgccgcctgctaatctgccggcgtgagcaccggcggagatgtgttactgctacccaacctataacgcagctctcccgcgcagtgcctctgtctctagctagggttttcctcttgggggagacgacctactatggtaaggtggggagctgaagccggcgacctggtgctgtccggaggaagctggagctcgtcgccgtcggatggacgccgatgaggccgcggggagtagcaggaggatggatctgaacctctaccttggcctcccacgcgccccgcgcccgcgccgctccgacctcggctccgacctcgccctcagcaccccgatgccctcctccccgtccttctccgcagcctccgtcgacgcgccgccgccaccgcccgagctgtcgcatcccccgtactccccctctcacgccgacctttcccctccgctgcaggaggtctactccctgtacaaccccgacgacccgcctgcttccgagacgcacctgccgccgtatgcgccgcctccggctccggtggtctcggagctccctgacgacctcgagtttggcctccaccccccgccgccgctggtgcgtgccagcgaactgctaggttgggaggaccggccgtcttcgtcgacggcatcgtcctctttcctccctgacaccgcagcccgttactggcggcttctcgagcagactggaagcagatggctccgtgcgaggcggtttaggtcggaccttccgccactcagttctgaagcttacccagctgggcgtgatgctgccgcagtcccagtgctgcagcatgaaccgatgaatgatactgttgaacataataaggtagctgccgatggcgcggaagtaggcgcctccgaggaatcggaggagcagggcaggagcgctgccacatttgagtgtaatatatgcttcgatatggccagcgagccggtggtcacctcttgtggccatctcttctgctggccttgcttgtaccaatggctcaatgtttattccaatcacaaggaatgcccagtctgcaaaggcgaggtgactgaggcgaatattactccgatctatgggagagggaattcatgtttggatgccgagaaggctgtggaaggtgggaaacaaacaggtcctactatcccaccaagaccacatggaaatcggctcgaaagcttcaggcagcagtttcaccatttgcgaccgatctcaagaaggcttggtgaggctcatgggttattgtcatcatggaggcgccttctggaccaacagattatgaatactgcgagtaggtttgaaggtccgcctgaatcagctgtgcaggaaatggttgacactgctcacgctcagcacaccagtcgcctaagtagattggcgtcaaggatgagagcaagacggttgctgagagaagcagacaaccctaaccctcccgatggcggatccacttcccctgacagtggtttgatcagaaacaatgcatcggatccatccagaaatggtccgagctcattattaccagatggaattgactggttgcgtggacttacccttcttgggtatgaagacacggaaagatttgcatctgccatgagtgattttagaaggataactggaccaagccaatatggtgcatcggcttcatcatcgaatcctccaaatctcgagtcaacatttgacagaactcatgttgttgcagcaccttctgcagaccaagcatctaactcaagcactgctgcagtgatacagggggatgctggtatctctgagagtgcaggagaaccaagtaacgcggggtcatcaagatccctgaggaggagagggaggagcagtgccctgggttctttggatgctgatggcgggggcctccaacggaacaagaggcgaaggataaactgaacattctgtgttgtggtgttgatctaaactctgcatgccatgctcgctgattttcaactattgcatttcatttcttcgggtgatgtctcctgtgttgtagtgtaacattttttcttctcttttcattttcccccgtaggttgcactgaaatgtttatctgtttagttctcatgtagcctgtacctgtttaatttatggaaagttagttgatcaagaaacctcgtgccgatcctgcagcccg

SEQ ID NO: 22717 - DNA, 954 bp, Oryza sativa
  Clone ID: TF_OsC137168_1
atgtcgtcgacggcggcgggcggcgcgccggggccggcggcgcagcgtcatggcggcggcggcggtggaggggggtgctgcagctcaggcgtgacgctggagctcgtcggcgcgttcacggcggtgtgcctggtgctgtacggggtgatactctacttcaactacctgtacgtgcggtggagcggccgcgacggcgtgcaccggacttcgggcggcggcggcggcggagggcgtggagcggcggcgaggaagaggggcggcggcggcggcctcgacaaggcggcgctggcggccattccggtgttcaggttcaaggcgtcggcgtcggcggcggcgctcggcggcggcgaggcggagtgcgcggtgtgcctgagcggcatgcaggacggcgacgcggtgcgcgcgctgcccgggtgcggccacgccttccacgccggctgcgtcgacgcctggctccgcgcccacggcacctgccccgtttgccgcgcgcgccccgccgtgccgcctcctccgccggcgaaaccaccctgcctgaaggcgccggagcccgccgccgccgccgccggccggcagccggtcgacctggagagccatgtatagcactaagctaatcaagacggttagttaattttagccatgtataaaatctagttagctcctactcctactactacatgttccttaattagttttttttttttttttttgcgttcttgaaatccaacgccattttcgtcaataatccagcaacgccattgttcccattgagatgaacaatgcctatgtccaatgtcttggcactctgtaaatcactttttgttattttgctgtaatttttttcccctggtttttgccaactttgaagcacaacgactgtgcaaaaaaaaaaaaaaaaaaaaaaaaaaaaaaaaaaaaaaaagggggggggcctcgtccgaattcctgcagcccggg

SEQ ID NO: 22718 - DNA, 2632 bp, Oryza sativa
  Clone ID: TF_OsC25552_1
atggatgccgcagctcttcagtatgagacgttctcgtcgtctcctccgctccgctcgttgcgccgccgccaagacgagcaggggagggccgggcggcgatctccatccggcgagcagcggaggggaggggatcctgtttgtttgaataactcttcagtatgagaaccagaagctggtgcagcaattggaggcacagaagtccgaaatgcgtgcagtgtaagaccagttcaaggtgaagagatatgagaaaagttcttacgatcatgtatttattagtttgaattaaacgtgaaatcagctgattgatgatttattgctacttaggagtacgagatgctggggatattaattgatgtggctctgcgcttggatcattcagcgatgtcagaagtaattctttgcgtcaaagactccttaggtgtacagttggctagaagtgaatttttatcataagctttaaatggacagaactccagtgaagacgttattgtggcccttgaaaaccataatgattacttgaaagaagtggttgacaatttacgtcaagctgtgtctatcatcaacaggaagcacgaaaagtatctggatgagattgaggctttcaaaaacaatcaatcaagagaactacatgaagtaaagtgtctttcaggtgagctagaggaaagcatggcagagcttgaggaaagccgtcgaaagttggctgttctccagttgcaaacgggtggaggctcactgatgaacacatctgctcctaacggtgtgaacggtagtgtttcaactgataaatcttcagacaagggtatgggctggcgagatctgaaagatgctgttgaggaggctaagactcttgctgcaaaccgcctatttgaactccatgagactcaagaggataatctgatactatccaagcagttggaagatattcaggatcaattaaaagatgagaactatattgttacatcaaaaccatatacgattctcagtgaccagttacaccatctgaatgctgagatagagcgatacagggggttagttgaagtgctacaggccaaaattgaggacctggaacatgaaatccagaaacttatggctgaaaagaatgatcttgagatcaaggctgaggaagccttgcaagattcagggaaaaaagacttcaaggacgagattcatgttatggctgcatcgtgctacagaatgaaaggaaccagctcctgccaaaggaagaaaaaatgcttgcaaaggcagaatcagtggacgctgttcaacaatccattaccacttacaaggccaaaattgaggacctggaacatgaaatccagaaacttatggctgaaaagaatgaatcttgagatcaaggggctgaggaagcctgggcaagattcagggtcaaaaagacaacaaggagaagatccatcttgtgagcgagccactcactaaagagaaggaattgtaggacattctattgaatagatccaagaatgcggctactgaaccacttgtgcttcgtgagaaagctgactatttaagaaattagcaatctaagaagaaaggggcacaatggatgcaatctgataagaacttatgaaacttaacgagtcaaaaagaattaaaaacgctgaattagatggccgtctatctgaaattgagactataggtcaaacataataagatatgcaaacactaaatcagcaccatcttaaacaggttgctgatagagatgattttaacataaagctagtatcagatagtgtaaagatgaagcaagcctatggttcccttcttgctgaaaagaatatgctacagaagcaacttcagcatgtcaacagttcactggagtcatctaaactaaaaatcaccagtggtgaagagcagatgaagacctatgtagcacaagctatgaaatcttcttcagagaataggcatcttgcaattagccttgaaaggactatgctggaggtatcagatgcagagaaggagctcaagtggcttcggtccgctactggatctgctgagaaagaatatgagataaatcagaaaaaaatagctgagctaaaaatggagctagagcgtgagagaaatgagaggataaagcttgaggaagaatacgaagaggtgaaaaacgaagtcagtgagctaacctcagaaactgaagagactactatacagaagctccaagatgaaataaaagaatgcaaggctattctcaagtgtggggtgtgcttcgaccggccgaaagaggtcgtgatcaccaaatgcttccacttattctgctcgccatgtatccagaggaaccttgagatccgccaccgcaaatgcccaggttgtggcaccccctttggacagagtgacgttcgggaggtgaagatctgaagcgtcagcaaaacagcttgaatgactgacttggtagcgagcatgtaaatatatagtagtagtgctagtttctgttttcttggaggacagatattagatcgaattgtcttggtgtgcctctgccaagactgccatgtagaaactattattattatcacctaaaaatagtgcaattgcggggatctgatactgactgtgtctgttttgcgtgttgtatcattaatttatctgttaattgaggtaccggctaaagttgttttac

SEQ ID NO: 22719 - DNA, 1380 bp, Oryza sativa; identical to SEQ ID NO: 13640
  Clone ID: TF_OsC25552_2

SEQ ID NO: 22720 - DNA, 1469 bp, Oryza sativa
  Clone ID: TF_OsC29049_1
atggcctcatggccgacatcatgtaccaaggtgtacgagatcattcagttttcgcgctgcaaggaggaggcgagcgcaacatcaagcatcatcgaccacaggacggccaaagtcggcagacgagatgacggcccgaacatgtcaaaggtgctaagagctacaatacctgagaattcagttagtggatcatcagttcgaggaaagctgcgagaaatggagatggacttggcagtcgagcagtacggcagtataggtgcgtcctccatattaagtactctctccgtcccagaatatagcaacctagcatgggatgagacctatcctaagaccatgttatctgctctctctgcaacaaagaacaggatgtacaacaggattgctccaattgtggggcatgcttgggtaaatatttctgcgcaaaatgcaacttttatgatgacgatgcaagttgtgctaaatatgcattcctgtgacggagtaatgaaatatgagccctttttgataaatctcaccatcacattttacagaactggtggtgcagagaacttctttcactgtgacaaatgcggatgctgctacagctatgtgctgaaggattcccatcattgtgtggaaagagcaatgcaccataactgccctgtatgcttcgagtatctatttgactcaacaaaagacatcagtgcactgcactgcggacacacgatccatctggaatgcctatacgagatgagatcccatcaacaattctcttgcccggtctgcctgaggtctgcttgtgacatgtcccatgcatggcaaaagcttgatcaagagaacaccatccaaataactcttcactcaggttgcagcatcgccgatgccagtgatctatcagaagaaaatgatatggatcctatgcaacgactgtgggacgacatcgaacgtgcaattccacatattgggacacaagtgccccggatgcagctcttacaacacccggcagacaagagccgcccctgctgccgcgtgctccagagtctgaattctgaagaacagtgagatgagagctagtctgaactccgaagaacagcgagagatttgcactgctctctgcagtctgaaatgcccaataaaaagatttgcagcctgtgattagtctcaaagcccatcaaaacgcaaacaaccgtttgttctgaaatttgggctcgtccatggtttgttccccctagtaggccggtctggtgctaatctggcccagcgttgtgctttaggcggatttcgactttgcttgcctgctgggccttggccgcaagcgccagtcaggactctgcatcgagatgatttttatcattaccgtgatttttatcgcgttgtgctttcgccggtgaggtatttctcgcaaagaaaaaggaactaacgaaatgtgctcgtcgttcattggcatgccggtgcttacgagattgaaataaagaagtagcggtatgatcatc

SEQ ID NO: 22721 - DNA, 297 bp, Oryza sativa
  Clone ID: TF_LIB3433-011-Q6-K1-F4
gcgtccacgcgtccggccgccgccgcgttcatcggcgcgctgcccacggtcgatgtgtcctagcccgccacggcctgcgccatctgcaaggacgacctccccctcgctgcccccgcccggaggctcccctgcggccacctctaccactccgaatgcatcgtgcagtggctggagatgcgcaactcctgccccgtctgccgctcccgcctcccgtccgacgagccccaggacgcggcggcgccgtctgacccgggccccgcgcccatgcggatcacgatcaggctcagcaccaaccga

SEQ ID NO: 22722 - DNA, 1974 bp, Oryza sativa
  Clone ID: TF_OsC13046_1
gcacgaggctttatatgtattaactattaaaatgccagggtgtgatccagtctcgcgtttttttggttttttttttttttttttttttttttttgtttattaaaaatgtaaaccacttcatatgattaaatgaattaaaaattggcattttaatagttaatacatataaaaggatatcagctatggtaacacacaaaataatttaatgttagcaaacttacttatttacatggctgaggcgcacaaagaatgaaacaacttaattgggtctaaatactaacaaatttgaggaccatattgttgtttgtcctcgcgtgtcctatgcagcagccgacttgcaaattgggcatgagttcttctccttcaaccacttcttgacgcagtcggtgtggaagtcgtgattgcatttcagtattcccagcaaactgttgtctttgtattcctccagacaaattgcacatttcccatcatcttgatcattttgctgttcatcagaactgcaatagatcacttctctcacacaacctgagattttctcgtccaccaagcctgtgcagacattaccaatagattctcccaaagccagcaggtcctcataactcatattgtcaatgtccagtctcatggccctgtgggggtcttgtgcttctcttgattcgcggagagcaaattgttgcatcattatcaattgctgtgcatcaatcatcaaaggctgaataccatagtatgagcttctcgcccttctgttccttccgctgttagcatgccctatgagtacattccttgcatgtctagaagatgcaacagctctgacaggtaatggctgactggccctcatgggtgttgaggtagttgcagaggtagcaggttggtagctcggaatgatcacctcatggggaatcgctgtagagctagaggatgctacagaaggcagatgaatgtagctaggaacagtgtcaccatgaacatgcctaggtgcaaagacaccactggcaaatattgcactgcttgaagagccttgtaaagttgggacaggaacagatgagttgctgcttcccatagtgtaaggcatttctccagagtgcattccagaggcacctacataatcatttaaatacatgtgcaagctctggtcattccaattaattgggccaacacttggaggcatttgacgatgcaaggactcagaaaatggagctggctgtggataattagagaactgggtacttgatgagctaccggcacaataaccatcaccattgatgctatactctggataaatgacaggattttttcgtttcactgcagcagttctgttgtcgatttgggaactccctcgagcaaattctccctcagatctatgtggataagttataacaggttcagtttgaggattgtaggatacatggccaccagagcttccagcaggatagtgaacataggagttatgtaaggttcctgtgtttttaactctatgacctgaatattgtgccactcgacttgaagatggaagatcattcgatctaattgccacattcccatggtatgaagggccaattttaagggctgcatcatttccagcatgcacaaataacttctgacctaaaggcagaggttggttgagttgctcattattgggttgaaccatctctggcagtagggaatggtttccatggtgtctagccataaaacagtcagtccagtatgcctgtccttaacctgctcacaagtcgtcgttcgctcgctcgatcgatcgatcgatccaccgatccaaaccccacgcgaccgaataaatttccaagggagtagatagatagagggggaaaggaaggaggcgcccgcgatacggaagcttcggggagaagataggaggagacgcgacgcacgcggccacagttttctcctaaaattaaaattctctctctctctctctctcgtagagtatttgtctgtgcggtgtggagcggacgcggg

SEQ ID NO: 22723 - DNA, 1248 bp, Oryza sativa; identical to SEQ ID NO: 13644
  Clone ID: TF_OsC159094_1

SEQ ID NO: 22724 - DNA, 906 bp, Oryza sativa; identical to SEQ ID NO: 13648
  Clone ID: TF_OsC336525_1

SEQ ID NO: 22725 - DNA, 459 bp, Oryza sativa
  Clone ID: TF_OsC336525_2
ttacttcatctcctccgatcctgacacgccgccgcacgccggtggtccaccgacgtcttccatccacgactcctccttcgtgtcaggcccatcgtcgtctcgaccggcgctggccacggtgatcactgtcaccgtctccgacgacgcggcggcggcggcggcctgcgccgtctgcaccgacgccctccagctcgcgtcgccggcgtccaggctcccgtgcggccacctgtaccacgcccactgcatcgcgcagtggctgtcgctgcgaaacacctgcccggtctgccgccgcagcgtcccgatgcgtactgaggagaccgcgccgccatggtcgccgccgacggagaccgaccaagaggccgtgccatcgccgccgccgacgacgacgaggcggttgatctgattgttgttgaatgttgcgtaatgttgttgttgctgctgctgctggactctggccat

SEQ ID NO: 22726 - DNA, 1345 bp, Oryza sativa
  Clone ID: TF_OsC62541_1
gcacgaggccccgcttacttcccgcttaccccccagtgctccctgagcttgctcacacacgttccgaaaaacaccggaggaatattccccacctcgcctctctccagccaccgacatggccgccgccgccgccgccgccgcttccgcctcctcctcgtcgtcgtcctcctcctcggccgaatccgtccccctccccaccacgactctccccatcgacaaggcggcggctgtaggcggcggtggcgaccgggcggtggattgcggggtgtgcgcgatttgcctggataagatcgccctgcaggagacggccctcgtcaagggatgcgaccacgcctactgtgtgacgtgcattctgaggtgggcgtcctacaaacagacgcctcaatgcccacagtgcaaacatccgtttgatttcctcagcgtgcaccgctctctcgatggctgtattcatgactacatgttcgaggaaagcgtttgccttctcctgagggccacttggtttgaacctctgatcgtagaggctcacgaagaggctctggatgaagaagagttataccacatctatcaatatgatgatggcgttgaagatgaccttgacgaggaagcttattacatgagcaggtctccgagcattcgaattggcaacaggaggtggggtgacaatggatatgtcagaggaggcaggaaagaggcaaggccagtgagtcgccagtccttgaatgacactgatgctggtccatccaggactcccaagaagaaagatgtatcagcatcgggatcaggttctgtgtctaaggaagttgcaggaagacgagcaaaacgagctctgaagcgtgaagctgctgataaggcagctgcagaaaagcacttgaagcacctccagaggttgggcctcaggaaggcacccgaagcaacagctgaagcaactccagaggttgaacctcagctgaacgagtgattttcaccaacttctgtagataatggtgctgtgaagaaaactgcagcccttgggtcacccgaataatcttccattgtgaaggactggagcgtggccttgtatcgttggcaaacttgccgatttgtacagtactttagtttcacaaattactcgtagcattgaactgcacatcagtctgcaccagatgcggcgatgcaatgcggtttacctcaatctgataatactttcagttaccgggattcctttgcatgatgcagaggaccctgaactaggagaatgtcagttgctagctttgctagtattttgtgctgcaatgtatcagtttagatagaatgttgcatgtgactatcctccgataaatgaaatgaggaaactggtttttttgcc

SEQ ID NO: 22727 - DNA, 1146 bp, Oryza sativa
  Clone ID: TF_OsC271396_1
agcccggctgcacgccctgggcgccaggcgcaaggaaacgaagcgcggtttccgtagcgccgccgccgccttcgccgccgcgggcaccactcccattaagaccggatcagctctctctctctctctctctctctctctctctctgtccgttgcgctcgtctcctcctctcgccgcgccgccgccccccgcccccacgatcgacgactcgccgcgccgccgccgccgccgccgccaacgcatgcaggcaagatgaagttcggtgcaatatatgaagagtatcttcgggaacagcaagacaaatacctaacaaagtgctcacatgtggagtacaaacgtctcaaaaaggtactgaagaaatgtcgagttggtcgctcattgcaagaagactgccccaatggtgaccagcaggaggggaacaacgaatctccagatatttgcaaatgcaattcatgcacattgtgtgatcaaatgttctttacagaacttactaaggaggcttcagaaatagctggctgtttcagctctagagtacaacgtctcctaaatcttcatgtcccttcaggatttctacgctatatttggcgtgtaaggcaatgtttcatagatgatcaacaaatcatggttcaagaaggcagaatgttacttaattatgtaaccatgaatgctaatcgctatccgtaaaattctgaagaagtatgacaaaatacatggttctgtcagtggtagagatttcaagagcaagatgcaaactgatcatattgaactgttgcagtccccttggctgatagaactgggtgctttccatctaaactgcaatagttcagatattgatgaaactgtggggttccttaagaatgagttcttcaagaatttttcctgtgatttgaccgaagcacgaccactaatgactatggctatttctgaaactatgaagtatgagtacagcctaacttgtccaatttgcttggatactttgttcaacccatatgcacttagctgtggccatctcttttgcaaaggctgtgcttgtggagctgcttctgtgtacatctttcaaggtgtcaagtctgcacctcctgaggcgaagtgtcctgtatgccgatcggatggtgtctttgctcatgctgtgcatatgactgaacttg

SEQ ID NO: 22728 - DNA, 1946 bp, Oryza sativa
  Clone ID: TF_OsC23902_1
cttcttcccaagtaaaaccccaagaagcggctattacttctctcccctgttcttcttcctccacattcccatttcctaaaaaaaaaatccccaaatctccacatgattcctccgtaattcggcgcgccctctcatggcgtccctcgccgaattccccctcccggtgatctctccgacttgctggagctatcggtagcgggaggaatcaatcaatcaatcccccacgctgggtggttcttgagcaagaacggctcgtcgccgtgccgatcgatcacgtcggccgccggggaaatcctctggggatttgtgggtggttttgggctaaagattccgtttctttcgagcccttttggtctcgggtggatccgcttagctttggttcttttgctggttggggggcatggcggcggagtcgtcggctgctgctgctgcgggcgggggcgagaggaggggcccgatggatctgaacctgtatctcggcctccctccgctgccgccgcctccgggaaggctggatgtcgccgccgattacccgtcgctgctgctgaactccgccgccacggtggcgaacgagcaaaggggctcggtggtggtggcggcaccgcctccggcggcggcggcgtactcgccgtcgaacgcgctgtcagcgccggagcaggtgctggtagatcctgttgcagcgtggcttgttgatcccggtgagcagcagccggtgccgccgctcgagacgccatcgtacatggccagggcctcgtcgacgctgccacagatttttgcttgtgcagcgttggaaatgcttgtgcagaccggtggagcaatcccacctactggtcttataaggggagcagagattgctgctgcaagccgccctatgacgccggagaatcggctgcggaggttgatccaggtgagcgatcaacacggcgtcgggaatgggagggcggggactgggccagtgagccgcagccgacgggcgaatagcccggaagccgataatctggcgcgggccatccagaggtctcataattctcttgaggcatcaaggaggcagatgcttgatggtgatggcagtgatgccaccaagaaggatgacggttgcggatgcaacggcagcttcgaatgcaatatctgctttgaatcagctaaagatcctgtggttaccccttgtggccacctcttctgctggccttgcatataccagtggcttcatggacattcagagcactctgattgccctgtctgcaagggcgaggtgctcgaagtaaacgtcacaccgatttatggaagaggaggtggcgaggagaactcctccagaaatgatatccaaatccctcccaggccgagtgcgcagaggaccgagagcttgaggcagcagctgcaaaggccagacacaagaggaggcattgcaaacatggtgaggcggttgatgcaaaaccaagatatagtggtaggccaggcggcttcatctgcaccccggccaaggggtaggggtcgaaggcaggcaaaacaagatgcgccttctgcaccagcaacacagcagcaggtggtcaatgctgatgctgggagtggcaatcaggctcctttgccacctcctgatgctaatggtgctgcaccggctgctgctgtcgctccccaacagtcatcatctgtggagcaagcgtcgacttctagcaccgtgggtgttatagcgggagggccagcacaaggtaggaggtcaagagtttctgaatccacccctgcaaggaggacaaggaggaggcatcagtaggtaacttagagttgttactgtaatagaacatatacaccatgtttccttgtaaccttgatcatatttaggctcatcccaaaattatgtagaattgtggatgaaatcttttcttttatttaccttgtatccaccattttaccttaggcaaaggaataaagatttcgatttcaatatattt

SEQ ID NO: 22729 - DNA, 3311 bp, Oryza sativa
  Clone ID: TF_OsC138281_1
tttttttttttttttttttttttttactgaaaattctcccattataaaacccttaattgggttcaacgagcttagagagtgcttaacaacttcatctcaaaacaggagcttaattaacaagcattgctgtctgtggccatggccatacacccagaataggggagctgagatgaatcgattgggtcagtaacagagctaactcatggcagctttgtcaccatgagtggcaagccgaacccgggttcaatggtcagcctgaacgccggcgagtgacggtacctcggcgacggcgagaaggcgaactttgtcagcagcctggccaacaccaccttcagctccgccattgccaggttctgcccgatgcacgtcctgggcccgtgcccgaacggcacgtacatgtgcgccgccctgcacgccgccgccacgccgttcgcgaaccggtccggccggaactcgtcggcgtcggcgccccaggcttccttgtccaggtgcagcatcagcctgggcacctgcacgatggtgccgcgaggcacctcgatgttgccaagcttcacgtccgtcagggcctcctgcatcatcaccgacgccggcgggtacagccgaagcgtctcctggatcaccatcgtcacctccattgcctcagagtgcgtggcgagtagcatcaggcaccagatggcggtgaccgccgtgctctcgtgacctccgaagtagatggtcttacagtttccgacgataaagtcctcagcctctgcagcgctgcgaccatcctgcgcaccatcaatgatggcgttgacaagactgttgtgtgagtcttggtagtggtgttgttcctttgcgacatccaggatcagtaagcggacttgttcatccagcatctgtatttcttggttgctcttggttggcaggtatttccacagtgcagacagaccaacaaacgaatcttgctgagcaattactttttggagctgcctaagcttgcaaaatatttcttctccttttgtgaagctactcccaaagcaagccctggcaattacatctgctgacaagttccgcaagtaatcatcgacaactatttccctacaccctcccacatcgtcaatcatatcctcccatgcttctaacactgtaacagttgcatcctcaatcagctggatcatacccttaatcttatccatgaagaactctggtgcaattatcttcctctgataggcccattcatcaccattctctgtaaataaacctcctccaaagagggccttgcgagatttctttagataattaggcttaccaagctctgatggtgtccaccggcctatatccttcaccatatctgggtgagaaacttgtagtatctccagagctccagttgagtatagaaacactgggccataagtttcccgacagaggagaaagtgtgggaagagggtggagatgaagttgttggtgccttgcttctgtgaaaatttgagttcttgtcggattcttttgatctcctttgtgttgccgtacagaaaagtaggcttgggaccccttatgccttgcctcctcaacttcttccttatcttcacagccctcagccataggatgttgcacaagtagaacagagctaagctctccactggacactgggtagaattctgacagaagcaaactggagcagcagcaataaaaagccatccactgcgcctgcgtgcactgtttggttgctcatcaacacgaacattgtgttcacttgtattagtctcttcgatcacaccagcagccatctgacgagttacctggacctcttgttcatcagaaatttcttccacaacctgaatgtctcttacattggttgtggcttgcttggacctttcatactctgcatcatctgtaggaagctcatatcggcagacaggacatgtatttctagaactaagccatggcaagatgcacgatgaatgataaagatgcatgcatggtagctgttttgctctagctctggtaggaattgggtctttgcagactggacaaataacatcaccatttgtctgatggcttgcagagataatcacggaggggagattttcaataaaggatgtcgctgctggtggagctcctcttctggaatcgttgtcctcagcaaattgctcaaggagcatctcaaactgccttgcatcaacatagtcatctggattcccgacaaaagttgtcctcatttctggctcttccatgtcatctagcaagttggtcacatttgctctttgacgtacactcacactccaattccatacaccatcttcagattcgtcctcactcaatccacttagctgaatatcatgtgattgctgctggtgctgggtcatggtgttgactatttcatcaaaaccagactcttccacatcttcctggtcatctgaatcccactgatccagtctagcattcatgggatcaatatcagtatctgtgttcatgtagctgtcattgtcaagttgaatggaaatcctcctccttgtcatcacgctatgttcctctatggaggtatctgaatctccaccatagtcaccaagactgatggcagattcaatttcaccaaacacagaatcaacataattaaggccatcgctctcatcatctgaagcatgccatctttgagattggcttggtgttgaattaaacgatgcatgttgcggcgcgaccgacgaagaatcaatatccgtttcacgaccttgtcttcttgctaagtcgatcagctgagaaaactcctgcaagaatgcgtcctccaggaaatcaatgcttgcagtcctggatatctgcctcctccgtgtgttctgccgataagtgctggttatttcatctctttcatcatcattgagtactgtcatcttgcagtccctgcatatggctaaagcttcaaaggtatcggtcacctgagcatccaaagtaaacggccttgtgcaaactaggcactgcacatctggttggccggcaaattgatggtcagacatggatatcccgacactgaagttggtcagcagtgcaccattggattggatgtgatagccttgtcaagcgttgctgcagcagagtagaggaagcatccccctcaggatcccttaaaatcaagagaaatgggatactagtcggggatggcagtagatttgggggcggcctaaactagggctcgtggtcgttggcaggagaggagggaaccaactgcagtctgcagcgatcgattgatgaaggtgacgccaatcgaatcagtggagcaacgccaaatacgggaagcaatggaattttgagattttggggattgatcctgcagcccgggg

SEQ ID NO: 22730 - DNA, 2393 bp, Oryza sativa
  Clone ID: TF_OsC11987_1
ttcgaagaaattggttacaacttccaacttcccaaccccgggccaggacccttgccacctccaaagggggacaactttttttttttttttttttaggaaatgcccaattgcaattgaatgttattgaataaattttaaacttcaaatctaggtttaaacaaaagggaaaaagaaactccaggtctacaaccatcgcctttctggtaaagtaccatgtaccaccctatagtataaattccacctgtatgttggatcttggaaggtgtaacatgccttataaccaaccactcggtctaaagaggcttatccgctttcctcgcaggcggaagcacgcaaaattaagtgcccagtcctgtctttttacagatagggcacagattttttataaccagccattgtttgatgcatgcggtgtggaagtcatgcccacagtctagtctgcccatgtcctcaccttcggcatattcttcctggcaaatacagcatggttcaacaccagttagaggttcttcaatcggtatgctcacatatttccattgcttcaaaccagtcctaattttatcctcactaagtccagtgtttacatacccaatgcgttcaccaagtgccaacaattcctcatatgacatattatccacatcaagccgcatgtcacgatgtctgtcaattaaactggcacgccttgcaaaaagtgcacgttcaaaattaggatcctcaaaccttccacctcttccctgacgaatttgttcaacaacattgcgaagatgcacaagttgattggcagactctgagactgtcctaattccgtctcttgaagcagcaatgctttgcataaaagactgcaggtccaagtaattcgagttttgcctatctacagagtgaggaacagccctgacataatgctgctgattggcacgagagctggatccaggttgatggcttcgaatctcatgtgatgtggatgaatgcccacgttgctgctgtgatgtaatgcttgaacctctggactgaggaacgctagcagcctgcaaggatctcctaacaatatcaaccgaaccccttgagcttgaagtaggctgggatgcatttaacccagcaatctgttgagctcctatatttacagcagttcgaattgtggagctggaattttgttggttgcttctgcctcccggcatagatagcaattctgccgagtcagaaggaaacagagaagaacctaacagaaggggctcaggaaaattgcctctcaccgagctcctgttgggatcttgtgaagataactggtttgttgtatcagcagaactaggaaaaatccctattctcgaaccaaaattgccacttgatggagcacggtgcaaattttgtgagaattgagtgacagcaggcacataaggccgactaagagaacttgttgaagagctcgatgctctaggttgtactggaataaacaaagactgttgctgagtaggctgataaacagaacacctgagacttccttcaggcaagagattggacgatgattgatcatactcattagggcttgttctcatccgggtattcctcagaaatctctcacgctcatgatcaccatatagtgaataatgatcagacaacatagcatttgcagacatattggtattctggtttagctgttccacaggagagtatgaaaaaacatggtttgtaggggcaggtgcagttaaaccagaagtgctttcatgactggatggagaaggttccagtataatattatttcgctgattattacgtgaactaccattggcagaagactctgcaagactcccatcaatattctttctcttgcaagatgaacgatgcccaccaaacaggttaacttcttggcctgtcattccatcagaaaagcttgcaacctgtgaaggatttcctgtagcactggaagaatttgtatggcgcagaacatgctcaggaatggaaaggcccctgttgagaggaaaagcgtttatccctggttgtccattactctgaatcatatcaacatcctcagaatcaaactgatcagcctgattaagattaaggtctaagtttaagctctgtgaaggcaatgaactactgccttcatgtcttctccctccaataattaagggagctcggatagacaaagcaggagcaaaatgttcccttttggcctcaaaaagactatcatgatcagctacacagcccatcgagctagatccagctgaatcccataagttcaagcttgtattttgctgaccaatcacgcttccatttggcatttccacctcatgactaccaagtaaataatgtgggtaatcatcatcctctagagtatttggaagtaaattctgttcatctgcggtggggttgctgggcagtaaattctgctgatccat

SEQ ID NO: 22731 - DNA, 1271 bp, Oryza sativa
  unsure (1)..(1271): unsure at all n locations
  Clone ID: TF_OsC192138_1
atggctcgccgcgacggcgtcggcggcgacggcggcgcgtcggcggcggagcagcagcggagagtagcgctgcgtgtgctgctgtcccgtgcggaggcttcctcgccgccgccggcgacggtggaggaggaggcgcagcgggggaggagcggtggtggtaacaaggggctcgcgtcggcggcgctgcgcgggctcgggtgcacgtcgacggcggcgctgcgtgcccacgcgccggcttcggcggtggaggtggcgagtagctcggagcggtggcacgggaggcggcggcggaggaaggtgcaggagaggcggagcgcgaggggcggcggcggaggaggaggaggaggcgtggcgccgcccggccccgcgccggcggcggccggggacgtgtggtgcacgtgcgctcccgggataccgttcgccgccgaggcgtcgtcggtggactgcgtcgtggtggcgcgccaccaccacgcccaccacacggcggcggcgatgggctccggccgccgcggggaggcggagcggcgccacagagagaggccggccgctcctcgagctcgaagggtgaccatgcgtgagcacatatcctcgtcgctcatggactcgccgccgttccccgacatgccgctcctcaacgccgacctgctaccaccaccaccctccggccgccaccgccatggataccgccacccccacgtcggcgccgccgaggaagagatcatgatgttaagaacacggctattatggggaagattcggtatgcatgatcagcaccaggattggcgactcgacgttgacaacatgacatatgaggagctgctggatcttgaagacagaattgggtatgtaagcacagggttgcatgacgatgaaatcgctcgcagccttaggatggtcaagtattcagcattcaaccccaagcattttgcaacagaagtagaaaggaattgcagtatttgtcaggaagaatttgaagcaaatgaggaaacagggaggctgatctgtggccacagctatcatgtgcaatgcataaagcagtggctttctaggaagaacacctgccctgtctgcaaaactgttgtatcgaagacatgaaatccaatcagtccctaagcacacttgaactgaaaattgtgaaaaggacttactctttcacagtgtttgtttgtgattgtacagctctgtttgtacatgatgctttgtgtaagcacaagcctgaancaaaccatctcattggcatatagaaatttacatgttttcagtttacccca

SEQ ID NO: 22732 - DNA, 2354 bp, Oryza sativa
  Clone ID: TF_OsC260254_1
ctcgagttttttttttttttttttttttttttttttttttcttttttttttttttttttttttggaatagtagcatactattcgcatatgcattttttcctcgatatgtagattgaatttgaatttgatttttgggtgaatcgatagatatcaccgtacaactatttgtatcaaatttagaagaaaaatatacataagggatatccctcagtgattagaatccactcccgagttaacgtgcacacataataagatgcacgtattgtattgtccgttgcctgatgaaaacgaccccacgctagctttgcttgttccgcagacatcgtcctgatgatctgtgctatgaaaaatgtaatactccatctatcactaatcacttaccctaatctatttcccaaagcttccagtgtcagaaaagctatatggactctggagtagtactatgcgagtgagtgtattgaaatgtttggagtacatcaatcacgcttcgaatgaagcaaagaaaattcgagagagcaaaaattgtctacagagcagtaacatttgtgacatgtgaacctgtgtcatcgagcgtgcgcggcgaggggcacggcctccgcgagcggcgtggccatcggcgacggcagcggcgagtcgcggcacaccgggcaggtggcgctcacccgcagccaccgctccgcgcactccgcgtggaaccggtgcccgcagccgtgccctcgccggagcgcgtcgcctgctacgaactccccgaggcagatggcgcactgcgcccccgcgcacgcgtcgtcgtcgtcaccgacgccgacgtgtaggagcttggggtagagcgcgtcgatggccgggccgtcgaggcctagcaccacgacggcggacgctgccggggcgccgccgccgtcgtcgtcggcgaggagcacggcagctgctccagccttggcccgaacgcagatgtaggaggcgagcatgacggtggagatgaagacgaggacgccgacggcgatggcgatgccgtagccgaggcacacagcgccgccgacgtccgctgcggtgggcgcgaaggaggcggcgtcgggcgaagatgcgggcgcgagggcgaaggagatggacgcgtgcattcgtagcagcagcgtgggcaaatcaaatgggatagatggagactgcggctgcagtgaagtggagcttgcagctggatagtggcacgaacgagctgcgatgcgtgcggcgtatgagttgaaaatggcgtgacaaaatttaaggcggagcacggccgccaccctgttggttcctaggccagccatcgccacgcgcaccgccatgccgagccccaccgaccccctcggcatcggcggcgcctcgagcgccacccacccgccccagcctctgccgtcaccgccacggccggtggcgccggaccacctccagaaggagagctccaccgcgtggctggctactacgtacaggtggtcaccgacgccgcacgcccccacgacacagccgccgccggggagcgcacgggggcgcgcccaggtgccggacgcgacgtgcagcgcgtccaccgacccggcgcacacgtgcgcctcgagcgcccgcgcgccctcgccggacaccgcgacgcccccggcgacgtagaacacgcctcccgcactcgcgccggcgcacccctacctccgccgcggcgcctcgccgaccacgcgccacgcgtcgacctccgggtcgtactcctcgaccgccgcggtgcgcgcggacccgccggcgacgtagatccggtctcccacggcggccgcggcgaacttcttccgcgggaagagcgtcggcgcgcacgcgcgggccgcgccggtgagcgcgtcgacgcgcagcgtcgccccgcggccgatgaggaagacatcccggcccagcacgaccgcgcgggcgtgcgcgaacacggagccgccgcaatgcagcagggtcgggggcaacggcagcgcggcgacctcgagcacgggcacggaggcgtcgaaccggagcagcgcctgcgcggcgcagccgttgtcggagacggagagggcgaggagggaggggcggaggtgggcgtgggcgcggcggaggtggaggaaggcgtcggaggcgaggagcgtggcgaagcggcgggagacggcggggagcggagggagggaggcgcgggggacgcgggcgaggcactcgaggaggaggtcgtcggggagggcggagattgggggtgccggcggcgacgagggaggcggcggttgcggggtggggcaaagaacggggacggcgatgtggcgggcggggtcggcggggatgcaggacttgacgagccacgagaggctgcgggagtggcagctctcggcggcgggcat

SEQ ID NO: 22733 - DNA, 966 bp, Oryza sativa; identical to SEQ ID NO: 13657
  Clone ID: TF_OsC281408_1

SEQ ID NO: 22734 - DNA, 1051 bp, Oryza sativa
  Clone ID: TF_OsC9428_1
gcggcacgaggctccccctttgctttccacgactctctttcgccgcagtctctgcttccgtgcatccatcggcgttcggcgactcggtgtatagtagtattgccaactgtgcgtagcaagctcgatacagcggcgatcatggggttccctctggtgtgctactgcatggcgatccccaagccgctcatcgccttggccaagctcctcgccgccatcagggaggccctccagctgatgctcttcgtcgtcgggatctgccaccacccggagcgatcgggccgcccggctgccgtcgacgccccgctgcccgacgaggtgaaggaccgcctcccgcccctcgagttcgcccagctgctcgcggcctcggagcacggctgtcatggctgcgacgacgacgaggcggtggcggggtgcatcgtgtgcctggagaggctggaggcggatgacgtggtgcggcggctgggcaactgcgcgcacgcgttccaccgcggctgcatcgaccggtggatcgacctcggccggttgacgtgcccgctgtgccgctccaccctgctgccgcgcgcgcgccccgccgccggcccgcgcgggcgactgggccgcctcgccacccgcctcacgggcgtcgtttggtgaatcaatatttggcccgcgcgaccgcgacgcgacacgggatcggttgggtgggagggcagtcgcgccatttcacagcctaagctagcttactgctgctgttaatcaacggagacaaagctctctttccctttcgtttcctttttctttttctgccgaggattatccagctggaggagagtggtacgtgtcggaatgcggtggaatatatcgatgattagacggtaggaacaattaattagaagcaggcaagcagctggttggttggcccggcctggcacctggcatgatcattgggaggttcatgtaattactgcgatgattagatactgcatgtaagtaaatcatgtcatagagataatacacctgtgtacagtggtataatgataaacggttcatttggtaaaaaaaaaaaaaaaaa

SEQ ID NO: 22735 - DNA, 1778 bp, Oryza sativa
  Clone ID: TF_OsC20197_1
cggcgcccgggaggagaaggactccattggcgacaagctaagcttagctatagctatagctagctcagcttagcccctgccttccaaggagcgaagaaacgaggcatacatacacccatcccctcctcctcgacggctagctgctacctcgtctgatcgatcgatcgatctcctcgtcggccatggcgcagcagcagaagaagaacgcgcacgtgccgaaattcggcaactgggacaatggcggcaacgtgccgtacaccgtctacttcgagaacgcgcgcaagggcaaggtcgccgccgccggcaagatgttcaaccccaacgaccccgtcgacaacccggaggccttctcctcctccatcgccgcgccatcgccgagccgagcccctcctcctccgccgtcccaccacgagcgcgccccgagcgacgcgccgccgccgccgccgccggccccctacgccggcggctcgccgtaccaccgccacgccgctggtggtggcgagacgccgccggcaagaagaggaggcgggcggacaagcggcggcggcgggtcgtcgtacagcgtcgagcactcgccgtcgccgtcgccgctgcacccctactccgacagcgggagcggcagctacggcggcggcctcgtcgccaactcccgcgccaagggcggcggcggcggcgccccgcgcggcaacgagacaccgacgagggggtcggcggtgccgcggttcggcgactgggactcgaacccggcgtcggcggacggctacacgcacatcttcaacaaggtgagggaggagaagcagaccggccaggccgccgggaagccggcggcggggctcggcaagggcggcgccgccgccgccggccacggcaacgccgccaagcgataccacgacgacgacttcgcctccacggttattccaaatatcataagaatcatgagtactgcaagtactgcacgctctaggaagcgagcccatgatggatccagacaaaaagttgatgttataaacttggaaacaactgctccagtggtgaacactgggagccagcatgaggctctgatccttaggggtacacggacctcacccatcgatgttgaagctctagatgataaaaggaggagcagaaaaattatgaggcgctctgtggctgtagtggatccggagaaggatactggtccgggaggttatggcgttgctggagctatattttcccggggcagaaattttcagggtgctgtacatgttatatgcctttctccagatagggaagaagggaccagcaagccgaaaaatgtggcccaaaccagtacgacgcatgccaaggttgctccaaaggaaccaacctttacctgtcctgtgtgtctgaacaaactggacaagccatccacgacaaattgcggtcatatcttctgcgagaaatgcatccaggcatggctcaaggctcagaagaaatgccctacttgtaggaagagtctagggatcaagagcttccatcgtgtttacctccctactcctgctgattatgattaattagtttctgctggcctgaacctcactagtccactcctgcacattcatcttgtgtgcaaaagaacttgagcagtagttagagttagacatttagtctttgtttgttagccctgtaggctaacaatgtggtaagaagtgcacaacacgattcttagctcattgactacatctgatctgatttgtatgtaatggcgtgcatttttctcctgtgggttctgaaaaagggaaaatatctagttttccaag

SEQ ID NO: 22736 - DNA, 1755 bp, Oryza sativa
  Clone ID: TF_OsC50470_1
gcccacgcgtcctatcctctttccccttccaccgccactgcgccgcaattcgccttcgctgcgggcatctgcagcagcagaatcatgggctgaaatcgaaccactgcgcgacaagggtgccaaggataactttattgtgctgctgaaggaagacatcttattgacctgctagttctgtagatgatttttggagtgctataaatatcgaggcgcgagttcggactgcaagatacaacacaagagtgagaaaagaaaggctttagctgagttacaggatggaacaaggtcagggagatagatactggtgccaccactgcgaggaagtgatcgaacctgtggagcctgatatgaagtgtcctagctgtgacagcgggttcgtggaagagatggggtctgcaggctttgagccatcgaccaacttgaggtctgatcgtatctccctctgggcaccactgctgctcgggatgatgggaggctcatcgcggcgagcaaggcggctccgaaggcagatcatggaggatgatgacgacgacgatgacgatgaggatgatgaagatgattcagaccatgagcttgaagacttgtttaggaggcagaggaggggctcatctcttgtaaggctgctccagaccctccgggatgacttgaggggcttggatgacattggcagggatagtgacagagacagggaaagggagagaagggagagggagaggctgagggagcgggagagggagagggagaggatgagagagagggagagagaacggaggagagaaaggacagaaagcttgatactgatcaactccaacaatgaggccattattctccaaggaacatttggacctgatgacaaccaggatgactcgagcaatacaagttctggtgtttcacttggtgactactttcttggtcctggattagatatcctcttgcagcatttggcggaaagtgatcttaatcgttctggtacaccacctgccaagaaggaagctgtagaagcattgccaactgtgaacatccaggaagtgttaggctgttctgtctgtcttgaggatttcgaaatggggacagaagcgaaggagatgccttgtcaacataagttccactcccagtgcatacttccatggctggagctacacagttcttgcccaatctgtaggtttcagttgcctaccgaggagtcgaaaaacccatgtgaatcagccggtggaattgtgtcagtgaacgatgatggagatgatgctggtacaagtagtgacgtagatagtgctaaccaacctggtagtcctatattctctgctttgagtgcacttttctcaaatccatcatcctcatcctcatcctcatctgatgataatgcaccacactcttctgagagctgaagccagcgctgggcctgggcttgcaatatgtcaatggagttctgaaatgggactcctgagaggccggcatctttatatctcgtggtttctgtacatattttaaagtttaatccgctagacaagctattcgcgtttcctttatgaaacctgtgtggtttgtaatcagtttggtgcctgttatgtctaattatgtaaaataaaatttagcctcaagcatgtttacctactctcaaaaacttgatcggggccagagaactgctgatctggttagcagcttgaccaatgcaaggctacttcagtactatatatggggatatccaacattggcattttgcacggcgggggccctgcagcccgggaaaaaaaaaaa

SEQ ID NO: 22737 - DNA, 1542 bp, Oryza sativa
  Clone ID: TF_OsC29695_1
atggcgacgcctcgctccccgagcacccgcggcgacgcgctccttgactcggcgcccctgctcggcgggggcggcggcggcggcggcggccggcgccgagggggcgcgctccgccggccgtcgctccgcggcgcggcgcggctgctgcggcgcggggggcggcgggcgatgcgggagccgtcggtgctggtgcgggaggcggccgcggagcacctcgaggagcggcaggcggactgggcctactcccgccccgtcgtggcgctcgacctgctctggaacctcgctttcatcaccgtcgccgccgtcgtgctcgtgctcagccgtggcgaggactcgcccatgccgctccggacctgggtcgccggctacgccctgcagtgcgtcgtccacatggtctgcgtcgccatcgagtaccggatgcgccgggggcagcgtgacagggccccggcgtccgccgacgaggaaaggggaagtgacgggtcgtcttcatctagcgatgatgatgtcacggaggacgatcgccgtggtagctgcaccgattgcgtcagtattgcaaagcacctggagtcagctaatacaatgttctccttcatatggtggataattggattttattggatatctgctgggggtgaggatgttatccgtgatgcacctcagctttactggctttgcatagtctttctggcatttgacgtgttctttgttgtattctgtgttgctctggcttgcatcattggtattgctgtatgttgctgcctaccttgcattatagctattctctatgcggtttctgatcaggaaggagcgtcagaagatgatattcgccaaattccaagatacaaatttcggagaacagatgaacctgaaaaacaaactgctgatgagacaggaccttttggtggaataatgacagagtgtggcaccaatcaacctattgagaaagtactcgcacctgaagatgcggagtgttgcatttgcctttcggcatatgatgatggtgcagagctgcgtgaacttccttgtgggcaccatttccactgtgcctgcattgataaatggctgcatatcaacgcaacatgccccctgtgcaagttcaatatccggaaaagtggcagtagcagtggaagtgaagaagtatgattgtgtgaatatcctccggtcgagaacaccgatccatttcaacttcacacctgtctctgctaatgcaaccacaggacctgaccagtgtaaattttgtatccaaaatgtgtgattagcgtcatatatgtacttgaagtgactcaagactgctgttcatatccacatacatggttgtccaatgtgtcttttactgtccggaatatatgcttagttgccccgtgagttgtaattcttcgagtgatcctcacatttcctgcttgtgttagcatggtttgtgcttatgctcctgccttggtcattggttcagcacaaaaactgttgtaaatgggctatcggtcctgttgaattgtcaggtacaaacgaaatgcgtcctgcttatgattcaaaaaaaaaaaaaaa

SEQ ID NO: 22738 - DNA, 825 bp, Oryza sativa
  Clone ID: TF_OsC229931_1
gcacgaggggtagtagtagtagtagggctttgctctggtcttgcaagttaggttagtgattagtagcagcagaaagagtggaagatttagaggatatgttgacctgctcgtatgtcggatacagccttgtcgggcgcgccgccggcggcgaggtcggaggattcgtggagtcagcagcagagctacaacttcagcgggcgcgtgctgctcacggccgtcgtgatcctgttcgtgatcgccgtcgtcttcgccgtcacccgcgtcttgctgtactacctcgtggtgcggcccggcggtggcggcggaggccgtcgtcgtggcggcctggcaggggggatcttgcggtcgttgaactcgctcggcgtgagcggtcgccgcgggctggacgcgtccgcgctcgccgcgctgccggtcaccgcgtaccggaagaacggcggcgggggcggtggtggggagggctccaaccgcggcgggcctggcgccaccgccgccgactgcgccgtgtgtctgtcggagctcgccgacggcgagaaggtgcgggagctgcccaactgccggcacgtcttccacgtggagtgcgtcgacgcgtggctgcgctccaggaccacgtgcccgctctgccgggccgaggcggaagtacccaaggcgagggcttcggcggcggcgacggcgacggcgcagtcgtcgtcgtcgctcggtgacggaggaattaccgtggtcgtgaccatacacggcggctctgacgaagccggtggcaggtcaacggcgttgactggtcaaccgggatcctcgaactctcctagctgcgaggctgcaaggaattga

SEQ ID NO: 22739 - DNA, 1398 bp, Oryza sativa; identical to SEQ ID NO: 13664
  Clone ID: TF_OsC188649_1

SEQ ID NO: 22740 - DNA, 1571 bp, Oryza sativa
  Clone ID: TF_OsC30324_1
tcggtgacgaaggtgaaagggaagcgcgtggccgccgtcgatgttgccgacgacggttctgctcatgggactgcacagtaccctggttgcactgtggccagctcggcggcggcggcggctgtggacgtggagaaggcagctaccaggcaagttcgaacatagaaaacgaacagaagttttgagtgagaaacttgaacagttgaacttgacgtcatgcattttcccacatgaaagaaagaaatggtctttttttgtcggtgggactgtattctgtactcctatgttcgaacttgcctggtagctgccttctccacgtccacagccgccgccgccgccgagctggccacagtgcaaccagggtactgtgcagtcccatgagcagaaccgtcgtcggcaacatcgacggcggccacgcgcttccctttcaccttcgtcaccgacgacgacgaggatgatgacacttccacctgggtgctatccggcgttctcctcgacgacggggagaggaaagacagctttcctgacaaagaatttgagagaaaagatgaccatctgcccgaccgcgaaaaccgggggctgcaccgagcgcccatgccgaccccttccccgagtctcctcccgcggcgcacgctctgctcccccgccgcgaccatctccctgtgtacgtgctccggcagccgcagcgtgtaccgctctaggtcgccgtcgagccggacggcgagggagtggccagtggagtgcgaccggggaagcttcgccgccgacgtctttggccgcagccccgaccgtgaccgcatcgcgcggagctgggtgcctatcgcctgaagctctagctcctccttcctccgctcctcgtcgtcctcctcggtgaccacgtcgatcaccacggctgctgggtgcgccccgtcttcttgccgtatcacaactatttcactggaggtgctgttcggatcggcggcggcggcggccgggatgatcacctcttcggtggtgtccttgttagggtcgagattgcggcggcagacggggcaggtcacgtggctggcgagccactggccgatgcagtccgggtggaaggcgtggctgcacttgggcaggaacctgagcatctcgtcgtcctcgaactcgctgaggcacaccgcgcactccagcgcggcgccggcgaccttccccacccgcagcgccttcgcctcggcgtacttcatggtggggaacatccggaccaccgacgagtcgagcccgcgcggccgccgctgccgcctcgagacgaagctgttggcagggaggatcatggaacggctcccgccgacgccgccgccctccgtcgcggggtcgtaaccggtgcagtggcggaggtagatggtggagatcgcgatgaacaggaaaaccccgacgacggcggccagcagcacgatcatcgtcgtgctgacgtgcacctgctgcccggacacgtcgccgtaggcatacccctgctgccccgccggctgcgctccggccgtcgacgacgacgccgcgagcgcgcacgcgaggagcgccgcgagcagcgcgtgctggtgctggtgcgcgtgcat

SEQ ID NO: 22741 - DNA, 617 bp, Oryza sativa
  Clone ID: TF_OsC66084_2
gattataatagacgcaggaaataattaatagatagatgtgctgcgtatatatacactgttgatgggtggtaaaaacagcgatccgatgagaaagatggatcatgcatatacaaccaaatcggagtacgtagctagggaggtgtgttgtggtgggcggtggcggtggcggtggagaaatcgtgcagcgtgggcaggtcgacctccccgcacctccggcagcggccggggagagggaggaataatgtactagtcccgacggtggcgcggcaggaggggcaggtggcgtgggtccccagccacgtatcgatgcaggagacgtggaaggcgtggccgcagtgcggcagcaagcgtagctcctcccccccggcgaactcagccaggcagatggcgcactccgcctgctgctgctgctgcttgagtgcgaaggacacggtggggagcgcgtcgatggctttcttcttcaggcctttgggtgcaggggatgtagcagccggtgtagtagtagtggtggtggtggtggtagcggcgcctcggcggcggcaggcacagcgggccacgagggccaggccggcgacgcagatgagggcgcagaggagggaggccaggatgaccaccat

SEQ ID NO: 22742 - DNA, 618 bp, Oryza sativa; identical to SEQ ID NO: 13654
  Clone ID: TF_OsC344781_1

SEQ ID NO: 22743 - DNA, 947 bp, Oryza sativa
  Clone ID: TF_OsC306848_1
cccgggctgcaggaatcggcacgaggcccccccccctttttttttttttttttttttttttttttgggactgaaaatacacttaatgggctacttaaaataacccagccaatactactgaatactaagtataaatcaataatatgatgctgcggggctgacagcatctgcagctgaattttatatgaaatttactcaatttaattaagcagggagcaccggggcagccaccctgcaggtgttgtgagactggcaatggcagcacttgtgccctgccaccctcgcgtacacctgcgtcgtgtccctgcagtcgttgcacacgatccatccctttcccatgtaatctatgtgcagcatatttgcttcaatctcagcgtccaaagccctcaagaacttgtccatgtcaaagataggcatcgagcatatgggacaagagaacttgtcgtgcttcagcatctcgtggaagcattgcaggtgcatcgtgtgcccacatctgagcacggacgtctcccttagagagtcaaacagatactcgtaacagatggggcagttgttcttcatggagttctcgatgcagcagtgcttgtcgcgcaggctgaccgagtagcatgatcctgcagatgccgcaatcttggcagtggaagtgttccctgtcaaccagatccagcagaagcaaagcaagcagcatcggcatctcacgtcgtcgtcgaagaatttgcacgcgctgcagaagtactcgcccatgcaaacgccgcagttgtagcacacttgcgcaaccggctgttcggtgtcacagacgagacagataaccgtggactcgttgtggcaatggcggcagtggaagacgtcgttgcagcacggcgcccggatcctgcacctcctcctgtagtgcttgcatccaaatcccatcctgccgaatccgtggcgagacgcgtcgtcgagctccat

SEQ ID NO: 22744 - DNA, 1680 bp, Oryza sativa; identical to SEQ ID NO: 13655
  Clone ID: TF_OsC47408_1

SEQ ID NO: 22745 - DNA, 2638 bp, Oryza sativa
  Clone ID: TF_OsC21047_1
ttcagatggaggattgccaagatgtcgctggggctcaacctctgcgtctacgtgcccaggacgctggacgacggcgactcgccgtccaccgggtcgtccacggcggcgctggtgtcgccggtggcgtcctcgtcgtcggcggcgaccagcgccaacaccacgcccacggcggagcagagggtcaagggcgccggcgcgctcatgccgaccaccccgacgccgacctccgccggacttcgcctctccaaatccggcagcaaatccttcaagaaaacatgtgcgatatgtttgaccacaatgaagcctggtcagggccatgctctattcacagcagagtgctcacatacctttcacttccattgtatagctgcaaatgttaagcatggaagcaacaattgcccagtttgccgcaccaagtggaaggaactcccatttcgaggtcccttgcctggtgaatttcctcaaggaagtgcaaggattaatccagttaatgggcaccaaaatggcgggcagatgaccatactgcgaccacttccccgtgctcgttcttctggtcggctgcatcatatgacatcgttgttgcctgacactgaccgtagtatttttaacgatgatgaacccttggactcactgtctgaagcaaatgaaggctcgcagcaggggtgtttaagaacagtggaaataaagacatatcctgagttcactgaagttccagaaagtacttcagaaagaaattttacagtcctagttcatctaaaggcaccccttgctcagactttgcaaacaagcagcaaacttgaagatggcaatagcttgggcacaactcgagcccctgttgatctcatcacagtgcttgatgtcagtgggagcatggctggtaccaaacttgcattgctgaaaagagccatgggatttgtcattcagaaccttggctcctcagatcggctttctgtaattgccttctcatcatctgcacgtagactcttccccctccgtcggatgactgagactggtcgtcagcaaagcttgcaagctgtttattcactgacatcaaatggtgggaccaatattgctgagggcctgaggaaaggctccaaagtgattgaagatcgacaggccaagaatccagtgtgcagcatcatcctactatcagatgggcaagatacatatacagtctcaccaaccgctggtgtacacaaagcagcaccagagtactgctcactcctgccatatactagtaatggttgtcaacaggtaccagttcatgtctttggatttggtgctgaccatgattcagtctcgctgcattcaatctcacaaacctccgggggcaccttttcattcatagagacagaggctgccatccaagatgcatttgcccagtgtattggtggactcttgagtgttgttgcacaggatttgcatgtaaaggtggagagcctccaccctgatgtacactttggctcgatcagatcaggaagctattctagcagacttgcagatgacaagaggaatggctccatagatgttggtgacatgtatgccgaagaggagagggatttccttatgtcagtaaatgttcccccaggttacggtgaaacagcacttctcaaagttggctgtgtctacaaagatccactgatgaaggagactatcaatatggctgatgtgcaagtcaagatctctagaccagcattcgtctcagtacaaagcgtgtcaatcgaggtggaccgacaaaagaaccgtcttcatgcagctgaagtcatggctgaagcaaggttgtctgccgagcgtggtgacctgacacatgctgtttccttactcgaagactgccggaggatgatcatggggtcaacatcaggacaatccggtgatcggttgtgccaagcattggatgctgagctgaaggagatgcaagaaaggatggccaatcgccaaaggtacgaagcatcaggccgcgcctatgtcctctccggcttgagctcacactcatggcagagagcaactgcgcgaggtgactccacagacagcgagagcctaatccaggcctaccagacttcatccatggtcgacatgctgctgcgctcgcagacaatgagccgctcctcaacccctccacagatgaggcatgtgaagtcgtttccagcgcgcccgcagcctaggtaactgcaatttctagtgtttggcaacgccaataaggatgggttttgctaaagcctagatgtgaatttggtgaaagtagtagtgtcagttgaattcttggttttgtggcgggaggacgggacgggggtatagtttgtgtggtataagggggattttaacggtgtaaattaatttgggtgtggtgggggtaaaagggaaaaagaatctgtatttgggagaaggatggtataagagttggggaaatggggtaagatagggtggctattattttttttttccttcttgttggttacctggtatactcccagtattgtactagtagctctcctctctcctttgtgtggtgatgtacataaagagaagggtatacatttgtgaactggaatgtggttgaggatggggatggatacctaatccttttgcaaggcttggcttgcctcttcctggaaattgaaaattctgatcatggccactt

SEQ ID NO: 22746 - DNA, 834 bp, Oryza sativa
  Clone ID: TF_OsC77502_1
ggcgtcgtgcgtcgtgtgcctcggcgcgctcgaggcgcgtcaccgggtgcgcgagctcggcaactgcgcgcacgcgttccacaaggcgtgcatcgacaagtgggtcgacaagggccaggccacctgcccgctctgccgcgccgccctcctcccctccgccgacgacgccgacgccgccgccatcgccgccaccaccaggcaccacctcccctccttctgatccatgtcgccaagaacccatcttgcttagcacccaacacccccttccaccccaagagcaacaagggttccctcctcctttctccaccaatggatcaaatccaatcaaaatggaagaacacacaacacaagagaagagagatagagagagaaatcaatggaggaagaagatgagaggagagagagggggtgtgtgtggtggaggagtattattggtaggggaggcactaattatgaggaggacaaggatggctacctgcactgcattggatctggtgaatttcagccctagctagctatagatccaacatctcctcttttcccttctcttctcttctcttcacttcacttcacatcaactttttctttgcttttcttttttctactttactttcttcttttgttgccttcacctcctttttgaaattttgctttctttctctttaatttttctccctctttttccttcttttttttgagggtttcctctccccttgtcattaacttaatttgtaaggggggattaagagagagagatgtgtacatacctgcctccactttgacaaatattggaataataatttataatgatgatgatgatgatgataatatagt

SEQ ID NO: 22747 - DNA, 2192 bp, Oryza sativa
  Clone ID: TF_OsC1528_2298
atgacctcgccgggcgcctcctctttcgccgccgcgctcgtcgtcgaggacttcccgtgggtgaagagggaggaggagatggggatggacccggacaagtaccgcgaggtgttcgacctcgcgcagcgcggtgctcgcgccttccgcgacggccacttcgacgaggcagtttccttttactctaaagcacaaactttgagaccaggagatcccattatccttagcaaccgaagttctgctttctgtatgataagtcaagtgttgagggagagatcagcagctgactcagagtaccaaccattgaatggtcttgatcccacaacgcatgcggaggtagcgctcaaagatgcagagaaggtattagctatcggcagtaattctccaagaccatatcttctcaaggcatatgcgcttatcctgttaatgcttactgttggctgcttgttattgcctcctctaggtgctatgcatgacctgtacatgatattttctcccctcataagaaaactcatccttaagcagcacttcagaaaaccagaaaattgccccatctcgagtgccatcctcttctcaataagagtaaccattgaagttctaacagaagccatcacgcagcgccgccgtcgttgcatcgagctatctatggactggatgcggcggctggggatggggacgaatgatgaggacgaagtgatgggtgctagcctgctaggtttcactttcacctccctcaatgggctgcttagtattggtgacttgacttctcatgtctctctggctagtagttgtacttatgccaatgtccttcaggtgttggagcagtaccatgaggcacgggaggctattctttctgggcttcaagttgatcccctcagccatgtcctgcaaagctggctcagtgatctgcacagaaatacaagtattgcagctcgagcaagacgtccaacattagatagaccagatgattttgagtgcacattatgtttcaagctattgtttgaaccagtcaccactccatgtgggcactcattctgtcgctcttgtttacatcaatcaatggatcatggcaataaatgtcccatgtgtcggacagttctttttattggtccaaaaacatatcctataagtgtaacgctgagcaacataattcagaaaaattttccggaagaatatgctgagaggaagtcagaacatgagactatgacatatgcaggcgttgatttgatgcctctctttgttatggatgttgtactgccttgtcaaaagatggcactgaacatatttgaacctcgctacaggctcatggtaaggaggataatggaagggaatcatcgcatgggaatggttggtattgattctgctacgggtactgtagctgactgtggttgtgaggtggaaattctggagtgtgagccacttccggatggtcgtttttatctagaggtggaaggttcacggcggtttcgtatcttgcgatcatgggaccaagatgggtatagggttgctgaaattgagtggctccaagatatttcattaccagacggatcgcaggagagaaaagatctgatggaaagggctaatgcagcttcagaattggccaggacatatataaggcgagctagagaaatctcaaggcctgcgaggcgagcaagacagacagatcttgagagcatgcctggaccacaggatcctgaaaaatttagtttttggcttgtcaacttaataaatttgaggccgtcagacaggttggatctattgcgccttagtgatactcgagagagaatttctcgtagtcttagattgctgggtgatgcagaacaaatttgtcgtgtacagtaaaagatatatttgttgcacaagcataactattgtaacaagtgatttattcatcaagaggtacatactcctatgtacactgaatgatactgtagagtagagttgtcgtcatttttgatttattcaaaacaatgatttgtgcaaactcatttttgtaacttgaattgaatctgttgtattattcttgcaattgctgtgttcatgtggagcctggggacaggttgttagggatcattattgtatatatttttacattatttcatatatattcggtgcttgtacatatggcatcagttgcctagcgtatgtaattaactgatggctcttttgttttgtaaaaaaaaaaaaaaaaaaaa

SEQ ID NO: 22748 - DNA, 912 bp, Oryza sativa
  Clone ID: TF_OsC3651_2
gagacgaccaaccaaatccttgtcccgtccgttcggtcgccgcgtcgaggaggcagggagctcgcggcctcgcaccaccgccgccacccccccatgacgagcgcctccgagctcttcaccgcccgccgcgcccgcgccgcccgcctctccgaccccgatccggacccggatccgcctgcggacgcgctccatgacccgcacggcctcgccgatcgccgcggccggcgccggggctgccgcccgcgccgccagctcgacgccgccggggacgtccgccagcacctgcacaccggggccccgccctcccgccgccgcgcttcgtacaccgatcgtgtcttatcatacatagacaatagcaacattggggactctgcaactaggaggaaccgactggataggctgatgttcagaacaaatgagcggcttcctggtgctgtactgcaagcacaagcacgtgttctagagagactgagaggcatttctattggttcatctgtgtcaaggccatctatcacattggatgaattttcagctactgatgtgtttagaatcattgacttcgggaacagggatgctccatatgaagcaaataggtccagctcatcattggcccatccaagtagcgagtcagatgaagaaaggtcacccattgacaccagttccttaaaaagatcacgtgggctgagcaaggcggccttccttcggctacagatagagatttttgaggcaagcaaagatgacaacagggaggcatcaccagaatgctcgatttgccttgatggattctatgacggagatgagctcataaagctacgttgtgggcacaggtttcactcgaattgcctggagccatgggtacggaaatgtgctgattgcccatattgtcgaacaaacatacagtcacgatcctga

SEQ ID NO: 22749 - DNA, 680 bp, Oryza sativa
  Clone ID: TF_OsC264554_1
gcacgagggcgctgctcaatctcccacactgctcggcagcttagctagctcgcggctcgcttgatcacgccatttttcttcgattcgatcgatctcctggtgtgccagccatggcgagaatgctccttgaggcggccgcctccggctcggtggaggactcactcaactcggacctcgtcgtcatcctcgccgggctgctctgcgcgctcatctgcgtcctcggcctcggcctcgtcgcccggtgcgcgtgcacgcgccgctgggcgcgggccgccggcggcgggacagcggctggcggcggcggcggtggcgccgccgcggcgaacaagggcgtcaagaaggaggtgctgcggtcgctcccgaccgtgacgtacgtctccgacggcggcggcggcgaggcggaggagtgcgccatctgcctcgtggagttcgaggacgggcaggccgtgcgcgtgctgccgcagtgcgaccaccgcttccacgccgcctgcatcgacacgtggctgcgcgcgcactcgtcgtgcccgtcgtgccgccgcgtgctcgtcgccgccgagatgccccccggcgagcggtgcggccgctgcggcgcgcgctccggcggccgcggcatcggcgcgctgctcttgaattactggaaggcgccggcctgcgacgccgaggggccagagttggcgtag

SEQ ID NO: 22750 - DNA, 1321 bp, Oryza sativa
  Clone ID: TF_OsC12875_1
gtcctcaaggtaaaattaattaatgcagtatagttttaactttgtccatcgatctcaacctgtaactgtgacgacacactggctagacagaacagcaaacgtttttttttaagagtaaacatgtaatgcgttaacatcatcacgatttcaagctgattcaaggctacgtcaacaactatggagagaaggtaaggtacatggccaaacgcatggtaaatacaacagtacacaaactagataaatctaaccaatggggactatagttagttttgttgtgtatcctttggaggcagagaggccattcggtagcctaaaccagagttgtcacctgcagctgatgagctcctggtgatgcatctacatacaaacaacagtagccttggatgaacatgcgggtctaggtggtcattttgccgtgacacaattccacagcaaaatggtacacgttatgggagaactcctgttcctctgaatatattagattggaggatgctgctgctgctgccagaagttcctttggtacatccaatgagccttaactatcagagtttggaaggtaaatacggtggaaattgttcgccctcagactctttctgcaagtagggcatttcttctgaatctggatggcttgcttgatgcatgtcgtgcagaagatatggccgcaaattgttgtggagggctcctccaacttgttccaacacaccggacagttaaaaaccggttcctttgccttaggaggctcattgctagtcttcaagctggacccttctcccctttctggagagaggcagtgtataacaggtgcaaccctttgacgtttgttcccttcccggctagcatctacttccagatcaactactgccacaggctgcctcctagttctccggttccttctcggaggaggcacttgcgaagcggacaatgtctgcacttcatcatccagagcttccacatcaatgggggaggcgcgcgcaccagtggaggtcggcaccgcgcgacggcttccaaccactggggaggagatcgcgtccaggttcacaacgactttatcaccaggaccatcttgtgattgcctccttggggcacgccgagtgccgctgacagtactcatgctaactttggagctgaatcagtggcactcaactctgaaatcaacctgctcgaatcctcgatccagccgcgcggctcgatgaggaggagaccgcgatttttttcttctttttttttcttttttttttatcttgaccgcgatttatttcaatttcaacacgagtgaagagagaagaagaggagaggtcccggcccgttctcggacgcgtgg

SEQ ID NO: 22751 - DNA, 633 bp, Oryza sativa
  Clone ID: TF_OsC17688_2
ttgatgatgatgatgataaggatgatattgatgattatgataataaagatgaaaccgggggatattccccaggatgcatgggaagatgttgatcccagatgaatattcttatgaggagctggttgcattgggtgaagtagttggtacggaaagcaaaggcctctctcttgatacacttgcttcattaccttcaaaaacttatcgagcacaagataagcaagacggcaacatggaacaatgtgttatttgccgtgtggaatttgaggaaggtgaatcattggttgcacttccttgcaagcattcataccattctgaatgcataaaccaatggctgcaattaaataaggtatgccctatgtgcagtgctgaagttcctacttcacaggacacccgggcatgacatcactacatattgtagccattatgggcgtataatttaaaagaagtagcggcagcttgatactttctgtcatcggtgaaatggaagcatcaggagctggtggattgttcaggtctctgtacttgtgtgcttcctttgccatgccgctacattgggtcgtggttaagacgctcattgtcgcccatgtatgatttgattagatgtgaaatagttattacatggttgcatcattc

SEQ ID NO: 22752 - DNA, 1387 bp, Oryza sativa
  Clone ID: TF_OsC20575_1
ccgggctgcaggattcggcaatttcttcctagctcagctttcccctcttctccttctcctcctactacccaatacgactactactagttttctttcttggccatcatcatttgttcctcatcttactctagcttctccattccaaaattcaccaccgccggcgccgccatctccattccaaaatttgctctgcgtcgagtcgtgtgatcgatcgatcgatcgatcgaggtgtacgtgtgcgctgctggggaaaagggaaatggatccgtcgggcgccttcttccacgcggctccccggagcggctcgaatgtgtcgctggcgtcgctggcgaggacggccggagggaggaggatgatgcacagggtcttccgcggcgtcatcaccttcatcttcgccatagctggactgtttcttggagcggtgactggcgggctgatcgggctggccaccgagagcggcctcttccgcggcaccggcatcggcgccatcaccggcgccctcgtctccatcgaggtcgtcgactcctccatccgcgtctggcgatcccgccgatccgggatctccagcatctgctatgtgcttaatgtgatctacagcctcctgaccggcaggcttgtccgcgagaaggtcgatccggcggtgcagcgggtggtccggagccagatgaatgcagtggattcatcgcccttcagggagtcccctgacctgttcgagatcgagggcaccaacggcatgccacgggcatccatcgacaagctcccggaggtcaggatcactgaggagtacaggaggaacgccattggtgacctctcgggatgttcagtttgcctccaggatttccagacaggtgagaaggtgaggagcttgccggattgctggcacgtgttccatgtgccgtgcatcgacggctggttgatcaagcatggatcctgcccgttgtgccggaggaagctgtgagatcgacgacgacgacggccatggtgatcactgctatagttgtagcagaaggaggaggaggctgctctgctttcttgctgtgtgctgcgatcgagttgtccatcagtgttgctgttcttagagaagaagactgacatctctctctctctatatatatatagaaaacccttaatctatagagcattttgtttctgcttatattgctacatgctctatctttttggttgaactatctacatatatatctatatttctatctactcactcctttctccttatgtaacatacctctcaaaactctgaactggcttgtgctgatcatctgatgtataatatataatatataaatatatatcgccccttggacaccatcgcactagtgcccaatccctcccgcctcggccgaattcctgcagcccggggatccac

SEQ ID NO: 22753 - DNA, 708 bp, Oryza sativa; identical to SEQ ID NO: 13372
  Clone ID: TF_OsC55101_1

SEQ ID NO: 22754 - DNA, 1439 bp, Oryza sativa
  Clone ID: TF_OsC60330_1
tattttttcgccttttctgttcgtgtgttcgtggtggagttcatctcgccttcccctcttccggtcctcccaccgctcctcgccaccacaaaccgccgccgcctcctcctcacctatctgtgcggaggaggtataccacaccttgggattttggggaagcagtacgttgattggaagaaatgtcaggaggtaggcaatcatactggtgctaccaatgtagacagcgggtgaggccccgcggccaggatatggagtgtccctattgtgattccggttttgtgtctgaaatggatgatgttgatgctctcatgcgccactttgttgggatggatcctgatttccatcgtgatccaagattcggtatcatggaggcaatctctgctgtgatgaggcatggcatggcgggaacgaaccgggaagttgatgtgagaggaaggccaaacatattttctgacctggagatggagtttggctcagggccatggttgctcttccgtggccagcttcctggtcatctctcagaagacaatggttttgatgtattcatcaatggacgccgtggtgttggcatgcgcagagcaaacattgcagactactttgttggacctggactggatgatctgattgagcaattaactcagaatgatcgacgagggccgccacctgccactcaatcatcgattgatgctatgcctactgtgaagattacacagaggcatctcagtggagactcacattgccctgtctgcaaggacaagtttgagctgggatcagaagcaagggagatgccatgcaagcatttataccactctgattgcatagttccttggctggaacagcacaattcctgccctgtttgccgatatgagttgccaccacagagctctactggtgctagctgctcgcgcacaagatcaaccaaccaaagtcagagttcaagtagcaatgggagaaccaatggacgtcaaaggagaaggaatccgttctcgttcctatggcctttccgatcatcaagctctagctctcgttagattagcctggtaatctggttggagtcctcaagactgtttaatcgaagatgctcataaaatgggtgttatgcatggcatcttatcgtccaatctgtaatgtatggcttgttatgatcaccacggaatgcttttccttgcaagtatatccttccacagcttcatatcagatactaattttaaaaatctgtttacataaaaggttaacgatagtatgatacttgtttagatagctagagaaggttattttcttaatgttgtattacttaatgttctacagcagaatatacttctgtcaactgtcattaagacgtttttttagctgtaaatctcaagggatcaatggtagcaagcatgatgatataatatagaagcaagttgcctgaaatttcagttaaataagtactagtt

SEQ ID NO: 22755 - DNA, 768 bp, Oryza sativa
  Clone ID: TF_LIB4309-008-Q1-K1-B7
caatcctttgagagagagcgagagcgagagcgagaccgtgcggccgtgcagggatggagagcttcaggaggttcctgaacccgctggtgctcaacctgcagaagatggagctggagctcacctgccccgtctgcctgaagttgctcaacgcgcctaccatgctgccatgttaccacacttcctgcagcaagtgtgctactacacggaccatggacggttacagctgcgcgatttgcaaatcagcttatcgttctcaagacctaaggcctgcctctcacctcgaggcaatagtgaacatccacaggagcctaagctctacagtcagcagcatggtcactcagcaggaggctcaagctgatattcctgttgcaaagacatcatttcaaggaactccagaatcgggaaacagaaatggagcagagaaatctgatcaggtgaaatcatacaccccggttgcttctaaactggcatataaccagtcaactgggcttgcatatggaaatgtggacggcgtgaaagaaagaaatcctgcattggagactagaggtgcggctgatgtgactgctatgcccacaattcttgtgcagaagggaccctgccgatctcaatcttctgatggccctagggatctggattgcgacagcaatgaccttgaaggagagctgataacaagcagatcatctcctcaaagtgtcttgaaaagagaacccaatacagcgaatgatgataatagagaaataaaaaggcaaagtccactgatcaggatga

SEQ ID NO: 22756 - DNA, 562 bp, Oryza sativa
  Clone ID: TF_OsC2184_2
ggctgataagcaatcaatcgataatgaccttttatgccagttgatgaataaaacacatggatatacaaaatatcgggcctaaacccacaaaacagagaattagcaccgaaggcaattaaaacaaggctttacaagattgcgcaacctcccgccgataccactgtcgtctaaagatagaaacgcaaccactgttgcaggcgacttccttctgttttcttgagtctaagggcagaatattcatggaaccgaattgtcacctttatgtgatcccaaacttgcaaactggacatagtttcttcctttttagccattcgtctatgcattctttatggaacatgtgaaagcatggcaagcgggggatcgtatcaccaatagagggattatcaaggcaaactgcacacgggttttcaatatttgactggattactgactgaggcaaattattgatctggctttctgaagcaccagcatgctggggggtattttcatctaatgcaagcagggcatcataatcattttaatcaatattaggttgaatatgtgcagcagggtatctggaaag

SEQ ID NO: 22757 - DNA, 582 bp, Oryza sativa; identical to SEQ ID NO: 13381
  Clone ID: TF_OsC400245_1

SEQ ID NO: 22758 - DNA, 1509 bp, Oryza sativa
  Clone ID: TF_OsC46801_1
ccggactgcggcatcccgcgctcaccctctgtctccctgatacccacggatccacgccggcggcggtctccctctctctctacgcctctcttctccccgtcgtggcggcggcggcggcgaccggcgagggcgacgccaccgatcgggggcctctcacccgctcccctccctcactcaccggggcctcggtttcgccagctcggagggagttctttctctctctccgtagacgtctccgtgggttcttgcttgtctctgattcttcttgtggattggcggtggaggagcggggatcgatcgatctacccctggactcggattgactctcctctctcgctgggctatgagagacggaattttagttttaaacggcagctatttcatagcctggagtaagctttttcattcagattagcatggggggctgctgttgctgttcatcaagaggatctgagacagatagagcaccagttcatatctatcgtcagcaaaatcaagaggagcatgaaccattgtcttcagcctatgatggatcatctccagcttctgctatagttgctgttgacacaaatctggatacatccactcctgatacttaccgagcaccacctgcaccattgccttatgatgttagtttgccagtcccagaaaaccctgatttggagaagtcagacctgaagagcaaaaccgatgaccaacaggaggaatctttagaggtggatgagttcaaatcatgtgaaaaatgtgtcgctgaagataagcctgatgaggaggatgtttgcccaatctgtcttgaagaatatgatgcagaaaatcctcgctctttaactaaatgtgagcatcatttccatctttgttgcatacttgaatggatggagcgaagtgatacctgcccagtttgtgaccagattactttgatagatgatatgtatgaatagcattggagcatgggactattatgtttggtttgatgctagtttgttttaatgaggaagtacagtcagcaaagctcctgatctatcaacctggtcagacgggggtgctattggaatgaattttgagaaaactaagggaaaataattgaagacgggaatggcttgaaatttgttaaatatcatctcagctttttacattttgtttgaagcattaactgttcatgacaacaggaggatttgttagtatccatatctactgctggttcgattgcttcacagttgatgaaacccccagatgagctatctgtttctttgtagttttgaacttgggatgtcttccatttcatttctggttgcggttagcgtctgtataaatcatgacacgttagataggtgacagggaaaaaaaactttattctaatttatgttcaacgatcaaagctgtacaagcttcatgtatatccttcgccttttgattagtcagggactattaagtcccctgttgtgaaacaagttggctgatttatgtaaaatggtatacatttgcctgctttataaaaaaaaaaaaaaaaaa

SEQ ID NO: 22759 - DNA, 1016 bp, Oryza sativa
  Clone ID: TF_OsC82048_1
cccacgcgtccgcccacgcgtccgttcatgaataacatggaagctctgtctgaaaaagaaccacttgattcagactgggtcgtgtgtggaggcaaggtaatgcacaacatcagaaagcaactcgggaaatcattcctcttattacaagcacagcaatatgatggcacaatcctagaatgtgatgaggcttgcaatcacaagaaaaccaaccaggatgagaagcgccttcaggtacacatccgcctgctgttgttgcccaggcggtccatggcggggagcagcagcagcatgggcatgtccgccgtggaacgcgtgcccatgaccgtgaccgtggccgtgtccatatccgtagggaaaaccagcaggctgcccataggcggttgcatctgggaacccatggacttggaagctgagcagggggaacaaacccccaaatgccgccgagaaggtgtaattcccccaccgtgcattggctagtgggatgcctccacccatgaaccaagggttggggttggcattggggaagtgggtgttaggattggcctgcggagccgtggcaggcctctgtccagctgggcgattaggaatgtcagccccagggacgttctttgaccttgggtcaacacggtccttaccacggccatagagggggacaagcttatcctcctcgacaacagccttgcagaccgggcactcaggtgaatgcgagtggatgtgcagccacttgtagaggcatggccagcagaagaggtggccacagagcgtgacaataggctcctgcggaagctcaaagcatatgttgcactcgaagcttcccccagaatcggcaccaccgctgctgctgccacttgtggattccccaacattggctgccatagtgggatgagatgagcggcgggcggcggaggaggagtcgcgtcgacggaggaggattcgccgcctgcgtgcgccgcagaggaagacgaagaggaagaggaagaggaaggcggagaaggttcgaggcgggcgcctcgtgc

SEQ ID NO: 22760 - DNA, 627 bp, Oryza sativa; identical to SEQ ID NO: 13387
  Clone ID: TF_OsC356927_1

SEQ ID NO: 22761 - DNA, 794 bp, Oryza sativa
  Clone ID: TF_OsC392220_1
atgcccggcgactcggcgtcgtcgacgctgcagtacacgggcatcggcgcattcgtcgccatcgtcggcatcgtcgtcctggccgtcatcttctacacccgttcgtccgcccgtcacgccgcccccggcgcggcgcccgacgcggtcaccgcgctccaggggcagcagcagcagcgcggcctcggcctcggccccgacgacgtctccgtgctcccgacgttcacgtaccacgccgccgccaccgcctcgcccggccgatgcgggcctgatcggacgcggggacgcgaaggcggcggcggactgctgcgccgtctgcctcgacgagctcggcgagggcgccgtcgtgcgcatgctgccgtcgtgcaagcactacttccacgccacctgcgtcgacgtttggctgctgtcgcgggccacgtgcccggtgtgccgggggagcccagggcaggagaaggtccgccattttcggcctcgcgtccctctcaccgccgctgccgcagctgcgccggtgcgcgccgtcgccgcccaaggaggccgccgccgccgccgctgccgatacgtcgagagccaacgacgatgactcctccgcagccgcgtcgaggtcgccatccccgataagatcgagcacgcgtttcgacctcgcggccgccgccattgacgccgccgcccgtagtccggcaatgtcgccgtcgccgactcgcccgtggactccggagcgtgtggcgcgggtgtcaaggtcaccgtctcccgtgacgacgacggcgacgaccgatttgcacgtggtcgaagtgtag

SEQ ID NO: 22762 - DNA, 1586 bp, Oryza sativa
  Clone ID: TF_OsC1868_1
atgattaggtgacactatagaagagctatgacgtccccgtgcccgcgtcgccagccggccccctccaccgcggccgcgcaatagaaaaccgcctccctccctccattatccaatttatccactccctacaacacgacgacgacggcgacgacgagtactacgatgatgttctaggtagaccgatcgagctggttgacgacgccattttgtgttcttggatttattggatgagatcgagctgctgcattgtcatggcgggaaggtttcttctcggcggccgggagatcgtcaggacgggggatgatggcccgttggatgatggtcctgccgtggcgccggcggcggggtcgtcggcgccggcgacgtctgcggcggcggcgagggtgacgccggcggtgctgttcatcacggtggtgctggcggtggtgctgctggcgtcggggctgctgcacgtgctgcggcggctgttcctcaagagccaccgcgccaacgccagcgccgaggcggtggagcgccagctgcagcagctcttcagcctccacgaggacggcgccggcggcgcggggccggggctcgatcaggccgccatcgacgcgctgccggcgttcacctacgccgagctgctcgccggcgccgccgcgcccaatggcggcggcgggaacgggaagaggcagttcgactgcgccgtctgcctctgcgagttcgacggcggcgaccgcctccgcctcctcccgctctgcggccacgccttccacgccgcctgcatcgacacctggctccgctccagctccacctgcccgctctgccgcgccgcgctctccgcccgcgccctcgccgccctcgccgccgccgccgcggacacccccgccgccgcgcaacaccgccagcccgacgtcgaggaccagaagctggaccaccaccacccgccgccgccgtccgacgagcccgcgaccagcttcgtgctctccgtcaggctcggccggttcaagaacacgcagcgcagcgacggcgacgccgacgcgagcggcggcggcagccgctgcatcgacgcgcggcggtgctactccatgggctcgtaccagtacgtgctcgccgacgacaacctgctgatctccgtgcactggcgccccggcgatggcattagcgccgccaccgccgccgccgccgcgggcgccaatgtcgccacggcgcgcactggcattaagcagggcggcggcggcggaggcggcaagaaggtgttcggccgaggcgacagcttctcgatgtccaagatctggcagtggcgcggcggcgacaggaggctcccagtcctccactccgacgcctcgccgccggcggacgacggcttgccgtgggcgacggcggcggcggcgagcacgcgaacgaggcaagaaagcgacacctgatagatacagctaccaacacacacacacacacacacacacacacacacacacacacacacacacacacacacacacaaagatgtatgctttcttgtgccttttgttagtggttagcaataagcatttcttgataatagagttttgctgataattaattaatcaaatcacctatgtataatc

SEQ ID NO: 22763 - DNA, 1008 bp, Oryza sativa; identical to SEQ ID NO: 13389
  Clone ID: TF_OsC383872_2

SEQ ID NO: 22764 - DNA, 1909 bp, Oryza sativa
  Clone ID: TF_OsC54609_1
atgccgatcgcctccaagctcgtctacttccagcgccgccgcccatcgccggcgccgccggagccggagccggagcctcccgaccctcgccgcagcctgccgagccggagccggagcctccgccgcacgccgccgcaagccgctatttcccgttcattctcttttgatggttcctttgctgtggagcttggataccaagtgcgtcgttgtcaacacgttcgcatccttggaggccgcctatttggacttgaagtgtcctcccgtcgctcaaggtcgttagccatggccttcgtccagcgaccgtggctgaccggcggtgctaccgacagaggtgggtgcctggctggacgcctttcccgatggcgccgtcgtcgtcaccgccgcagcgctgccgaaagggttcgaggcggcgacaatggcgtggggacgggcctggtcatccgcgggtgggcgccgcaggtggcgatcccgcgccaccgcgccgtggggtggtccctgatgcactgcggcacgaacacgatgctggaggcgacgtcggcgggcgtcgcgatgctcacgtggcccatggtcgccgaccacttcgtgaacaagattttgctggtggaggccggcgtggcgatgcacctggcggagggcgcggacgccgtgcctgactctgggcagatggcgaaggcgatcgccgccgtggtcggcgacaaggggaagcccttcagggagcgtgcagtggcgcttgcccgcatggctgcagcggcggtagcagagggtgggacttcgtatagggacttggaaagagggaggaaatggggaataagggagaagagacgaagggcaaatgagtccaacgatatttttctccacttcgatctaacgccgttacctcataatgtgacggaagtgctacgggtcgaaggaaaaacgggtcaggaacatgttccaggaagcaaaagagatacctcaaagggtgtcgcatctgctggaaacataacaggacaagcaggcagcacgggctccagctcaaggctaaaccgcagcgtatcagatcatggccggcttcctgattccgttcagcaggctagggaacggctacttcagaggcttaacagcgtggacttatcaggaagaaggcaaaatacatcgttgtcatcagaaaccattcatggtggagtagccccgggcgtctccaccaccgcagatagcatattcagcagtctaaccagttgcttccacactgacgtatcgatcgctccctgcaaactccaagagagcacagctgaaaccttcaacaccgcagataagcatacgttcatcgcgcattgttctgaaccggctcctacacaagaagtagcaagctgcagagtaacagatgatgacgaactcgcgggaccttcaacggagtgctctatatgcctggagagatgtggggatgcagatgggctcctcgagctgcggtgcaagcacatcttccactcggcctgcctcgagcgatggctgcgctctcgcagcgactgcccctactgcagggccagcgtgctcctaacagcagaaggatgagaatttgaggatgaaactaaacccagctctgtagaacctctctttaagcccttaactttgtcactgctcacatgctcttcttccagtaccaagttttttcccccctttgctgatgaggctgtgaaatctgtgatacttttgtcactgtgtgaggcttcagaaagttagcatcttactgtaccatgaatgtgtctaaaacctgactgggttgtttgcaactggatcatgctctctccatgcatatagagtgagagctgagctgctacctgtttttccatggaagcttttgtttgctcttccatgttgtgcatctgaaagtgagtgattgcttttgctctcaaaaaaaaaaaaaaaaaaa

SEQ ID NO: 22765 - DNA, 1074 bp, Oryza sativa; identical to SEQ ID NO: 13382
  Clone ID: TF_OsC240119_1

SEQ ID NO: 22766 - DNA, 990 bp, Oryza sativa
  unsure (1)..(990): unsure at all n locations
  Clone ID: TF_OsC359_8274
gggggtgcacacgaagtcgatgagctggtacatggggacgccggcctcgccgtcgccggggagcgccggggaggcgcagcacgcactgagcagcggcgggggagggggcagcgacgccagcttcgacaccaacatggtgatcatcctcgcggcgctgctcttcgcgctgctgttcgcgctcgggctcaactcgctcgcgcggctcatcatccggtgggcgcggcgggcggcgacgggggaaggcgccggcggcggcgtggagggggcgggcgccggcggcgggctcaagaagcgcgcgctcaggagcatccccatcgaggtgtacggcggaggtggtggagggagccccgccgccgcggcggaggtctgcgccatctgcctcggcgagttcgcggacggcgagaaggtgcgcgtgctgccgcgctgcggccatggcttccacgtccgctgcgtcgacacgtggctcgtctcccacgactcctgccccacgtgccggggctccgtcctccacggcgccaccaccaagcacaaaccaaccgccgccgccgccgccgcgggcagccggcggccggggagcgaggtcgacgcccccgccgccgccgccgtgacggtggtcatcgcgtgaccggggcaggtgggcccccgcttcccccagccgctgtgggcccagtgtaacatacccatgtaaaaaatctcctttcttgttttggacctatgtaaaaaaatctctccttgggccaggccatggcccatggccgtgagatattttccgacgttggtgctgtgagaggatgacgggtgggcccgctcgtctgttcagtttgtaggttactcacagtagtccaccgtccattcgatttcgatcttggctagcaagggcagttgttgtggaggttaggaggtacaggacgcttacagttacgtacaggcttgtaatattaccgtataagtagtatcattttgcgaggaaataccgntatatttgttggt

SEQ ID NO: 22767 - DNA, 1065 bp, Oryza sativa
  Clone ID: TF_OsC388105_1
atggtggctgtgccggtggtggccgacgatggaggcggagggcatggggcgaagggggaggagagtgtgagcgggagcgtcgcgggcatttcgccgagcatcctcatcatcgccgtcatcgtcgtggtgatgctcctcgcctccgtctccatccactacttcatccgccacctgtgccgccgctcgtcggcgtcggcggccgcgtcgtcctccgcgccggtgctccccgtcgtggtgcgccccgcgtcgtcggcggccgtgggggagcaggtggtggggaaggcgtcggcggagcgcgcggcggagatggagcggctcatctcgcggctgccgctgttcacgctggcgtcgtcgctggcggcgctccccaagtcgtcgcgcgactgcgccgtgtgccagagcgcgttccgcgacgacgacgagctccgcctcctcccggcgtgccgccacgcgttccactcccgctgcgtcgacccgtggctccgcgccaacccctcctgcccgccctgccgcgccgccaccgcgctcccgcacccgcccctcccggacctcctccgcgtcgagctcggcagcgtcagcagccgccgctccaaccccaactccgccgccgccgtcgccagcgcgccgcccgagggcgccgccgtccgcgcctacccgctccccccccgcccccactccgagtacctcgtcgaggaggagctcgaggtcgtcatcaagcaacccgccgccgccgctgcgccaagaaccggcgagccaagccagcatccgctgccggcggcgcaggcggagcgtgggcagccgtcgtcggtgaccccgacggcgtcgttcagctcggcgaggtcgcaggagcggtggagcaacaggtggagcagcagatggagcagccggtggagcagcgggcggtggagcagccggtacgacgccggcacggtgacggcggccgccacggcggagtggtggtgggacatggacggcggcgcggcgcccgccgcgcggcggcgcgaggtggaggagcagggcaacgcgttccacggcttcatgcgctggctcacaggggcatactag

SEQ ID NO: 22768 - DNA, 963 bp, Oryza sativa
  Clone ID: TF_OsC31203_2
atggcggcggcgggggtgtcgaggagcatggtgctgacgctgctggggttctgcgtcagcgtcctcttcatcgtcttcgtctgctcccgcctcgcctgcgccctcctcaggcgacgccgcggccgcgcccgcctccgccgcgcctcccctctcgccgtatcgggggtcctctccatctacgtcgaccgccacggccaccaccagccctcgtcggccgccggggccgcttccgggaccgggggcctcgaccccgccgccgtcgccgccttccccacccgcgccttctcccccgccgcctcctcctccgcctccgcctctacccagtgtgtagtctgtcttgcagaatacgaagagaaagatgtgctccgtgttcttccctactgtggccacggctttcacgtggcctgcatagatatttggctaatgcaccattcaacatgcccagtttgtagaatttcgttgtgcgactaccctgatagcaagcacacgatgtctcctgtaccaagtgcagtgataataccattacctcaatgttctcctggagcagcaagatcagatcaatgcaattggctattggtgggaacagggcattcgccaagggcatcaactatttgtagtattggaaatatccgagagaaggtggatccgtggtttgctgtcataggttagtgttggaggtgttttgctgtaaaagatgcaaaaccttttatgttacttgttatgaaaaccgcggttgtttgtgatcatattcaagattctatttttgtccacgcatggatgtcggccggtccaatcatggctcatacaatagatctgaactttgtgtgctcaaagcatcagcagcagcaatggttcttcttccctgctgcaacagggaaaagtcgtgttgaaccaagagatgctgacgcagggcttcactcatgtcttctccccgaccttcgggaattagctctgaagatctga

SEQ ID NO: 22769 - DNA, 1169 bp, Oryza sativa
  Clone ID: TF_OsC246997_1
aatgcacagaatcggtattcttttttaagaaaaaaagcttgcctagctacaaaagaattgaattttcaccaccaactactgcatgctacgtactagctagcgagcaaatgtacaggccggcaccgtacgtacatacgtatacgtacggctgttgccctacgtaggatggttgacgaatcggtgtatcatcatcatcagaagagagagagagagaaaaaaaaataatgtgtacatttttttttgttacacttgcctctgttgggttaggaactcctgcacggacacgtagagctgcttgtggcaggagtcgtccatggacagcgacctcctcatcggctgcaccgcgaactcctcgtcgtacttcttcctcgtgtcgatggcctcgtcgcccacgctctccggcttccgccgccgctgcggcgtccgcttggtcgcaggcggcgcggcggcggcgccgccgcggtggctaacccagctctcgtgctcccctctcacctcgatcacgatgctgttgatgagctcgtcgtccggccggtggttgtggttgtggtggtggtggtgcgaatccccccttccctttcttcctcccattttttcccctctcccccagaaggggcagcgcgcgttgccctgcagccacgtgtcgatgcagtcgatgtggaaggcgtgggagcagttgggcagcagccggacgcgctcccgctccacgaactcgctgaggcacacggcgcactccgacacggatatcctcgcgcccacgccgccgccgccaccttcgccgccggcgccgccgcatgccgccgccgtgaacctcacgacggggagcatccgtataaacggcatgccgagcccccgctcctcggtcgccacggtgcggatcaccgacgcctcccgcgcggcccgccgccgcgcgccgccgccgccgtgcccgcgccacggcatcgcgccgcgggaccacagcccgcgcagcgcctggcacttggtcacgaacgcgtagtagctcgcgagcagcgcgaacgccgcgaggatgccgacgacggtgatgacaaccatcgggacgctcgcgttcgacgacgacggcgacgaggagcggaatgccggtggcgcgtccatttttgtagcgctccccgccgtgccgcctaacgagagaggcgatacagttgaagcct

SEQ ID NO: 22770 - DNA, 1809 bp, Oryza sativa
  Clone ID: TF_OsC17809_1
ctagcccggccaatttccatcgcagccatttttacccctagccccctccgcttcctcctttttacatccaaacccctcttccactcccctcgccgccgccgcctccgccgtcggggaggatgggaggggcgcacttccccggtgagggcgaggtggtggccggggagggcgacgccgtcgtccccctccgcgacgtgggcaagatggagcacgggtgcgagcattacaggaggagatgcaagatcgtggcgccctgctgcggcgaggtgttcgcttgccgccattgccacaacgatgccacggcttcaggtgatcggcataccatttgccgccaggatgttgaaaaagtagtatgtctactctgtgatactgaacagccggtgtcacaagtgtgcataaactgtggtgtcaatatgggagagtacttttgtgatgtatgcaagttttatgatgatgatacagagaaagggcagtttcattgctacgattgtggcatatgcagggttggtggcaaggaaaactacttccactgcgcaaagtgcgggtcttgttatgctgttgctctgcgtgataaccatcagtgtgtggagaactcaatgaggcagaattgcccaatttgttatgagtatctatttgattcattaaaaggaacacgagttctcgactgtggacacacgatgcacatggaatgcttttctgagatggtggaacataacaaatacacttgtccaatatgctccaagacagctcttgatatgacacatcactgggcattgttagatcaagagattgaagcaacaatcatgcctcccgtctaccgttacaagatttgtcttcgttttacacagccgagagagccggcgcattgggaggggattcaaggtgttcgacgatttgctcaagagggcatcgggtgcagggattttattccgttccacatgatttttgggctggccatgggagaatactgcagttcgtcatcgaatcaatccaaggtacccatcatcctcctcttttcagcatcaacgatcgtacaatctagtatagtgaattggttctctgtacacagctctagtggcaccatactgatgataatgacgtgcatgcatcctttcgtgtcagctatgcgtttgaagattgagaaatgcttgctatcctttgaacaaattgtggttctgaaataccatggctctttctccgaaaacattacgcgtcttggaagaacaaaagttaggtcttgtgttgcacatgttaaagaatcatgggtacagtgttggaatgcaatcacaagcacagtgctgaaatgcattctcacacagccgcaagcccgcaatactatggaagataatgaaaatacaaaggtgagagctgtcaatgcagatataaaggataaggatatcattctcttgtcctgctggatgtttgcgtcatgtaatgactgcaacaaggtctcagaagtggacttccatgtgattggccacaagtgcagccactgcaactcgtacaatactcgatcgacatcacggcctgcggatttatcaggaagcagttctccctcgacgtcagattcgtccgaaaacaatccgtagataacatgccatgttggtgcccaacaagatctacagtttagacaatcaagtcccagattcatacatatacaagtagtagaaggaacattgttttgcggctagcctatccaagtgcctacccaattcttcaagattcaattgattccttgaatcttcatgtgttggaactgctactagacaaaagctattgtgatgataccatatgttgtgttgaatcttt

SEQ ID NO: 22771 - DNA, 2945 bp, Oryza sativa
  Clone ID: TF_OsC43568_1
gctgcaggttttttttttttaagttttaacaaactgcatccaactgaaatttcgctattgccaatctcctgaaatgtacaatctggaaaacccgtaaaacctacattcttattgtctgctacaacaatggaactacaagctatatatggtacaatgtttcagtatggcgggaagcaccaccccttttgttggatgttttttccccaaaagaacagaatggatatagcaaaagtcagactaatctagcgacttaactactccaggagaatcccgaactatacaagggagcaggaataaacattagcatcacgaatgcctgacacctgcaattccatgtagccaaccaaattaggctactacattctgcttatatgtttggttgtacaagctagtacttgtcatatcttcaactcgcatggtcatctaaccatatgaccaagtaatgaccatcaaagtagcttgatctagatgcctgcgataccatcttgaaattaacaacctcatatgtagataggtttcacgtcattagccccaaaactcaagctacatgaaggacatctcctctgtcggttcccaagggacttctgtatgcactgattgcagaagagatggtagcacttggtaatcacaacctccttctgcctatcatggcagataccacacttcaatatccccctatactccttgacctcatgacgaagcttttccaggactgctgattcacgtgccttggctctaagagagctagctttccttgacataacctccaaatcatcctctattctcttcttactaaacctctctttctcaagttctataagcagatcagcgacttccaaacgactgcttccaacattcgcttgtattccatccaatgattgcataagcttttgagcatctctgtgcacatcaaccagctttctttggtaattactcaatgaaacagattgttgccatccatcctcttgaagtttcccaacccgatcagaccacattttaagctgatcttctaaggaaacaattttctggttgtacagatccatcaaagagctttcctgctgcaagtttctgcgcaaagaatatgtttccaaatgcaaagcatcttgtgtctgttttgctttaacaccctccataaaaatcaacttaacgcaagtaaacagcttttcaatgaagtactgagtctccggaacaatcaaattaacaatataaccaaatctaacatccttggtattatcatcatctctttcaataatctgctgtagcaattgttggttttgtgcctgtatgtcctcatatgcttgcccgatacactcgacctccactctgtaagcttcacattcttcctgtttagacttcagcatatgggataaactgatacactcgacctccactctgtaagcttcacattcttcctgtttagacttcagcatatgggataaactgactagatcctttctagaagtcccaagcttctgccctgattcagcaatctcagcttctgcagttgctagcctctgctgtgtgattgcttcagcttcattggcagccttaacacgctgctctagcttactttcatcaagagatgatttcagggcatgaacatgagcccattcaaggaattccctatctctggattccattatttccctggaatcagtggattcgcgcttatacatatccgcgaacaacttaagctccttattagtttgcttcagatcagaaatcactgattgaagttgtgttatatcagatcccgcacgggcagatctgcatgatgcttcttcattatcacgttcctttctggacagaatgcgagaaagtgaatggacttctgctcgcaaagaattcaactccaaggaagcctccttgtgtttggtcatttcactctgcatcgcgcccatttcccttggtatcgatgacactaaagctgctttagcaagacaagtttgaaagttactcttggtaaagtgaatagtaactaccgcaccaggttctcttgaagcctcttcaagtttgagaataagcatgtttttttcatcacatagtttctgaatatccttcttgagatcagcaatgctagactcacaatatgtagaaaccctctcaggaatctcagccagatcaactttcaaattaaattgcctttcttgccacacaaacttatccttatcaacctgtaatttctctaataatgtctggtagtgatccaattctgcttgtgacttctgaagtcgatcattaacaagctgaaaagcttttgaagaacgaatgctcttgaaatccatcaagatattctgaaaagttgctattttgttcaaaatttcaattctctcttcatgtaatctcttaatttccaccaaccgctttgaaatcaattccttatcttcaggcatatttgtgtttcctaatgtaggatatgggattcgagctccttgtgtattatctctttgagctttaagtgctgccagtttgtagttagtttcttccaactcagaagcagcactggccaactcctcttttagacgtctatgttcagctctttttcgggcactggaatctctttgattttgataatcctctgctaactgcttgtgcttcaactgaagattacttaatgcttgtacgacattattgaggctggacaacaggttgctactagtactctgtagttgcttactgcggtcattttctggtaatttagtgagagcagccaaagcacactcctcatttgcttgcaaaagatcacttgatggaaaaaagatatccccaagagcattagctgtggatagatgtaatggaggggcatcacttcccaagtggcaaccaggcaaacaacctgaactttcagttgcaccagattccacaagacttctaagagtgtccctctctatgggtgcacaagtaccatctgaaaagagaaggtttatagttaacctgataggcaa

SEQ ID NO: 22772 - DNA, 2165 bp, Oryza sativa
  Clone ID: TF_OsC31886_1
acgagggcaccaaatggcaaagaaggcccaattcccaaccaccgccacctccctcctcctcgtcaagcattcaggctctcctatcccaaaatgctttgctttccaagcaagcacactccctctctgctttggagattagctctcgtttctcttagtagcagcagctggtgtggcagcatctcatctcatgatctctgattcttcacggctgctgctctcttcccatctcatctcacatttcccagggccacgaaagaactgggttgtactgaagtccaagcagagccacctaccttctcttgcttctctcatctcttgccacaattattggaccggaaattcatgaagatcctctgccggtgctagaacatggcagtctgggtatggcctgagcagtaaagatttgttcatctttgtttattgggatttcttctttgtcaccttcatccctttagactctcccctttagacctctagtgttgctgctgtgcttgtgtatccatggcggcaatggcctcttctccccctacaacaccaaatctcggttcgcagcctacatgggtgccctatgagccaaccagggattgctcccagggcctctgcagcatgtactgcccgcagtggtgctacttcatcttcccgccaccgccgccggccttcgacatcaccggctccagctccgacgactcctccggcccaaccttctcgccgctcgtcatcgccatcatcggggtgctcgcgagcgccttcctcctcgtcagctactacaccatcatatccaagtactgcggcaccttcagctccctccggaacagactccttggctccagcgctcaccgcggcagcggcggcggcgccgacggcggagacaattccaggagccaggagccgtggagcgtcgcgctgtcggacgggatggacgagacgctgatcaacaagatcacagtgtgcaagtacaggcgcggcgacggcttcgtggacagcacggactgctccgtctgcctcggcgagttccgcgaaggcgagagcctccggctgctgcccaagtgcagccacgccttccacgtcccgtgcatcgacacctggctcaagtcccactccaactgcccgctctgccgctgcaacatcgcgttcgtcaccgtcgggatggtctcgccggagccggaggcccgcgttccacgggaggataggagagacaaccacgagctggtcctgacaattgacaacccggagcatgtgcgcgaggagccacagaacgtggtgaccggtgtcgccgtcggcaacggcggccgcaaccacgaggcgaaggatggtccggggaggtcggaagatgcaaatggcacagctgagatcagagaagacggcgccttgatgccgcccacaagggcgccgtcgtcgttgtcagacacgcaccgtgaaggccggatgtccattgccgatgtcctgcaggcgagcctggaagacgagctgatggtggccagggagagcggcctcctggcaggctcttcggggtcctcaagacggtgtcacggggagcacagcaaggacggcggcggccgcagtggccgggcattgccggacggcgcgaatatgaagagattggcgccggccgggagatcatgcttcagcagcaggagtggcagaggaaaggactccgttcttccaatgtgaggcaaccaaggtggttcttttgacagggaaacatgacaagaaacttttgtgtgttcttccgtgtggagatcaaatgatcaatgtgccggctgcatctgcgatgcgcgtatggggatttcatcctgttttgatcacttcccgtgatgcccacatgctgaagaaatccttctcctgcaatgcatggtgagtggtgagatctcctacatgtttctactagataactgtatagggtttgagaagttttcctttttctttctttcttccatgttgccacccctctctatacaattgggatctgctccagagcagcctctctggattagtgagttaggcattactagatcaaagactctccaagtgagaagtgtgacactttcagttctttttccacctccaaaaaaaaaaaaatttgcctctgccgccgcccccgccccggtgtcattgtggcacaatttggggattgaatgagaaccgtggccaattcagcttgatcc

SEQ ID NO: 22773 - DNA, 737 bp, Oryza sativa
  Clone ID: TF_OsC269066_1
cggcacgagggatcactttgcttactgctatagctctagctcttcagttgtcacctttgttttctccttgtctttctctgcgatgtcgtggttgctccactctcttctcctcttctccttgcctgtctgatcgatcgcctcgccaccgccgccgccaccgccgccgtcgtcgtcgtcgtcgtcgtatcggcatggaggtgtcccacatggccaactgcagcaacgtctcctcaccggagcagcagccgatgccgccgtcttcggcagcggcgtcgtcgccgtcgccgccgcagcttgactacgacgtggtggtgatcctggcggcgatgctgtgcgcgctggtgtgcgcgctggggctcaactcgatgctccagtgcgtggtgcggtgcacccggcgcgccgtggcggaccccgtcggctgggtggagcaccgccgcgccggcgcggggctcaagcgcgaggacgtcgtggcgctgcccgtcgccacgtacgtcgcctcgccggcgccctccgtcgccggctgcgccatctgcctgtcggacttcgccgacggggagagggtccggctgctcccggcgtgcggccaccggttccacgtcgtgtgcatcgacaggtggctcctggcgcactgctcctgcccgacgtgccgccgccgcccctcgccagaggccgacggccacggcgccgtcgtcggagaagaccaccaccatcgcctgcaagttttgactgctgcttaa

SEQ ID NO: 22774 - DNA, 1330 bp, Oryza sativa
  Clone ID: TF_OsC35328_1
gtggatcccccgggctgcaggaattcggcacgagggtgacgtcgacgcctcatctcccctccctctttttccccgcagcgatacggcattcgtgacctcccgattgttgccaacccccctcgccttccgattgctgccacccccgcgcctcgccgcttgcccgtctcctgttcgtccctcgggagcgggaggctagggccgacagcagcgttcgcgccggcgcgggattgggttctttgttcttgtcagtgctgtgtttgctcgcaagggtcatcgtgagaatggaccagatttacatggctgctgtcaataacaagacttcattgcctgatgatgagccaatgaagaaaattagtggagatatgcctgtgactgctggaaacgcttgctttgactgcaacatttgccttgattttgcagcagagccggtggttactctttgtggtcatctctactgctggccttgcatctatgagtggctatgtccaggggttggatcgactgccagtaacaacagcagtttggcaaggcgacagtgccctgtgtgtaaggctacactctccccagacatgctggtgccattgtatggtcgtggggggagtctgaagaaatcactgaatggtgtgcccattccacgacgaccaaccgtgcagcgggaggcggttgagcatcaaaacacacacaataacatcgatgatcggcaccatgagaacatggaacccagccctccaccacaaccgctgcggcattcgagccatcattccagtgcaactgaatttgattttatttacccgccatcaccaattgggcgtggcttgatccactcgacggctggtggtgtgcttggggggatggcagtggcggtgctaccatgggcattccgtggccaggtgccaccgagcatgttcatgagtccccactatgtcacggcacacaatatgagctctagagcgaggagacatcagatggaagttgagaggtcactgcatcagatctggttcttcctcttcgtttttgtggtgctgtgcctgctcttgttctgaagcaagatggtggtgtattccttttgtaaatacgggaaggcaagacactaatgggtggatgcatatggtaaaagagggtggttaacactgttggtctgtatcgataagcatgtgcctaaagcatgctgatatagagatgtaatgtgacaagacttaaggtgaaatgcacatttcattcttctcttgtcctaagatcaaaaaaaaaaaaaaaaaaaaaaaaaaaaaaaaaaaaaaaaaaaaaaaaaaaaaaaaaaaaaaaaaaaaaaaaaaaaaaaaaggggcggccg

SEQ ID NO: 22775 - DNA, 1899 bp, Oryza sativa
  Clone ID: TF_OsC22486_1
tttttttttttttttctccaataattgcatcagattgcattgcacagtcaaacatgttgcaggatgcagctccagcaccacaaaaatgaagtgcagaggaatagatcacctcgccacgtggcgcggccctggctcggcttctttcttttctttcgttttcctgcctccggtccgctgcgttttttttttttttttttgagagaaacacctgcatcaatggcatcacaactatgttcaatggcaacaatcgctgcttggtacagtttaagcttatgtttccaaatagtttctgcccattgcaacaaatgagataggataaagcacaacccttaatcaaacctagggctgccagctagaaaaccctaaattccgacaacagaagcagcatcatttagttccttggaaacaatagcatctgattcatcgttttctctcggagcaaataattccaactaattttgagatatacacaaacaacgaggaagataacctttacaagaatggcggcatcctctgaggatgcatggaatgatatccactatctgggtggctctgcggcattcgctccccggtgggtcttcgagtaaagcctccatgtgtatggttctgcatgggattgaaggtgccccaccagtgagattcaccgtcagctgggatccagggaaatggggtaaagccctcctggccccacccatatggccgatcaacaggtctagaaacagcctcaccatccgaggaattgctcctgttcacaggaggagcaaagccatggtgtcctccaatctcagctgaggatgatgctgcgatgaaagatgtaattgttaaagccctaggcctaacccttctagatgtaggggggaatgggctgctctgcaatgagtgcattgactgttgatacatgtgtcccctcgcaccatgaccatggcctctagtctcagccataacagctggcacagaccctaatggtgtaaccatattgcttccgttgcgaggtgtgggcctgtgaactaggggacggtgatgtgcatatggccttgttctctgttggctgctgctgtcatatctcggcaatcctataccaaatggagctacagaatgatcaggaatgcctgacacaggaagattgctcatatagcggtggtcattgtcatgatttcttgactctgttgcatggaaaacttgtgtattgctcaaatcgtgggctgcatggccttccaagctagttggatgccgatgaaatgaactgttttcggcaccagaactagaactagaagggacatgcacaggatggagaaaaccacgcagtgcaaggtaagggcaaacaagagaactgctagcagcatttgaatgatctccaactgtatgataagaagtttgttcagcttcaccctcctcaaatacagatgctagctgggtgaatccactaaaggggcaccattgaaaaccaaatggaatatctgaggtgatgtcataggtttcaccagtcacccagccacctatatcaatatcaggagatggatggtgcccacttgcgtaaagccagcggcctttctcaatcttccgacaattagggcattgcatggccccttttgcattaaatgccgatccaatgcagtctaggtggaactcgtgcccgcattgcagcctggcgacggacctgcccccggccaccaccggatccaggcagatggagcacgacgcgcctcctcctcctcctcctcctcctccctcgggcggcggcggcggcggcgacctctccagatccatcaccgcctgcctctctctcgctcgctcgcgggagaggagaggagaggagaggagaggtgagctcgtggaagaggagagagagggcggaagctggggaggtgtgtccaaaggaaggaaggaagggagatgaag

SEQ ID NO: 22776 - DNA, 1776 bp, Oryza sativa
  Clone ID: TF_OsC59284_1
cacgaggccaccaccacctccaccaccgccgcgccgtcgcgttcgccttttttcctccttcccggacctcgtgcgctcccaccaccaccaccccgcggcttcgctcgcgccaccgccactgattcgccggagagttgctgttcccttcgtgatttcgtcggcggtggcggcggcgggggtggtctcctgttgctgtacagaccagcatcgttggggggaatcggatgagatgagatgagatgagatgcgggggtggtggtgatggaggcgctctcccggaccgagcgtgtaggaggaggaggtggagccatggttgaagtggccttcgcttcgtccgccggatcctccgccgcggccccgcgccgccttcgtggggagctcgtcgtcagggacgctattccgtatgccggggtggctcctccgccgcccgcgctgccgctgccgcagccgcagctgcagccgcaggtgcaggctacgacgagtgggggcggcggcggggggaagattagccccgcggtgctgttcatcatcgtgattctcgcggtggtgttcttcatctccggcttgctccacctcctggtgcggctactcatgaagaagcagcatcgccgcggaggaggagggggtgcggcggccggggtgtcgcggtcggccgccggggatgacgcggggggaggaggggacgcggcgctgcagcggcagctgcagcagctgttccaccttcacgactccgggctggaccaggcgttcatcgacgcgctgccggtgttcgcctaccgggagatcgtcgtgggcggcggcggcgacggcgacaaggagcccttcgactgcgcggtgtgcctgtgcgagttcgacgccgaggaccgcctccggctgctgccgctgtgcgggcacgccttccacctgcattgcatcgacacatggctgctgtccaactccacctgcccgctctgtcgcggggtgctctttgtccctgggctcacggagaacaatccgatgtttgatttcgatgaggggttggaagaagggaggctgtctgaagattgcgataacggattcggatatcccgggcacaaggctacggaggggatgcagacgccagggactgagaagagggtgttccctgtgaggcttgggaagttcaagaatgtcgggacccagggcgctgtcgaaggcggtggcatcggcaatgccaatggtgctgtcttgaggagagaggaaggggagagcagcagcagcagcttggatgcaaggagatgcttctcaatggggacttaccagtatgttctagggacctcagagctcagggtgtctctccagccagaccgaattagaaatggcggcggcggtgtgacgagggcaaggccgacagggttaagctctgtcaatgctgagatcatggaggggaagaagatatgcgcacggaacaaaggggagagcttctctgtgtcgaagatttggcagtggtctaatctgaagggcaagctacctactggctcagatgaatgttcggaagcagggagccttccatggatgaagagaggtggcattggggatacatcaaatatgtgactgtagtctgtattatgatagtggctaatcttttctcttgttggtgctgctcacttaatctcttacctatagttatcttgacttttttcagtctgatagctttgtgctgagtttgattggaatgcattaatcccatggagcgataatttctcatagccgtgccactgagtattgcggtagcttaggatggttgatttctggtgc

SEQ ID NO: 22777 - DNA, 624 bp, Oryza sativa; identical to SEQ ID NO: 13414
  Clone ID: TF_OsC400404_1

SEQ ID NO: 22778 - DNA, 1005 bp, Oryza sativa; identical to SEQ ID NO: 13410
  Clone ID: TF_OsC270394_1

SEQ ID NO: 22779 - DNA, 1008 bp, Oryza sativa
  Clone ID: TF_OsC394647_1
tcatcctagtcggcggcggtgattcattctcctccgggctcgccaccgtcccttcttcccgttgccgccgtctctagccttcgggctggccgccaccccttctttccgctgccgccgcctccaaccttcgggctcgctgccccccttctttccgctgccgccaccacactcgcacccacttgccggcagccgagcttgcatcccactgcctccctcgcgtcgtcgttgttctcgcatggtgagaggggtgacgtgacccacctcgtcgctcgccccgctcgcccgagcgctcgggcggctgtatccgggcaaatcggccggattaatccatccatcatctagggggaatattcccctctgggctatcctatccggcggcaaggcgtcatcacccggcggcgccgccgtctccgccgccgtggcctctttcgcggccacttcccggggcggcgagaggtcgcaccggcacatcgggcaagtccggtgcgagtgcagccacatgtcgatgcactccacgtggaacaggtgcttgcacgccggcatctcccgcactatctcgccggcatgcagctcctccaggcacaccgagcacggctcgccgttcccggcctcgaggtcgccgccgccctgcgcggcgccagcgccaccggacgcgtacgcgaacgtcggcagcgcgtccaccgcggccttctcgagcccgaacgtgctggaggaagaagctcccggctgagcctcccgctccgcggcgcgggtgttcgtcccgccgcggcggcggcaccagctcgccggcgcgaggtagtcggcgacgccgaaggccagtagcaccatcccggcgagcacggacgccttccagacgctcccggcggcggcgcgcccgccgacccgcagcaccgccgcggccgtcgccgcgatgccgtagcatgcgcggcggccgcggccgccgccccgctcctcctcgccgccgccccgcagcgtcgccgccgatatcctcgcgaacacgttcgacat

SEQ ID NO: 22780 - DNA, 1472 bp, Oryza sativa
  Clone ID: TF_OsC181138_1
tcatgaacagctcccgactctgctgagctgcctgctgcctccgacgacccagagcagcgtcctcctcgcgaacgacgggcgctcctccgccgccaccgacgacacggcgctgttcccgccgcagctcccggcctcgacgtcccagtccttcgccgccggccaccggaacgacaccgcgcgcctctcggcggcggcgccgggctctttcttggacggcaccatccagatcttggacacggagaagctgtccttggcgagcttcgcgccggcggccgcggccgcgtcgtcgtcggggttcttgcgcggcgtcgcgcggaacggcggcaggcggagcgaggactcgccgcgcttggaggcgccgaactcgcactccgacatggcgccgcggcggcgcgacttggaggccgccgccgccggcttcttcctcggcggcttgatggacacgcggagggaggcgtgcgcgtccatgacgtactcgtaggatcccatggaatggcaccgtctttgcccgagaccaccagccttggcattggcgtcgccattgccgttgctgctcgtgccggctctatccccttcgccggcgatggcgttgacgttgaagaagacgttgccttcgacgcacatgaacttcccaagcttcacctcgaccacctcctccgctcccggcgcgtcttcgccaccgacgtcggctggctcatcgtcggcggcgtggaccatgtcgcgggagctctcggactcgagcaccatgacgacgggggtgcacgtcggcgagagctcggcgaggaggctcctccggcagagcgggcaggtggagtgggagaggagccaggtgtcgatgcactcgaggtggaacgcgtggctgcacttgggcagcagccggagctggtcgtcggcggcgaactcgcacaggcagacagcgcagtcgaacgggtccttgccatcctcgccgccgacgccgacgacgttccggtacaggaacaccgggagcgcgtcgatgaaggcctggtcgacgccggcgtcgtggaggtggaacagctgctgcagctgcccctcgaacgccgtcgcgctctcggcgtcctccctcgccctccgctgccggtgcagccgcagcaggtgccgcaccagcaggtgcagcagcccgcacacgaagaacacgatcgccaagacggccacgatgaacacgatgctcgggcttatcttgttctccacgccgtcaatccccgacgccgacgacgccgccgccgccggagtctgcggcggcgacggctgccacgtcgaattgctcattcttcaaatacgctctacgatcccaagatgatttttcttgggagaagagacgatttctagcttgttttgcgatgagctaggggtaggagaaggatcttggtgttggcatggcggccattggcgatgaagaaggacagaggacacacagcagcaggtgatggcgatggaagaaaaaaaaaaaaaaa

SEQ ID NO: 22781 - DNA, 1947 bp, Oryza sativa
  Clone ID: TF_OsC37456_1
cccgccgccccaacagcaagagtcgcaagcgtgatcgcatttgaacttcatacatattacataccctacttgatgtctggtttgctgcctccgtatatcctcgagctcgccttccaggaaagcgctccaggtcgtgaattccacccaaattcgttgcctcccccactacccaacccaaatccgtagaggaacatagcagaagtgaagccaagaaaccagtaaaaaagcaaagcttccttgcttcgatcgatttatgatcaatttttgaagatacttccggccaccgctggtcgattccggcgaccccgtttccaggagatggggaacatgggcagcagcggcggccaccgtcgccggaacaacggccacggccggcatcaccaccatggtcagcccaccgcgccgccgccgccgccgcagcagcagcaacaggaggtggcgccgaaccgctacgtgttcgcggcggcgagcccttacccgccgcagtacccgaatcccaacctgccgcagtactacccgcagtacgggaacttctacccgccgccgccgccatcgatgccagggccgctcccggcgccgtacgaccaccaccaccgtgggggtgggccagcacagccgccgccaccaccgccgccaccccagccgatccatgccgcaggggagttcccgcctgctatgctgcaacagcatccccactaccatggctggggtggaaacttctcgtatggtccacctacccagccgccggcgccggcgccgccgtatgttgagcaccagaaggctgtcaccatccgtaacgatgtgaatctcaagaaggagactctccgggttgagcctgatgacgagtgccctggacgattcctcatcaccttcacctttgatgccaccgtcgctggaagcatgactgtttacttctttgcaaaggaggagctgaactgtaatcttacagcaacgaaagaagatttactcaagccagtcactgtaacatttaaagagggtcttggtcaaaaatttaggcaaccttcagggacaggaattgacttttcgttgtttgaagatgctgaattatttaaggagggagagatggatgtatatccacttgcagtgaaggctgaaacaacattctcaattggtcaattctcagaaggggaagaacaaaagtcacaaactccaaattcacagatcacccaggctgtatttgagaggaaggagaatggggattaccatgttcgtgttgttaagcagatcctttgggtcaatggcacgagatatgagttgcaggagatttatggaattggaaactctgttgaaggtgacaccgaagggaatgatcctggcaaagagtgtgttatctgcctatcggagccaagggatacaactgtcctcccatgtagacatatgtgtatgtgcagcgagtgcgcaaaggttctgaggtaccagaccaaccgatgtcccatctgcaggcaacctgtggagcgtttgctcgagatcaaagtcaacaacaaaggtgaagagcaacagcagcagcagataccacaaccaccaccacctccttcaaccgcgcctccgcaccaacagcaagagtcgcaagcgtgatcgcatttgaacttcatacatataacatacactacttgatgtctggtttgctgcctccatatatacaggagctccccttgaataagtggaaaacagggagaagacatgtgcgtgtttttagtatatgtgagcaccaaagcttgctgcgcgcggtggcttgcaaacttgcacttcagtgctgggtgtgctgtactacaatcatgtaagggaggatgggttagttaataccctgcatccatgaaaacaaggtttgtacataagttctctctacttgtactactgcgacagaaattctcacgatttgtattactgcggctgatggaagtggagtgcgtgtgcggtattggctat

SEQ ID NO: 22782 - DNA, 574 bp, Oryza sativa
  Clone ID: TF_OsC250874_1
gcacgaggctcctccattttctctctctagttcgggggacctttgagtaggaaattcttggacatggacgacgacggcgactggatcacagcgaggtacctcctctcgtcgatcctcgggcggaacccgctcgtcgtcgattacgtggacgaggagtccttccccgtcgaggaccctcccccggtggccggtggcgcccgtggagggaggcaagcggtggtgtcgcagccgccggtggtgcgcgcgacggcgggcgtggccgggacggtgtgctcggtttgcacggaggagatcgcggtggcggacgccgtggtgcgtctcccctgcgcgcactggtaccacgccggctgcatctccccgtggctcgggatccggagcacatgccccatgtgccgcgccgagctgccggccagcgacgacgccgccgaggaaggcggtggtgccggccgggagaagccgccgcgcgcggcccccgccgggactagcgccggcggcggtgtcaggcgtgacgcgtcgtatgagctcctcgccggcggcggcgtcttgtctggctgagtggctgagcgtgtgggcc

SEQ ID NO: 22783 - DNA, 490 bp, Oryza sativa
  Clone ID: TF_OsC126152_1
aacaacaaagttttttttcctttttttttaaaaaaaagagcaaattgctcatgcaggcaacagctaggatggattctgattaaccaagctagaaaccggcgacgaagagggaggagaaccagatgacgaggtcgtcgccgagctggagctcgtcgagcccggccacggcggcggccaccacggcgccgccgacgtggaggcggcagagcgggcacgtccgccgccggcagtagagcgccagccaccggtcgacgcagtcccggtggaacgcgtgcccgcacggcagccgccgcacctcctccccgtccctgaaccccgatatgcacacgcagcaccccgccgccgccgcctgcccgccgccgacgccgtcgccgtcccgccagcaccggcactgccctccgtcgtcgtcgccgtcaccttccgccgccgccttcttcccggacagcgccgacgacaggagcgccatgacatggctcaccaccaccaccat

SEQ ID NO: 22784 - DNA, 1355 bp, Oryza sativa
  Clone ID: TF_OsC66748_1
ttttttttttttttttttttcatcaatgagacagtgccgcctattaattatttatctttcagcaacgccaataaattacaagtgttttcagcgtttcatgttgcacttgcacacaaatcaatcgatcgatcgaatcccctataagtttcaatttttttttcaggttaattttcagcggagcggcgcatgaattggccactcgtacgccatcaaccaatccaaccaacaaatcttatagctactaccgccatgctgcatgatcgttctatctgcatctgaattctgaagaagattagaagatgtcgaggatttcttggtttgcatctgaattctgaagaagatgattagaagatgtcgaggatttcttggatgaaaccgttgcagagagggcagttgccgcggctgacccagagctcgcgggagcagaggcggcagaaggtgtggccgcacgggatgaaggcggcgcccttgtggcgcaccatgcacacgcagcacacgtgcaccatctcctcctcccgcccctcgccgtcgtcctcgtcgtcgtcgccgtcgccgttcttgcgcgcgccgccgccgccgccgccgccgccgttgcccccgccgccgccgccaccgccgtggccttggtcgtcctcgtcctccgagtcccactggctgtccgattgctccagtagcgccatcagcgacatctgcgccgcgggcgcgtcgtccttgccttgctcctcttcgtcgtcgtcgtcgtcgtcgtcggtgtggtcctcgtcgtcgtcctcattggcgtggccgccgccgtcgaccgcggcgcgcctggagccgctggagaaggctgtggctccgaggcgggtggaggtggcgcgcgagaaggtcggcgtcgggcggagcgaccgcgtgcgggagaaggtgcgcgagaacgccgccgcggcctcgccgggggagtagttgtacttgttgctgtggttgctgccgctgttgctgctgctcagcgtcgcgccgccgccgcctccgccgccgctgttcgacgcggcgggcttgggcgacgcggacatccacgcgctcgcggcgcggcgtagccggagccggtcacgcagcggcttccagttgatcatgccaccgacgccaccgccgccaccggaggcgcccgcggcggcggggatcctccctccctcgccgtcgccgccgccgaggccgtcgtgtgggatcttgaggaagtcgcggatggcctggtcgggcgcggacagctgctccgagagcgtcatcgtccgccgcagctccggccgccgctccatctctcagccttgtcgcgctactcttccgccgccgcgccggaagcctcgccgtctgcgtgcgaggcggcg

SEQ ID NO: 22785 - DNA, 858 bp, Oryza sativa
  Clone ID: TF_OsC82464_1
atgagcgaggagcagggattgattcattgtgctgcgctgttgctactgctgctgctggaacacgttggagatgcagccgggagggctaatgctatccagaggaactatggtggagcatgtgtgcagatgaggttgtcgtgcagctcactggcgccattctttctttacctcatccagtggctggattgtggctgctgttatgctcttcccagttatctaggcctttttcacattctcatttgcaaggtttatgcagatggagatagctcagtatcaacgtatgaaaggcgtgcaagccttagagaattctatgccttaaacaatctctgccttccagcgatcatctaccctatccttcaacagcttgagggtagtttgattgagagggacctgaaagggaaagggcgatgtaaagacatagtgagtaggaagcggctcgaagattggaggaagctttgtaacaaggatgtggaaagggaggatgaatgtgggatttgcatggagacatgcaccaagatggttctgcctaattgcagtcatgcaatgtgcataaaatgctacagggactggtatagaagatcagagtcttgccctttctgccgaggaagccttaaacgaattcgctcaagagacctgtgggtgctcacaaattacaatgatgtggttgatcctgtaactctagaaagagaaaatgtgaagttcattgtattgctcatggtctctttgttatgaatacttccagataatattttcttcttctactatgattacctactctaatctggaaacaccacaagttgtgtgtgtgaaattatgaaaccggagaaacccatttggtgaaaaaaaaaaaaaaaaaaa

SEQ ID NO: 22786 - DNA, 531 bp, Oryza sativa
  Clone ID: TF_OsC240119_2
atgggttcgcgttccggctcgacgacgacgagtatgccgccgccggtgccgcaggagaaccagtccgtgggcaaagggacggccatcttcagctacacctgcgtcggcctcacgggcgtcgcgctcgtcgccgtcgtcgccttctactgcaaccgccacgtccggaggcgcgcgcctgtcgtagccgccgagggcgccggcggcgccggcgggcgagaggacgacggactgcgcggcgtcgctgacgtggcggccaagatcccggagttcgcgtacgcggggtcggcgaggcacggcggcggcggcgagtgctcggtgtgcctcggcgcggtgcagggcggcgaggcggtgcggcggctgccggcgtgcaagcacctgtaccacgtggagtgcatcgacatgtggctggcctcgcacgccacgtgcccgctctgccggacggaggtcgagccgccgccgggggacggcggcggccgacctgcgccggcggcagatgagtcgtcgccgacggaggcgctgccaccggtgtag

SEQ ID NO: 22787 - DNA, 1548 bp, Oryza sativa
  unsure (1)..(1548): unsure at all n locations
  Clone ID: TF_OsC33248_1
ggctgcaggattcggcacgaggcaaaaagcggaacgggctaaagccggccgggaacgggcgccgaggtcagacttccacccagacttccagactccagaggcgagggcttcccaatgggcaacatcgcgagcagcggcggcgctagcccacgtccgccgccgccgcatctcgaagcctatagacacggggtgccgcccccgtactaccacagctaccctcgtccgccccccggcgccgccgcgccgccgccggtgccggtgcctgcgcacgtggagcggcacagggccgtggcggtcagcgtcggcgtcaacgtcaagggggacaccctgcggctggtgcccgacgacgacgacgacgatggccgcagcctactcctcgccttctccttcgacgccgatggccccggaagcataactgtctgcttctttgcacaagaagataagtgtgccttgaagaccgcaaaggaaaatttgcttcaacctgtgaccgtgccttttaaggaaggtcgaggtcaggagttcaagcaaccaagtgggtcgggaatcgatgtctctcgttttgaggaatctgagctaactaatgttggggaaggtggtgtattccctgtagcattcaaagtacaaatggatgtgtcaggcaaccaagaatcagaaggggcacatgagaccgaacaatcgaaatatcttgttaaatatgctatatttgtgaagaaagacaatgctgaatatggagttcatgttgtgcagcagatcctttgggtaaatggaatcagatatgtcttgcaggaaatatatggtattgggaacacagctgataagaatgctcatgaggatgattccgggaaagaatgtgtggtttgcctttctgaaccaagagatactgctgttcttccatgcaggcatatgtgcctgtgcagggagtgtgctcaagttttaaaatatcagaccaacaaatgcccaatatgcaggcaacctgttgagggccttcgcgagatagaggttgataacaaaccgattccccaacaaggatctcagcagttaacagcacctcaataaagtctcatctgattgcaagcaaactacctgtacatgtgtcatgtgtatataaaaggtctgtgctttcgggaaggggaaatcggaagttacctggtagcaacaaagctgtttctgatattttgttaaaggatgaacctactgggatttaattgtctacgtttggaccgccaaactcgacttattacttggaaaagacactattttagattgtatggttcaagccttttgcaggggacaatcgttttcttgttctaatttagttactcatccatcactttgatgtgtttaagaccaaaaaaaaaaaaaattctagtggatgcccttattgttctgtgatgtcaccaattggaagtttttcctcctactggcatgtccctgggaagacaagccaggcaacattttggtgctacttttaccatgctttagatcttactattacaagattatgtagatcgacnatcctttttgggttaaaaaaaaaaaaaaaaaaaa

SEQ ID NO: 22788 - DNA, 783 bp, Oryza sativa
  Clone ID: TF_OsC46309_2
ttttgttttttttttgctatgaggtcaccaaatccattatttataccggtgaaaacttggccctgatttttttccctttttacatagatgaagaaactgaaccagcagaaggcatgtttggatgcgaagaaaaaactaagaactgtggacgaccatgagagccggaacgacccctgtgtccttctcttctaccaaggtggtgtgaccttcccattgcagcggctgctgctaggtgatgctgaacctcaaaatctccaagagcaggatgatgaaatatagttgtatttcgagtttgattggtccttacattcctttcacgctccactgcctcgagcagctcttgactggtaggatccttcaaactgataggctgccaacacataggacactgagaacttctctgacaccattcaagaatgcattggaggtggaactcgtgtttgcaaccagtcaatgtggaagggtcactctcacagaacgcctcaaggcagatactacatgcatcatcacatgcatcctgaatcccaccctcaacaaaggctgcagctgatgtcaaaccctccatcttggctttctcatcagttccagatgccattgcaacggaatcacaacactgatatcaggggcaccgccgccgacgccgacgaggacgcccgatcggatccggctgcgcgcgcgaggcgatggggagcacgaaaccctagctagctagctagccttttcgcctcctccttcaacctccttttctctttgggtgagcggacgaataggcggacgcgtggg

SEQ ID NO: 22789 - DNA, 1500 bp, Oryza sativa; identical to SEQ ID NO: 13432
  Clone ID: TF_OsC345789_1

SEQ ID NO: 22790 - DNA, 1180 bp, Oryza sativa
  Clone ID: TF_OsC219076_1
atggcctccgaggacggctgcggcggcggcaacccgccgggggacgcagcggccgcgccgccggtgtggaacgccgcacctgcggcgggagctggctgcggcgatctggaggaggacctccggttccagtgctgcgtctgcctggagcttctgtacaaaccagttgttattgaggatgagaagcgtgtggatacatattctccacaaatcattgagtttttaaactccaagagcaacaattgtgaaattgatggggagaatagacctgaagaaagtaatagtcgacctccacaagaagttacatctgatggcaacactatcaatgggcatccgaagaaagttaagctggaggacgtgtcatgtgctctttgtaaggagctgttgtatcaacctgctgttcttaattgtggtcatgtgtactgcatgtcctgtttgtcgtccttggatgatggtgcactcaaatgccaagtttgtggaggtcttcatccaggagattttcctaatgtttgcttggatttggaccattttatcgaagactattttccagcagaatatgacttaagacgagagaagattaagcttttgaagggtgaatgcaatcaaggatcatcttcaggtacttcatgcataaaagaaggcaggggtagaccaacaaataaggaaaaccgtgcacatcaggatgatgacttgtcagatgttcatattggggttggatgcgattcatgcgggatgtatccaatacgagggaagaggtacaaatgtaaggactgcactgaattaattggatttgacctctgcgaagaatgctacaatacaaaatcgaaacttccaggccggtttaatcagcatcatacccctgaccacaggatggaacttgatcattcagcactcttcaataggttgatgaggctacaagggatacacgaggagggcccaggagagataatcatagaaggtgcatttgttgctcctgacgctgtggtgcatataatagcagatgatcatgaggaaatcgaggataacggtgaggatgatcacttgctctagaaacgaatcagtggtattaaccctgaatttcggcattgtcctttctttaatgtggaggaggctacatgaatcatgaatggtactgtatgaaatggagggattgaacaaagcttgtaggcgtgtaacgcccata

SEQ ID NO: 22791 - DNA, 616 bp, Oryza sativa
  unsure (1)..(616): unsure at all n locations
  Clone ID: TF_OsC198988_1
caaaaaaagtagttnatctcctcgcggcggcgctctctctctctctccgccggcnacgatggccacggcgaacggcgtcgacctcgcgacggcggggctcctgcggctgctggcgatggggatggggccgtccgtgcagattccgggagaaggcggggttccggtgatgatggtgcagcacatcatcatcggcgacgacggcggcgacctgttctccggcgggctcggcggcggcgtgccccccgcgtcgaaggcggcgatcgcctcgctgaaggaggtgaaggccggggaggacggcgaaggcggggactcgctgggcgactgcgcgatctgcctggacgccttcgccgccgggaaggagatgccgtgcgggcaccggttccacagcgagtgcctcgagcggtggctcggcgtccacgggagctgccccgtctgccgccgcgagctccccgcggcggaacaacaaccaccagaggagcagcagagcggcggcgcggacgccggcgagaggcggaggccgagggcggtggtggtgagctacgtggtgctcggagacggcggccgcggcggggagagaggggagccatggaacattaggatagaggacgtggattag

SEQ ID NO: 22792 - DNA, 758 bp, Oryza sativa
  unsure (1)..(758): unsure at all n locations
  Clone ID: TF_LIB4309-011-Q1-K1-H9
caaccacccgcgcgatcgcggcggcactgagtttggtggaggtgcaaggaatgcagcagcattggattatccagaaagggcgggtcaacctatatgcgagtattacatgaagactgggacttgcaaatttggtaccaattgcaaatatcaccatcctaagcaagatggagctgtgctacctgttatgttaaacaacagtggattccctatacgcctgggtgagaaggagtgctcctactacatgaaaactgggcaatgtaaatttggaactacatgtaaattccatcatccggaattcggtggtgttccgatgacccctggaatatacccaccattacagtctccatctatagcttcccctcatccatatgcttctcttgcaaattggcaaatggggagaccacctgtagttcctggatcatatataccaggctcatacaccccaatgatgctctcatctggaatgatcccattgcaaggatggagcccttatccggtaattgatttgaattacatgttctattgtggaaaaataaacagcatacctataaatgcaaaactgataaacaaattggacatgacagccaacttatactatgaaatgcaaagtgaatcaacaaatgaggcacgacagcatacttgtgtcatgatttgtgaagcaggttctttgtaatctagactganagatgtaagatgtgcttattgtcttttaggccagagctggaaggcactcactgatgtgctgcctgaataccagc

SEQ ID NO: 22793 - DNA, 731 bp, Oryza sativa
  Clone ID: TF_LIB4831-020-R1-N1-A9
gtcgttaaccctctcgattccgcggctggtcgcttccccttccgcttccctccgccaaccacgagctagggtttcgatctcgcccccgaccggcttcccctcccttccctcctcctccctccgcgcgaaggctcgccatggagggagccggcgccgcccgcaagagatcccggccggacacggccaacggaggcgccgccggagggaagcgctcgagagcactatcggatgcccttttggcgagggttgtcatttctcgcactttgtccctggtgggtatcaagcagtagcaaaaacactcaatctaggcaacccagctgtgcctgcaccggcaagagctcctatggatcatgctgctggtggtaattctcatccagcttcttctggcaagacacgcatgtgcaccaagtataacactgcagaaggctgcaaatttggtgacaagtgccatttcgcccatggtgagagggaacttggcaagccagcttacatgtcccatgagagtgccatggctcctcctatgggtggtcgatatggaggccgacctgaaccacctccaccagccgctatgggtcctccagcaggaaactttggtgcatctgctactgccaagatcagcgttgatgcctcgcttgctggtggcataattgggaagggtggagtcaacacgaagcagatatgccgagtaactggggtcaagctctcaaaacgtgaccatgaatcagattcaa

SEQ ID NO: 22794 - DNA, 2424 bp, Oryza sativa; identical to SEQ ID NO: 13670
  Clone ID: TF_OsC307477_1

SEQ ID NO: 22795 - DNA, 409 bp, Oryza sativa
  Clone ID: TF_LIB3432-044-P1-N1-E6
cgcttcccaaagatctgcattaacaaaaaataaactgtacatctccggtagcaactcaatttacagaactttgattccggggagttaggagggggtggcaacattcacacagcgcctgagacgggcgtgcgatggacttttttatacatcacggtggtttgggtcacaactgccaggacgccgccttaggaagtgtacgcggatgcggatggggattgcaggagacgccgaaccataggtacattagttgaagcagagccgtaggcatacactcccattggaggagccatcgttggatggtcaaatttgcaattcgcgccgaacttgcagatgccatagcgagaatagaacttgcacagttcttctcccggacgtagtggaagacccactggactcaagacacaatctg

SEQ ID NO: 22796 - DNA, 2157 bp, Oryza sativa; identical to SEQ ID NO: 13677
  Clone ID: TF_OsC206898_1

SEQ ID NO: 22797 - DNA, 703 bp, Oryza sativa
  Clone ID: TF_jC-osleLIB3474044d01b1
cccacgcgtccgcgccgtgtccctgatctgattgattgatgccggggcggccgtgatggcggcgggagcaggagcgggcggcgggggcggggagggcgacagcaacgggggaggcacctccccgggtggcgtgtcggcggcggcgccggcgatcgggccccaccacctcggggttgccgccgcggaagaagcaatgtggcaaatgactttaggaggaggagagtctatggagtccactccataccctgagcggataggagagccagactgcagttattatatgaggactggactatgtaggtttgggatgacctgcaaattcaatcaccccccaaatagaaaactggctgttgctgctgcaaggatgaatggagagtatccttatagagttggtcaacctgagtgtcaatactacttgaaaactggaacgtgcaagtttggtgcaacatgcaagtttcatcaccccagggagaaggctgcacttgcaaaccgtgtacaaatgagaaggaatgtgcttactacttaagaacagggcagtgtaaatttgcaagcacatgtaagtttcatcatccacagccctttaatacaatggttgctgtacggaactttatgtattcacctggacagtctgcaacctctcctggtcaacatacttattctggggccgtaacaaactggaccttgtcaagatctgcatcattta

SEQ ID NO: 22798 - DNA, 2395 bp, Oryza sativa
  unsure (1)..(2395): unsure at all n locations
  Clone ID: TF_OsC208927_1
gaacaagcaacaccatttaataattgcattctctagcgaaacaactcgataggccacactgtacatactaccaattacataggaattcatctcacttaaagcaaactcaaatggaaatgtaggatgttaataaatttaggtagcattacacaataaatcacatgtaaatagttcatgagtaggcacaccataagagtagaaaataggcaagantccatgaactaaggtccaacacttattccttcaccttgtacatccttttcagccacccaagtcttccttcacgtgtatcaagggtaagaaatatttccctatattcaggtttaataaataataaggtagccatgaaatgctcatcactgccttccacagctcctgcatcaacaactaactccattatctctgaaatactgcatcctcctcgacagatcctcacagatgattctaagttagttggcttctctttctcaatgagataactgattgctccatctgcataatttttctgaggatccattttgttatttgggacttcatcataagatttttgtaatattgcctcttcattttgcctattgacattcttacgagtcatctcgacatcatttgaagctatggaagatttattgccaccaatcatagcattgacgcaaatattagattcatcacctgctgaatctgaatccagcatgccttcaaatattatatttagcaaatcaacttttccaagtggttcaaagcgaaacttacaacaatccatcactgcctgaacaatgtgatctattatcttatttgtgatcaactttttcttgagcagggctcgaatgaaattaatatttcccagtgtttcaagtttcactaccctttctttatcccgttgctccatctctcggtcttgtccaatcaatttgccaatctcagaacatacggtgtgagcactttcgaatatttcttgacatttgttcgacagtgcttgtttgaacgtaatttcttcacaatcacagtcttcaggagggaatggtgtgaggttttgatttagatatgtgcaaagttgcgcatacgtcgaacagaaggctggctcagcaacaaccttttcaaatataagattaataacatccttcaaaatatcagcgctagagattcttgtttctattagctggcccttctgaagatcgaacatctttggtgaaaatgtgtttagtatacttttcaatgttttcagaacttcatctttgccagagataatgcctctctgatctttagaatcaaagtggaagcttgattggtcaggcttgttaaatttctcttgcttccaacctaaagaatagggttcttttgcttcagagaagttgtcccaaaatttctgttcccaattagtttgtgcagaccatgaatgccagtcacggctgtctgtcgcgtcaaaccgtttatatgatggagtttgtactatgaaatacaagactttgcatctttgaggaacattaatcagagcagcacaaacgatttctgccatgatgacatatgagaagggaaggatgctcacatgatctttctctgctccaaatcccgaaattttatcttcaccattcagttcaacattaatatcttgacaaaattttaagatgtccttgggcacttcgacattctgacaaagttggagaagttggtcccttgtgtaactgattcgttggtgaaaacttggaatccctggctgatggacttcttcggaggtaaaagtatgctcattcgattctccatggtcaagcaccgagtaaatgttcacctgagaggaaacttgattggcattacttgaaacgacccacttctcatgatctgagcctggatctgggtggtcaaacttgcagttagtgccaaatttgcagattccccggttcatgtagtatgagcacaaccctgtcccaggacgaagtggaagcccaagaacgttcagctttacttgctcaactttacttttgccttcaatatggtggcagtggcatgcattcccagagaaatactcttgttgtggtggcactggcatgcggggagggtggttgaacctgcaattcatcccaaacttgcagctcccgaacttgacgtagtagctgcagtcgggctcgccgggccgccgcgggaactgctcggccggcttcttgtcgtcggcgccatgctgcggcctcggatccgggtggttgtacacgcagctgatgccgaacttgcagctcccgaacttgacgtagtagctgcagtccggctcccccggtcgccgtgggtgctgctcctccaccttcttcgtctttcccgccaccggcggctttggcttcgacgtcgtctcgccgtcgccgacgacgacgggagtcgggcgcccccagaaccagtcatcgtcctgaggcat

SEQ ID NO: 22799 - DNA, 2566 bp, Oryza sativa
  Clone ID: TF_OsC2916_1
tcaccggaggggcggcaatggccggcggagaaaaacgagggaggcggcgaagaccggcgatgccgaggtgcggacgagcgacggcgacaccgggatcggcgggaggtgggggaaggacccgacaggtggggcctcgggggaaaggagagaggaggagacggttggggggagacgatgacaggtggggcctcgggtccaccggtgcaccacgcgcatcaccccctcatagttccacatcagcccccgcagcacgccgtcgagccaccgcagctgcgcctcacagacggcaccgttgaacatcacgaaccgcctggccacgccggcaaggccgctcgggttgttcttgtccgtgttcgggttcctcttgtccaagaatctccccgctgccgcggccatcgggtggtcgcgcgaccatcccacggcgttgaagtcgtacgcgtcgaggaagcggtcaaactcggcgacgacggcctggacggccagcagcgacggcgccaccgccgccgtcattggatgcttgtggttgtgggcattccaggagcggacggctctctggaggacggtgaggctgtggcggtagtagcgggggacgccgaggaaggagcggccgtcggggatgtcagtgtgctgggcgtcggcgttcggcggctgaaccagcatcggtcgtcgttgccgaatgattgccaatcggccgacgaccaccacaagtttgtcttcctctccggcgagcggtgaccactggccagtgaccaagagaggggaggaggaagaggagtatccgccgcgtccaccgctcgtgtcgaggtggacgatgtcgccgaagcgtctccaagtcggcgcgctctgcccctttttttggagcattagtctcgctttttttttttttttttttcagtattccagcaagactttcattaaataagcatctcttgtccgttacaatgtgccttgctcccagtatagacacatatgtacttatgtagtttcgagtctcatgtccgttgaatatatagatatataatatatgacaatatacagaaccaaaaaaaaaagggaaaaagacgaactccggaagctggacgagcaaaatccagtagcttctgcatgtataaacctccttgcctgagaattatttaccgagggaatggatccgagtctcccagtgccgcgaactgccgatgagaactatcgagcctgacattcaaaaaccttccttttctttcccgtttcagagaacagaagaacgcaaaaattgcaagtgaatcgagcttgcctgtaacctatgaatgctttattgagatggcagagaaacaccaccctcgccgagccttctctacagaggccacagctttttattcacattggaggggcctatcataactgtgtcaagtgattgaaaaattgtgctgagatctctcagctcagaaaaatcagcgaccaccgccaggactcgagctaccaccagatgttgtgttagtctgagcacgcatcatggtgtctgctgggaaaacccctttcggcaatattgatccaacaggctcggatgctgccacgggcgatgttacttggtggacgtctttgaaattctggccttaaatccgggaagtggaagccaagggattggccatacggcctgatttaggtgcactcaactctcgggggtgatgatatttacatgtaccgccaaatttgcaacctcctgttcccatataatattgacaatcaggctgcctggccgctcagggaatccatgttcttgttgattgttgctatatggaacgtaaggaccaccataagcaattgtagaggaagatccatggtgccccatgccgtacacaggtccagcttgaacattttgttgagctccacctgacactacagggtttaccgaagccggataagggctccatccttgcaatgggatcattccagatgagagcatcattggggtgtatgagcctggtatatatgatccaggaactacagtggtctccccatttatgtagttccaaatttacattgcccagttttcatgtagtaggagcactccttctcaccctccaccgcgaacccaaactctaatgctgctacccgatgagtgctaccgatgcgccggacaagatctaggcagtggcatgcccaattttcaagctcagtgccgccgcgatcgcgcgggtggttgtagcggcagcggtcaccgaagccgcacgcgccggtgcggaggtagtagacacagtcctcctccccgggccgctccggcagcctccccgccgcgtccccatcccctcctcctccacctccacctcccccgcctcctcctcccagccccatcctccacatcggcccttccaggccggtgtcggggctagccccgccctccccctcccctccaccagctgcggcggcggcggcgtgcggctgctccatgccttcgtcggcgtcagcggcggcgatcggggcggggagcgatcggagtgggaggaggggcggcgcgggggtgggggttgagagagagggagagggaggcgggtgggtgcctcgtgccgaattccttgcagcccggggg

SEQ ID NO: 22800 - DNA, 2079 bp, Oryza sativa
  Clone ID: TF_OsC170_5
ttagggacgacggcgcccggcgaagagcatttccgctgccgggtcagcgagcgggtcgacgttcgcgacgagtggatcgttggctgccgccgccgccgcagcggcgtgctgctggcggcagagcttgaggtggtgctggacggcggcgagctcggcgtgcagcatctcgtactggcggcagagctcgacgacgacgcgcgccgcgccgccgacggggtcgctggcgcgcgcgttggcctcgaacgtgagcgcctgcatggcgtcggcgtggagctccggcggcgtgtcccgcagcgtcttctggatcttgctgacgccgaacaggtggtgcgcgttgaggaatcgccgctgctcgtcggcggggaagtagcgcgcgagcgggcagtccgcgttgcacttgcgccgctggtacttgcacgcggcgcacgcctggctctgccctacgccgccgccgccgccgccgcagttcctccaatctgcacgatctgccatgcttagcaacccagccaacacctcacggccaaactgagcagggaacttctcattactgtcaaccaaatgtaaaagcactgaaccttctggtagctcaacataaaacaagcttgatttgctgtcacactctgatcttaacaattccctggcgcggttagcatcaccatctggattcactacagaaaattcaaatcccagtctctgtgctgctaaatggaatatctttttaacacttgatgctttagacaatggtactggaacagcctgaaggtttgcatggcgggactgctgagaaacccactcgaagtatatagctatctttccttgtttctcaaaatacttggccagagcatccttatatctcccaagctctgcctcagcttccacgggcatctttagtgtactagagcagtgctcaactggtataactagaacatggtttggaacaagtggcccttttgcaagtgcacagtagtaaccttctccaatgctgataacaagatgtgattcaacatctggacttgacaagcagaaccagcaactgctctcaacacgtcttcgttcgattcctattgtaatgctccctggcctcctcatcatgcctataattgcatttactccctcgaggacaggatcctgatgatgtaaatttgaaacatagacgattcccaccggcttcaccatgtctttgcttcttgacatcgtaacgccagtattgcaaatcagcatcctcagcaggacgctttggagtttcttcaacaggaactgactttgctgcttctctttgtttccaacattagcaagtccaataaaacgggtaacatgtgcagcggaatcactcacatatggttcccttgcatagaatacacctttagaaccatggagggtgaagcgggcgctgcctctgagccagaagaggttggggcatatctggatgcctccgggggagaagcctcgggcgctggacgcggccttcgcgagaaggcgaggcgccgcggggccgtagtccccggtgaagtaggtcgggatgggcacggcggcgcgtccctccaggtagtccgcgacctccccgccgccgccgccatccccgtcgccggcatcgggggagaagaactgcccgacgcagagcagcgcgtggaacggccccgtcgactggttcaccgaggtgacgcgcttgaagagctggtggaggcggccgttcgcgtcgccggcgaggaggatccgcggcggcgtcggtcgagacgtcgatcggagttagtacaacagcatgtgtatagatgcccttccccagaagacgagaatcccagatcaggacggtcttaaccatgataaagagtctacaactaataataccacaagttgttttggtaacctctgttgtactgtaaatttttcccccttcagttttgtgttttgacagcaaacaactgtctaactgactggttagttcctcgtcttttcctcgatgggacaatcaccgatcctgtaaaatttcctttcttttgatgacagaatcatacactgtttctatgatatattctaaaattttgcagtcaatacaaagagataatacatcccagtttttac

SEQ ID NO: 22801 - DNA, 627 bp, Oryza sativa
  Clone ID: TF_LIB3598-036-Q6-N1-H9
gtgttgggggtttttttttagtcatacagcattccttctttctctatacatgtcgtatccttcctgtagtaatcctaatgctatattgaaagcaaaaaatttcttgataaatcttctattaatcttacaaggcaaaaggagtatcaacgccgggggggggcggacttgtcgatgtgccatatttctttctgcactctggttacttacagtgtgcatttctgtgggtacgtgcagcagttccccttatcaagcatttgtgttaagaacactgtacagcttcggctcctcaagttttgttgcgggtaatttactcagagagtcaagaacaggaagcagcatgaaacatttgcaccgaggatggcttaggacgcctctctctcggtgcctctttcaccagagggtatttgctgggaatctgaatgggtgatcctccgagacctccctgagacattgtcaggcgatacttctgaatgtgctggtacaggtgccagcatacgtcgggcagacacatcaccagttggtgatgttgcgagaccatacatcacagttcccattggatgatcaaatttgcaattcggaccaaacttgcagatgccatagcgagaatagaatgtgcatatgggctct

SEQ ID NO: 22802 - DNA, 2037 bp, Oryza sativa
  Clone ID: TF_OsC40248_1
tcaggaatcatgactactgcgacttctttttctccttgacctgtgcgttgagagattctcgtcactgcttctcgatcggctcctccatgcatcagagctcatatctctggtgtctgaatctgaagtaacctctaaagtgtcgctgcgctcaccgtttccactctgacgcttcctttccctacggctcttggttgttccacttcttgaccttccgtacccagtttctgaatctgatcgagcatgatatttcattcccagcttgctgccttcactacttgacctctggtattgagtctccaagtctgaatcaacatcactgtttgttgctacccatctatcatccgatgtatcatggtgatccttgcgttttacagctacagactgtcctcttccatcatcttccatgtcccgatgccttgagctccttctggtgctgtgctcttctaaggattgcctcctggtcttcttgtgatgcctgccagtggacttgctgcctgaaggactctcggtggtgtcttgatcgatgaagtccgaagaccggccagaagatccaggctccaaactttcttggcgttcagatctgttcttcctcgacctaactttaccatggtctcctttacctccatttccatggtcaatcctatgtttttcttcacgcatgtacttgtgggactctctttcactttccatgttagaggagtatttgctggtcttatctttaatctctcgatgtcggtgcttatctgatgcagatgattcttttctgtctcgtctgtgctcagtatggctgctgcgttcatgcttcgaatgtgaataatctctggacgagtgctgtttatgtgcatcttcatcccttgttctgcttggtgtgtacctaggatcagaacttctcggtctcctcctgtctgaactctgtgagcgctctaaatgtggggtgtcgcttggcttgccatagatagaatcatccgagggaccaaaaagagcagccatcttcctaatccagtatctaggaggaggattatcccaatcagcccactcataatctcctccagggttgcgaaagcaatgaataaaattacaagcgattccacgtgaacatgtcttgaatcttgacctcatgtattcaccacatatggcaaccttccatcttgtcacagcaacaaattcacatgttatctgcttcccagcaaaataccgtccattcatgctgctgtaggcaataagagctgaatccaatgatttataatgcacataaacatttcctcgaagatggagtgatccatttcgacacaccttaaagttcacaagttcaccaaatttcagaaattctgtgtgcacatcttcataaaattcttcatagctctgttcaatctcttcatctgtacactcaagcccttcatcttgctccaaagcaaggcctggaccactatacatgtttctcatgagcagagtgcatgatttatcaggataaaaatgaactctgctgcaacgcactccaaagcggcaagcccctgtcttgaggtgaaatgggcaatgtgccttatcctgttgaattggctggttttccttggctttctttggtactttgaccattttcttcttcacagtgatttcatttccttcccatatgatctctgctggtccatcttcaacatattcccattcgtcatcctcctcggttccatttccatggtcatctttatactcgcgggaggaatcctccggagccgtcgactcctctctcgcagccgcggccttctccgcggcgcgcgcggcggcggcctccagccaccggcgctccgcgtcctcgaaggctcgccgcgcgcgctcggacgcgtcggcctcggcctcctcgagctcccggaggcggcgctcctcctccgggtcggccgcgagcgcctcagccgccttccgagcggcctccgcggcctccctccgcgcccggcgccgccgctccttcttccgctccctccgcctctccttcctcgtgaccgccgcatccgccgccgcggcgggatcagcggccgccgtcgacat

SEQ ID NO: 22803 - DNA, 2433 bp, Oryza sativa
  Clone ID: TF_OsC5401_1
gctcggggctcccgctctcgctctcgctccccctcccgcgtgccgacctcgccgcgccggccacccggggttcctctcgctccccttccttcctccctcttccgcctccgcctcctcctcctccgcccttacccccgcgcgcgtgcacgcgacggcgcggcgatctgatgctgccgccgctgctgctgcaggcgccgcggtgatggcggcggcgccgtccgccggcggcgttggggagggctcttcctcctccgccgccgccgccgctgctgctgctgccgcgacgatcgggccccacgtggtcgacgaagaggcaatgtggcagatgaatctaggagaagctatggaagctgggccatacccagagcgtattggagaaccagattgtagttattacatgaggactggcttgtgcaggtttgggatgacctgtaaatttaatcacccagcagatcgtaagatggctgttgctgctgcaaggatgaagggggaatatcctcaaagaattggtcaacctgaatgtcaatattatttgaagactggaacatgcaaatttggagcaacatgcaagtttcaccacccccgagaaaaagctgcaattgcaacccgagtacagctgaatgctttaggctacccattgcggccgaatgagaaggaatgcgcttattatttaagaaccggacagtgcaaatttgggagcacatgtaagtttcatcatccacagccatctaatacgatggttgctgtacgtggctctgtttattcacctggacagtcagttacttctcctagtcagcatacttacccaggggctgtaacaaactggcccttgtcaagatctgcttcgtttattgcaagtccaaggtggccaggccattctagctatgcacaagtgattgttcctccagggctcgttcaagttccagggtggaatccttatgcagcacaaattggttcttcatcctcagacgatcaacagaggacagctggaggtgcacaatactatactggctcacgtcacagtgaaacacctaacatgggtgaccagggaatgttttcatcataccaagctggttctgttcctcttgggctatatacagtacagagggagagcatatttccagagcgacctgaccaaccagaatgccagttctatatgaagactggggactgtaagtttggtgctgtatgcaagttccatcatcccaaggagagaattatccctactccaaactgtgcgttgagctcattaggtcttccactgcgtccgggagagcccatatgcacattctattctcgctatggcatctgcaagtttggtccgaattgcaaatttgatcatccaatgggaactgtgatgtatggtctcgcaacatcaccaactggtgatgtgtctgcccgacgtatgctggcacctgtaccagcacattcagaagtatcgcctgacaatgtctcagggaggtctcggaggatcacccattcagattcccagcaaataccctctggtgaaagaggcaccgagagagaggcgtcctaagccatcctcggtgcaaatgtttcatgctgcttcctgttcttgactctctgagtaaattacccgcaacaaaacttgaggagccgaagctgtacaggtctcgcccttttgcctcacatttgagctttacataccggagcttgcttcaagacttccaacatgtatcgcattcaggcaggaaaaagttcttgcttgttagggatgctcttttgccccgtgtaaacgggacaaccgaccttatttaaacatctatatatggaacaaactcacctctggacattcgatttcgagtgatgtgccttgatccctttgttgtagttatacaggtgccttgcaatggacaaagcttttgccaaacgggggatatgtgcaaatcgctctcctctctgtttctttcttttttttgccttccctctaatttagcagtttcataaggggcaacccccgcttctggaattgtgcatgttgaggatgcggaaataataggcaattgtataatcatctacatatttataccctgtcccttgttcccatcacaaatgtttgataaggggaattgttgcaggtacccacagaaatgcacactgtaagtaaccagagtgcagaaagaaatatggcacatcgacaagtcaggttgccattggcgttgatactccttttgccttgtaagattaatagaagatttatcaagaaacttttttgctttcaatatagcattaggattactacaggaaggatccgacatgtatagagaaagaaggaatgttgtatgactagatgaataacagatgagtatgtgatctctgcatctattgttagaaacaatattgttttgcacacggcaatgcatgtgacttgttacattggtaatgagaaaacaaggctggattccctggccc

SEQ ID NO: 22804 - DNA, 1653 bp, Oryza sativa
  Clone ID: TF_OsC6441_1
gttctagatcgcgagcggccgtccttttttttttttttttttttttttttttttttttttttttagttagatatgctcaacaaagtcaataaaaaaatactatagcatatgatgtcacctgcacatgaacgcccaaaccgaaaggtgcatatactcaaaatgcatcagctaaaaccactaaataacagggaatacatcagatgccacagagatctacaaagacgacatacctacccaagtagtgcggtttcatgtttaattcatatgcgaggaatgaataaggcatggatttaattcggccttgcgtcaatatatttgtctctcttctcagctccctgaattcgacaccttggcgatagcctcctgagggggtgggtggtcgaacttgcactgcataccaaacttgcacacgccagtcttcatgtagaaggcacataccacggcatcctctcttcttggtaggccagcaagagtaagctgcacagactcctcagcaggctcccagtttgcagagggatcgggagcagaacgatcaattgggtggtgaaacttgcatcggtcagcaaacttgcaaaatcctgtcttcatgtagaaatcacaaacagttgctccaggcctctggggataggtgactggcccaggtccaacaggcatgtgtaccgcatgaaaatacaagccttgcaagaagtctgcagaggtaataaggaacatggatccctgagaaggtagaatggtgtgtccccatggaagaggaaaatttacttctccacggtctggatggttgtatagacaggtagaaccgaactttcaactgtctatctaaatgtaaaaaggacaatcaactttacctgttctcataggcagtcctttagagttaaactcttgcgcagcagcaactggagtttgcatcttcgctgaaactgaatcagctgctgaaccagtatccgtttcacttacaggagtcgctcaacttacgggagcatcatgacttgaaggtatgtcaatatggttggaatgattggacgtacacaatgcaagaaatttggatcagcctgtttgaacataaaaatcactcgtattttccaacggtactgcatcatcctataactttggatgattgaacttgcatttcgatccaaacttgcatttaccagtcttcataaaaaaaggacaatctggttccccttcttgttctggataggattcttcaacatttgcagcctctttccaatttggaatcccaccctctggaacccattgtggatggtcaaatttgcaggaacctccgaatttacaggttcgggtcatcatatagaaggcacagtccttttcccccggtcgctgtggatatataggaaggctgctttcaagcctagggcgcttggtcatagtatttgaagaatacaaagcctcaatctgttcaacagtactatggcttcccataattggctgatgatagagaactcccatggatcgcctcgcgccggccagccgcgcgtcgaggtcggcggcggccgaggaagggttggcgagcgggcggccgccgtagcgggccgcgatgaggtcgacctcgtaggacgagtaccccgccgcggccgcgccctcgccgcccgcggcgccgccgtggccgtgcgggtagaaggggtccgacat

SEQ ID NO: 22805 - DNA, 1605 bp, Oryza sativa
  Clone ID: TF_OsC23226_6
atgtcggtgatggacgccaatcaggcgtacgctcggcaccactttgacggcggacacctgcgtggtgaccgcgccgacgtgctggcgcagcaggctgggatggatatcggcagcatggcggactcggaggatggagatcacgttgcgacgacgacgacggagcagcgctacgacgacgacgggcacctcgtccccagcagcggcggccaggaggaggagggatccggcggccgcgacgtcgtcgtccccggcggccacgtcgctgaggattaccgctctggcgttggcgtccccgtcggccgagacgcaggcggcgccacctcctccccgccgcagccagtccacgtcaccccgagcatcctcgtcggcagcatccacgcgccggtcttccagggcgagctcgtcggcatgaagttcggggtcgggtcaggctccatgggtgccggcaccagcgcgaccaggcgcctccccgcgaccggttttggtgctctgccgaccagcagcatggcggaggatagtgccgaccacgccgacgacgaccacctcgccgaggaggaggaggaggaggaggaggagcactacatcgacgacgggcccctcgtccccagcagcggcggccaggaggaggagggatccggcggccgccacgtcttcgtccccggcggccacgatggtgaggaggaccaccccgacgacctcgtcgccgacctcgacctcgacctactcgtcgacggcgtagtcggccctgtccccggtggccacctcaacgcagatgcccccgccttcgtccccaccacccgtgggcgccaggacctctattccgccctctcctcatccgcccccgccgccggttaccggtaccgccactacatcacctcgtccgcgctcgcagaagccggccacgtgtccccattcctcggtctcccgtacgccacggccttcgattctccgctcgaccgcgagttggtcggcccgtcgtcagcgccgccgccgtgctccgccgctagccgtgcctggttagtgcgctgttcctcaccgctctccgactccgagtggactcggcgttcgatcctggcgcgagaggctgcacacacaccggcctccaccgtcactgggcgtgggcggttcgagttcgtgcccattcccggcgcaccctatgctccgccgccgtcattcgcccccatcgccgccggagctggaccagcagcgcgaccgctacagcagctggcattcggactggaggaacacaagacgaagctgtgcgcggaatattattcccgtgggcttggttgtcctcgtggcaacacatgcaagtacgcccatggagaagatgacctgcgtttggtggtggcggtgagctctctagccgacgccggtgagggctcctcgtcctcggattcgtccttcgccgctttgggaggggaagacaagtacaagacgaagctatgcaagacgttcacgagtggtggattatgcctgtttgcagccaactgcaggttcgcgcatggggaggtggagcttgggaagaaggagccgtgctggtatttcttctccggtcagacctgcccccgcggtgacacctgtggtttccggcattcctactag

SEQ ID NO: 22806 - DNA, 1164 bp, Oryza sativa; identical to SEQ ID NO: 13694
  Clone ID: TF_OsC333015_1

SEQ ID NO: 22807 - DNA, 1648 bp, Oryza sativa
  Clone ID: TF_OsC3834_1
ctcgagttttttttttttggtgctccccccctttttttttttttttttttttttttttttttgacaggtaaacaggcagttcatactttcagataaccatatctaactttccaggtacaggtattgcaaccatgacttcatatcatgtaagcaccatacatgatatcaggtattgcaacagacagcacaacataaaattcagtctaacaacccgcagactatgtcttgactctgaccaggtttccacatggctaatctaaatgtcttgagaccaggattccaaaatggctaactaattgacatctccttttcgctcaagacaatggtttttcccaatggctaactatagcatcttgttttcgccttcaggtggtggcgacgaaagatcaaaggtttgatttcgcctactcggtttcgtctatccagtcaccatagatcctgctgatcttgtcagggcccttccatttctgaatgggcctctgtacctgcccagacctttggccggcaatggtagaacgctgcgcctgcacgcctagatggtacacgtctgcatgagggagcactgtggtggatgcagcagcggtctctgctggagctttcgcagataccacagcttgcttggagtcgggagttgctgcagcatccctgctgtctatgtcaacaagtcccccaccatacttgtggagttcagctgctccatgagcgaagtggcatttgctgccaaaggggcagtacccagtcatctcccacttgttacagatcctcgtcttccagttcgacggcttctgcatcggcccattccccgccgcggcggaggcggaggcggccgcggcggccgcagaattgtagctcccgccaccgccgccgccgccgacgctcggcgagaggctgatcgcgacgctctccctggccttggactgctcgtcgtggaggaacgtgcacgcgtcgccgtaggggcatccctcgtcggtgtagaacttcttgcagtgcctccccttgtaggccctcccggagccgccgccgccgccgccgccgcagcccgcgtcgccgccggcggtgggtcccgacgacgtcatgatggggatctggtgctcctccctcgcctccgtggcctcctcgtgcgccgcgacgatctcctgccagttgggcggcggcttgcggagctcctccatgccgtgggcgaagttgcagttggtgacgtaggggcaggtccccgccctgaacttgcagcacagcttcgtcttgaagaacatcttcccgatcgcccgcgacttgctcgtgttcccgccgccttcgccgccgccgccgccgcgggatttcttgcccggaggtggctgctcgctcccggccctcgaggagccgccgccgccgccgtcggcgttccactggctgttgtagtcgtcctcggtggcccatatcccggcgtccccgccctgcgccgccgcgttcgcccaggcgtcggggcccgccgcgtccgggatgatgtggatggcgttggtgtaatccatcacccgctaccaagaatcgaaggcagcggaagaaggaggaggtgggagagacgaacagcgaggtcacttgcttgctcggtgatggcgaacggcggcgccggcggcgaaggcggcagcgctatcccgccgaggagatgagt

SEQ ID NO: 22808 - DNA, 1373 bp, Oryza sativa
  Clone ID: TF_OsC4710_1
gcacgtcgcagccaacacctcacaccactctcttccaaactccacatctctcacctcctctcgcccacccaatcccttccgccttctacccgccgccgccgccgcgacgagccggaaaccctagccgagctccgaggcggcgtgcgcgagcgcgagcgcgggcgcgggtgtgggggagccgagagatggaagtcggcggccgcaagaggggcaagcccgacggtgcgaacggcgccggcgggaagcgcgcgcgagaatcggagtcatttcaaaccggtgtaggaagcaaatcgaagccatgcaccaaatttttcagtacctctggttgcccctttggtgagggttgccacttcctccaccacttccctggtggctaccaagctgttgcaaagatgaccaatcttggtggtccagctattgcgccgcctccaggaagaatgccaatgggaaatgctgttcctgatgggccaccaacacccactgttaagactcgcctgtgcaacaagtataacactgcagagggatgcaaatggggggataagtgccactttgcgcacggtgagagggagctcggcaagcctatgttgatggatagctcaatgcctcccccaatgggaccaaggcccactggtcactttgcacctccaccaatgcctagccctgccatgtccactccagcaagctttggcgcttcggccacagccaagatcagtgttgatgcatctcttgcaggtggcataatcgggaggggtggggttaacacaaagcagatatccagagtcacaggggccaagctggccatccgtgatcatgaatcagacaccaacttgaaaaacattgagcttgagggcacatttgatcagatcaagaacgctagtgcaatggtgagggagctgattgtcagcatcggtggcggtgcccctccacaaggcaagaaacctgtgggaggatcccaccgcgggggaggccccggaagcaacttcaagaccaagctgtgcgagaacttcaccaaagggtcgtgcacttttggcgacaggtgccattttgcccatggtgaaaatgagcttcggaaatcagctgctgcttgagatccattgtggtttgtagcgattagtcattgtaactcgaaactttgagggctgatgctgaattttctgaccgtttaggcttatgtgctgtcttgttttacctctggattctttattgcattttatttttgagctatttctcgtacgcctggttatgtgattatgttatcccttttctcctgcgatgttaaagcctactgtggttgatgattactatgcttttcataaaattaatgctactgtgactgtttctctggcaaagtgagcagtctcgttgattgttgg

SEQ ID NO: 22809 - DNA, 2038 bp, Oryza sativa
  Clone ID: TF_OsC98105_1
atggagccgtacgcggcggcggaggggggaggaggaggaggaggtggaggcagcaccgacaccgggctcgaagagtcgatgtggaggatggggctgggcggcggcgggggtggcggaggggaggcggtggcggcagggaggctgccggagcggccgggggaggcggactgcgtctactacctccgcacgggggcttgcggctacggggagaactgccgctacaaccacccgcgcgatcgcgccgccgcagcagtgttaaatggaggtgggaagaccacacattcggcagagtatccagaacggccggggcaaccagtttgtgagtactatatgaagaatggaacttgtaagtttggctctaattgcaagtatgatcacccaagggaaggctctgtgcaagcagtcatgttaaattccagtggataccctctacgctcaggtgagaaagattgtacctactatgtcaaaactggccattgcaaatttggatctacatgtaaattccatcacccagaaattggtggagtttcagagacacctaacatgtatccaccagttcagcctcagcctatctcttcctctcatccatatcaacatcttgctggctggcaaatggggaggcctcctgttttgccaggatcatttttatcaggctcatatccaccaatgatgcttccgtccacagtcgtaccaatgcagggatggaacccttacatttcacctgtgaaccaagttgcgtcagctggggggcatcaaactgttcaagcagggccgttttatggcttatcgcaccaagggccttctgctgcagtcacttatggcagtcagtatgcaccgttatcttcttcaaccatgccttcaagtagcagtaaacaagaacctgcctttcctgcgcgacctgggcaacctgaatgccagtattatctgaagacagggagttgtaaatttggatctgcatgcaaatatcatcatcctcagtatttgaatacacctaagtctaactgtatgctgagtcctcttggtcttcctcttcggccgggtagccaaccatgtgcttactatacacagcatggattttgcaaatttggtccgacttgcaagtttgatcacccaatgggtactctaagctatagcccttcagcgtcatcgattactgatttgcctattgctccctatcccctcaattacgctgttgctcctgtggctccaccttcatcttcttctgatttgcggccagaataccttctaaccaaagagttttcagccaaccagtcagcgtcacctggtactacatgcggacctgctggagcaatgttaaaagcgtacgctccacacatgcttatccgacctcaaacttctggagctggtggcatggttacaactcatggtggagagctctaaccaccttcagcaagcttctcgggacttttttggcatatggtgaatgagatctcgtctcctttttttgcgtcagttcgacttaccctctcagcatcagttcacttggacccccactcattgtgaataaggcttcaactgactttgacaaaggcatggccaaggtggtaatcttgccacctgaataaattcatcatagatagataggcagtggcaagctcattcacttgccgtttatctcttcatgtctgaaatggaacaggggtcattctgaagtccagttaactgtttgactgtcattgcactatgattcagagcttcgaatccatctcctcggtacataattttatcggcggagcaggccgttgagtgtgcaccactgcagagagtttcatgtcagaaagttatttggtttggtcgctcttgcccaaatctctgtttatttttaatcatcatatatatatgcaatctcgagttcagctatatgcatattcatatatatactgggatcaagaaactgtaatcacacacttggaaaccctcatctgaatcgccccaagctaacttgctgcatcatcattttgctcatttagtcgattgcatccgacttatgtttgaaccctgcaaaaaaaaaaaaaaa

SEQ ID NO: 22810 - DNA, 1403 bp, Oryza sativa
  unsure (1)..(1403): unsure at all n locations
  Clone ID: TF_OsC2916_5
gcagactgactacacagatgtgtgtagttagccgcatcatgtgtcgctgganacccccttcggcaatattgatccacaggctcggatgctgccactggcgatgttacttggttgacagattggtctttggtcgaaatgtattctggccttaaatccggggaaggcgaagacggagccaatgtggcaatagagaagccaataggatatggggcaattggcatatcagagaggggcaaagcagacggactgtagccaagcgtgcccattgggtgatcatacttgcatgcaactccatatctgcaatacccattttgggcatagtatgcacaaggctgagcccccggacgaagtggaagacaaagggagttgaccatatagcctgatttaggtgcactcaactctcgggggtgatgatatttacatgtagctccaaatttgcaatctcctgttctcatataatattgacaatcaggctgccctggccgctcagggaatccatgttcttgttgattgttgcttgattgtccagttgaggaagcatatggaacgtaaggaccaccataagcaattgtagaggaagatccatggtgccccatgccgtacacaggtccagcttgaacattttgttgagctccacctgacactacagggtttaccgaagccggataagggctccatccttgcaatgggatcattccagatgagagcatcattggggtgtatgagcctggtatatatgatccaggaactacaggtggtctccccatttgccaatttgcaagagaagcatatggatgaggggaagctatagatggagactgtaatggtgggtatattccaggggtcatcggaacaccaccgaattccggatgatggaatttacatgtagttccaaatttacattgcccagttttcatgtagtaggagcactccttctcacccaggcgtatagggaatccactgttgtttaacataacaggtagcacagctccatcttgcttaggatggtgatatttgcaattggtaccaaatttgcaagtcccagtcttcatgtaatactcgcatataggttgacccgccctttctggataatccaatgctgctgcattccttgcacctccaccaaactcagtgccgccgcgatcgcgcgggtggttgtagcggcagcggtcaccgaagccgcacgcgccggtgcggaggtagtagacacagtcctcctccccgggccgctccggcagcctccccgccgcgtccccatcccctcctcctccacctccacctcccccgcctcctcctcccagccccatcctccacatcggcccttccaggccggtgtcggggctagccccgccctccccctcccctccaccagctgcggcggcggcggcgtgcggctgctccat

SEQ ID NO: 22811 - DNA, 2073 bp, Oryza sativa; identical to SEQ ID NO: 13700
  Clone ID: TF_OsC42413_1

SEQ ID NO: 22812 - DNA, 747 bp, Oryza sativa
  unsure (1)..(747): unsure at all n locations
  Clone ID: TF_LIB4309-005-Q1-K1-C12
ctggtcgcttccccttccgcttccctccgccaaccacgagctagggtttcgatctcgcccccgaccggcttcccctcccttccctcctcctccctccgcgcgaaggctcgccatggagggagccggcgccgcccgcaagagatcccggccggacacggccaacggaggcgccgccggagggaagcgctcgagagaaacggagtcatttcaaactggtctatcaagcaaattgaagccttgcaccaagtttttcagcactatcggatgcccttttggcgagggttgtcatttctcgcactttgtccctggtgggtatcaagcagtagcaaaaacactcaatctaggcaacccagctgtgcctgcaccggcaagagctcctatggatcatgctgctggtggtaattctcatccagcttcttctggcaagacacgcatgtgcaccaagtataacactgcagaaggctgcaaatttggtgacaagtgccatttcgcccatggtgagagggaacttggcaagccagcttacatgtcccatgagagtgccatggctcctcctatgggtggtcgatatggaggccgacctgaaccacctccaccagccgctatgggtcctccagcaggaaactntggtgcatctgctactgccaagatcagcgttgatgcctcgcttgctggtggcataattgggaagggtggagtcaacacgaagcagatatgccgagtaactggggtcaagctctcaatacg

SEQ ID NO: 22813 - DNA, 2152 bp, Oryza sativa
  Clone ID: TF_OsC49276_1
cggcacgccgtgctgcacccccgggctggaggcttgtctcctcctctctcctcctcgccgcctcctctcctcgcgtgcctagcttcccttcccttcccttcccttcttccctactcctcccactccactccacgcgcacctcgccgcgtccctgatctgattgattgatgccggggcggccgtgatggcggcgggagcaggagcgggcggcgggggcggggagggcgacagcaacgggggaggcacctccccgggtggcgtgtcggcggcggcgccggcgatcgggccccaccacctcggggttgccgccgcggaagaagcaatgtggcaaatgactttaggaggaggagagtctatggagtccactccataccctgagcggataggagagccagactgcagttattatatgaggactggactatgtaggtttgggatgacctgcaaattcaatcaccccccaaatagaaaactggctgttgctgctgcaaggatgaatggagagtatccttatagagttggtcaacctgagtgtcaatactacttgaaaactggaacgtgcaagtttggtgcaacatgcaagtttcatcaccccagggagaaggctgcacttgcaaaccgtgtacagttaaatgttctaggctacccgatgcgtccgaatgagaaggaatgtgcttactacttaagaacagggcagtgtaaatttgcaagcacatgtaagtttcatcatccacagccctctaatacaatggttgctgtacggaactctatgtattcacctggacagtctgcaacctctcctggtcaacatacttatcctggggccgtaacaaactggaccttgtcaagatctgcatcatttattgcaagccccaggtggcctggccattcaggctatgcacaagtaatcgttccccagggccttgttcaagttccagggtggaatccttatgctgcacaaatgggctcttcgtctccagatgaccagcaacgaacacctgtaaccactcaatactatggctcacgtcagagtgaaacaggtggtatgggagatcatggaatgtatcagtcataccaaggaggctctgttccagtcggtgtttacacagtacaaggggaaaatatatttcctgagagacctgatcaaccagagtgtcaattctacatgaaaactggagactgtaagtttggtgctgtttgcaagtttcatcaccccaaggagcgactggtacctgctccaaactgtgcattgaattcacttggtcttccactacgcccgggagaacctgtctgcacattctattctcgttacgggatctgcaagtttggtcctaattgcaaatttgaccatcctatgggaacccttatgtatggaagtgcaacatcaccaagaggtgatgtgtcatctatgcattatcagttgtcaccctcaccagggcatccaggaatattgcttgatggaggctctggaaggtctcaccgggttcctcagtctgattcccagcaaataccctctggcgatgggaatgccgagagagaggcatcataagccctcctcggcctttcctcatgctacctcccattcttgactcttcagtaattatctccaacaaattcaaagagctgaagctgtacaggtccttgtccatcctttttctgcttctctgaatcaccacacaccggtgcttcatcatgtatcacattcaggcaggaaaatgttcttgcttgcccctccccgccccaattcctgcatgccccgtgaaaataaatggggcaaccattcttatttatccctaccatatatacacacacaagatacactcacctcctgacactcggttcggcgaatgatgtgccttgatccctctgttgtagttatacaggtggcctgcagtggacaaagcttaccaaactgactgtattggggattctgtttcgttttgctcttcttcctttctaggcattggggagtaagcgcaggacttgctgcttgtgcaagtgtgcatgttgaaaacaacggaaataatgctctgccttaattgtaataattgtaatttatgttctaccaactgaattatttgttcaataaaagaatcggccatggctgcgcgatctgggtcattgttctcgacaaaaaaaaaaaaaaaaaaaa

SEQ ID NO: 22814 - DNA, 1460 bp, Oryza sativa
  Clone ID: TF_OsC1290_1
caaagttaaaaacgataacatatgaacttgtttttatttagcatatgctccctttgttgtctactttttctgtatgtaatgcgctatgacgactctaaatcccacgcgtccgccctcgcccccggcctctccccaactcggcgtcgcgccgcctcaaccgaagcaaggagcaaagcggggattcagaacgggaaggagaaggtccggttcgtccgctctcgagctcaagtgtcagttgaagtgttttgaaagtcatggcggagcatttggcttcaatatttgggactgagaaggatagggttaactgccccttttacttcaagattggggcttgccgtcatggggatcgttgctcccgtctgcacaacaggccaactgtgtcgccgacaattgtgcttgctaacatgtatcagcgccctgatatgatcacaccaggagtcgatgctcaaggccaacctattgatcctgaaaagatgcaggagcactttgaggatttctatgaggatatctatgaggagctgagcaagtttggtgaggttgagaccctcaatgtctgtgataaccttgctgaccacatgataggcaatgtgtatgtccagttcagggaggaagaacaggcagtcgctgcgcataatgcccttcaaggtcgcttctactcagggcgcccaataattgttgagtattcccctgtgactgatttccgtgaggcgacctgtaggcagtttgaggagaacagctgcaaccgtgggggctactgtaattttatgcatgtaaagcagattggcagggagctcaggaggaagctttatggggggcgatccaggaggagccatgggagaagccgcagcccaagcccacgccacaggaggggcaatcgtgaccgtgatgatttccgccgtgaacgtgatggttatcgtggtggtggtgatggttaccgtggcggcggcggtggcggtggtggtgacggttaccgcggcggtgatagttaccgtggtggtggtggtggtggacgcaggggtgggggcagcaggtatgacaggtatgatgatggaggaaggcgcaggcatggcagccccccaaggcgtgcaaggagcccagtcagggaaagcagcgaggaacgcagggcgaagattgaacagtggaaccgtgaacgggaggaaaagccttgaacgaaagcagtgatatctctatggatggccggttcatgccttcatggcaatcactatccgctggagtcgtggtgtgctgctatgttctaagtggatatttagtgtgtgtcgtttggtactcatgcttggctgagtaacccttttaaatgcaggattctggattctatttacattgtgtttcgtttgacgtgtaaaccgccgtttgtttttaaatatgcaatattggatcttttgtcagtctaaaaaaaaaaaaaaaaaaaaaaaaaaaaaaaaaaaaaaaaaaaaaaaaaa

SEQ ID NO: 22815 - DNA, 1954 bp, Oryza sativa
  Clone ID: TF_OsC2718_1
ttttttttttttttttgtcctcaactgatgaaactactatagatgaataaagtgagggtgaagatactgaaagagggagctctacactggcatacaccccagaaagactaagttatttgcttcttagacatctatcaaaagctgaaccgaaaacgtaacaatccatatagaaaatcgcaatacaacaggctaatcacctaaagatgcagagatatatatagtcacaaaaggcaatggagaattagtgcgccgcgcccaagatgcgtttcggctctcaagcagcgcccttccgctgctcgttctcgccatgagcgaagtggcatcggtcgccgaacgtgcaggttcccttcacgaagttctcgcacagcttggtcttgtagttgctcctgcccccggggccgcctcggcctgctggtgctgctcctgctgctgaaccagcgggtttcttggctggtgtgctcgggctgattgttgcaatgagctcacccaccatgttgcttgcctgctttatctggtcgaaattgccttcgagctcaatgttcttcaggtttgaatctgattcatggtcacgtattgagagcttgaccccagttactcggcatatctgcttcgtgttgactccacccttcccaattatgccaccagcaagcgaggcatcaacgctgatcttggcagtagcagatgcaccaaagtttcctgctggaggacccatagcggctggtggaggtggttcaggtcggcctccatatcgaccacccataggaggagccatggcactctcatgggacatgtaagctggcttgccaagttccctctcaccatgggcgaaatggcacttgtcaccaaatttgcagccttctgcagtgttatacttggtgcacatgcgtgtcttgccagaagaagctggatgagaattaccaccagcagcatgatccataggagctcttgccggtgcaggcacagctgggttgcctagattgagtgtttttgctactgcttgatacccaccagggacaaagtgcgagaaatgacaaccctcgccaaaagggcatccgatagtgatgctcctggccatcatctcctggtacctccggtacgactcctgcttctccagcaagaacttggcatggcacctcgcgatgaacctctccgcgagcctgtcgatctcgttcaccgcaccattgccgtcgccgtcgccgttgccgttgccgccgtcttctccttctccggcagccggcaatgcaccggccgacgtctcctcctccagccagcacaggtacccgcagtcctccccgtcgtcgccgccgccgccgcgcagctcctccgccgcgccgtcggccggaaccaccacgttccacgtcgagtcgtcgtagtcgtagtagtacgggtggtagtgcagctcgagatccttggcgcgagccggcgtgacggcggcggcggcggcccagttgaagcgcagcagcttcatgaagctggcgatcctcttcttgctcttctccggtctcgagcggtagccgatggcgtacttcttgccgccgccgcctctcgtcggcgccctcttcttgcggacgacgtcgaggagcagcgacttgaacttggcgagggcacggaagacatggccgacgtcgttttcgttctgtaaaactctgattactgaatacttgtagtcaaaaagaaaagtaaaaaaatgatgcactgcatgcctcatcggatgctttgcctgtctcaagactttggggccaaaaaaccttggctccatgaagcttttgtttccagtcatgtccttctcaaaggaaagagaagcgacgaacaactttctgtgagcaagcctgttggcacaaaaatggaccttaatctgttgtttgattctttctgcacgccactgactagaattgttcagctggataacagacaagagagagatggagcgatgaactgtgtacgcacttgacat

SEQ ID NO: 22816 - DNA, 659 bp, Oryza sativa
  unsure (1)..(659): unsure at all n locations
  Clone ID: TF_LIB4371-030-R1-K1-G10
ctcctcctcctgcttcccctccggcgacggcggcgcagatctccgagaaatctctagctttttcagcggcgaagcgaatccatggccgagcacctcgcttccatctttggcacggagaaggaccgcgtgaactgccccttctacttcaagatcggcgcgtgccgccatggcgaccgatgctcccgcctgcacaacaagccgtcggtctcgccgacgctgctgctctccaacatgtacctgcgtccggacatgatcacccctggaattgatgctcagggcaaccccatcgaccctgagaagatccaggccgacttcgaggatttctacgaggacatctttgaggaactcagcaagtacggcgagatcgagagcctccacgtgtgtgacaacttcgccgaccacatgatcggcaatggtgtatgttcaattcagggagggaggatcaggccgccagagcgctgcaggcgctgacggggcggtactactcncggccgtcctatncattgtcgagttctcgcncggtgtccgatttccggggaggccacctgccggcaatatgaagagaacagctgcaaccgtggtgggtactgcaacttcatgcacgtcaaggagatcggcagagacctgaggagnaaggttgtttgggcacctgcataggt

SEQ ID NO: 22817 - DNA, 1552 bp, Oryza sativa
  Clone ID: TF_OsC1291_1
agtggatcccccggccgggaggaaacccaccaccgaattcgtccgtactcctcctcctgcttcccctccggcgacggcggcgcagatctccggttggaagttagggtgttcatcttgacacaaaatcatgccgaaatcaaactgtaccgaagcgaaaataagatatggattagctctccttccaattgatttatcgttctgtcaatattgatccgaatacgaaaattttaagtgctgttattttgaaggtttcggaaccggaattcggaattgcagtagcagtggatgcctttataaatcaagttcttgtccttggcttcaaatactcgatgtgtttcttggctaatcctaatccctagctgcttgtgtgttgcgtgtgcaatttctgacccttttgtggtggtgtatatcaacagagaaatctctagctttttcagcggcgaagcgaatccatggccgagcacctcgcttccatctttggcacggagaaggaccgcgtgaactgccccttctacttcaagatcggcgcgtgccgccatggcgaccgatgctcccgcctgcacaacaagccgtcggtctcgccgacgctgctgctctccaacatgtacctgcgtccggacatgatcacccctggaattgatgctcagggcaaccccatcgaccctgagaagatccaggccgacttcgaggatttctacgaggacatctttgaggaactcagcaagtacggcgagatcgagagcctccacgtgtgtgacaacttcgccgaccacatgatcggcaatgtgtatgttcaattcagggaggaggatcaggccgccagagcgctgcaggcgctgacggggcggtactactccggccgtcctatcattgtcgagttctcgccggtgtccgatttccgggaggccacctgccggcaatatgaagagaacagctgcaaccgtggtgggtactgcaacttcatgcacgtcaaggagatcggcagagacctgaggaagaggttgtttgggcacctgcataggtcccggagaagccatagccatggccggagccgcagcccgagcccgtaccattaccggagggactatgatcggaggagctcatcgcggtccagggaccacgacgattactaccgtggaggtagccacgattactaccgtggaggtagccggaggagcagcgagaggcaccgcagcagctacgacagcgatggcagcaggcggcggcacaggtccaggactaggagtcctgtcagggatggtagcgaggagaggagagctcaaattgagcagtggaaccgtgaaagggaggctgcacaagtgtgatctctggattagttgctgtttgcaatggcccatgtttctcatcttgtactggtagccctagattaaattagcatcatatcttatcttaatgatctgagcttggatgtactcgagattttccttactgaacttgaattttctgtcagatgcatgtgttaactgaacctatttggtgttaaattatatttgtactgatggttgtgtgctaaaaaaaaaaaaaaaaaaaa

SEQ ID NO: 22818 - DNA, 685 bp, Oryza sativa
  Clone ID: TF_LIB4309-025-R1-N1-C2
gctcgccaacccttcctcggccgccgccgacctcgacgcgcggctggccggcgcgaggcgatccatgggagttctctatcatcagccaattatgggaagccatagtactgttgaacagattgaggctttgtattcttcaaatactatgaccaagcgccctaggcttgaaagcagccttcctatatatccacagcgaccgggggaaaaggactgtgccttctatatgatgacccgaacctgtaaattcggagggtcctgcaaatttgaccatccacaatgggttccagagggtgggattccaaattggaaagagcaggctgcaaatgttgaagaatcctatccagaacaagaaggggaaccagattggcctttttttatgaagactggtaaatgcaagtttggatcgaaatgcaagttcaatcatccaaaggaaaagggtaatgcattatcgtctggaaataccaatgataagcatctaattgctgataggtctatcttaccagtgaggccttctgagccactttgttctttttatgcaaaaacaggcaaatgcaaatttcgtgcaatgtgtaagttcaatcatcccaaggatattgaaataccttcaagtcaaaatgaaccccaaagtgcagtgactgttgaaggagaaacggatattggttcagcagctgattcagtttcagcg

SEQ ID NO: 22819 - DNA, 2081 bp, Oryza sativa
  Clone ID: TF_OsC53320_1
atgctcctcgtcgacggcgagcccgtctccgcctccgcctcccccaccttcggctcctcccgcggggtgcgcctacttggttgttggagggatttcttcccaccgatcaattcgtcgttataatgggaatttggatagctctaattattgcttaaaataacggtaatcatgtgtcatattttctgttcattagcgaatcaaaccctgtacaggactacaagaaaattccttcctttcagctgtgttaaaaaatggtacctcccaatcatgcaatagtttttttttttaaagtccttccagcgggagttcgccacggttgatccggcgcgcgtcgagttagtgggcacagatgaggtgactacatgcgtgggtgtagtaattcgcaacaacaagactggaatgacctccattagccacatggacttcccaaaaattgtggagggagggctcaaacagatgttagaattacttggtgatgacaatgcaccgtttgatgttgtacattctgctggaaggaagcacatcaaacaggaagggtattcctatccactatgttgcaggatacttgaggtgttgtataagtcccggcagcaattccatcttcgtacattttgtgtccttgggagcaataccacaactgattcatacgggaatacacggccaataatcggtggatttgtggtggagacctcatctggggctgttaatccagcaagctttgaaatgaattcaaggtgtccagatgaaatagttaggagaattcgtgtgagcgtttcttcttatgatccaaattggcaaggaaggctactagagacttatgatactcacagtgatgcttttgaaattgcacctgcctgctggatgccggattgggctgaaatggcatcatcacttaaccagctatcggactctgaggtcttgttgcagtgctccacctctccagctgccgagccaccacattttgtggaaaatgagagaaggatatggagatacttgattgaaaatccatattggcaagacacatttccgaaatacaagcctcgggtcttccataggaccagtgatggaagtacttctggctgtccttttggttcaagttgtcattttctccataacttccctggtggctaccaggctgctgcaaagatgaccagccatggtgggacagctgttgcagctcctcctggaagaatgcctttaggacctggtgctcctaatgggccacctacatccagcgtgaaaactcgcatgtgtaacaagtacaacactgcagaaggatgtaaatggggtagcaagtgtcattttgctcatggagagagggagcttggaaagccgatgctgctggacaactcaatgccacatccaatgggatcaatgccgtttgaggctccaccaatgcctggcccggacatcgttcctccctcaacctttggtgcctcagccacagcaaagatcagtgttgatgcatccctggctggcggtatcattgggaagggtggaaccaacacaaagcatatatcccggatgactggggccaagctagccatccgggataacgagtccaaccccaacctcaagaatatcgagcttgagggtacatttgaccagatcaaacatgctagtgctatggtcacggagctaatcgtccgcatcagtggtaatgcccctccagccaagaacccgggcagggggtcgcatgctggggggcctggaagcaacttcaagaccaagctgtgtgagaacttcaacaaaggctcctgcacgtttggagacaggtgtcatttcgcccatggtgaaagtgagctgcgcaagccgccggctgctgcttgatacatgcgtgtcgtggcttggactagacggccagcatacctgagctccaaatatgaaaacgattgcacacaaggtgaaaatgatatgtgcattgttgctgcttctgcagcatgagatattttgtcatgggaggaaactggatgtaatctgggaggaaatagataacagggaatttcggtgtcttagatttgtagaattaccttggagtttttccctcggcgcttcagtcaaattttgtaatgcttcgaatg

SEQ ID NO: 22820 - DNA, 1401 bp, Oryza sativa
  Clone ID: TF_OsC121777_1
tttttttttttttttttgaacgtcatttcgcttcccaaagatctgcattaacaaaaaataaactgtacatctccggtagcaactcaatttacagaactttgattccggggagttaggagggggtggcaacattcacacagcgattttacgatatgggatagggtcttctccgagtacatgtgtgtttggtggagccccggaggaatctgtcgggtccttggctccttgctgccaagatccactaaagccgataccgacaatcataggtacattagttgaagcagagccgtaggcatacactcccattggaggagccatcgttggatggtcaaatttgcaattcgcgccgaacttgcagatgccatagcgagaatagaacttgcacagttcttctcccggacgtagtggaagacccactggactcaagacacaatctggagtaggcattgatcgcacccggggatgatggaacttgcacaccgcaccaaatttacagtctccagtcttcatgtagtattgacattctggttgatcaggtctctcaggaaatacattctctctctgcaatgcgtattgaggtacaggatatgaactagatctgtagggtgacaacattccctgattgcctgcactggcatcaacttgctgagaagttccataggtttgttgagcccctggggactgcagtcgactctcagaagatgaaacaggcatcatttggccagtatatgagttccagcttggtacttgaacaagaccttgcggtacaatcatcggtgcataatttgagggattctgccatctagggcttggaataaaagaacctcttggaaaagcccagctagccattgttccagtataaggtggacccgcggttgcagaggaatgtacagaaggataaataggtgaaccacgtgaagaagccatagcattgaaaagttctggatggtgaaatttacatgtattcccatatttacactgtcctgtttttaagtaatatgcacactccttttcactcggtcggagtggatatcctaatgtgtttagctgcaccctccctgcaattccagctttttctctgggatgatggaatttgcatgtaggcccaaacttgcatgttccagtcttcagataatactgacattctggttgccccatcctctcagggtattctcctttcattctgcacaatccagtcctgaggtagtaagtgcagtccggttctccggaccgctcaggatatggtccaggttgcatagcgccactgccgctcatggtcatctgctgccacataccctctccatagagagcggcggggtcgtgggaaggctcgtccgtggcggcggcggtggcggggagcgtcaccaccgctggagcggaggcccttccggcgtcgtccat

SEQ ID NO: 22821 - DNA, 2123 bp, Oryza sativa; identical to SEQ ID NO: 15061
  Clone ID: TF_OsC359_6768

SEQ ID NO: 22822 - DNA, 499 bp, Oryza sativa
  unsure (1)..(499): unsure at all n locations
  Clone ID: TF_LIB4506-043-R1-K1-B5
ccacgcgtccgcttaaatattatagcaatacacgactagaaacgtaggaatcggtgcggatgcgggtgcggcaccaggagcaccctgatgacaagtgtcggaattgcaataagataggccactgggctaaagattgtcgctcaaaggccaagaactgccgaaggccacatcgcagcggaggacgacgacgagcccacgctgctgatggcccggacgtgctttggttgaacggtgatgcccgcgcgggtgttgactgacagttttttttttttgggttcagatttggatagaacatgaggatccaaggacatagcagggtgccttcagcaagctgaccgtgcttaattttggtggaatcttagccgggcgtgagctctcttggacgatcttcctcctcccggaattcgaccttttcggttgatcgactctttggctggaaaagatgtccgaatgctncaataaagaaggctcttaaacagcaagctgaaggtgtgaagat

SEQ ID NO: 22823 - DNA, 4515 bp, Oryza sativa
  Clone ID: TF_OsC1517_1379
ctaagggagcagctccggaaactcggcgcggagaagatcttctcgttcccaggttgcttcatcttcagaatgattgctccattggactttgtagaacttgattgtcttccttcgagtctgacgttctgcttcttcaagaaccttgatcggtctttccttgtaggtcagattcttttccagctcgatattacccaggggaacttgctcttctggaactcgaagacatttctttaactgggatacgtgaaacacgttgtgcacatctgcgagaccttcaggtagctcaagctgataagccacttcgccacgtctggcggttatgaggtaggggccgatgtagcggggtgctaacttgccggacatcccaaaccttctcataccacggaggggtgatacccgcaggtatacatgatctcctttttcgaactcaaggtcatgcctccgattgtcagcgtaattcttctgacggtccagggcttcgcccacctcgttccagcacaagggggtgcgacactttcttccgaacattgcctcattcggcgacatctgaatgctggcctgataactgttgttgtatgagaactcagcatatggcaaacaacgatcccaagtgccttcgaaatccaaggcacacgcacgcaacatgtcttctaggatttggtttacccttttcgtctgaccatcggtctgcggatggtaggctgtactaaagtttagatcagtcccgagggcttcatgcaactgcttccagaaccttgaggtgaactgagtgcctcggtctgacacaattttcttggggcagccaaatctacatacgacatgggtcatgtagagttctgccagtttccttccatcataggtggttttcactggcacgaaatgagctgatttcgtgagtcggtccacgattacccaaatagagtcgtacccgctgggggttcttggcaaaccggtgatgaaatccattccgatctcttcccatttccactcgggaatcggtaggggttgcagcagaccagctggcctctgatgctctgccttgactctttggcaaatgtcacacaaggctacgtattcagcgacatctcgcttcattccagcccaccaaaagtatgccttgatatcctggtacatcttcgtacttcccggatgaatggagtaagcggactcatgagcttcctttaggatgagatctcttaactccttcttggccggtacacagatgcgtgaatcgcaccaaactgtgccttgatcgtctatggagaaattggtgtctttcttctcctgtattctttttattaactcttttatcccttcgtcatctttctgagcctcccggatttgcgactctagggtaggctgtactgtcaagctggctgggactcctgtctgtaccacggtcagccttaacttctccaattctctgcacagatgatcttggtcaggccgtatttgagctacattgcaataggccttgcgacttagcgcatcagcgaccacgttggctttaccaggatgatagtggattccaagatcgtaatccttgattagttccaaccatcttctctgcctcatatttaactcggtctgtgtgaagatatatttaagacttttgtgatcggtgtatacttcacatctgttccctattaagtagtgcctccagatcttaagagcatgaatcacggctgccaactcgagatcatgggtgggataattgacttcatgaggcctgagctgcctggatgcataggccacaacctttcgttcttgcattaggacacatcctaagccttgtcttgatgcatcacagaagatctcgaaatcttttcggatatctggcaaggtgagaactggggcagtggtcaaccttttcttcatttcttgaaagctgtcttcacaggctgcagaccattgaaatttcttttccttctttaacagctcggtcataggtctggctagcttagagaatccttcaatgaatcttcgataatatccagctaagccaaggaagctgcgaatctctgacacattcttgggcgggttccaagcaagtacagcttcaaccttgctgggatctacttcgacaccactggaggagatcacgtgtccaagaaatgctattcggtctaaccagaattcacatttcgagaatttagcgaatagttggtgatctctgagcttttccattatcagcctcaggtgttcggcatgttcttcctcgttcttggagtatatcaggatgtcatcgatgaacaccacgacaaactggtccaggtaatccataaagattttgttcattaagttcatgaagaacgctggagcattggtgagtccgaaggacatcactgtgaactcatatagaccataacgcgttgagaaagcggtcttcgggatatcttcagatctgattttcagttggtggtaacctgatctcaagtcaatttttgagaaaactcttgctcctttaagttgatcgaacaagtcgtcaatccatggcaacgggtacttgttctttatagttacttcattcagggctctatagtcgattaccattctctcagagccatcctttttcttaaccagaagcactggggctccccaaggggatgagctaggtcgcacataacctttactctccaactcttcgatttgtcttttaacttctgctaactcattagctgccattcggtagggtctttttgcaattggtgcagtgcctggcgccagttctatggcgaactcaatctctcggtctggtggcatactcgttaattcttccggaaatacgtcgggatattcacagactataggcaccgactccaaggaggtgacttgtaaacaggttaggatagaccgacttgcggtaggggtgttagaggtaaagcggacttgctttcctccaggtccttgcaaggtgatggactttttggcacaatctatctgtcctttgtgcttagcgaaccaatccatccctaggatgatgtccaagctttgcgagtctaggactatcggtttggctaggaagtcaacttcctcaattctaaggttaacttccgggcatatttgagttgcccttatattcctcccaggggaatgtaccatcacaacgtctggagcatcctgagcggtttcagcttgaatgtggttcacccggcctcgaccaaagttgttggaagcacgtgaaccttgtccacttgcctgagagctaggacgaaactgagctgccgctggagtaggagttctggcagtgctgccattagcatgccctgagttggtgttggtaggattctgagggcactgtctggcatagtggcccatctggtcgcaccggaaacactgaactgttgttggtccctgcggtgacttgaaagaggtaacactgtttggcgcagtattgccactaggggcacgctgctgtggctgaggtgccggacggttcatctgaggacgaggggcgtagcctggctggcggttagcctgagtgaccgactggtggtattgcatgggttgaccgtagcgagggtgaggtgcgcctcgggaagaatttccctgatggttagacttgcgtttcttgtattcttcggtagcctcttttctggcatcctcaagtagaagtgccttgttgatcatatattgaaaagtggggaagtcatgagcaagcaactggagtctcattccaactgcgattcctttcaagaatttcctgatcttcttcttgtctgtgtccacttcctcaggggcgtaccgagccaacttgttgaacatacttaggtactcattgacactgctgttgccttgcttaagtctgttgaattcctctttcttcatgtcaatagtgctttcaggcacatgagctgcacggaaagccgtagcaaactcatcccaagcaatgttagtgggttcagggtgtgcgttgcagtaattctcccaccaatctgcagcaggtcctcttagctggtgagaggcgtagagcgtcttctcaaccggagtacactgcactaagttgagttttctatcaacatccttcagccaatcgtcagcctcgacgggctcgacggtctgagagaactctggcggacgagacctcagaaaatctgtcagcttggatctattgttattcgtgtgagggtggccatttccatgcgcattatgctgaaaaccagctacggctgcggctaatccttgcaagatttgtgtctgaactgccatcaggtgctgcatgttgttttccacatgaggtggggaagggaggcgttcttctccagaattgtgactggcagtgcggtgagagcggtgagactgttcaatctctgcatcacgggaagctgtgcgatgcgagcggttgctgcggcgaggttgctcaacttctgcgttgcgggaagcagtacggtgcgaacggttgctgtggtgagaccgctcattagctgactcatgatttgcttctggctcgactctaccatcttcaaaaccaaagcgggctggtgcacgagctgcacggcgggggcggctagccat

SEQ ID NO: 22824 - DNA, 3615 bp, Oryza sativa; identical to SEQ ID NO: 14926
  Clone ID: TF_OsC1528_1944

SEQ ID NO: 22825 - DNA, 3526 bp, Oryza sativa
  unsure (1)..(3526): unsure at all n locations
  Clone ID: TF_OsC22400_1
attcccggngtcgacccacgccgtccgggnaacttaaatattaaagcaaatacaacgactagaaacgtaggaatcggtgcggatgcgggtgcggcaccaggagcaccctgatgacaagtgtcggaattgcaataagataggccactgggctaaagattgtcgctcaaaggccaagaatgccgaaggccacatcgcagcggaggacgacgacgagcccacgctgctgatggcccggacgtgctttggttgaacggtgatgcccgcgcgggtgttgactgacagtttttttttttttgggttcagatttggatagaacatgaggatccaaggacatagcagggtgccttcagcaagctgaccgtgcttaattttggtggaatcttagccgggcgtgagctctcttggacgatcttcctcctcccggaattcgacctttcgataactaaagactgaaaccactctaatgtcaccggcactgcactttgtcagacaaaatgagtacctctttctgctgttctcaatcaagtttcagccataaaaacagatagcggagtcatcattttgtgacatgcatgttcaatcctctctatgttaattaggatgcatcctctctatattaattctgttgcaaatatgccaggtcctcatggttcttcctgtttgtcttgcaatggcatagttattggcaacaaaatagagtgacaatcgcctgctcatgatgaatatttttcagttcaaatcccagtcccaactttagaaaccagccccgagtatggcccgcacggcgagtgccgccaccggtggcgacgagccgccgcccgaaccccaccatcaggccggcgtccagcggccgcccaaaaatgacggcgacggcggtgaggaggcggggggcgggaatgtgggtgttcctgcggccgccgccgacgaggatccaaccgccggcgcggtgggtgccgcggggaggggatcgaggaggaggaggaaggcgggcaggagagcggccgcgccagacgaagaggacctcgacacgatcctcgccgagatcgaccaaaatatggccagtgcggcgctcgattccatgccggagatgaatctggcccaggcttcggcgtccacggcgatggatgtggctgctaccgtgaacgatgttggtgccgaggtgaaggatgacgaaatggaggcggagtcggccgctcctaagaggaggaagcggaagaaggagaaggagaaggagaggaaaactacctcgaaggtggcggaggccgacgcgaagaagccacctaggcacgtgcgggtgatgctggaggtgctcgccaagaggaaagaggcggaggagctgaggaagcgcgaggaggagctgaggaagaggaaggcagaggaggagcggctacagagggaggaggacgagaggatggtggaagagatgaagatgcagcagaaggagagagataagggcaaaacgatgaagaagaggcaggatgggaagaccttgactgggaagcagaaggaggaggctaggaggcttgatgccatgaggcgacagttccttgggcagagtagaattcttgctcgcagcgaccttggcaatgatggtggtgccaatgagagaaagaagaggcccatatatgattccaagagaaagaaagtgcaatcaaaggctgatgaggctgctaatggagatggcggtcacatgcaggagcttcataaggttaacaaggaagaagaagaatgtgccattatggaagagcaaccccactaccgtgtggaggaggatggggagaaaatcaaacttgaggagattaaaggggctgaatcagtagaaagaattaactttgaggagagaatcacaaaggaagagaagaatgaagctatgaaatcctccaatgaggaggttgtttctctagtcacaggctggaagaatagaattgaagaatgggatgttgatgttgatgaaaatgataaggacactagaaaacttactccaaagagagatcctgctaaggtggacaaagctgagaaatatacggacctccgctcaccgatctgctgcattcttggtcatgttgatactggaaagactaaattgttggattgtattcgatgcaccaacgtgcaaggaggggaagcggggggtattacccaacagattggtgcaacattctttccaattgaaaacattagagaaagaaccaaggagttgaaagctggtgctgctcttcatgttccaggatttcttgttattgatactcctggtcatcagtccttctctaacttgcgtactagaggttccagtttgtgtgatatcgcgattttagttgttgacatcatgcgtggtattcaagcacaaacaattgagtctttgaatattttgaagagacataaggcagacttcatcattgttttaaataaggttgatcgactctttggctggaaaagatgtccgaatgctccaataaagaaggctcttaaacagcaagctgaaggtgtgaagatggagtttgatgcaaggctaacagattgtactgtcctagaggttaaggttactgaaggccactgcactacaattgatgttgtgttggccaatggtttcctccgtgaaggagatcaaatagttacatgtggcatgcagggacccattgtgactcatatcagggctctgttaacacctcatcctatgaaagagcttcgaattaagtgcccatatcaacatcataaggagatcaaagcttctcaaggcatcaagatatctgcgccaggcctagaacattcggttgcaggcacaagtctctttgtagtgcagccaggtgatgatcaggaaaagtcagtgaacaaagccatggcagagatggttgttttaatgaacaggattgacaagaacagtgatgctctcatagagtttctaaagagcccagctgtcaatatccctatttatgatttcaatatagggcctgtccacagaaaagatgttatgaaagccagtgtgatgcttgagaagaagaaagaatatgcagctatctttgcttttgatgtcaaagtgatgcctgatgcccgtgagattgccaatgaatctggtgtaaaaatctttgtggcagatgtaatatatcaccttttcgaccaatttaccacatacattgagggtttgagggaaatagagaaggatgaaaagattgtagaggctgtgttcccttgtgttctcaagatcattccagactatgtgttcaacttgaaggacccaattgtcttaggcgttgatgtccttgaaggagtagctaaggtgggaactcctctgtgtctcccttccaatggtttcgctcgtattgggaacattgcctctatccagaatagcagtaagcaagttgatgtggcaagaaaaggagagaaggttgctataaagaatatagtcttgggcgttttcgacagatcacaggaagcactccagatgagcaaaagaaatgtttcgggtgacctcacgttgaaagagtgggagcttgtgaggacgctaaagcacatcttccgtataccttga

SEQ ID NO: 22826 - DNA, 4429 bp, Oryza sativa
  Clone ID: TF_OsC1713_4887
tccgcacgactgctccgctccagttcgtcttcctctgcatcgtcttcgccaacatgtcgaacaccggtgacaacagcaacactggacacaaggagaaggaggctcccgccaacaccaacggaggcaatactgcctcaaattctagcaaagggccattctcagggtacaactcaactttcatcgtgttcatgttcttttctcaaatactactgttaggtgcaatgttttcattgcattcccatgtgacaaatgtttatgcttattctatattaagcatgatatgtagtcagtggcagacgtaggtttaaaatacagatttggcggcagagctagccctaattagttgcactagtttattccctgcagatgtcatacttattgtcttaatattttagattaaaatatatcgaattgtgaccatatttctaacaattcaaaaacctgataggtccttttcggtagttggctttgccgcatcactgaaaccgcacgctttcgatggttcaaactataagagatggaaagcatgtgcagtattatggttgacagcgatgcaatatttctttgtttcacggggcaaaccgagtgaaccgcctctctctcctgaggaggaggccaagttcgaggctgcagattgcctgttccgtggagcattgatcagtggtgctcgccgacaacatagtggacgtgtacatgcacatgcctttagggaaggaaatgtgggatgcacttgaggcgaagttcagggtttccgatcctagcagtgagctgtatatcatggagcagttctatgactaagagatggtcgatgatcgatctgtagtggaacaggctcatgagatacagatgctggcaaaggaacttgagaacaaccgctgtgagttgccatacaagtttgtggcgggaggcatcatcgccaaattgccaccttcttggtccgactttgctatttctctaaaacacaagaggcaagagttcactgtcactgatctcatatgctctttgggtgttgaggagaaggcgagggcaaaggacaaccgcggcaaaagggtggaggggagttctagtgtcaattaagcatcccataacaacaagaaagtcaagcctgatgtcaaactaaaggctacgaatacttttaagaagaaaggcatgggaaagcctaagggtgactgctttgtgtgtggcaagcctgggcattaggccaaggactgtcctaagcgcaaagacagaaagtttgcaaacatggtcattagcgagggtggacgaacatcggggtatggtaaatttttacctacaattgtttctgtctgtcactcacctgattggtgggttgacactggtgctaatatccatgtgtgtgctaacatttccctgttttcttcttatcaggccaggagaggttcctccttattgatgggaaatgggtcgcttgcggctgttcttggtgttggtacggtcgatctgaagtttacttcgggaaagaccgtgcagctgaaaaacatgcagcatgtcctttcaataaagaagaatctagttagcagctctctactatgtagagatggttttagactggtgtctgaatctaataaatgtgtcgtatctaaatatgaaacgtttattggaaaaggttttgacagcggaggcttgttccgcttctctttggataacatgtgtaataagattgtgaactatgtaagcaatgatgacgagtcaaatgtgtggcattcgcgactctgtcatgtgaactttggttgtatgacgcacttagacaacatgagtttaattccaaaatttactttagtgaaaggtgccaagtttcatacctgtgttcaatcgaaacaacctcgcaagcctcatagggaatttgaggcgaggaatttggcacctctagaacttattcattctgatctgtgcgaaatgaatggcgtgtagactaaagggggaaagaaatatttcatgacactgatagatgattgcactagattctgctatgtgtacctattaaaaacaaaggatgaagcattacattactttaagatatatatggctgaggtagaaaaccagctggaaaggaaaatcaaacggttgaggtctgataggggtggagagtttttccaatgagcttacctctttctgcgaagagtttggaattattcatgagaggatgcctccatattcaccctagtcaaacggagtagccaaaagaaagaactgcactctaactgagttggtgaatgccatgttagacaccgcgggactttccaaggaatcgtggggtgaggcaatcctgattgcatgtcatgtcctgaatagaattcctaccaagcataaagaagtaacaccattcgaggaatgggaaaggaggaaattaaatctctcatacctgctcacttggggttgtttggccaaggtaaatatatctataggtgcaaacttggaccaaagaccgtagattatgtgttcctcggttatgctatccatagtgtgggatataggttcttaatagtaaattctggagtacctgacatgcgtgttggtacaattactgagtctagagatgctacatttagcacttctagtgaagaacctatcttaacccctgagcattttgcaccgatagaacacattgatcaaacgcctgagggaaatcctgaggaggataataatgtagctactcgcaagagtatgagacaaagtactgcaaagtcggtttgtgatgactacattgtatacatagtggataacactccaagaaccatagaagaggcatattcatctcctaacgctaattattggaaggaagcggtacacagtgagatggactcgattatgtctaatggtacttgggaagttatcgagcgtccatttgggtgcaagccataggatgcaaatgagttttaaagaaaaatcttaggcttgatggtacaattgaaaagtacaaggcaagacttgtggccaagggttatacccaaaaggaaggcgaggattttttgacatttactcatcggttgcttgcttgaccacgattcgagtattattcgctacggcagcctctcatggtctacttgtccatcagatggacgttaagatagctttcctcaatggagagttggaggaggagatccatatggatcaaccaaacgggtatacattggaaggtcaggagggaataatgtgcaagctgttgaagtccttgtatacattggaagctgttgaagtcctcaaacaagcgcctaagcaatggcatgagaagtttgataaaacacttacatctgctggctttgttgtgaacgaagctgacaaatgtgtattctatcgctatggtgggggagagagagtgatcttgtgtttatatgtcaatgacatgtcgatctttgggaccagcctcaatttgattgaggaggtaaaggactttctatccaaaagctttgaaatgaaggatttgggagtggctgatgttattcttaacattaagctactgagaggagatgagggtgggattacacttgtgcaatctcactatgtggacaaagtcttgagtcgctttggttatagtgactgcaaggcagctcctactccttatgatcccagtgtgctattaaggaaaaaccgaagaatagcaagggatcaattgagatactctaagatcattggttcattgatgtacttagctagtgcaacgaggcctgacatctcatttgctgtgaacaagttgggccggtttgtttcaaatccgggagatgatcattggcatgctcttgaaagagtaatgcgctatctaaaagggataatgagctatgaaattcactacgtcgggtacccaaaagtgctggagggctatagtgagtcaaactggatatttgatgctgatgagataaaggccacaagtgggtatgtgttcacacttggagggggcgctgtttcctggaagtcttgcaagcagaccatcttaacgaggtcaacaatggaagcagaactcacagctttagatactgccacagttaaggccgaatggcttcgtgagctcctgatggacttgccggtggttgaaaaaccagtaccagcaatcctgatgaattgtgataatcaaacagtgattattaaagtgaacagttcgaaggacaacatgaagtcatccaggcatgttaaaagaagactgaagtgcctccgaagctccgtccgcttgagaacctgcacgggtaggcgggcgatcaagtttttgggtagcgcttcaagcgcgactgctctcgttcttcgcggctactgctgctacatcggcgccttcaccaagatgtcaacggagattggagacaagaagatgaacgacatcaacggaggcaatactgcctcaaaatccagcgcgcatagggatggggggtgccaggcccaccccggcacccccggtggcttcgccactggaggtggatga

SEQ ID NO: 22827 - DNA, 5194 bp, Oryza sativa; identical to SEQ ID NO: 14946
  Clone ID: TF_OsC359_7611

SEQ ID NO: 22828 - DNA, 2912 bp, Oryza sativa
  Clone ID: TF_OsC1528_2115
atggctaaggaactcgaactccttaagtttgtcttacccgacaaatttgtggtcgggtgcattattgcgaaactacctccatcttggagaggtttcggtactgcactcgaacacaagagacatgaatactccgttaaggggttgatagcgtctcttgatgttgaggagaaagctcgggaaaaagatgccgcgtctaagggcgatggtgggcagtccagtgccaatgttgtgcacaaggcccagaacaagagtaaggggaaatacaaagctcaacagaccaccaacttcaagaagcagaagaagaacaacaacaatcctaaccaggatgagaggacttgctttgtgtgtgggcaacctggtcatctagctaggaagtgtctacagcgcaaggggatgaaggcacctgcagggcagacttctaagtctgctaatgtgaccattggcaacactggagatggaagcgggtatggtaatttacctactgttttttcagttaatcagtctactaattggtgggttgatactagggccaatgtacatgtttgtgctgacatcttattgttttcttcttatcaggtcgcacggggtttcaccgtcctaatggggaatgggtcacatgcttctgttcatggtgttggcacggtagatctgaagtttacttcgggaaagatcgtgcagctgaagaacgtgcagcatgtcccttctattgacaggaatcttgttagtggctcccgtctgactagagacggatttaagttggtttttgagtctaataaagtagtcgtgtctaaacatggatattttattggtaaaggttatgagtgcggaggcctgttccgcttttccctttttgatttctgcaataagtctgtgaaccatatttgtggcagtgtggatgatgaggctaatgtttggcactcacgtttatgtcatattaattttggcttgatgtctcggctttccagcatgtgtttaattcctaagtttttcattgtcaaaggttctaagtgccatagttgtgtgcaatcgaagcaacctcgcaagcctcacaaggctgccgaggagagaaacttggcaccactagaactcctacattcagatctttgtgaaatgaatggggtgttgacgaagggtggaaaacgatatttcatgacgttgattgatgatgctactagattttgctatgtgtacttattgaaaacgaaagatgaggctctagactattttaaaatttataaggcagatgttgaaaatcaacttgacagaaagataaaaagacttaggtctgatcgtggtggagagtttttctcaaacaagtttgacttattctgtgaggaacatggcattatacatgagaggacgcctccctgttctcccgagtctaatgggattgctgaaaggaagaaccgcacactgactgacttggtgaatgccatgttggacaccgcgggactacctaaggcatggcggggagaggcattgttgacctcgaatcatgtgttaaacagagttcctaacataaataaggacaaaacaccatatgagatatggattggaagaaaaccatcactttcttacttgcgcacatgggggtgcttggcgaaagtcaatgtaccaataacgaaaaagcgcaaacttggacctaagactgtggactgtgtctttctgggatatgctcaccacagcattgcctatagatttttaatagttaaatctgaggtacctgacatgcatgttggtacaattatggagtctcgtgatgctaccttctttgagagctttttcccaatgaaggatacacatagtagttcgagccaaccctttgaagtaattcccagttcaattacactaccagaacaaactgaacatacacatgaacatgtcactgaggaggatgttagtgaagctcctcgaaggagtaagagacaaaggacggctaagtcctttggtgatgatttcactgtgtacctcgtggatgacactcctaagtcaatttcacaagcatatgcatctcttgatgtaaactactggaaggaggctatccgtagtgaaatggattctattatcgctaacgggacttgggaggtgacagagcgaccctatgggtgtaaatctgtggggtgcaagtgggtgttcaagaagaagcttaggcctgacggtactattgaaaagtacaaggctcggcttgttgctaaaggctatactcagaaagaaggcgaagatttctttgacacttactcacctattgctagattgaccacaattcgcgtgctactttccctagcagcctcacatggtcttctcgttcatcaaatggacgttaagacagcttttcttaatggagagctggatgagaagatctatatggatcaacctgataggtttgtagttgaaggtcaacaaggcaaggtgtgcaaattgttgaaatctttgtatgatctgaaataagctcctaagcaatggcatgagaaatttgatagaacattgacatctgcacgcttcgcggtcaatgaggcagataaatgtgtatactaccactatggtgggggtgagggagttattttgtgcttgtatgttgatgacatactaatatttgggacaaaccttgaggtgataagtgaggttaaatcattcttgtctcaaagtttccatatgaaagatttgggagtagctgatagataaacattaagctaattagaggtgagaatgggactacactcttgcagtcccattatgtggagaagatcctgaatcgctttggctacattgatagtaagccttctcaaacaccttatgattctaacttgttgcttcgcaagaacaagagaattgctgggaatcaattggaatactcccaaatcattggctcgcttatgtactatgctggagctctgttggtcggcatccacatg

SEQ ID NO: 22829 - DNA, 3645 bp, Oryza sativa; identical to SEQ ID NO: 15263
  Clone ID: TF_OsC1528_1610

SEQ ID NO: 22830 - DNA, 795 bp, Oryza sativa
  Clone ID: TF_OsC25048_1
ttttttttttttttttttaagcagaatgatccctctttagcacatagtaaaaaggtaatatgtcttagttgcatattacatccatcccataagttttttaacgtcagaaataagaggctgaaatatcaaggcagataaagtagtaaaccttaattgaagtcaatcagttgatgccagtcttaaagcattcatggcatgcaagccaaagagcagacggtcaagcacaggcatcagggtctagctcctgctacggcggtacctgccaccatcttacccatcagcataaggagaaccacctcggccacgtggtgacctgctgtagctgcgcccacgaactggtgaaacactgcggcgccttggagagcgatcacgaggactgtagcttcttctaccataggtcgggctcttgcggtattgagggctgcgactgcggctgcgactcctgctacgacgctttccactacccagacctccaggaccaatacgcaaacgacattcacgagcaaagtgcccagtttcaccacactcatagcacttcatctcagacccaccatgtcgatcacgacctccgcggctacttgagttccgtgagagctcaactctccatccattcttgccatctaaatcacggagtgcatcctcagcatccctcttgtcatcaaaatcgataaatgcaaaaccaggtggtttacgggcaacccagacacttcgcagaactccaaacacacgaaactcatcttcaagttccccggaagtcactcggggatccaagttgccaacatacaagcgggccat

SEQ ID NO: 22831 - DNA, 429 bp, Oryza sativa
  Clone ID: TF_OsC25048_4
atgcgcgttcctggcgcgcgggcgcacgaggggaagtccacctacgagtcacaaaaagaatggagggatctcacgcgcgtccacgtcgtgagtcgtgacgtgctctccttcctcgggatccccaccggcgcctcgtgcgcgcgacagctggggaatagagaaactggacttggcggtggcgagtcgggctcttgcggtattgagggctgcgactgcggctgcgactcctgctacgacgctttccactacccagacctccaggaccaatacgcaaacgacattcacgagcaaagtgcccagtttcaccacactcatagcacttcatctcagacccaccatgtcgatcacgacctccgcggctacttgagttccgtgagagctcaactctccatccattcttgcctattaaaagaggaaccacgcatttga

SEQ ID NO: 22832 - DNA, 3342 bp, Oryza sativa; identical to SEQ ID NO: 15068
  Clone ID: TF_OsC266287_1

SEQ ID NO: 22833 - DNA, 1902 bp, Oryza sativa
  Clone ID: TF_OsC359_7110
atggccgccgccggcgaccataggggcgcgggcgcgccgcctcccgtcggccgtgccggcgaggccgcctttgggcgcgccccgcggctgccatgtggggcccggccgtcagccgcccgcgccctcggtgcggctgacgcgtgggacccacggcgccggccagcgcaagccgcgtgcgcccggtccaccgtggaccgtgaggctgccgcgtgggccccactcccgtggacccggctgggctcggggtgcatggttttgatagtagcacctcggccatataaggaccggtcttcgggcctctgttgcaaagcactaccgtacttccacatgtctagtggggcaaatgaaggctacacgagctgcggcccggtagtcgagatgtcatggcacagggctggtgtcctgctgctaggggctcaatcctgcctacctgtcccggaggttccggccgtaggtggggttgggtcggtactcttgtttatggctaggatgggttgggaactatgtcacgtcttccgtccgtataccgtggtgatgtttaatagagaaaaaggaaagaatgtcagcgggtatacctcaagtaactcaagttttcaactcaatccaccactggcctccagagagttaacaagggcacacccttggtccattccgagcatgctgcttagttcacagctaccattggttcgaagtcaagaccagaatcagtatgtgtttgatcgagcatttgccccccaggtcaatgagcttccaatgccagaagaggatgtccccttttgtcatgattgtagagaacaaggacactatgccctgaattgtccatgggtatatgccaaagaagccccttcctttggtttagcagtgcagacatcgctaaaccagcctcctcacaccaagtcaagcttgcagcctagtgtgcaaagtagagagcccaatggagagaatccattgaatcccgggaaatgctttcctcctagcctttcgtaccacgtggggtcacgtactaagcaagccaaaggcaagaagagtaagaatcagaagagaaaagcaccgatgcgaactgaagaagaagtacgtaagatgactattaccagcaccgaatggcctccagcagggataactattcctagacgtcaaagaggaaataccttccgaggtgcacgacagttgacccagcacctcctaagccatggcggcagagtatctgatagtgaagggtcagatcaagtctcctcggatgatgaagatgagtctccccgacatctcgacgaggaagagatggaatcaaaggcatgcacccgttgtggagaaattggacacattgctagcatgtgtctcacactctgcccttattgtgaagaagaccatccaccaggggagtgtcccacccgcaaggtcacatgttttctgtgcgaaggtacaaaccatgtgcccaaggattgccaactcagtgtgttgttgaccaagaccgcagaaatccaacgaacaaccctacgattgtctcatcagctagttagctccaacagcaacatcgacgatatcatccacagcaccaatgctcctcctgctgcacctgactctgcaataaatcatagcaataataccttcagcaccaaccattctctgcaccgacagcctcagcaaagaattgtcgtcgatggaagaagttgtgtctctccccgaccacctgttagatgtaggccgaaaggtgattgataaaggataatcagaaacatgctcagcatcactcaaaggagacccctgatagtaatcgccctgggccttgttccgggcctgccgaggctcccgctgtccgaacctcctggtgaccgttcggggccacccgccaaaggcgtgttgcttgtggttcgggacggaggtgttatttttcttccggcgagc

SEQ ID NO: 22834 - DNA, 2104 bp, Oryza sativa
  Clone ID: TF_OsC1528_2171
atgtcgataaccggcgacaacaacaacactggagacaaggagaaggagcctcccgtcaacagcaacagaggcaatactacctcaaactccagcaaatggccattctcgggtgtgctccccgatagtattgtggatgtgtatatgcacatgcctttagggaaggacatgtgggatgctcttgaggccaagttcggggtttccgacgccggcagcgatctgtatgtcatggagctgttctatgactacaagatggtcgatggccgttctgtattggaacaggatcatgagattcagatgttggcaaaggaacttgagaacaacaactgtgagttgtcggacaagtttgtggcaggtggcattattgccaaattgccaccttcttggacggactttgctacttctctaaaacacaagaggcaagagttcagtgttactgatcttattggctctttgggtgttgaggagaaggcgagggcaaaggacaaccggggcaaaaagatcgagggaggttctagcgccaatttggtgcagaagaagaaccctcacgcatctcacaacaacaacaagaaagtcaagcctgatgtcaaaccaaaggcaactaccaattttaagaagaaaggcaagcgaaaggccaaaggcgtctgctttgtgtgcggtaagcctgggcattgggccaagaattgtccttatcgcaaggacaagaagtctgccaacatggtcattagcgagggcggaggaacattggggttcttaatagtaaattctggagtacccgacatgagtgttggtacaattactgagtccagagatgccacattttttgagaatgaattttctatgaaaaatgcacctagcacttctagtcaagaacctattttatcccctgagcactttgcgctgatagaacacattgatcaaacacttgaggaaaatcctgaggaggataacattttagcaactcgaaagagtaagagacaaaggactgcaaagtcttttggagatgactacattgtatatcttgtggatgatactccaagaaccattgaagaggcatattcatcttctgacgctgactattggaaggaagcgatacgcagtgagatggactcaattatgtctaatggtacttgggaagtcgtcgagcgtccatatgggtgcaagcctgtaggatgcaaatgggttttcaagaaaaagcttaggcttgatggtacaattgaaaagtacaaggcaaggcttgtggccaaggggacaatgagctatggaattcactacgccgggtacccaaaagtgctggagggctatagtgattcaaactggatatctgatgctgatgagataaaggctacaagtggcgggcgactccattccacaggcatccttgacggcagcgacgaaaccaacctcttcgagacatcttcaactgagaaggacttcaactctggcaacgggcagcccccctttcgtgccgcggtgaatccggaagctgatcaaccggacaccccggccgacccaactccatcacgcccaccctcgccaccggtgcctaggaaagggtcgagctatacctcagatcaagcagttacccactcccgcttgtggccgaccgaccgaccaaggcgaggcggcggcgaggcacggccaccgacggcggtgaccggcggtgcgggaagcggcggcgacggccgaaaggcggcggcgcatggccggagcagcggcgtcgcgggaaggccgaagcggaagacgaaggcggcgacgacgacccgacgagaggaagggcggacgagcggcggcgacacctagaggaggggaggagatgagttagggatggagaggacgaccgcgacgaccaaagtggccggccggagacggaggggaatggatagctcaccggctcgtgagggagatggggttccggtggggttccggcgacgcgaggcggtggccgagatggcccacacagcggcggagctagcggcggcggcggcttggcgcggcggcagccctagcggcgacggcacgcggccggagatgggcggcggcggcggagctcggcgagcgcggcgcgacggcggtagagggcgtgggagaggacggtgaatggggg

SEQ ID NO: 22835 - DNA, 4599 bp, Oryza sativa; identical to SEQ ID NO: 15085
  Clone ID: TF_OsC359_5735

SEQ ID NO: 22836 - DNA, 3854 bp, Oryza sativa; identical to SEQ ID NO: 15184
  Clone ID: TF_OsC359_5774

SEQ ID NO: 22837 - DNA, 5616 bp, Oryza sativa
  Clone ID: TF_OsC359_5862
tcatcgccgcccctcgccggcgaccttccagccggccaccactgccgccctaagcaccgccaagtcgcaccaccaccaccgtcggcttcgccgctccatgccgcatcccagcctccaccacgcttcccgctccagccgcgcatagccgcctgtccggtcgaccccgtggtgctctgtcgccctcctcgataccgcggccattgtccgcagcccgtccacccctccatcttcgcgaatcgccgccgaaaatccctcccctctgctcaagctcccttccataccttccccatgtcctaccagtcctcggccgcgctgcggtcttcaccgggaatcgccggagcgccgtcccaccgtcatcctgaggcgcccgccgtcaccttgctcgccgccggccgcctccttccgccgtttggcctctcgattccgtcgtttctggagagtccgttttcgcggaagaagagtttgaagagttccaaggccagcaaggcagctcctggtttggaatggtacattcctggtttggagatagaactgtgcagccggggtggttgttcagaatggttgggcctatacaacaggatgccgcgttacaagcctgagtacctgtttggtgttgagggttttgtccaggagttgcgtacgatgtcctttgtcattggatttgggactgcccctttttatgcccagattcctcatgatcgtcatgaagagaagtgccgagtcaaagtcaccttaaacagcaatagtgaagatgtcccctcagtgatgtttgaagctggaggaagaaactacatccatgcatgtcaggaagtggcaaggatcgccataggagagctccgtgatcgctacagtgatcaattggccgacactgagtatcgctaccatcctcgccaacctcagggaagtgaccgtggcagttaccttgagactgaaggaattgagaatgatgttaccacgaaacatttggttgagatgttgtgggctatggatgaaagtcgtgcggggactgtgttagcagctcaagatcgtgaagatcggaatcgtggtaagatttgcaagctagaagacaaggtggatcgtttggagaaggaattagccgcattgaagggagaagcaccgccgcagaaggccaggattcgtcttaccgcaaggaagagagccctatttgtccctcgctatcaattggcgccaaagatggtgaatactcgcagcaatgggaatggccctaacaaccccaataacaacaacaatggagagaatcctactctggcccaagttcttgctcaacagacacagcttatgaacatgatgatgcagcaatttcagaatcagcaaaaccaagggaataatcatgcacctccacagaacaagttagcagaatttcttcgtgtgaggccgcctgttttctctagtaccactaatcctgttgaagctagtgattggctgcatgccatagagaagaagttggatttacttcagtgtactgatcaggagaaggtctcatttgcatcacatcagttgcatggccctgcctctgaatggtgggatcacttccgccttaacaggactactgctgaacctatcacttggcttgaattcaccgctgctttccggaagacgcatataccatcaggagtagtgtctctcaagaagaaggagttcaggtcgctttcccagggatctcgctctgttacggagtacctacacgagttcaatcgtcttgctcgttatgctccggaagatgtgcgcaatgatgaagagcgccaggagaagtttttgggaggacttaatgatgagctttcttacccactcatggttggagattatcctgatttccagaaattagtggataaggctattcgtcaggaggacaagtacaatcgcatggagcagaagaaacgtcggattgctcaattcaagacacaacagggaaataatcagaagccgcgtcttactttaggaccccagcccatgccacagggaggttcatcgtctgttgttcgtccgcaacgtcagttcttcaacaacaatgctggcaacaacatccgtaatcaagctccacgtcctgttgcagctccaacacagcaacaacctgccaagagagagcaaggcaacaagcccgtggtgtgtttcaactgtggagacccaggacattacgctgacaagtgtccgaagccccgacgcgtgaaggttgtccctgcccagagcaattctaccgtatcagcatcaaaggcccgtgtaaatcatgtcgctgctgcagaagctcaagatgctccagatgtgattttgggtacgttccttgttaactcagttcctgcaacagtacttttcgattctggtgctacacattcattcttatctatgagttttgcgggaaatcatgggatggaagtagaagatcttagacgtcctttgatggttagtaccccaagtaatcaagcactctctttgcaacgtagcccctctgtcagaatagaaattcaaggagtaccatttctggccaatcttatcttgttagaatccaaagaccttgatgtcatcctagggatggactggttagccagacataaaggtgtgatagactgtgccaacagaaaagtaactctcaacagctatgatggtcgagttgtaactgttcatgcattgtcatctgagtttttaaggtcaagactgaaccagataactttggaagagattcctatagtccgggagtatcctgatgtgttcccagatgatttacctggtatgccgcctaaaagggatatagagttcagaatagatttggtacctggaacaactccgatccatacgagaccttatcgaatggcagccaatgagttggcagaagttaagaggcaagtagatgatttgctacagaaaggatacatcagaccgagttcatcaccatggggagctccggttatttttgtggaaaagaaagaccatactcagagaatgtgtgtggactatcgtgcactaaacgatgtgactatcaagaatgagtatccactacccaggattgatgatttgtttgatcaacttaaaggtgccactgttttctccaagatagatcttcgatcagggtatcatcagttgagaatcaaagaggaagatatacctaagacagctttcaccactaggtatgggttgttcgaatgtactgttatgtcttttggacttaccaatgcccctgctttcttcatgaacttgatgaataaggtgtttatggaatacttagacaagttcgtggtggtctttattgatgatattcttatctactctcgaaccaaagaagagcatgaggaacatcttcgccttgcattggagaagctacgagaacatcaactatatgctaagtttagcaagtgtgaattttggttgtccgaagtgaaattccttggtcacgtcatctcagccggaggagttgccgtcgatcctagtaacgtggaatccgtaaccaattggaagcaaccaaagacagtttcagagattcgcagtttcctaggccttgcaggatattatcggaggtttatagagaatttttccaagattgctaagcccatgacacgactgcttcagaaagatgtaaagtacaagtggtcggaagaatgtgaacagagttttcaagaattgaaaagtcgcttaatatcagctccaattttgattttgcctgatccaaagaagggttttcaagtgtattgtgatgcatccaaatttgggttaggttgtgttctgatgcaagaagggaaggtggttgcctatgcatctcgtcagttacgtccgcatgagaagaactaccctactcatgatattgagttagctgcagtcgttcatgcattgaagatttggcgtcattatcttttcggtactcgtacagaagtgtacaccgatcacaagagtttaaagtatatctttactcagccggatctgaacatgagacagcggagatggttggaattaattaaggattatgacatgggaattcattatcatccgggaaaggctaatgtggtagcagacgctcttagcagaaaaggctattgcaatgctacagaaggacgacagttgccattggaattatgcaaggaatttgaaagattaaatttgggaattgtcggtagaggtttcgttgcagccttagaagcgaagcccactctaattgatcaagttagagaagcccaaattaatgatcctgatattcaagagatcaagaagaaaatgagaagaggaaaagctattggtttcttggaggatgagcacggaactgtatggttgggtgagagaatctgtgtccccgacaacaaagatttaaaggatgcaattctgaaagaagctcatgatactttatactccattcaccctggtagtactaagatgtaccaggatcttaaggaaagattttggtgggcaagtatgaagcgtgaaatcgcagaatacgtagcagtatgtgatgtttgtcaacgagtcaaggcagaacatcagaaacccgccggtttgttgcaacctttgaagattcctgaatggaaatgggaagaaattggtatggattttattactggtttacccagaacgtcatcaggccatgactctatttgggtgatagtcgacagacttaccaaagtggctcatttcattccggtaaagacaacttattccggaagtcgcttagcggaattgtatatggcaaggattgtgtgtttgcatggcgtccctaagaagatagtgtctgatcgaggcagtcagtttacttcaaatttttggaagaaacttcaggaagagatgggttctaagctgaactttagtactgcttatcatccgcagacagacggacaaaccgaaagggtgaatcagattttggaagacatgttgagagcttgtgctctagatttcggtggaagttgggataagaatctaccctatgcagaatttttgtacaacaacagttatcaagctagtctacagatggctccgtacgaagcactgtatggtcggaagtgccgcactccgcttttgtgggatcaaacgggagaacgtcaggttttcggaacggatatcctaagggaagcagaagaaaaggtaaagatcattcaagaaagattgcgtgtggctcagtctcgtcataagagttatgccgacaatcgccgcagagatttgagttttgaagagggagattatgtgtatcttcgtgtcacgcctcttcgaggagttcatcgttttcataccaagggaaaattggcaccgcgttttgtgggaccttataagattgtcagtagaagaggagaggttgcttatcagttggagttacctcaatctttggcaggagtacataatgtgttccatgtgtcgcaattgaaaaagtgtttaagggtacctaccgaagaagctaatattgagcagatagaagtccaagaggatttgacttatgttgagaaaccaatccgtatcctagaaacaagtgagagaagaaccaggaatcgagttatccgtttttgcaaagtccagtggagtaatcactcggaagaagaatcaacttgggaacgagaagatgaattgaaatcagctcatccgtacctgttcgccagttcttccgaatctcgaggacgagattctgtttaa

SEQ ID NO: 22838 - DNA, 5170 bp, Oryza sativa; identical to SEQ ID NO: 15135
  unsure (1)..(5170): unsure at all n locations
  Clone ID: TF_OsC359_6016

SEQ ID NO: 22839 - DNA, 2232 bp, Oryza sativa; identical to SEQ ID NO: 15093
  Clone ID: TF_OsC359_6046

SEQ ID NO: 22840 - DNA, 4605 bp, Oryza sativa; identical to SEQ ID NO: 15199
  Clone ID: TF_OsC359_6050

SEQ ID NO: 22841 - DNA, 5896 bp, Oryza sativa
  Clone ID: TF_OsC359_6406
aaagtcttcttttggctttgggccgaaagtcggcccaaaacctctcttctctctcctcggcccagccggcccagtcagccgcgcgcgcgcgccctcgctgtcgctgacaggtgggtcccgcctgtcggagtcgtcgtcctcctcgggccgaaaccctagtttcgcgccgccgagccgccgccgccgtttcctttccaatccggccattcctttccttctccggccgaatcaatagaggggaaatgatctccgggatctcctctaccttttctcctttggaatctttggttaaatcgctttggaaagcgtcggagacgagttcgattcggatcggttttccctctctccaagccgaaggtttccttcgccgttgccgtcgccgtgggcctccgccgtcgcctccgagcccctttaaaaggatccccggtgtctcctctacccgtcgcagccctcgccttcgcctctcgtcgtcggaagagctctagcgccgtgtgccctagcttcgccgtcgccgccgccgcttcagccgtgctccgccgtcgctccagctgtcgccgccgctcgggaagaccgccgtcgtcatcgccaagtcgccgccgtcctcgtccgccccttcgcagccgtcggaacccgccggagcttcgtcgccgtcgacaacccgaaggtagccgccgcttccttctcgtcgccgtcgtcgtccgttattccgtcgtttccggagagtccgttttcgcagaagaagagtttgaagagttccaaggccagcaaggcaactcctggtttggaatggtacattcctggtttggagatagaactgtgcagccggggtggttgttcagagtggttgggcctatacaacaggatgccgcgttacaagcctgagtacctgtttggtgttgagggttttgtccaggagttgcgtacgatgtcctttgtcattggatttgggactgcccctttttatgcccagattcctcatgatcgtcatgaagagaagtgccgagtcaaagtcaccttgaacagcaatagtgaagaggtcccctcagtgatgtttgaagctggaggaagaaactacatccatgcatgtcaggaggtggcaaggatcgccataggagagctccgtgatcgctacagtgatcaattggccgacactgagtatcgctaccatcctcgccaacctcagggaagtgaccgtggcagttaccttgagactgaaggaattgagaatgatgttaccacgaaacatttggttgagatgttgtgggctatggatgaaagtcgtgcggagactgtgttagcagctcaagatcgtgaagatcggaatcgtggtaagatttgcaagctagaagacaaggtggatcgtttggagaaggaattagccgcattgaagggagaagcaccgccgcagaaggccaggattcgtcttaccgcaaggaagagagctttatttgtccctcgctatcaactggcgccaaagatggtgaacactcgtagcaatgggaatggtcccaacaaccccaataacaacaacaatggagagaatcccactcttgcccaagttcttgctcaacagacacagcttataaacatgatgatgcagcaatttcagaatcagcaaaaccaagggaataatcatgcacctccacagaacaagttagcagaatttcttcgtgtaaggccgcctgttttctctagtaccactaatcctgttgaagctagtgattggctgcatgccatagagaagaagttggatttacttcagtgtactgatcaggagaaggtctcatttgcatcacatcagttgcatggccctgcctctgaatggtgggatcacttccgccttaacaggactactgctgaacctatcacttggcttgaattcaccgctgctttccggaagacgcatataccatcgggagtagtgtctctcaagaagaaggagttcaggtcgcttacccagggatctcgctctgttacggagtatctgcacgagttcaatcgtcttgctcgttatgctccggaagatgtgcgcaatgatgaagagcgccaggagaagtttttgggaggacttaatgatgagctttcttacccactcatggttggagattatcctgatttccagaaattagtggataaggctattcgtcaggaggacaagtacaatcgcatggagcagaagaaacgtcggattgctcaattcaagacacaacagggaaataatcagaagccgcgtcttactttaggaccccagtccatgccacagggaggttcttcgtctgttgttcgtccgcaacgtcagttcttcaacaacaatgctggcaacaacatccgcaatcaagctccacgtcctgttgcagctccagcacagcaacaacctgccaagagggagcaaggcaacaagcccgtggtgtgtttcaactgtggagatccaggacattatgctgacaagtgtccgaagccccgacgcgtgaaggttgtccctgcccagaataactctgctgtaccagcatccaaggctcgtgtaaatcatgtcgctgctgcagaagctcaagatgctccagatgtgattttgggtacgttccttgttaactcagttcctgcaacagtacttttcgattctggagctacacattcattcttatctatgagttttgcgggaaatcatgggatggaagtagaagatcttagacgtcctttgatggttagtaccccaagtaatcaagcactctctttgcaacgtagcccctctgtcagaatagaaattcaaggagtaccatttctggccaatcttatcttgttagaatccaaagaccttgatgtcatcctagggatggactggttagccagacataaaggtgtgatagactgtgccaacagaaaagtaactctcaacagctatgatggtcgagttgtaactgttcatgcattgtcatctgagtctttcaggtcaagactgaaccagataactttggaagagattcctatagtccgggagtatcctgatgtgttcccagatgatttacctggtatgccgcctaaaagggatatagagttcagaatagatttggtacctggaacaactccgatccataagagaccttatcgaatggcagccaatgagttggcagaagttaagaggcaagtagatgatttgctacagaaaggatacatcagaccgagttcatcaccatggggagctccggttatttttgtggaaaagaaagaccatactcagagaatgtgtgtggactatcgtgcactaaacgatgtgactatcaagaataagtatccactacccaggattgatgatttgtttgatcagcttaaaggtgccactgttttctccaagatagatcttcgatcagggtatcatcagttgagaatcaaagaggaggatatacctaagacagcttttaccactaggtatgggttgttcgaatgtactgttatgtcttttggacttaccaatgcccctgctttcttcatgaacttgatgaataaggtgtttatggaatacctagacaagttcgtggtggtctttattgatgatattcttatctactcttgaaccaaagaagagcatgaggaacatcttcgccttgcattggagaagctacgagaacatcaattgtatgctaagtttagcaagtgtgaattttggttgtccgaagtgaaattccttggtcacgtcatctcagctggaggagttgccgtcgatcccagtaacgtggaatccgtaaccaattggaagcaaccaaagacagtttcagagattcgcagtttcctaggcctcgcaggatattatcggaggtttatagagaatttttccaagattgctaagcccatgacacgactgcttcagaaagatgtgaagtacaagtggtcggaagaatgtgaacagagttttcaagaattgaaaagtcgcttaatatcagctcctattttgattttgcctgatccaaagaagggttttcaagtgtattgtgatgcatccaaacttgggttaggttgtgttctgatgcaagatgggaaggtggttgcctatgcctctcgacagttacgtccgcatgagaagaactaccctactcatgatattgagttagctgcagtcgttcatgcattgaagatttggcgtcattatcttttcggtactcgtacagaagtgtacaccgatcataagagtttaaagtatatctttactcagccggatctgaacatgagacaaaggagatggttggaattaattaaggattatgacatgggaattcattatcatccgggaaaggctaatgttgtagcagacgctcttagcagaaaaggctattgcaatgctacagaaggacgacagttgccattggaattatgcaaggaatttgaaagattaaatttgggaattgtcggtaaaggtttcgttgcagccttagaagcgaagcccactctaattgatcaagttagagaagcccaaattaattatcctgatattcaagagatcaagaagaatatgagaagaggaaaagctattggtttcttggaggatgagcacggaactgtatggttgggtgagagaatctgtgtccccgacaacaaagacttaaaggatgcaattctgaaagaagctcatgatactttatactccattcaccctggtagtactaagatgtaccaggatcttaaggaaagattttggtgggcaagtatgaagcgtgaaatcgcagaatacgtagcagtatgtgatgtttgtcagcgagtcaaggcagaacatcagaaacccgccggtttgttgcaacctttgaagattcctgaatggaaatgggaagaaattggtatggattttattactggtttacccagaacgtcatcaggccatgactctatttgggtgatagtcgacagacttaccaaagtggctcattttattccggtaaaaacaacctattccggaagtcgcttagcggaattgtatatggcaaggattgtgtgtttgcatggtgtccctaagaagatagtgtctgatcgaggcagtcagtttacttcaaatttttggaagaaacttcaggaagagatgggttctaagctgaactttagtactgcttatcatccgcagacagacggacaaaccgaaagggtgaatcaaattttggaagacatgttgagagcttgtgctctagatttcggtggaagttgggataagaatctaccctatgcagaattttcatacaacaacagttatcaagctagtttacagatggctccgtacgaagcactgtatggtcggaagtgccgcactccgcttttgtgggatcaaacgggagaacgtcaggttttcggaacggatatcctaagggaagcagaagaaaaggtaaagatcattcaagaaagattgcgtgtggctcagtctcgtcataagagttatgccgacaatcgccgcagagatttgagttttgaagagggagattatgtgtatcttcgtgtcacgcctctacgaggagttcatcgttttcataccaagggaaaattggcaccgcgttttgtgggaccttataagattgtcagtagaagaggggaggtcgcttatcagttggagttacctcaatctttggcaggagtacataatgtgttccatgtgtcgcaattgaaaaagtgtttaagggtacctaccgaagaagctaatattgagcagatagaagtccaagaggatttgacttatgttgagaaaccaatccgtatcctggaaacaaatgagagaagaaccaggaatcgagttatccgtttttgcaaagtccagtggagtaatcactcggaagaagaatcaacttgggaacgagaagatgaattgaagtcagctcatccgcacctgtttgccagttcttccgaatctcgaggacgagattctgtt

SEQ ID NO: 22842 - DNA, 3039 bp, Oryza sativa; identical to SEQ ID NO: 15169
  Clone ID: TF_OsC359_6469

SEQ ID NO: 22843 - DNA, 3993 bp, Oryza sativa
  Clone ID: TF_OsC359_6565
atggtgcgctgcggtggattgtgttatgcaaggggtattgtcacagctcctttccgagctcctggtttggaatggtatattcctggtttggagataggactgtgcagccgggatgattgttcagaatggttgggcctatacaacaggatgccgcgctacaagcctgagtacttgtttggtgttgagggatttgtccaggagttgcgtacaatgtcctttgccataggatttgggactgcccctttttatgcccagattcctcatgatcgtcacgaagagaagtgccgagtcaaagtcaccttgaacagtaatagtgaagatatcccctcagtgatgttcgaagctggaggaagaaactacatccatgcatgtcaggaggtggcaaggatcgccataggagagctccgcgatcgctacagtgatcagttggccgacactgagtatcgctaccatcctcgtcaaccacagggaagtgaccgtggcagctaccttgagactgaaggaattgagaatgatgctaccacaaggcatttggttgagatgctgtgggctatggatgaaacccgtgcggagaccgtgttagcaggtcaagatcgtgaagatcggaatcgtggtaagatttgcaagctagaggacaaggtggatcgtttggagaaggaactagccgcattaaagggagaagcaccaccgcagaaggccaggattcatcttaccgcaaggaagagagctctatttgtccctcgctaccaattggcgccaaaggtccgtgtggtggagaaagaagttaccccagccccagcggatcctccggtcgtcaataacaagttagcagaatttcttcgtgtgaggccgcctattttctctagcaccactaatcctgttgaagctggtgattggctgcatgccatagagaagaagttggatttgcttcagtgcactgatcaggagaaggtctcatttgcatcacaccagctgcatggccctgcctctgaatggtgggatcacttccgccttaacaggactactgctgaacctatcacttggcttgaattcaccgctgctttccggaagacgcatataccatcgggagtggtgtctctcaagaagaaggaattcaggtcgctcactcaggggtctcgctctgttacggagtatctgcacgagttcaatcgtctggctcgttatgctccggaagatgtacgcactgatgaagagcgccaggagaagttcttggaaggacttaataatgagctttcttatccactcatgactggagattatcctgatttccagaagttagtggataaggctattcgccaggaggacaagtacaaccgcatggagcaaaagaaacgccggattgctcaattcaagacacaacaggggaataatcagaggccgcgtcttactttaggaccccagtccatgccacagggaggttcttcgtctgttgttcgtccgcagtgtcagttcttaaacaacaacgcagtcaacaacatccgcaatcaagctccacgtccagttgtagcctcgacgcagcaacaacctgccaagagggagcaaggcagcaagcccgtggtgtgtttcaactgtggagacccaggacattacgctgacaagtgtccgaagccccgacgcgtgaaggttgtccctgctcagagcaactctaccgcaccagcatcaaaggcccgtgtcaatcatgttgctgctgcagaagctcaagatgctccagatgtgattttgggtacgtttcttgttaacttagttcctgcaacagtgcttttcgattctggtgctacacattcattcttatctatgagttttgcgggaaatcatgggatggaagtagaaaattttagacgtcctatgatggttagtaccccaagtaatcaggcactctatttgcaacgtagcccctctgtcagaatagaaattcaaggcataccatttctggccaatcttatcctgttagaatccaaagaccttgatgtcatcctagggatggactggttagccagatataaaggtgtgatagactgtgctaacagaaaagtaactctcacgagtgatgatggtcgagttgtaactgttcatgcattgtcttctgagtctttaaggtcaagactgaaccaaataactttggaagagattcctatagtccgggagtatcctgatgtgttcccagatgatttacctggtatgcctcctaaaagggatatagagttcagaattgatttggtaccaggaacaactccaatccataagagaccttatcgaatggcagccaatgagttggcagaagtcaagaggcaagtggacgatttgcttcagagagggtacatcagaccgagttcatctccatggggagctccggttatttttgtcgaaaagaaagatcatacccagaggatgtgtgtggactatcgtgcactaaatgatgtgactatcaagaataagtatccgctgcccagaattgatgatttgtttgatcagcttaaaggtgctaccgttttctccaagatggatcttcgatcagggtatcaccagttgagaatcaaagaggaagatatacctaagacagcttttaccactaggtatggattgtttgaatgtactgttatgtcttttggacttaccaatgcccccgctttcttcatgaacttgatgaataaggtgcttatggaatacctagacaagttcgtggtggtctttattgatgacattcttatctactcccgaaccagagaagagcatgaagaacatcttcgctttgcactagagaagctacgagaacatcaactgtatgccaagtttagttgtgttctgatgcaagatgggaaggtggttgcctatgcatctcgtcagttacgcccgcatgagaagaactaccctactcatgatcttgagttagctacagtagttcatgcgttgaaaatttggcgtcattatcttttcggtactcgtacagaggtgtataccgatcacaagagtttaaagtatatctttactcagccggatctgaacatgagacaaaggagatggctagaattaattaaggattatgacatgggaattcattatcacccaggaaaggctaatgttgtagcagacgctcttagcaggaaaggctattgcaatgctacggaaggacgacagttgccattggaattatgcaaggaatttgaaagattaaatttggaaattgtcagtagagctttcgttgcagccttagaagcgaagcccactctaattgatcaagttagagaagcccaaattaatgatcctgatattcaagaaatcaagaagaatatgagaagaggaaaggctatcggtttcttggaagatgagcaaggaactgtatggttgggtgagagaatctgcgtccccgacaacaaagatttaaaagatgcaattctgaaagaagctcatgatactttatattccattcaccctggtagtaccaagatgtaccaggatctcaaggaaagattttggtgggcaagtatgaagcgtgaaatcgcagagtacgtagcagtatgtgatgtttgtcagcgagtcaaggcagaacatcagaaacccgccggtttattgcagcctttgaagattcctgaatggaaatgggaggaaatcggtatggatttcatcactggtctacccagaacgtcatcaggccatgactctatttgggtgatagtcgacagacttaccaaagtggctcatttcatcccagtaaagacaacctattccggaagtcggttggccgaattgtatatggcaaggattgtgtgtttgcatggcgtccctaagaaaatagtgtctgatcgaggcagtcagtttacttcaaatttttggaagaagcttcaggaagagatgggttctaagctgaactttagtactgcttatcatccgcagacagacggacaaaccgaaagggtaaatcagattttggaagacatgttgagagcttgtgctttagacttcggtggaagttga

SEQ ID NO: 22844 - DNA, 6468 bp, Oryza sativa; identical to SEQ ID NO: 15152
  Clone ID: TF_OsC359_6605

SEQ ID NO: 22845 - DNA, 5162 bp, Oryza sativa
  Clone ID: TF_OsC359_6632
cgtgattagtctcacccttctcaccataatagaagaactgtgcagccgggatggttgttcagaatggttgggcctatgcaacaggatgccgcgctacaagcctgagtacttgtttggtgttgagggttttgtccaggagttgcgtacaatgtcctttgtcgttggatttgggactgcccctttttatgcccagattcctcatgatcgtcatgaagagaagtgccgagtcaaagtcaccttgaacagtaatagtgaagatatcccatcggtgatgttcgaagctggaggaagaaactacatccattcatgtcaggaagtggcaaggatcgccataggagagctccgtgatcgttacagtgatcagttggctgacactgagtatcgttaccatcctcgtcaaccacagggaagtgaccgtggcagttaccttgagactgaaggaattgagaatgatgctaccacaacacatttggttgagatgctatgggctatggatgaaagtcgtgcggaaactgtgttagcggcccaagatcgtgaagattggaatcgtggtaagatttgcaagctagaagacaaggtggatcgtttggagaaggaactagccgcgttgaagggagaagcaccacctcagaaggtcaggattcgtcttaccgcaaggaagagagctctatttgtccctcgctatcaattggcgccaaagtttcccccggtttctcttcttgtgccctgtccatgccagatggtgaacactcgcagcaacgggaatggtcccaaccccaacaaccccaataacaataacaatggggagaatccaacccttgctcaagttcttgctcaacagactcagctaatgcacatgatgatgcaacaacttcagaaccagcagaaccagggaaataaccatgcacctcctcagaataagttagcagaatttcttcgtgtgaggccgcctattttctctagtaccactaatcctgttgaagctagtgattggttgcatgccttagagaagaagttggatttgcttcagtgcactgatcaggagaaggtctcatttgcatcacatcagttgcatggccctgcctctgaatggtgggatcacttccgtctgaataggactactgctgaacctatcacttggcttgaattcaccgctgcttttcggaagacgcatataccatcgggagtggtgtctctcaagaagaaggagttcaggtcgctcacccagggatctcgctctgttacggagtatctgcacgagttcaatcgtctggctcgttatgctccagaagatgtgcgcaatgatgaagagcgtcaggagaagttcttggaaggacttaatgatgagctttcttacccactcatgactggagattattctgatttccagaaattagtggataaggctattcgtcaggaggacaagtataatcgcatggagcagaagaaacgccggattgctcaattcaagatacaacaggggaataatcagaagccgcgtcttattttaggacaccagtctatgccacatggaggttcttcgtctgttgttcgtccgcagcgtcagttcttcaacaacaatgctggcaacaacaaccgcaatcaagctccacgccttattgcagcctcgacacagcaacaacctgccaagagggagcaaggcagcaagcttgtggtgtgtttcaactgtggagacccaggacattatgctgacaagtgtccgaagccccgacgcgtgaaggttgtccctgcccagagcaactctaccgcaccagtatcaaaggcccgtgtcaatcatgttgctgctgcagaagctcaagatgctctagatgtgattttgggtacgttccctgttaactcagttcctgcaacagtacttttcgattctggtgctacacattcattcttatctatgagttttgcgggaaatcatgggatggaagtagaggatcttagacgtcctttgatggttagtaccccaagtaatcaagcactttctttgcaacgtagcccctcggtcagaatagaaattaaaggagtaccatttctggccaatcttatcctgttagaatccaaagacctagatgtcatcctagggatggactggttagccagacataaaggtgtgatagactgtgctaacagaaaagtaactctcaccagtaatgatggtcgagttgtaactgttcatgcattgtcttctgagtctttaaggtcaagactgaaccagataactttggaagagattcctatagttcgggagtatcctgatgtgttcccagacgatttacctggtatgccgcctaaaagggatatagagttcagaatagatttggtacctggaacaactccgatccataagagaccttatagaatggcagccaatgagttggcagaagttaagaggcaagtagatgatttgcttcagaaaggatacatcagaccgagttcatctccatggggagctccggttatttttgtggaaaagaaagatcatacccagaggatgtgtgtggactatcgtgcactaaatgatgtgactatcaagaataagtatccactacccagaattgatgatttgtttgatcagcttaaaggtgccaccattttctccaagatagatcttcgatcagggtatcatcagttgagaatcaaagaggaagatatacctaagacagcttttaccactaagtatggattgttcgaatgtactgttatgtcttttggacttaccaatgcccctgctttcttcatgaacttgatgaataaggtgtttatggagtacctagacaagttcgtggtggtctttattgatgacattcttatctactcccgaaccaaagaagagcatgaagaacatcttcgccttgcattagagaagctacgagaacatcaactgtatgctaagtttagcaagtgtgaattttggttgtttgaagtgaagttccttggtcacgtcatctcagccggaggagttgccgtcgattctagtaatgtggaatccgtaaccaactggaaacaaccaaagacagtttcagagattcgcagtttcctaggcctcgcaggatattaccggaggtttatagagaatttttccaagattgctaagcccatgacacgactgcttcagaaagatgtgaagtacaagtggtcggaagaatgtgagcagagttttcaagagttgaagaatcgcttgatatcagctcctattttgattttgcctgatccaaagaagggtttccaagtgtattgtgatgcatccaaacttgggttaggttgtgttctgatgcaagatgggaaggtggttacctatgcatctcgtcagttacgtctgcatgagaagaactatcctactcatgatcttgagttagctgcagtagttcatgcgttgaagatttggcgtcattatcttttcggtactcgtccagaggtatataccgatcacaagagtttaaagtatatctttactcagccggatctgaacatgagacaaaggagatggttggaattaattaaggattatgacatgggaattcattatcacccgggaaaggctaatgttgtagcagatgctcttagcaggaaaggctattgcaatgctacagaaggacgatagttgccattggaattatgcaaggaatttgaaagattaaatttgggaattgtcagtagaggtttcgttgcagccttagaagcgaagcccactctaattgatcaagttagagaagcccaaattaatgatcctgatattcaagagatcaagaagaatatgagaagaggaaaagctatcggtttcttggaggatgagcatggaactgtatggttgggtgagagaatctgtgtccccgacaacaaagatttaaaagatgcaattctaaaagaagctcatgatactttatactccatacaccctggtagtactaagatgtaccaggatctcaaggaaaggttttggtgggcaagtatgaagcgtgaaatcgcagaatacgtagcagtatgtgatgtttgtcagcgagtcaaggcagaacatcagaaacccgccggtttgctgcagcctttgaaaattcctgaatggaaatgggaagaaatcggtatggattttatcactggtctacccagaacgtcatcaggccatgactctatttgggtgatagtcgacagacttaccaaagtggctcatttcatcccggtaaagacaacctattctggaagtcggttagcggaattgtatatggcaaggattgtgtgtttgcatggcgtccctaagaaaatagtgtctgatcgaggcagtcagtttacttcaaatttttggaagaaacttcaggaagagatgggttctaagctgaactttagtactgcttaccatccgcaaactgatagacaaactgaaagggtgaatcagattttggaagacatgttgagagcttgtgctttagatttcggtggaagttgggataagaatctaccttatgcagaattttcgtataataacagttatcaagctagtcttcagatggctccttacgaagcactgtatggtcggaagtgtcgcactccgcttttgtgggatcaaacgggagagcgtcaggttttcgggacggatatcctaagggaagcagaagaaaaggtgaaaatcattcaagaaagattgcgtgtggcttagtctcgtcataagagttatgccgacaatcgccgcagagatttgagttttgaagagggagattatgtgtatattcgtgtcacacctcttcgaggagttcatcgttttcataccaaaggaaaattggcaccgcgttttgtgggaccttataagattgtcagtagaagaggagaggttgcttatcagttagagttacctcaatctttggcaggagtccatgatgttttccatgtgtcgcaattgaagaagtgtttaagggtacctaccgaagaagctatcttgaacagatagaagtccagaggatctgacctatgttgagaaaccaatccgtatcttggaaacaaatgagagaaggaccaggaatcgagttatccgtttttgcaaagtccaatggagtaatcactcggaagaagagtcaacttgggaacgagaagatgaattgaagtcagcccatccgtatctgttcgccagttcttccgaatctcgaggacgagattctgtt

SEQ ID NO: 22846 - DNA, 2775 bp, Oryza sativa
  Clone ID: TF_OsC359_6662
cgagccactggccgctgtgctatgccgtgcccgtgtctagctcaccggtttagtcgcagccgttattgagtcgttcgctcgttcgttcaaacgaggtgttccccttgcttcgttcgttcgtccgtgttgagtcgtcctttagtttagagccgttcagagctgccggttccgttcgccggtttcggttgatcatttgggtgatctttatgtgtactatttatttggtttttattagtctttttcctcgttttgcgtgttagcttgtcgtttccgtcgtttcgaaggatcgcgtgtgcgtcggaagtgttcaagaagacataataaaagatgcttaatctggtaataatttgtttagctcctggtttggaatggtacattcctggtttggagatagaactgtgcagccgggatggttgttcagaatggttgggcctatacaacaggatgccgcgttacaagcctgagtacctgtttggtgttgagggttttgtccaggagttgcgtacgatgtcctttgtcattggattcgggactgcccctttttatgcccagattcctcatgatcgtcatgaagaaaagtgccgagtcaaagtcactttgaacagtaatagtgaagatatcccctcagtgatgtttgaagctggaggaagaaattacatccatgcatgtcaggaggtggcaaggatcgccataggagagctccgtgatcgctacagtgatcaattggccgacactgagtatcgttaccatcctcgtcaaccacagggaagtgaccgtggcagttatcttgagactgaaggaattgagaatgatgctaccacaaggcatttggttgagatgctgtgggctatggatgaaagtcgtgcggagactgtactagcagctcaagatcgtgaagaccggaatcgtggtaagatttgcaagttagaagacaaggtggatcgtttggagaaggaattagccgcattgaagggagaagcaccgccgcagaaggccaggattcgtcttaccgcaaggaagagagctttatttgtccctcgctatcaactggcgccaaagatggtgaacactcgcagcaatgggaatggtcccaacaaccccaataacaacaacaatggagagaatcccactctggcccaagttcttgctcaacagacacagcttatgaacatgatgatgcagcaatttcagaatcagcaaaaccaaggaaataatcatgcacctccccagaacaagttagcagaatttcttcgtgtgaggccgcctgttttctctagtaccactaatcctgttgaagctagtgattggctgcatgccatagagaagaagttggatttgcttcagtgtactgatcaggagaaggtctcatttgcatcacatcagttgcatggccctgcctctgaatggtgggatcacttccgcctgaataggattactgctgaacctatcacttggcttgaattcaccgctgctttccggaagacgcatataccatcaggagtagtgtctctcgagaagaaggagttcagcgccaggagaagttttttgggaggacttaatgatgagctttcttacccactcatggttggagattatcctgatttccagaaattagtggataaggctatacgtcaggaggacaagtacaattgcatggagcagaggaaacgtcggattgctcacttcaaggcacaacaggggagtaatcagaagccgcgtcttactttaggaccccagcccatgtcacagggaggttcttcgtctgttgttcgtccgcagcgtcagttcttcaacaacaatgctggcaacaacatccgtaatcaagctccacgtcctgttgcagctccagtacagcaacaacctgccaagagggagcaaggcagcaagcccgtggtgtgtttcaactgtggagacccaggacattatgctgacaagtgtccgaagccccgtcgcgtgaaggttgtccctgcccagagtaactctgctgtaccagcatcaaaggcccgtgtcaatcatgtcgctgctgcagaagctcaagatgctccagatgtgattttgggtacgttccttgttaactcagttcctgcaacagtgcttttcgattctggtgctacacattcattcttatctatgagttttgcgggaaatcatgggatggaagtggaagatcttagacgtcctttgatggttagtaccccaagtaatcaagcactctctttgcaacgtagcccctctgtcagaatagaaattaaaggagtaccatttctggccaatcttatcttgttagaatccaaagaccttgatgtcatcctagggatggactggttagccagacataaagatgatttacctggtatgccgcctaaaagggatatagagttcagaatagatttggtacctggaacaactccgatccataagagaccttatcgaatggcagccaatgagttggcagaagttaagaggcaagtagatgatttgctacagaaaggatacatcagaccgagttcatcaccatggggagctccggttatttttgtggaaaagaaagaccatactcagagaatgtgtgtggactatcgtgcactaaacgatgtgactattaagaataagtatccactacccaggattgatgatttgtttgatcaactgaaaggtgccactgttttctccaagatagatcttcgatcagggtatcatcagttgagaatcaaagaggaggatatacctaagacagcttttaccactaggtatgggttgttcgaaggtttatag

SEQ ID NO: 22847 - DNA, 4905 bp, Oryza sativa; identical to SEQ ID NO: 15213
  Clone ID: TF_OsC359_6777

SEQ ID NO: 22848 - DNA, 4119 bp, Oryza sativa
  Clone ID: TF_OsC359_6816
atggtgggttgtgagcacatggttttgaaggtcgtgctcataacaattaaggacccgttcgcgagctactgttgtgaaacattaaccgtgccaaccacaagccagcgtgtgcaacggctttaccttttgtatagcatggttcattacggggtgccagattgagaagcggcgagaagtccgtgggggtcgctggggagtccatgcctctggttattgagggggtgattatgatccaggaatggtgcactgtggtgagttgtgttgtgcgaaaggtattgtcacgatttccccctttgcagctcctggtttggaatggtatattcctggtttggagatagaactgtacagccggatgtcgcgctacaagcctgagtacttgtttggtgttgagggatttgttcagaagttgcgtacgatgtcctttgtcataggatttgggactgcccctttttatgcccagattcctcatgatcgtcacgaagagaagtgccgagtcaaagtcaccttgaacagtaatagtgaagatatcccctcagtgatgttcgaggctggaggaagaaactacatccatgcatgtcaggaggtggcaaggatcgccataggagagctccgcgatcgctacagtgatcagttggccgacagtgagtatcgctaccatcctcgccaaccacagggaagtgaccgtggcagctacctagagaccgagggaattgagaatgatgctaccacaaagcatttggttgagatgctgtgggctatggatgaaacccgtgcggagactgtgttagcggctcaagatcgtgaagaccggaatcgtggtaagatttgcaagctagaggacaaagtggatcgtttggagaaggaactagccgcattaaagggagaagcaccgccgcagaaggccaggattcgtcttaccgcaaggaagagagctctatttgtccctcgctaccaattggcgccaaaggtccgtgtggtggagaaagaagttaccccagccctagcggatcctccggtcatcaacatggtgctcactcgcagcaacgggaatggccccaacaacaccaataataacaacaacaatggagagaatcccacacttgcccaagtcctggctcaacagacacagcttatgaacatgatgatgcagcaactccagaaccagcagaaccagggaaataaccatgcacctccccagaacaagttagcagaatttcttcgtgtgaggccgcctattttctctagtaccactaatcctgttgaagctggtgattggctgcatgccatagagaagaagttggatatgcttcaatgcacggatcaggagaaggtctcatttgcatcacaccagttgcatggccctgcctctgaatggtgggatcacttccgcctgaataggactactgctgaacctatcacttggcttgaattcaccgctgctttccggaagacgcatataccatcgggagtggtgtctctcaagaagaaggaattcaggtcgctcactcaggggtctcgctctgttacggagtatctgcacgagttcaatcgtctggctcgttatgctccagaagatgtgcacactgatgaagagcgccaagagaagttcttggaaggacttaatgatgagctttcttacccactcatgactggggattatcctgatttccagaagttggtggataaggctattcgtcaggaggacaagtacaatcgcatggagcagaagaaacgccggattgctcaattcaagacacaacaggggaataatcagaagccgcgtcttactttaggaccccagtctatgccacagggaggtttttcgtctgttgttcgtccgcagcgtcagttcttcaacaataacgcgggcaacaacatccgtaatcaagctccacgccctgttgcagctccaacacaacaacaacctgccaagaaggagcaaggcagcaagctcgtagtgtgtttcaactgtggagacccaggacattatgctgacaagtgtccgaagccccgacgcgtgaaggttgtccctgcccagagcaactctaccgcaccagcatcaaaggctcgtgtcaatcatgtcgctgctgcagaagctcaagatgctccagatgtgattttgggtacatttcttgttaacttagttcctgcaacagtgcttttcgattctggtgctacacattcattcttatctatgagttttgcgggaaatgatgggatggaagtagaagatcttagacgtcatttgatggttagtaccccaagtaatcaagcactctctttgcagcatagtccctctgtcagaatagaaattcaaggagtaccctttctggccaatcttatcctattagaatccaaagaccttgatgtcatcctagggatggactggttagccagacataaaggtgtgatagactgtgctaacagaaaagtaactctcaccagcaatgatggacgagttgtaactattcatgcattgtcatctgagtctttaaggccaagtctgaaccaaataactttggaagagattcctacagtccgggagtatcccgatgtgttcccagacgatttacctggtatgccgactaaaagggatatagagttcagaatagatttggtaccaggaacaactccgatccataagagaccttatagaatggcagccaatgaattagcagaagtcaagaggcaagtagacgatttgcttcagaaagggtacatcagaccgagttcatttccatggggagctccggttatttttgtggaaaagaaagatcatacccagaggatgtgtgtggattatcgtgcactaaatgatgtgactatcaagaataagtatccgctacccagaattgatgatttgtttgatcagcttaaaggtgccaccgttttctccaagatagatcttcgatcaaggtatcaccagttgagaattaaagaggaagatatacctaagacagcttttaccactaggtatggattgttcgaatgtactgttatgtcttttggacttaccattgcccccgctttcttcatgaacttgatgaataaggtgtttatggaatacctagacaagtttgtgttggtctttattgatgacattcttatctactctcgaacaaaagaagagcatgaagaacatcttcgccttgtactagagaagctacgagaacatcaactgtatgctaagtttagcaagtgtgaattttggttgtctgaagtgaagttccttggtcacgtcatctcagccggaggagttgccgttgatcctagtaatgtggaatccgtaaccaactggaaacaaccaaagacagtttcagagattcgtagtttcctaggcctcgcaggttattatcggaggtttatagagaatttttccaagattgctaagcccaggacacgattgcttcagaaagatgtgaagtacaagtggtcagaagaatgtgagcagagttttcaagagttgaagaatcgcttaatatcagctcctattttgattttgcctgatccaaagaagggtttccaagtgtattgcgatgcatccaaacatgggttaggttgtgttctgatgcaagatgggaaggtggttgcctatgcatctcgtcagttacgtccgcatgagaagaactaccctactcatgatcttgaattagctgcagtagttcatgcgttgaaaatttggcgtcattatcttttcggtactcgtacagaggtatataccgatcacaagagtttaaagtatatctttactcagccggatctgaacatgagacaacggagatggttggaattaattaaggattatgacatgggaattcattatcacccgggaaaggctaatgttgtagcagacgctcttagcaggaaaggctattgcaatgctacggaaggacgacagttgccattggaattatgcaaggaatttgaaagattaaatttgggaattgtccgaagaggtttcgttgcagccttagaagcgaagcccactctaattgatcaagttagagaagcccaaattaatgatcttgatattcaagaaatcaagaagaatatgagaagaggaaaagctatcggtttcatggaggatgagcaaggaactgtatggttgggtgagagaat

SEQ ID NO: 22849 - DNA, 3285 bp, Oryza sativa
  Clone ID: TF_OsC359_6857
ccaacctcattcttcttgagtccaaggaccttgatgtcattcttggaatggattggttgacacggtacagaggagtgattgattgtgctagccgcaccatcaagttaaccaatgcgaaaggagaagtggtaaccttccagtctccagtgccgcagaagccagggatcagtttaaaccaggctgctggtgaagaacaagaggtagcagtggagaaaaccactaagaagttggaggatattcctatagtcagagagtatccagaggtttttccggatgatctgacaacaatgccaccaaaaagggatatcgagttccggattgacttggtacctagaactgcaccgatccacaagaggccttacagaatgagagccaacgagttggcggaagtcaagaaccaagttgatgaacagttacagaagggatacattcgcccgagcacgtcgccttggggtgctctagttatctttgtggaaaagaaagataaaaccaaaaggatgtgcgtcgactaccgcgcactcaatgaggtcactattaagaacaagtatccgttgccaagaattgatgatctgtttgatcagttgaaaggagctactgtgttctctaagatagacctacgatcaggctatcaccagttgaggatccgcgaagaggatattccaaagacagcattcatcgctcgcaagtgtgacttttggcttaaggaagttcagtttctcggtcacatcgtgaatgctcaaggagtagctgtggatccagcaaatgtggagtcagttaccaaatggaccccaccaaggacagtcactcaggatggcaaagtggtttcttatgcttcatggcagttgcgtcctcatgaaggcaactacccgacgcatgatctggaattggccgcagttgttcatgctttaaagatttggtggcactatctcatcggtaaccgttgtgaggtatatacagatcacaaaagtctaaagtacatcttcactcaacctgatttgaatctcagacagcgaagatggttagagctaatcaacgattatgatatgggaatacattatcatcccggcaaggctaatgtggttgcagatgccttgagcaggaagagctactgcaatgttgcatgggtagagcaactatgttgtgaggttcaatgtgatttggaacatctgaaccttggtatagttgagcacggattcgtggctgccctagaggcacaacccacactggtggagcaggttcgcatagctcaagcaagtgaccctaaaatagcagagctcaaaaagaacatgagagttggaaaagcccgaggttttgttgaggatgaacaaggaacaatctggatgggggaaagattgtgtgtacctgaaaacaaggagttaaaggacttgataatgacagaagctcatcaaactcagtattccattcatcctggcagtaccaagatgtaccaagacctcaaagaaaaattctggtgggtcaacatgagaagggaaatagctgaattcgtcgcactctgtgacgtttgccagcgagtaaaggcagaacaccaaaggccagcaggtttgctacagccacttcagattccagaatggaagtgggaagaaatcggaatggatttcattacgggtttgcccaggacgtcatcggggcatgattctatttgggtagttgttgatcgactcactaaagtggctcactgcattccggtgcatactacctactcagggaagagcggtgacgtcaccgacagcggcagcggctcggcggagcggacggctcgggcggcgcacactcaccggcaaacggcggcgctaggacgcaaacggagggcaccaagatgtagaggacaacacggcgaactcaccggtgacctaaacggcggcggaagaccaacggacggcgacggcgacaaggaggaagcggcgggaaccttcgggtcgacgacggcgaagctgctccggtgatctccggcgacggcgaaggggcgaacgaggacggcgacgacttggcgagcacgacggtggtcttcccgagcgacggcgacggcggagctccccatggagatgaactaggtctgatgtatcccttctgaagcaaatcatctacttgcctcttaacttctgccaactcattggcaggtaaatcatctgggaacacatcggaatactcccgaactataggaatctcttccaaagttatatctggagcatcttgagcttctgcagcagcgacatgatttacacgagccttggatgctggtacagcagagttattctgggcagggacaaccttcacgcgtcggggcttcggacacttgtcagcataatgtcctgggtctccacagttgaaacacaccacgggcttgctgccttgctctctcttggcaggttgttgctgtgctggagctgcaacaggacgtggagcttgattacggatgttgttgccagcattgttgttgaagaactgacgctgcggacgaacaacagacgaagaacctccctgtggcatggactggggtcctaaagtaagacgcggcttctgattatttccctgttgtgccttgaagtgagcaatccgacgtttcttctgctccatgtgattgtacttgtcctcctgacgtatagccttatccactaatttctggaaatcaggataatctccaaccatgagtgggtaagaaagctcatcattaagtcctcccaaaaacttctcctggcgctcttcatcattgcgcacatcttccggagcataacgagcaagacgattgaactcgtgcagatactccgtaacagagcgagatccctgggtaagcgacctgaactccttcttcttgagagacactactcctgatggtatatgcgtcttccggaaagcagcggtgaattcaagccaagtgataggttcagcagtagtcctgttaaggcggaaatgatcccaccattcagaggcagggccatgcaactgatgtgatgcaaatgagaccttctcctgatcagtacactgaagcaaatccaacttcttctctatggcatgcagccaatcactagcttcaacaggattagtggtactagagaaaacaggcggcctcacacgaagaaattctgctaacttgttctggggaggtgcatgattatttccttggttttgctgattctgaaattgctgcatcatcatgttcataagctgtgtctgttgagcaagaacttgagcaagagtgggattctctccattgttgttgttattggggttgttgggaccattcccattgctgtgagtgttcaccat

SEQ ID NO: 22850 - DNA, 5253 bp, Oryza sativa
  unsure (1)..(5253): unsure at all n locations
  Clone ID: TF_OsC359_6997
ctacgcgttcaggggggcgtgcggcacaaccgcatgctcgaaaagatcgcttccaaagagccccagaccaccgcggagctttttcagctcgcggaccgagtggctcgtaaggaggaagcgtggacatggaactcctccggttccggagtggcagcttcggccgcccccggatccgccgctcagacagggcggcgtgacaggaggaggaagaagaggtcggtccattccggcgacgagggtcatgtcctcgccgtcgagggcgctccgcgggccacccgaaaggggaggcccataaccctcggtcaccacgctcccggcctggccagtctcgacatgtggatctccccaggcactagccccgacccgagccatttgaggactagaacccgggtcgccagcctcgtcgccactgtcgcccacaccgccgtcatcgccctcctcgtcggagttgagggcgaacgcgagccgaggggccgaaccctcgaagctgtggacgatatggtcggcggcatcccggacctgcacgcgcgcgccgtcctcggtcccgggagggaactcgtccagcgccgtccatggggagaagtcggggtccctggcctggtaactcgccagtacgagctccaccgctcctcgggcgaggtccctcgaggatgagttaatcgtcccctcgagctcctcggggagccgctggagagtcccggccatctccgagaggcgctgggcgaggcccccctggttggcggcgtacttcacagtccgcccgccccagagacccgcctgccgcccggcgcggtctaaacgggacacggcatcgcgaagcatgctgggccctatctcgcctgccaggcgaagggcctcgacctccccggtggacgaatccagcgcgccctgcagatccgcgatggtgtgttcggcagctgcgaggcgggcggctaagtcgctgtcgcccgtggccgccccgccgctacgcgcccttgcatccagctcccttgcctgcgcctcgagttcagcggcccgctggttcagtgcggccctctcggcgcgggcactttccagattgcgacgcgcttgttcctcttgcgcagcctcgcggagggacaggctgtccgccagccgttgcgccgcggcctcggcctccttgagagctcgctcccgctcggtgagcgcgtcctcgcggaggcggagcgcggactcttcttcggcacaggcggcttcgtgcaccgccagtgtgacctcccgaatagcaacggcggcctcgcgatccgccaggtccctctccacggcgcaggcacgctcttccagcgccatggcacgggcctcaagggcttcttcgcgccgccgggatgccacctcggtctccgccgcccgccgttctcgggcagcggcagcgtcaaggaccccccgggcggcgtcgagctttttccctagctccgcctcccagctcccgtattgaaggcggagggtgtcctgcgcctcgttcatcacggtggtggcgatgagggcagccccccgctcctcctccacctccttggcgatctcccccagcaccttccgacgggcttcgagctctgagacgtgccggcggtgtgccttgcggcccacctccaccatggcctccaccgagcgtcgcccctcttcgacacgcgcccatgcggcgtcaagctccgcccgctctgcttgcagggcctccacttgggcacttaacccgtccaacaccgtggtgtttgcgacggccaaggcctgcagaaggggttctgcgctcagtggagcaacggaaggcgtggggaagagccgcctcggtgaggatgccgcgcggctcggcccgccgatggacatgccggactcagggatgtcccccggacctggcttgtcctgagcgtcgcccgagggagtgggcccaagcgatacgcccgcggcctcgtcgcgagctgcctcggaagtcgtcgccgcctcggcctggcgaagtctggcctcctcccgagcggcttcttcagcttggcgagctcggacggccacctgggcggcctccccggcttcccgtaggcgatccgcggcttctcgccggtcagattcccgcctccgagcctctgtggtcgccgggtcctcggcctcagactggccggacttggaatggcgggagggacgcgacgggatctcgcttggaggggaaataaggtttccccgggatggttctgtcccccccatcttgcggagccgtttcttcttccgctccccctcgggctgcgacgtcggcgtggccccctccgggcgcctgctgctggcacgcgccgccccgccccctcggggaggagatgggggaggggttccttcctgcttcctcttcccccgggcgtcggcagggcggccgctccccgggcccccgtcgcggggcccagaagcacgaccccctcccggggtagattgttcccccctgcggctcccgcccgcgccatcgtggcctcgaggagcccgctcctccgacgccccgaccgcctgcatgatggtcaggatggaggcgcggtctggatcgctgcagagggggaggactccttgaggaatgagggatgcctccacggagctgagattcagcacccgttggaccactatcttgaagtcctcaggagcccggtcccatctgaccccctggtgggtcctcatacagtcctcggacccggtgtactcccaggcgccccgggcgcgccgctggagtggcgcgatccggcgacgaagatagtcgccgaacaccatggcccctgtgagcccctgggatcgcaggcccgccaggcggtcgaggacggcgtcgtagccatctcccagatctaccggcgcccgccagttggaggcctgcgttggaggctggctcggaagtcggaggcgcgcttcgtcggcgaggggggtgtagaaccagtcgctcttccagtcatcccacttcttgcggaggacgcagggaatgtagcggttcagcaccggccctcgcggctggaagtagcaaccaccaaccaccgacggcggcgacaccggctgtacggtgaagaaccaccggaacagccgaagggatgggcgcaccccgatgaacatctcgcacaggtgcgcgaagatggccaatgtcattaccgcgttgggggtgaggtgcgccatctggagatcgtaaaactccagaacatccatgaagaaagaagaaaatggcggaaccagccctgccatagcaaaagggaggaagaagacggaccgccccgggtagcgtggcgccgggcatccctcgcccagcgagactatctcccggtcagtggcagattccggcatgaagcggcgcggcagcccggcctgtctctcgctcacgatgcgggaaggcggcagcacggcctcgccccgtcctgtcaggatgagagtctctaggcactcgtccctagccggagccagcgtgctagctcctggagatggcacgttggtcatcaccgacgacggcggcggctcggcgaagaagacggctcgggcggcggacactcgccggcgaacggcggcaccacggcaccaacggagggcaccagcacgtagaggacaacgcggcgaacacaccggtgaccaaaacggcggcggagaaggaacggacgacgacggcgacgagaaggaagcggcggctaccttcgggttgtcgacggcgacgaagctccggcgggttccgacggctgcgaaggggcggacgaggacggcggcgacttggcgatgacgacggcggtcttcccgagcgacggcgacggctggaacgacggcggcgcacggagttccgtgctcatcctccaagaaaccaatagcttttcctcttctcatattcttcttgatctcttgaatatcaggatcattaatttgggcttctctaacttgatcaattagagtgggcttcgcttctaaggattcttccgaccacttgtactttacatctttctgaagcagtcgtgtcatgggcttagcaatcttggaaaaattctctataaacctccggtaatatcctgcgaggcctaggaaactagtggtaaaagctgtcttaggtatatcttcctctttgattctcaactggtgataccctgatcgaagatctatcttggagaaaacagtggcacctttaagcggagctccccatggtgatgaacttggtctgatgtatcctttctgtagcaaatcatctacttgcctcttaacttctgccaactcattggcaggtaaatcatctgggaacacatcaggatactcccggaccaaaatcacatctggagcatcttgagcttctgcagcagcaacatgattgacacgggcctttgatgctggtacagcagagttattctgggtagggacaaccttcacacgtcggggcttcggacacttgtcagcataatgtcctggatctccacagttgaaacacaccacgggcttgctgccttgctccctcttggcaggttgttgctgtgctggagctgcaacaggacgtggagcttgattacggatgttgttgccagcattgttgttgaagaactgacgctgcggacgaacaacagacgaagaacctccctgtgacatgggctggggtcctaaagtaagacgcggcttctgattatttccctgttgtgtcttgaattgagcaatccgacgtttcttctgctccatgcgattatacttgtcctcctgacgaatagccttatccactaatttctggaaatcaggataatctccaaccatgagtgggtaagaaagctcatcattaagtcctcccaaaaacttctcctggcgctcttcatcattgcacacatcttccggagcataacgagcaagacgattgaactcgtgcagatactccgtaacagagcgagatccctgagtaagcgacctgaactccttcttcttgagagacactactcccgatggtatatgcgtctttcggaaagcagcggtgaattcaagccaagtgataggttcatcagtagtcctgttaaggcggaagtgatcccaccattcagaggcagggccatgcaactgatgtgatgcaaatgagaccttctcctgatcagtacactgaagtaaatccaacttcttctctatggcatgcagccaatcactagcttcaacaggattagtggtactagagaaaacaggcggcctcacacgaagaaattcttgctgcgtgcggtcngataccaaggatcccctgttgttgttatctggggggttgggaccattccaattgctccgagtattcaccat

SEQ ID NO: 22851 - DNA, 2401 bp, Oryza sativa
  Clone ID: TF_OsC359_7193
atggtgaacactcgcagcaacgggaatggtcccaacaaccccaataacaataacaatggagagaatcccactcttgctcaagttcttgctcaacagacacagctaatgaacatgatgatgcagcaacttcagaaccagcagaaccaaggaaataaccatgtacctcctcagaataagttagcagaatttcttcatgtaaggccgcctgttttctctagtaccactaatcctgttgaagctggtgattggttgcatgccatagagaagaagttggatttgcttcagtgcactgatcaggagaaggtctcatttgcatcgcatcagttgcatggccctgcctctgaatggtgggatcatttccgccttaataggactactgctgaacctatcacttggcttgagttcaccgctgctttccggaagacgcatataccatcgggagtggtgtctctcaagaagaaggagttcaggtcgcttacgcagggatctcgctctgttacggagtatctgcacgagttcaatcgtcttgctcgttatgctccggaagatgtgcgcaatgatgaagagcgtcaagagaagttcttggaaggacttaatgatgagctttcttacccactcatgactggagattattctgatttccagaagttagtggataaggctattcgtcaggaggacaagtataatcgcatggaacagaagaaatgccggattgctcacttcaaggcacaacaggggaataatcagaagccgcgtcttactttaggatcccagtctatgccacagggaggttcttcgtctgttgttcgtccgcagcgtcagttcttcaacaacaatgctggcaacaacatccgcaatcaagctccacgtcctgttgcagctccagcacagcaacaacctgtcaagagggagcaaggcagcaagcccgtggtgtgtttcaactgtggagacccaggacattacgctgacaagtgtccgaagccccgacgcgtgaaggttgtccctgcccagagcaactctaccgcaccagcatcaaaggcccgtgtcaatcatgttgctgctgcagaagctcaagatgctccagatgtgattttggtccgggagtattccgatgtgttcccagatgatttacctgccaatgagttggcagaagttaagaggcaagtagacgatttgcttcagaaaggatacatcagaccgagttcatcaccatggggagctccggttatttttgtggaaaagaaagatcatacccagaggatgtgtgtggactatcgtgcattaaatgatgtgactatcaagaataagtatccactacccagaattgatgatttgtttgatcagcttaaaggtgccactgttttctccaagatagatcttcgatcaggatatcaccagttgagaatcaaagaggaagatatacctaagacagcttttaccactaggtatggattgttcgaatgtactgttatgtcttttggacttaccaatgcccctgctttcttcatgaacttgatgaataaggtgtttatggaatacctagacaagtttgtggtggtctttattgatgatattcttatctactctcgaaccaaagaagagcatgaagaacatcttcgccttgcattggagaagctacgagaacatcaactgtatgctaagtttagcaagtgtgaattttggttgtctgaagtgaagttccttggtcacgtcatctctgcaggaggagttgccgtcgatcctagtaatgtggaatccgtaaccaattggaaacaaccgaagacagtttcagagatccgcagttttctaggccttgcaggatattatcggagatttatagagaatttttccaagattgctaagcccatgacacgactgcttcagaaagatgtgaagtacaagtggtcagaagaatacgtcgccgtcgctcgggaaggacgtcatcgtggtcgccgtcgcgtcgccgtcctcgttcgccccttcgccgtcgccggagatcaccggagcagcgtcgccgtcgacaacccgaaggtttccgccgcttccttctcgtcgccgtcgtcgtctgttgttcgtccgccgccgttttggtcaccggtgtgttcgccgcgtcgtcctctacgtgctggtgccctccgtttgcgtcctagtgccgccgttcgccggcgagcgtgcgccgcccgagccgtccgctccgccgagccgccgccgctgtcggtgacgtcaccgctgacgtcatcggggtcgtccgcccgtggttcattgcggggcaccagactgagaagtggcggagataagcccacgggggtcgctggggagtccatgccttgtttataagggggtgattatgatccaggaagaggaagagttcttcaatgaggctgatggtgtggaggagtag

SEQ ID NO: 22852 - DNA, 10549 bp, Oryza sativa
  unsure (1)..(10549): unsure at all n locations
  Clone ID: TF_OsC359_7218
atgccgcgctacaagcctgagtatctttttggtgttgagggttttgtccaggagttgcgtacgatgtcctttgtcattggatttgggactgtccctttttatgcccagattcgtcatgatcgtcatgaagagaagtgccgagtcaaagtcaccttgaacagtaatagtgaagatattccctcagtgatgttcgaagctggaggaagaaactacatccatgcatgtcaggaggtggcaaggatcgccataggagagctccgtgatcgctacagtgatcagttggccgacactgagtatcgctaccatcctcgccaaccccagggaagtgaccgtggagactgaaggaattgagaatgatgctaccacaaggcatttggttgagatgctgtgggccatggatgaaagtcgtgcagagactgtgttagcagctcaagatcgtgaagatcggaatcgtggtaagatttgcaagttagaagacaaggtggatcgtttggagaaggaattagccgcattgaagggagaagcaccacctcagaaggccaggattcgtcttaccgcaaggaagagagctttatttgtccctcgctatcaattggcgccaaaggttcgtgtggtggagaaagaagttgccccagcagatcctccggtcatcatcataagtagtgatgaagaagaagaatccaagcgcaactgttccaagattgagtgggtagcaacccaagatgatgaagacgagccgaacgagccttcaatcgacctccgatgctcggaagaactagacaacgggaatggtcccaacctcaacaaccccaataacaataacaatggagagaatccaacccttgctcaagttcttgctcaacagactcagctaatgaacatgatgatgcagcaacttcagaaccagcagaaccaaggaaataaccatgcaccccctcagaataagttagcagaatttcttcgtgtaaggccgcctgttttctctagtaccactaatcctgttgaagctggtgattggttgcatgccatagagaagaagttggatttgcttcagtgcactgatcaggagaaggtctcatttgcatcacaccagttgcatggccctgcctctgaatggtgggatcacttccgcctgaataggactactgctgaacctatcacttggcttgaattcaccgctgctttccggaagacgcatataccatcgggagtggtgtctctcaagaagaaggaattcaggtcactcactcaaggatctcgctctgttacggagtatttgcacgaattcaatcgtcttgcccgttatgctccggaagatgtacgcaatgatgaagagcgtcaggagaagttcttggaaggacttaatgatgagctttcttacccactcatgactgaagattattctgatttccagaaattagtggataaggctattcatcaggaggacaagtacaatcgcatggagcagaagaaacgccggattgctcacttcaaggcacaacaggggaataatcagaagccgcgtcttactttaggaccccagtctatgccacatggaggttcttcgtctgttgttcgtccgcagcatcagttcttcaacaacaatgctggcaacaacatccgtaatcaagctccacgtcctgttgcagcttcgacacagcaacaacctgccaagagggagcaaggcagcaagcctgtggtatgtttcaactgtggagacccaggacattatgctgacaagtgtccaaagccccgacacgtgaaggttgtccctgcccagagcaactctgctgtaccagcatcaaaggcccgtgtcaatcatgttgcagctgcagaagctcaagatgctccagatgtgattttgggtacgttccttgttaactcagttcctgcaacagtgcttttcgattctggtgctacacattcattcttatctatgagttttgcgggaaatcatgggatggaagtagaagatcttagatgtcctttgatggttagtaccccaagtaatcaagcactctctttgcaacgtagcccctctgtcagaatagaaattcaaggggtaccatttctggccaatcttatattgttagaatccaaagaccttgacgtcattctagggatggactggttagccagacataaaggtgtgatagactgtgctaacagaaaagtaactctcaccagcaatgatggtcgagttgtgactgttcatgcattgtcttctgagtttttaaggtcaagactgaaccagataactttggaagagattcctatagtccgggggtatcctgatgtgttcccagatgatttacctggtatgccacctaaaagggatatagagttcagaaaagatttggtacctggaacaactccgatccataagagaccttatagaatggcagccaatgagttggcagaagttaagaggcaagtagatgatttgcttcagaaaggatacatcagaccgagttcatcaccatggggagctccggttatttttgtggaaaagaaagaccatacccagaggatgtgtgtggactatcgtgcattaaatgatgtgactatcaagaataagtacccgctacccagaattgatgatttgtttgatcagcttaaaggtgccaccgttttctccaagatagatcttcgatcagggtatcaccagttgagaatcaaagagtacgggttgttcgaatgtactgttatgtcttttggacttaccaatgcccccgctttcttcatgaacttgatgaataaggtgtttatggaatatctagacaagttcgtggtggtctttattgatgacattcttatctactctaagaccaaagaagagcatgaagaacatcttcgccttgcattggagaagctacgagaacatcaattgtatgccaagttcagcaagtgtgaattctggttgtctgaagtaaagttccttggtcacgtcatctcagcaggaggagttgccgtcgatcctagtaatgtggaatccgtaaccaactggaaacaaccaaagacagtttcagagatccgcagtttcctaggcctcgcaggatattatcggaagtttatagagaatttttccaagattgctaagcccatgacacgactgtttcagaaagatgtgaagtacaagtggtcagaagaatgtgagcagagttttcaagagttgaagaatcgcttgatatcagctcctattttgattttgcctgatccaaagaagggtttccaggtgtattgcgatgcatccaaacttgggttaggttgtgttttgatgcaagatgggaaggtggttgcctatgcatctcgtcagttacgtccgcatgaaaagaactaccctactcatgatcttgagttagctgcagtagttcatgcgttgaaaatttggcgtcattatcttttcggtactcgtacagaggaatttgaaagattgaatttgggaattgtcagtataggtttcgttgcagccttagaagcgaagcccactctaattgatcaagttagagaagctcaaactaatgatccggatatccaagaaattaagaagaatatgagaagaggaaaagctattggtttcttggaggatgagcacggaactgtatggttgggtgagagaatctgtgtccccgacaacaaagatttaaaagatgcaattctgaaagaagctcatgatactttatactccattcaccctggtagtactaagatgtaccaggatctcaaggaaaggttttggtgggcaagtatgaagcgtgaaattgcagaatacgtagcagtatgtgatgtttgtcagcgagtcaaggcagaacatcagaaacccgccggtttgttgcagcctttgaagattcctgaatggaaatgggaagaaatcggtatggattttatcactggtttgcccaaaacgtcattaggccatgactctatttgggtgatagtcgacagacttaccaaagtggcacatttcattccggtaaaaacaacctattccggaagtcgcttagcagaattgtatatggcaaggattgtgtgtttgcatggcgtccctaagaagatagtgtctgatcgaggcagtcagtttacttcaaatttttggaagaaacttcaggaagagatgggttctaagttgaactttagtactgcttatcatccgcagacagacggacaaactgaaagggtgaatcagattttggaagacatgttgagagcttgtgctttagatttcggtggaagttgggataagaatctaccttatgcagaattttcatacaacaacagttatcaagctagtcttcagatggctccttacgaagcactgtatggtcggaagtgccgcactccgcttttgtgggatcaaacgggagaacgtcaggttttcgggacggatatcctaagggaagcagaagaaaaggtgaaaatcattcaagaaagattgcgagtggctcagtctcgacataagagttatgccgacaatcgccgcagagatttgagttttgaagaaggagattacgtgtatcttcgtgtcacgcctcttagaggagttcatcgtttccataccaaaggaaaattggtaccgcgttttgtgggaccttataagattgtcagtagaagaggagaggttgcttatcagttagagttacctcaatctttggcagaagtccataatgtgttccatgtgtcgcaattgaagaagtgtttaagagtacctaccgaagaagctaatcttgaacaaatagaagtccaagaggatctgacctatgtggagaaaccaatccgtatcttggaaacaaatgagagaagaaccaggaatcgagttatccgtttttgcaaagtccagtggagtaatcactcggaagaagaatcaacttgggaacgagaagatgaattgaacgagggattcgagttcgtctcggattcgtctttcccgaaccttccttcctcgtcgccggtcgccgtgggccttcgccttcgcctccgagcccctttaaaaggttccccgtggtctcctctacccgccgccaccctcgccttcgcctctcgtcgccggagtcgccctagcgccccgtgcgccgccgttgttccagccgtcgccatcgctcgggaaggccgccgtcgtgttcgccgtcgcgtcgccgtcctcgtccgccccttcgccgtcgccgaagaccgccggagcgtcatcgccgccgtcgacccgaagagcttcgccgcttcctcctcgtcgccgtcgccatccgttgatcttccgcctccgtttgcgtcctcgcgccgtcgttcgccggcgagcatgcgccgcccgagccgtcccagctgcccgagccgccgccgccggggtgacgtcatcgctgacgccatcaagttcgtcctccattccgtcgtttccggagagtccgttttcaccggagaagagtttgaagagttccaaggccagcaaggcaactcctggtttggaatggtatattcctggtttggagatagaactgtgcagccaggatggttgttcagaatggttgggcctatacaacaggatgccgcgctacaagcctgagtacctgtttggtgttgagggttttgtccaggagttgcgtacaatgtcctttgccataggatttgggactgcccctttttatgcccagattactcatgatcgtcacgaagagaagtgccgagtcaaagtcactttgaacagtaatagtgaagatatcccctcagtgatgttcgaagctggaggaagaaactacatccatgcatgtcaggaggtggcaaggatcgccataggagagctccgcgatcgctacagtgatcagttggccgacacggagtatcgctatcatcctccagtcgtcaatgtaagtgatgatgaaggagaagaatcgaagcgcactcattccaagattgagtggggagcaactcaagctgatgaagacgagccgaacgagccttcaatcaactccgatgctcggaagacctagaaagccttgtcgaaccgttgtcttagatcgttgtgttagtttgcttgagtcttcagtttgtaataatgaaactcacttaagatcaataaaagttaaagtaattctctgtcctaagtagtttcccccggtttctcttcttgtgccctgcccataccagatggtgaatactcgcagcaatgggaatggccccaacaaccccaataacaacaacaatggagagaatcccacacttgcccaagttcttgctcaacagacacagctaatgaacatgatgatgcagcaactccagaaccagcaaaaccaaggaaataaccatgcacctccccagaacaagttagcagaatttcttcgtgtaaggccgcctactttctctagcaccgctaatcctgttgaagctggtgattggttgcatgccatagagaagaagttggatttgcttcaatgcactgatcaggagaaggtctcatttgcatcccatcagttgcatggccctgcctctgaatggtgggatcatttccgcctgaataggactactgcggaacctatcacttggcttgaattcaccgctgctttccggaagacgcatataccatcgggagtggtgtctctcaagaagaaggaattcaggtcgctcacccagggatctcgctctgttacggagtatttgcacgagttcaatcgtttggctcgttatgctccggaagatgtgcgcaatgatgaagagcgccaggagaagttcttggaaggacttaatgatgagctttcttacccactcatgactggagattatcatgatttccagaagttagtggataaggctattcgtcaggaggacaagtacaatcgcatggagcagaagaaacgccggattgctcaattcaagacacaacaggggaataatcagaagccgcgtcttactttaggaccccagtccatgccacagggaggttcttcgtctgttgttcgtccgaagcgttagttcttcaacaacaatgctggcaacaacatccgcaatcaagctccacgtcctgttgcagctccagcacagcaacaacctgccaagagggagcaaagcagcaagcccgtggtgtgtttcaactatggagacccaggacattatgctgacaagtgtccgaagcccagacgcgtgaaggttgtccctacccagagcaactctaccgcaccagcatcaaaggctcgtgtcaatcatgtcgctgctgcagaagcacaagatgctccagatgtgattttgggtacgttccttgttaactcagttcctgcaacagtgctttacgattctggtgctacacattcattcttatctatgagttttgcaggaaatcatgggatggaagtagaagatcttagacgtcctttgatggttagtaccccaagtagtcaagcactctctttgcaacgtagcccctctgtcagaatagaaattaaaggagtaccatttctggccaatcttatcttgttagaatccaaagaccttgatgtcatcctagggatggactggttagccagacataaaggtgtgatagactgtgctaacagaaaagtaactctcaccagcaatgatggtcgagttgtgactgttcatgcattgtcttctgagtttttaaggtcaagactgaaccaaataattctggaaaagattcctatagtccgggagtatcccgatgtgttccccgatgatttgcctggtatgccgcctaaaagggatatagagttcagaatagatttggtaccaggaacaactccgatccataagagaccttatagaatggcagccaatgagttggcagaagtcaagcggcaagtagatgatttgcttcagaaaggatacatcagaccaagttcatctccatggggagctccggttatttttgtggaaaagaaagatcatacccagaggatgtgtgtggactatcgtgccctaaacgatgtgactatcaagaataagtatccgctacccagaattgatgatttgtttgatcagcttaaaggtgccactgttttctccaagatagatcttcgatcagggtatcaccagttgagaatcaaagaggaagatatacctaagacagcttttaccactaggtatggattgttcgaatgtactgttatgtcttttggacttaccaatgcccccgctttcttcatgaacttgatgaataaggtgtttatggaatacctagacaagttcgtggtggtctttattgatgatattcttatctactctcgaaccaaagaagagcatgaagaacatcttcgccttgcactagagaagctacgagaacatcaactgtatgctaagtttagcaagtgtgaattttggttgtctgaagtgaagttccttggtcacgtcatctcagctagaggagttgccgttgatcctagtaatgtggaatccgtaaccaactggaaacaaccaaagacagtttcagagattcgcagtttcctaggtcttgcaggatattatcggaggtttatagagaatttttccaagattgctaagcccatgacacgattgtttcagaaagatgtgaagtacaagtggtcagaagaatgtgagcagagttttcaagagttgaaaagtcgcttaatatcagcacccattttgattttgcctgatccaaagaagggttttcaagtgtattgcgatgcatctaagtttgggttaggttgtgttctgatgcaagatgggaaggtggttgcctatgcatctcgtcagttacgtccgcatgaaaagaactaccctactcatgatcttgagttagctgcagtagttcatgcgttgaaaatttggcgtcattatcttttcggtactcgtacagaggtatataccgatcacaagagtttaaagtatatctttactcagccggatctgaacatgagacaaaggagatggttggaattaattaaaggattatgacatgggaattcattatcacctgggaaaggctaatgttgtagtagacgctcttagcaggaaaggctattgcaatgctacggaaggacgacagttgtcattggaattatgcaaggaatntgaaagattaaatttgggaattgtcagtagaggttttgttgcagccttagaagcgaagcccactctaattgatcaagttagagaagcccaaattaatgatcccgatattcaagagatcaagaagaatatgagaagaggaaaagctatcggtttcttggaggatgagcacggaactgtatggttgggtgagagaatctgcgtccccgacaacaaagatttaaaagatgcaattctgaaagaagctcacgacactttatactctattcaccctggtagtactaagatgtaccaggatctcaaggaaagattttggtgggcaagtatgaagcgtgaaatcgcagaatacgtagcagtatgtgatgtttgtcagcgagtcaaggcagaacatcagaaacctgccggtttgctgcagcctttgaagattcctgaatggaagtgggaagaaatcggtatggattttatcactggtttacccagaacgtcatcaggccatgactctatttgggtaatagtcgacagacttaccaaagtggcacatttcattccggtaaagacaacttattccgaaagtcgcttagcggaattgtatatggcaaggattgtgtgtttgcatggcgtccctaagaagatagtgtctgatcgaggcagtcagtttacttcaaatttttggaagaagcttcaggaagagatgggttctaaactgaactttagtactgcttatcatccgcagacagacggacaaacagaaagggtgaatcagattttggaagatatgttgagagcttgtgctttagacttcggtggaagttgggataagaatctaccttatgcagaattttcgtacaacaacagttatcaagctagtcttcagatggctccttacgaagcactgtatggtcggaagtgccgcactccgcttttgtgggatcaaacgggagaacgtcaggttttcgggacggatatcctaagggaagcagaagaaaaggtaaagatcattcaagaaagattgcgagtggctcagtctcgacataagagttatgccgataatcgccgtagagatttgagttttgaagaaggagattatgtgtatcttcgtgtcacgcctcttcgaggagttcatcgttttcacaccaaaggaaaattggcaccgcgttttgtgggaccttataagatcgtcagtagaagaggagaggttgcttatcagttggagttacctcaatctttggcaggagtccataatgtgttccatgtttcgcaattgaaaaagtgtttaagggtacctaccgaagaagctaatcttgaacagataaaagaccaagaggatctgacctatgttgagagaccaatccgtatcttggaaatagatgagagaagaaccaggaatcgggttatccgtttttgcaaagtccaatggagtaatcactcggaagaagagtcaacttgggaacgagaagatgaattgaagtcagctcatccgcatctgttcgccagttcttccgaatctcgaggacgagattccgtt

SEQ ID NO: 22853 - DNA, 4782 bp, Oryza sativa
  Clone ID: TF_OsC359_7242
atggccaggcgtcggggagcagcagccgttggcggcgccctgaccagcggcgagctggaggccatggcggtagagagtagcgggcaaggggcctggttggctgctgttgctgtccttgaatctatcaaaatttcattgatgattggaatctggaaaaattcgaaacgtgcaataacaaggatgccgcgcttcaagcctgagtacttgtttggtgttgagggatttgtccaagagttgcgtacaatgtcctttgtcattggatttgggactgcccctttttatgcccagatttctcatgatcgtcatgaagagaagtgccgagtcaaagtcaccttgaacagtaatagtgaagatatcccctcagtgatgttcgaagctggaggaagaaactacatccatgcatgtcaggaggtggcaaggatcgccataggagagctccgcgatcgctatagtgatcagttggccgacacggagtatcgctatcatcctcgtcaaccccagggaagtgaccgtggcagctaccttgagactgaaggaattgagaatgatgctaccacaaggcatttggttgagatgctgtgggctatggatgaaacccgtgcggagactgtgttagcggctcaagatcgtgaagaccggaatcgtggtaagatttacaagctagaagacaaggtggatcgtttggagaaggagctagctacgttgaagggagaagcaccgccgcagaaggccaggattcgtctcaccgcaaggaagagagctctatttgtcccttgctatcaattggcgccaaaggttcgtgtggtggagaaagaagttgccccaaccctagcagatccttcggtcatcatcataagtgacgatgaaaaagaagaatccaagcgcaaccattccaagattgagtgggtagcaactcaagatgatgaagacgagccgaacgagccttcaatcgacctccgatgctcggaagaactagagtgccataaccagcaaaaccaaggaaataaccatgcacctccccaaaacaagttagcagaatttcttcgtgtgaggccgcctattttctctagtaccactaatcctgttgaagctggtgattggctgcataccatagagaagaagttggatttgcttcagtgcactgatcaggagaaggtctcatttgcatcacaccagttacatggccctgcctctgaatggtgggatcacttccgcctgaataggactactgctgaacctatcacttggcttgaattcaccgctgctttccggaagacgcatataccatcgggagtggtgtctctcaagaagaaggagttcaggtcgctcacccagggatctcgctctgttacggagtatttgcacgagttcaatcgtctggctcgttatgctccggaagatgtgcgcaatgatgaagagcgtcaggagaagttcttggaaggacttaatgatgagctttcttacccactcatgactggagattatcatgatttccagaagttagtggataaggctattcgtcaggaagacaagtacaatcgcatggagcagaagaaacgccggattgctcaattcaagacacaacaggggaataatcagaagccgcgtcttactttaggaccccagaccatgccacatggaggttcttcgtctgttgttcgtccgcagcgtcagttcttcaacaacaatgctggcaataacaaccgcaatcaagctccacgtcctgttgcagctccaacacagcaacagcctgccaagagggagcaaggcagcaagcccgtggtgtgtttcaactgtggagacccggggcattatgctgacaagtgtccgaagccccgacgcgtgaaggttgtccctgcccagagcaactctaccgtaccagcatcaaaggcccgtgtcaatcatgttgctgctgcggaagctcaagatgctccagatgtgattttgggtacgtttcttgttaacttagttcctgcagcagtgcttttcgattctggtgctacacattcattcttatctatgagttttgcgggaaatcatgggatggaagtagaagatcttagacgtcctttgatggttagtaccccaagtaatcaagcactctctttgcaacgtagcccctctgtcagaatagaaattaaaggagtattatttctggccaatcttatcctgttagaatccaaagaccttgatgtcatcctagggatggactggttagccagacataaaggtgtgatagactgtgccaacagaaaagtaactctcaccagtcatgatggtcgagttgtgattgttcatgcattgtcttctgagtctttaaggtcaagactgaaccagataactttggaagagattcctatagtccgggagtatcccgatgtgttcccagatgatttacctggtatgccgcctaaaagggatatagagttcggaatagatttggtacctggaacaactccgatccataagagaccttatagaatggcagccaatgagttggcagaagtcaagaggcaagtagatgatttgcttcagaaaggaaacatcagaccgagttcgtctccatggggagctccggttatttttggtggaaaagaaagatcatacccagaggatcttaaaggtgctactgttttctccaagatagatcttcgatcagggtatcaccagttgagaatcaaagaggaagatatacctaagacagcttttaccactaggtatgggttgtttgaatgtactgttatgtcttttggacttaccaatgcccctgctttcttcatgaacttgatgaataaggtgtttatggaatacctagacaagttcgtggtggtctttattgatgatattcttatctactcccgaactaaagaagagcatgaagaacatcttcgccttgcattagagaagctacgagaacatcaactgtatgctaagtttagcaagtgtgaattttggttgtctgaagtgaagttccttggtcacaaacaaccgaagacagtttcagagatctgcagtttcttaggcctcgcaggatattatcggaggtttatagagaatttttccaagattgctaagcccatgacacgactgcttcagaaagatgtgaagtacaagtggtcggaagaatgtgagcagagttttcaagagttgaagaatcgcttgatatcagctcctattttgattttacctgatccaaagaagggtttccaggacgggaaggtggttgcctatgcatctcgtcagttacgtccgcatgaaaagaactaccctactcatgatcttgaattggccgcagtagttcatgcgttgaaaatttggcgtcattatcttttcggtactcgtacagaggtatataccgatcacaagagtttaaagtatatctttactcagccggatctgaacatgagacaaaggagatggttggaattaattaaggactatgacatgggaatctgtgtccccgataacaaagatttaaaagatgcaattctgaaagaagcccatgataccttatactccattcaccctggtagtacaaaaatgtaccaggatctcaaggaaagattttggtgggcaagtatgaagcgtgaaatcgcagaatacgtagcagtatgtgatgtttgtcagcgagtcaaggcagaacatcagaaacccgccggtttgttgcagcctttgaagattcctgaatggaaatgggaagaaatcggtatggattttatcactggtttacccagaacgtcatcaggccacgactctatttgggtgatagtcgatagacttaccaaagtggctcatttcatcccggtaaagacaacctattccggaagtcggttggcggaattgtatatggcaaggatcgtgtgtttgcatggcgtccctaagaaaatagtgtctgatcgaggcagtcagtttacttcaaatttttggaagaagcttcaggaagagatgggttctaaattgaactttagtactgcttatcatccgcagacagacggacaaaccgaaagggtgaatcagattttggaagatatgttgagagcttgtgctttagatttcggtggaagttgggataagaatctaccttatgcagaattttcgtacaacaacagttatcaagctagtcttcagatggctccttacgaagcactgtatggtcggaagtgccgcactccgcttttgtgggatcgaacgggagaacgtcaggttttcgggacggatatcctaagggaagcagaagaaaaggtgaaaatcattcaagaaagattgcgtgtggcccagtcgcattataagagttatgccgacaatcgccgcagagatttgagttttgaagaaggggattatgtgtatcttcgtgtcacgcctcttcgaggagttcatcgttttcacaccaaaggaaaattggcaccgcgttttgtgggaccttatatgattgtcagtagaagaggagaggttgcttatcagttggagttacctcaatctttggcaggagtccataatgtgttccatgtgtcgcaattgaagaagtgtttaagggtacctaccgaagaagctaatcttgaacagatagaagtccaagaggatctgacctatgttgagaaaccaatccgtatcttggaaacaaatgagagaagaaccaggaatcgagttatccggttttgtaaagtccaatggagtaatcactcggaagaagaatcaacttgggaacgagaagatgaattgaagtcagctcatccgcatctgttcgccagttcttccgaatctcgaggacgagattctgtttaa

SEQ ID NO: 22854 - DNA, 4765 bp, Oryza sativa
  Clone ID: TF_OsC359_7268
ggagaaggaactagccgcgttgaagggagaagcaccgccgcagaaggccaggattcgtctcaccgcaaggaagagagctttgtttgtccctcgttatcaattggcgccaaagattcgtgtggtggagaaagaagttgccccagctcaagcagatcctccagtcatcatcataagtagtgatgaagaagaagaacccaagcgcaacaattccaagtttgagtgggtagctatcaaagatgaggaagatgagccgaacgagccttcgatcgacctcctatgctcggaagaactagagtgactttttccccggtttcttttcttatcctgtccatgccagatggtgaacactcgcagcaacgggaatggtcccaacctcaacaaccccaataacaataacaatggagagaatccaacccttgctcaagttcttgctcaacagactcagctaatgcacatgatgatgcaacaacttcagaaccagcagaaccaaggaaataaccatgcacctccccagaacaagttagcagaatttcttcgggtgaggccgcctattttctctagtaccaccaatcctgttgaagccggtgattggctgcatgccatagagaagaagttggatttgcttcagtgcactgatcaggagaaggtctcatttgcatcacaccagttgcatggccctgcctctgaatggtgggatcacttccgcctgaataggactactgctgaacctatcacttggcttgaattcaccgctgcttttcggaagacgcatataccatcgggagtggtgtctctcaagaagaaggagttcaggtcgcttacgcagggatctcgctctgtcacggagtatttacatgagttcaatcgtcttgcccgttatgctccggaagatgtgcgcaatgatgaagagcgtcaggagaagttcttggaaggacttaatgatgagctttcttacccactcatgactggagattattatgatttccagaagttagtggataaggctattcgccaggaggacaagtacaatcgcatggagcaaaagaaacgccggattgctcaattcaagacacaacaggggaataatcagaagccacgtcttactttaggaccccagtctatgccacagggaggttcttcgtctgttgttcgtccgcagcgtcagttcttcaacaacaatgctggcaacaacatccgcaatcaagctctacgtcctgttgcagtttcgacacagcaacaacctgccaagaaggagcaaggcagcaagcccgtggtgtgtttcaattgtggagacccaggacattacgctgacaagtgtccgaagccccgacgcgtgaaggttgtccctgcccagagcaactctaccgcaccagcatcaaaggcccgtgtcaatcatgttgctgctgcagaagctcaagatgctccagatgtgattttgggtacgttccttgttaactcagttcctgcaacagtgcttttcgattctggtgctacacattcattattatctatgagttttgcgggaaatcatgggatggaagtagaagatcttagacgtcctttgatggttagtaccccaagtaatcaagcactctctttgcaacgtagcccctctgtcagaatagaaattcaaggagtatcatttctggccaatcttatcctgttagaatccaaagaccttgatgtcatcctagggatggactggttagctagacataaaggtgtgatagactgtgccaatagaaaagtaactctcaccagcaatgatggtcgagttgtgactgttcatgcattgtcttctgagtctttaaggtcaagactgaaccagataactttggaagagattcctatagtccgggagtatcctgatgtgttcccagatgatttacctggtatgccgcctaaaagggatatagagttcagaatagatttggtaccaggaacaactctgatccataagagaccttatcgaatggcagccaatgagttggcagaagtcaaaaggcaagtagacgatttgcttcagaaaggatacatcagaccgagttcatctccatggggagctccggttatttttgtggaaaagaaagaccatacccagagaatgtgtgtggactatcgtgcactaaatgatgtgactatcaagaataagtatccactacccagaattgatgatttgtttgatcagcttaaaggtgccaccattttttccaagatagatcttcgatcagggtatcaccagttgagaatcaaagaggaagatatacctaagacaacttttaccactaggtatgggttgttcgaatgtactgtgatgtcttttggacttaccaatgcccctgctttctttatgaacttgatgaataaggtgtttatggaatacctagacaagtttgtggtggtctttattgatgacattcttatctactcccgaaccaaagaagagcatgaagaacatcttcgccttgcactagagaagttacgagaacatcaactgtatgctaagtttagcaagtgtgaattttggttgtccgaagtgaagttccttggtcacgtcatctcagcgggaggagttgccgttgatcctagtaatgtggaatccgtaaccaactggaaacaaccgaagacagtttcagagattcgcagtttcctaggcctcgcaggatattaccggaggtttatagagaatttttccaagattgctaagcccatgacacgactgcttcagaaagatgtgaagtacaagtggtcagaagaatgtgagcaaagttttcaagagttgaagaatcgcttgatatcagctcctattttgattttaccttatccaaagaagggtttccaagtgtattgcgatgcatccaaacttgggttaggttgtgttctgatgcaagatgggaaggtggttgcctatgcatctcgtcagttgcgtccgcatgagaagaactaccctactcatgatcttgagttagctgcagtagttcatgcgttgaagatttggcgtcattatcttttcggtactcgtacagaggtatataccgatcacaagagtttaaagtatatctttactcagtcggatctaaacatgagacaacggagatggttggaattaattaaggattatgacatgggaattcattatcacccgggaaaggctaatgttgtagcagacgctcttagcaggaaaggctattgcaatgctacggaaggacggcagttgccattggaattatgcaaggaatttgaaagattaaatttgggaattgtcagtagaggtttcattgcagccttagaagcgaagcccactctaattgatcaagttagagaagcccaaattaatgatcctgatattcaagagatcaagaagaatatgagaagaggaaaagctatcagtttcttggaagatgagcaaggaactgtatggttgggtgaaagaatctgcgtccccgacaacaaagatttaaaagatgcaattctgaaagaagctcatgataccttatactccattcaccctggtagtaccaagatgtaccaggatctcaaggaaagattttggtgggcaagtatgaagcgtgaaatcgcagaatacgtagcagtatgtgatgtttgtcagcgagtcaaggcagaacatcagaaacccgccgggttgttgcagcctttgaagattcctgaatggaaatgggaagaaatcggtatggattttatcactggtttacccagaacgtcatcaggccatgactctatttggataatagtcgacagacttaccaaagtggctcatttcatcccggtaaagacaacctattccggaagccggttagcggaattgtatatggccaggattgtgtgtttgcatggcgttcctaagaaaatagtgtctgatcgaggcagccagtttacttcaaatttttggaagaaacttcaggaagagatgggttctaagctgaactttagtactgcttatcatccgcaaacagacggacaaaccgaaagggtgaatcagattttggaagacatgttgcgagcttgtgctttagacttcggtggaagttgggataagaatctaccttatgcagaatttttgtataacaacagttatcaagctagtcttcagatggctccttacgaagcactgtatggtcggaagtgccgcactccgcttttgtgggatcaaacgggagaacgtcaggttttcgggacggatatcctaagggaagcagaagaaaaggtgaaaatcattcaagaaagattgcgtgtggctcagtctcgtcataagagttatgccgacaatcgccgcagagatttgagttttgaagaaggagattatgtgtatcttcgtgtcacgcctcttcgaggagttcatcgttttcacaccaaaggaaaattggcaccgcgttttgtgggaccttataagattatcagtagaagaggagaggttgcttatcagttggagttacctcaatctttggcaggagtccataatgtgttccatgtgtcgcaattgaaaaagtgtttaagggtacctaccgaagaagctaatcttgaacagatagaagtccaagagcatctgacctatgttgagaaaccaatccgtattttggaaatagatgagagaagaaccaggaatcgagttatccatttttgcaaagtccagtggagtaatcactcggaagaagaatcaacttgggaacgagaagatgaattgaagtcagctcatccgcatctattcgccagttcttccgaatctcgaggacgagattctgtttaa

SEQ ID NO: 22855 - DNA, 2954 bp, Oryza sativa
  Clone ID: TF_OsC359_7295
atggtgaacactcgtagcaacgggaatggccccagtaacaataacaacaacaatggagagaatcccacacttgctcaagttcttgctcaacagactcagttaatgaacatgatgatgcagcaacttcagaaccagcagaaccaaggaaataaccatgcacttccccagaacacgttagcagaatttcttcgtgtgaggccgcctattttttctagtaccacaaatcctgttgaagctggtgattggctgcataccatagagaagaagttggatttgcttcagtgcaccgatcaggagaaggtctcatttgcatcacacaagttgcatggccctgcctctgaatggtgggatcacttccgcctgaataggactaccgctgaacctatcacttggcttgagttcaccgctgctttccggaagacgcatataccatcgggagtggtgtctctcaagaagaaggagttcaggttgctcacccagggatctcgctctgttacggagtatctgcacgagttcaatcgtcttactcgttatgctccggaagatgtgcgcaatgatgaagagcgccaggagaagttcttggaaggacttaatgatgagctttcttacccactcatgactggagattattatgatttccagaagttagtggataaggctattcgccaggaggacaagtacaatcgcatggagcaaaagaaacgccggattgctcaattcaagacacaacaggggaataatcagaagccacgtcttactttaggaccccagtctatgccacagggaggttcttcgtctgttgttcgtccgcagcgtcagttcttcaacaacaatgctggcaacaacatccgcaatcaagctctacgtcctgttgcagtttcgacacagcaacaacctgccaagaaggagcaaggcagcaagcccgtggtgtgtttcaattgtggagacccaggacattacgctgacaagtgtccgaagccccgacgcgtgaaggttgtccctgcccagagcaactctaccgcaccagcatcaaaggcccgtgtcaatcatgttgctgctgcagaagctcaagatgctccagatgtgattttggtgaagttccttggtcacgtcatctcagcgggaggagttgccgttgatcctagtaatgtggaatccgtaaccaactggaaacaaccgaagacagtttcagagattcgcagtttcctaggcctcgcaggatattaccggaggtttatagagaatttttccaagattgctaagcccatgacacgactgcttcagaaagatgtgaagtacaagtggtcagaagaatccttagaagcgaagcccactctaattgatcaagttagagaagcccaaattaatgatcctgatattcaagagatcaagaagaatatgagaagaggaaaagctatcagtttcttggaagatgagcaaggaactgtatggttgggtgaaagaatctgcgtccccgacaacaaagatttaaaagatgcaattctgaaagaagctcatgataccttatactccattcaccctggtagtaccaagatgtaccaggatctcaaggaaagattttggtgggcaatcatcgtcgtcgctcgggaagaccgccatcgtgctcgccaagtcgtcgccgtcctcgtctgccgcttcgccaccgtcggagaccgccggagcatcgtcgccgtcatcaagccgaagagcgccgccatttcaacctcgtcgccgtcgccgtccgttggtcttccgccgtcgctttggtcgccggaaggtgcgctgcggtggattgtgttatgcaaggggtattgtcacaactcctttccgaggtaccgtggtggtattgaggcacatggtgacatgataggcaagcgagtggtgcggcagttggcaagcgtgacgaggggtgtgcagcgagggcagtgcagcagccacggcggccggcgagtgcccgatgagcgcattgagctggcaaccacgatgaggggatcggagcactactacagaaggcctaaatggtgccggttgagaaaccccctaagaaaaacaacacatcaagaacacatccatcaagaatacaacaagaagaatacattcatcaagaaccggatggagaggaggagggcgccactgccttctccaccgccacagacgtctccactgccaccgccgtcgtcggatggagaggaggagggcgccgctgtcttctccaccaccaccactaccactgtcgcgggaagccgctgtcgccacctcccgggctatcggaccaccgccgcctcccctcccatcgccaagccgccacagccacctcccctcccgccagatctggcggaggggagggcgccgccgctgggccatcggaccaccgccgcctccgctcccgccgtcgagccgccgcagagccaccgccgccacctcctctcccgccagatctagtggaggggagggcgccgccgccacctcccgggccgtcggaccaccgccgcctcccctcccgctgccgcacgacgttgcagcagccgcctctggatccaaaaaaaaacccctaaccctaaagctgccgccgccgccctcctcacggtcgtcatcgtcgtcgtcgccgtcgccgtctgagcccgcccacccgtcgccacctccacgggatccaggtgggggacggccgctaccgccagatccggtcggggggcagccgcctccaccagatccgggtggggggcggtcgtccgccgtcgtgcgcccgctactcccgccttccaccgagcccgtcgctcccagtcaccaccaagcccgccgttcccgcccaccgctctccatcgcctagcaccgctgcgtgcccgtcgccgagccgcgcgtcgctgtgctgggagaagtgcgatggcggggcgactgttgtgcaagaagttcatgagattgggatgcggctgatgacgctgatctctggtcattag

SEQ ID NO: 22856 - DNA, 2654 bp, Oryza sativa
  Clone ID: TF_OsC359_7353
gggctgtcttcctcctccagccgtcgcccggccgaaccctagccgagctgcgccgccgccgctgcccttccaaattccgtcgcccctctctatttccggtcaaattgattgagggcaaatgatctttgagatctcctcttccttttctcttttggaaacatcggctaattttctttggaaaccggtggatttgagttggattcggattcatctatctcctctaaccctagactttcctcctcgccgccggtcgccgtgggcctccgtcgccgcctcctagcctctataaaagcatccctgggacctcctctatccgccgccacctttgccttagcccgccgtcgcgtctagcgccgcctccgcgtagccctagccgtcgccgtcgttgccgtcggttcagccgcgccgcgccgccgttgcagccgccgtcgtcggtcgccgtcgccaccatcgggatcgcgaggtcgtcgccgtccccgtccaccgcttcgccgccgccgaagaccgccggagcaccgccgtcaccgtcgacccgaagaccgccgccgcttcttcctcatggccggcgccgtccgttgctcttccgccgtggttttggtcaccgcgccctagcgccgagtagcctcgagccgccgtcgccgccgtcgctccagccgtgcgccgccgccgttccggtcatcgccgtcgctcgggaagaccaccgtcgtggtcgccaagtcgccgccgtcctcgtccgccccttcgccgtcgccgaagaccgccggagcaccgtcgccgtcgtcaagccgaagagctccgccgtttcaacctcgtcgccgtcgccgtccgttggtcttccgccgctcctttggtcatcggcgagcatgcgcgtccgagccgccgagccgccgccgccggtggtgcgccaaggtgaagagaagcccggccgcacctcctccttcgtcgccggccgccgtagctcgccgttgccggtcaagccgagccgccgccgccgttcatctcgtcgccggccgtcgtcgttcgtcgtttggctcaagggtgagtaccgttgggttcgtctcgtcgttctccacgtgtacatgtcctccaaatttgcagccgaccatccaatctccggcgaggtcgccaacccgggccggccattgatgatccgcgccgagcagccgtctccgccgtcgccgccgcttgccgccaccgccattagcaccactaatcctgttgaagctggtgattggctccatgccatagagaagaagttggatttgcttcaatgcactgatcaggagaaggtctcatttgcatcccatcagttgcatggccctgcctctgaatggtgggatcacttccgtctgaataggactactgctgaacctatcacttggcttgaattcaccgctgctttccggaagacgcatataccatcgggagtggtgtctctcaagaagaaggaattcaggtcgctcactcagggatctcgctctgttacggagtatctgcacgagttcaatcgtcttgctcgttatgctccggaagataagttagtggataaggctattcgccaggaggacaagtacaatcgcatcgagcagaagaaacgtcggattgctcaattcaagacacaacaggggaatagtcagaggccgcgtcttactttaggaccccagtccatgccacagggaggttcttcgtctgttgttcgtccgcagcgtcagttcttcaacaacaatgctggcaacaacatccgcaatcaagctctacgccctgttgcagcctcgacacagcaacaacctgccaagagggagcaaggcagaaagcccgtggtgtgtttcaactgtggagacccaggacattacgctgacaagtgtccgaagccccgacgcgtgaaggttgtccctgctcagagcaactctaccgcaccagcgccaaaggcccgtgttaatcatgtcgctgctgcagaagctcaagatgctccagatgtgattttggaaaggatacatcagaccgagttcatctccatggggagctccggttatttttgtggaaaagaaagaccatacccagaggatcttaaaggtgccactgttttctccaagatagatcttcgatcagggtatcaccagttgagaatcaaagaggaagatatacctaagacagcttttaccactagatatgggttgttcgaatgtactgttatgtcttttggacttaccaatgcccctgctttcttcatgaacttgatgaataaggtgtttatggaatacctagacaagttcgtggtggtctttattgatgacattcttatgatcggagcgaggatcagggacacggacttcttgcaaggagatgacattctctggatcaatttcaggggaatctacgaactataccagctggacgccctcgacgtctctattatgagttgctggattttaatggagattcaaagggcccgacggcggagggttttcgatactggattcatcgaccctcggagagtaaacgtcacaatgcttgaccaatatccacaagaaacagaggacaatctcgtccatctcctgaaggcgcagcattacaagacgttcatactgttgccgtacaacatagaattccactgggtgcttttactcttcgacctgtcggcctgcaccgtcaac

SEQ ID NO: 22857 - DNA, 2026 bp, Oryza sativa
  Clone ID: TF_OsC359_7374
atggtgaacactcgcgccagtggaagtggaaacaacaacaatggagagaatcccacacttgcccaagttcttgctcaacagactcagttaatgaacatgatgatgcagcaactccagaaccagcagaaccagggaaataaccatgcacctccccagaataagttagcagaatttcttcgtgtgaggccgcctattttctctagtaccactaatcctgttgaagctggtgattggttgcatgccatagagaagaagttggatttgcttcagtgcactgatcaggagaaggtctcatttgcatcacatcagttgcatggccctgcctctgaatggtgggatcacttccgcctgaataggactactgctgaacctatcacttggcttgaattcaccgctgctttccggaagacgcatataccatcgggagtggtgtctctcaagaagaaggaattcaggtcgctcactcaggggtctcgctctgtcactgagtatctgcacgagttcaatcgtctggctcgttatgctccggaagatgtgcgcaatgatgaagagcgccaggagaagttcttggaaggacttaatgatgagctttcttacccactcatgactggggattatcctgatttccagaagttggtgattaaggctattcgtcaggaagacaagtacaacagcatggagcaaaagaaacgccggattgctcaattcaaaacacaacagggaaataatcagaagccgcgtcttactttaggaccgcagtctatgccacagggaggttcttcgtctgttgttcgtccgcagcgtcagttcttcaacaacaatgctggcaacaacatccgcaatcaagctccacgtcctgttgcagcttcgacacagcaacaacctgccaagagggagcaaggcagcaagcccgtggtgtgtttcaactgtggagacccaggacattacgcggacaagtgcccgaagcctcgacgcgtgaaggttgtccctgcccagagcaactctaccgtaccagcatcaaaggctcgtgtcaatcatgtcgctgctgcagaagctcaagatgctccagatgatccccggtgtcgccgctacccgtcgccactctcgccttcgcttctcgtcgccgggagcgctctagcgccgtgccgcttcgcgccgccgtcgtcgccgccacttcagccgtgcgccgccgtcgctccagtcatcgtcgtcgctcgggaaggtcgccatcgtggtcgccgtcacgtcgccgtcctcgtccgctccttcgccgttgctgtagaccgccggagcaccgtcgccgccgtcgacccgatcttctccgccgcttcgatctcgccgccggtgccgtccgttgatcttccgccgcttctttggtcaccggtgagttcgccgcgtcacgctctacgtcctggtgccctccgttctcgtcgtcgcgccgtcgttcgccggcgagcttgcgccgcccgagccgccgccggtggtgacgtcaccgctgacgtcatcgtggccgtttgccgtgagccgcatggttcattgcggagcaccagactgagaagtggcggagataagcccacaggggtcgctccagtcatcgtcgtcgctcaggaaggtcgccatcatggtcgccgtcatgtcgccgtcctcgtccgctcctccgccgttgctgtagaccgccggagcaccgtcgccgccgtcgacccgatcttctccgccgcttcgatctcgccgccggtgccgtccgttgatcttccgccgcttctttggtcaccggtgagttcgccgcgtcacgctctacgtcctggtgccctccgttctcgtcgtcgcgccgtcgttcgccggcgagcttgcgccgcccgagccgccgccggtggtgacgtcaccgctgacgtcatcgtggcggtttgccattccgacgtttccggagagtccgttttcgcaggagaagattttgaagagttccaaggccagcaaggcaagtcacacagatcccaaacaaccctttgagcatgttgatcctatttaa

SEQ ID NO: 22858 - DNA, 2450 bp, Oryza sativa
  Clone ID: TF_OsC359_7395
ctcctggtttggaatggtacattcctggtttggagatagaactgtgcagccggggtggttgttcagaatggttgggcctatacaacaggatgccgtgttacaagcctgagtacctgtttggagttgaaggttttgtccaggagttgcgtacgatgtcctttgtcattggatttgggaatgctcctttttatgcccagattcgtcatgatcgtcatgaagaaaagtgccgagtcaaagtcaccttgaacagcaatagtgaagatatcccctcagtgatgtttgaagctggaggaagaaactacatccatgcatgtcaggaggtggcaaggattgccataggagagcttcgtgatcgctacagtgatcagttggccgacactgagtatcgctatcatcctcgccaaccccagggaagtgaccgtggcagttaccttgagactgaaggaattgagaatgatgttaccacaagacatttggttgagatgttgtgggctatggatgaaagtcgtgcggagactgtgttagcagctcaagatcgtgaagatcggaatcgtggtaagatttgcaagctagaagacaaggtggatcgtttggagaaggaattagccgcattgaagggagaagcaccgccgcagaaggctaggattcgtcttaccgcaaggaagagagctttgtttgtccctcgctatcaattggcgccaaaggtccgcgtggtggagaaagaagttgccccagcaaatcctccggtcatcatcataagtagtgatgaagaagaagaacccaagcgcaacaattccaagtttgagtgggtagctatcaaagatgaggaagatgagccgaacgagccttcaatcgacctcctatgctcggaagaactagataccactaatcctgttgaagctggtgattggctgcatgccatagagaagaaattggatttgcttcagtgcactaatcaggagaaggtctcttttgcatcacatcagttgcatggccctgcctctgaatggtgggatcacttccgcctgaataggattactgctgaacctatcacttggcttgaattcaccgctgctttccggaagacgcatataccatcgggagtagtgtctctcaagaagaaggagttcaggtcgcttacccagggatctcgctctgttacggagtatctgcacgagttcaatcgtcttgctcgttatgctccggaagatgtgcgcaatgatgaagagcgccaggagaagtttttgggaggacttaatgatgagctttcttacccacttatggttggagattaccctgatttccagaaattagtggataaggctattcgtcaggaagacaagtacaatcgcatggagcagaagaaacgtcggattgctcaattcaagacacaacagggaaataatcagaagccgcgtcttactttaggaccccagcccatgccacagggaggttcttcgtctgttgttcgtccgcaacgtcagttcttcaacaacaatgctggcaacaacatccgtaatcaagctccacgtcctgttgcagctccagcacagcaacaacctgccaaaagggagcaaggcagcaagcctgtggtgtgtttcaactgtggagatccaggacattatgctgacaagtgtccgaagccccgacgcgtgaaggttgtccctgtccagaataactctgctgtaccagcatcaaaggcccgtgtcaatcatgttgctgctgcagaagctcaagatgctccagatgtgattttggtccgggagtatcctgatgtgttcccagatgatttacctgaaaggatacatcagaccgagttcatcaccatggggagctccggatattatcggaggtttatagagaatttttccaagattgctaagcccatgacacgactgcttcagaaagatgtgaagtacaagtggtcggaagaatctttagaagcgaagcccactctaattgatcaagttagagaagcccaaattaatgatcctgatattcaagagatcaagaagaataggagaagaggaaaagctattggtttcttggaggatgagcacggaactccgtgctccgccgtcgctccagctgtcgccgccgctcgggaagaccgccgtcgtcatcgccaagtcgccgccgtcctcgtccgccccttcgcagccgtcggaacccgccggagcatcgtcgccgtcgtcaacccgaaggtagccgccgcttccttctcgtcgccgtcgccgtccgttccttttccgccgccgttttggtcaccggtgtgttcgccgcgttgtcctctacgtgctggtgccctccgttggtgccgtggtgccgccgttcgccggcgagtgtccgccgcccgagccgtcttcttcgccgagccgccgccgtcgtcggtgacgtcatcgctgacgtcatcgggatcctatcccgtgagccggtcgtggaccgattga

SEQ ID NO: 22859 - DNA, 4905 bp, Oryza sativa; identical to SEQ ID NO: 15143
  Clone ID: TF_OsC359_7429

SEQ ID NO: 22860 - DNA, 2883 bp, Oryza sativa
  Clone ID: TF_OsC359_7443
atggtgaacactcgcagcaacgggaatggccccagtaacaataacaatggagagaatcccactcttgctcaagttcttgctcaacagacacagctaatgaacatgatgatgcaacaactccagaaccagcagaaccaaggaaataatcatgtacctcctcagaataagttagcagaatttcttcgtgtgaggccgcctgttttctctagtaccactaatcctgttgaagctggtgattggctgcatgccatagagaagaagttggatttacttcagtgcactgatcaggagaaggtctcatttgcatcacatcagttgcaaggccctgcctctgaatggtgggatcacttccgcctgaataggattactgctgaacctatcacttggcttgaattcaccgctgctttccagaagacgcatataccatcgggagtggtgtctctgaagaagaaggagttcaggtcgcttacccagggatctcgctctgttacggagtatctgcacgagttcaatcgtctggctcgttatgctccggaagatgtgcgcaatggtgaagagcgtcaggagaagtttttggaaggacttaatgatgagctttcttacccactcatgactggagattatcatgatttccagaagctagtggataaggctattcgtcaggaggacaaatacaatcgcatggagcagaagaaacgtcggattgctcaattcaagacacaacaggggaataatcagaagccgcgtcttactttaagaccccagtccatgccacatggaggttcttcgtttgttgttcgtccgcagcgtcagttcttcaacaacaatgctggcaacaacatccgcaatcaagctccacgtcctgttgcagctccaacacagcaacaacctgccaagagggagcaaggcagcaagcccgtggtgtgtttcaactgtggagacccaggacattatgctgacaagtgtccgaagccccgacgcgtgaaggttgtccctacccagagcaactctacggtaccagcatcaaaggcccgtgtcaatcatgttgctgctgcaagaggttcaagatgctccagatgtgattttgggtacgttccttgttaactcagttcctgcaacagtacttttcgattctggtgctacacattcattcttatctatgagttttgcgggaaatcatgggatggaagtagaagatcttagacgtcctttgatggttagtaccccaagtaatcaagcactctctttgcatcgtagcccctctgtcagaatagaaattcaaggagtaccatttctggccaatcttatcctgttagaatccaaagacctagatgtcatcctagggatggactggttagccagacataaaggtgtgatagactgtgctaacagaaaagtaactctcaccagcaatgatggtcgagttgtgactgtttatgcattgtcttctgagtctttaaggtcaagattaaaccaaataactttggaagagattcctatagtccgggagtatcccgatgtgttcccagatgatttacctggtatgccgcctaaaagggatatagagttcagaatagatctggtaccaggaacaactccgatccataagagaccttatagaatggcagccaatgagttggcagaagtcaagaggcacgtagatgatttgcttcagaagggatacatcagaccgagttcatcaccatggggagctccagttatttttgtggaaaagaaagaccatacccagagaatgtgtgtggattatcgtgcattaaacgatgtgactatcaagaataagtatccgctacccagaattgatgatttgtttgatcagcttaaaggtgccactgttttctccaagatcgatcttcgatcaggatatcaccagttgagaatcaaagaggaagatatacctaagacagcttttaccactaggtatgggttgttcgaatgtactgttatgtcttttggacttaccaatgcccctgctttcttcatgaacttgatgaataaggtgtttatggaatacctagacaagttcgtggtggtctttattgatgatattcttatctactcccgaaccaaagaagagcatgaagaacatcttcgccttgcattggagaagctacgagaacatcaactgtatgctaagtttagcaagtgtgaattttggttgtccgaagtgcttttctcctttggaatctttggttaaatcactttggaaagctttggaatcgagttcgattcggatcggttttccctctctccaagccgcgagtttccttcgccgttgccgtcgccgtgggcctccgccgtcgcctccgagccccggagcttcgtcgccgtcgacaacccgaagtagccgccgcttccttctcgtcgccgtcgtcgtccgttccttttccgccgccgttttggtcaccggtgtgttcgccgtgttgtcctctacgtgctggtgccctccgttggtgccgtggtgccgccgttcgccggcgagtgtccgccgcccgagccgtcttcttcgccgagccgccgccgtcgtcggtgatgtcatcgttgacgtcatcgggatcctctcccgtaagccggtcgtggaccgatcgatctcggccatccgatttggatcggatcaatctcgaccgtccgttcgtgtgaaccgccgcccgtgcgccggtccacccaaaccctagcccgctgacgcaataaatccccttttccttgcaatcattcatcagaggaagagttctacaatgaggctgatggtgtggaggattaggtgtagccttggtcaagctgcctgtggagtggagccgtctgcgccgtttatttattttccgctgcttagaactttattgattgagaggaactatctacctctgt

SEQ ID NO: 22861 - DNA, 4911 bp, Oryza sativa; identical to SEQ ID NO: 15129
  Clone ID: TF_OsC359_7488

SEQ ID NO: 22862 - DNA, 5271 bp, Oryza sativa; identical to SEQ ID NO: 15227
  Clone ID: TF_OsC359_7516

SEQ ID NO: 22863 - DNA, 3027 bp, Oryza sativa; identical to SEQ ID NO: 15178
  Clone ID: TF_OsC359_7532

SEQ ID NO: 22864 - DNA, 5082 bp, Oryza sativa; identical to SEQ ID NO: 15118
  Clone ID: TF_OsC359_7537

SEQ ID NO: 22865 - DNA, 1997 bp, Oryza sativa
  Clone ID: TF_OsC359_7756
ctcctggtttggaatggtacattcctggtttggagatagaactgtgcagccgggatggttgttcaaaatggttgggcctatacaacaggatgccgcgttacaagcctgagtacctgtttggtgttgagggttttgtccaggagttgcgtacgatgtcctttgtcattggatttggaactgcccctttttatgcccagattgctcatgatcgtcatgaagagaagtgccgagtcaaagtcaccttgaacagtaatagtgaagatatcccctcagtgatgtttgaagctggaggaagaaactacatccatgcatgtcaggaggtggcaaggatcgccataggagagctccgtgatcgctacagtgatcaattggccgacactgagtatcgctaccatcctcgccaaccacagggaagtgaccgtggcagttaccttgagactgaaggaattgagaatgatgttaccacaaagcatttggttgagatgttgtgggctatggatgaaagtcgtgcggagactgtgttagcagcccaagatcgtgaagattggaatcgtggtaagatttgcaagttagaagacaaggtggatcgtttggagaaggaattagccgcattaaagggagaagcaccgccgcagaaggccaggattcgtcttaccgcaaggaagagagctctatttgttcctcgctatcaattggcgccaaaggttcgtgtggtggagaaagaagttgccccagctcaagcggatcctccggtcatcatcataagtagtgatgaagaagaagaatccaagcgcaacaattccaagattgagtgggtagcaacccaagttgataaagacgagccttcaatcgacctccgatgcttggaagaactagagactactgctgaacctatcacttggcttgaattcaccgctgctttccggaagacgcatataccatcaggagtagtgtctctcaagaagaaggagttcaggtcgcttacccagggatctcgctctgttacggagtatctgcacgagttcaatcgtcttgctcgttatgctccggaagatgtgcgcaatgatgaagagcgccaggagaagtttttgggaggacttaatgatgagctttcttacccactcatggttggagattatcctgatttccagaaattagtggataaggctatacgtcaggaggacaagtacaatcacatggagcagaagaaacgtcggattgctcacttcaaggcacaacagggaaataatcagaagccgcgtcttactttaggaccccagtccatgccacagggaggttcttcgtctgttgttcgtccgcagcgtcagttcttcaacaacaatgctggcaacaacatccgtaatcaagctccacgtcctgttgcagctccagcacagcaacaacctgccaagagagagcaaggcagcaagcccgtggtgtgtttcaactgtggagacccaggacattatgctgacaagtgtccgaagccccgacgcgtgaaggttgtccctgcccagaataactctgctgtaccagcatccaaggctcgtgtaaatcatgtcgctgctgcagaagctcaagatgctccagatgtgattttccttgttaactcagttcctgcaacagtacttttcgattctgccaatgagttggcagaagttaagaggcaagtagatgatttgcttcagaagggatacatcagacctagttcatctccatggggagctccgccgtcgccgtcgctcgggaagaccaccgtcgtgctcgccaagtcgtcgccgtcctcgttcgccccttcgccgtcgccggagatcaccggagcagcttcgccgtcgtcgacccgaaggttcccgccgcttcctccttgtcgccgtcgccgtccgttggtcttccgccgccgtttaggtcaccggtggtacacctctgatcagagtaaaactattcgaatagccgtgcccgcggttatgggcgggtctaacaatgtctttcgtgattag

SEQ ID NO: 22866 - DNA, 4775 bp, Oryza sativa
  Clone ID: TF_OsC359_7844
atggttgttcagaatggttgggcctatgcaacaggggtttacacacatatgccgcgctacaagcctgagtacttgtttggtgttgagggttttgtccaggagttgcgtacaatgtcctttgtcgttggatttgggactgcccctttttatgcccagattcctcatgatcgtcatgaagagaagtgccgagtcaaagtcaccttgaacagtaatagtgaagatatcccatcggtgatgttcgaagctggaggaagaaactacatccattcatgtcaggaagtggcaaggatcgccataggagagctccgtgatcgttacagtgatcagttggctgacactgagtatcgttaccatcctcgtcaaccacagggaagtgaccgtggcagttaccttgagactgaaggaattgagaatgatgctaccacaacacatttggttgagatgctatgggctatggatgaaagtcgtgcggaaactgtgttagcggcccaagatcgtgaagattggaatcgtggtaagatttgcaagctagaagacaaggtggatcgtttggagaaggaactagccgcgttgaagggagaagcaccacctcagaaggtcaggattcgtcttaccgcaaggaagagagctctatttgtccctcgctatcaattggcgccaaaggtccgtgtggtggagaaagaagttgccccagcagatcctccggtcgtcaacatggtgaacactcgtagcaacgggaatggtcccaaccccaacaaccccaataacaataacaatggggagaatccaacccttgctcaagttcttgctcaacagactcagctaatgcacatgatgatgcaacaacttcagaaccagcagaaccaaggaaataaccatgcacctcctcagaataagttagcagaatttcttcgtgtgaggccgcctattttctctagtaccactaatcctgttgaagctgctgattggctgcatgccatagagaagaagttggatttgcttcagtgcactgatcaggaaaaggtctcatttgcatcgcatcagttgcatggccctgcctctgaatggtgggatcacttccgtctgaataggactactgctgaacctatcacttggcttgaattcaccgctgcttttcggaagacgcatataccatcgggagtggtgtctctcaagaagaaggagttcaggtcgcttacccagggatctcgcactgttacggagtatctacacgagttcaatcgtctagcccgttatgctccggaaaatgtacgcaatgatgaagagcgtcaggagaagttcttggaaggacttaatgatgagctttcttacccactcatgactggagattattctgatttccagaaattagtggataaggctattcgtcaggaggacaagtataatcgcatggagcagaagaaacgccagattgctcaattcaagacgcaacaggggaataatcagaggccgcgtcttactttaggaccccagtctatgccacatggaggttcttcgtctgtcgttcgtccgcagcgtcagttcttcaacaacaatgttggcaacaacatccgcaatcaagttccacgtcctgttgcagctccaacacaacaacagcctgccaagagggagcaaggtagcaagcccgtggtgtgtttcaactgtggagacccgggacattacgctgacaagtgtccgaagccccgacgcgtgaaggttgtccctgtccagagcaactctaccgcaccagcatcagaggctcgtgtcaatcatgttgcagctgcagaggctcaagatgctccagatgtgattttgggtacgttccttgttaactcagttcctgcaacagtgcttttcgattctggtgctacacattcatttctatctatgagttttgcgggaaatcatgggatggaagtagaagatcttagacgtcctttgatggttagtaccccaagtaatcaagcactctctttgcaacgtagcccctctgtcagaatagaaattaagggagtaccatttctagccaatcttatcttgttagaatccaaagaccttgatgtcatcctagggatggattggttagctagacataaaggtatgatagactgtgccaacagaaaagtaactctctccagcaatgatggtcgagttgtaactgttcatgcattgtcttctgagtctttaaggtcaagactgactcaagtaactttggaagagattcctatagttcgggagtatcccgatgtgttcccagatgatttacctggtatgccgcccaaaagggatatagagttcagaatagatttggtacctggaacaactccgatccataatagaccttatagaatggcagccaatgagttggcagaagtcaagaggcaagtggatgatttgcttcagaagggatacatcagaccgagttcatctctatggggagctccggttatttttgtggaaaagaaagatcatacccagaggatgtgtgtggactatcgtgcactaaatgatgtgactatcaagaataagtatccgctacccagaattgatgatttgtttgatcagcttaaagataagtttgtggtggtctttattgatgacattcttatctactctcgaaccaaagaagagcatgaagaacatcttcgccttgcattggagaagctacgagaacatcaactgcatgctaagtttagcaagtatgaattttggttgtctgaagtgaaattccttggtcacaaagatgtgaagtacaagtggtcagtagaatgtgagcagagttttcaagagttgaaaagtcgcttaatatcagctcctattttgattttacctgatccaaagaagggtttccaggtgtattgcgatgcatccaaacttgggttaggttgtgttctgatgcaagatgggaaggtggttgcctatgcatctcgtcagttacgcttgcatgagaagaactaccctactcatgatcttgaattagctgcagtagttcatgcgttgaagatttggcatcattatcttttcggtactcgtacagaggtatacactgatcacaagagtttaaagtatatctttactcagccggatctgaacatgagacaacggagatggttggaattaattaaggattttgacatgggaattcattatcacccgggaaaggctaatgttgtagcagatgctcttagcaggaaaagctattgcaatgctacggaaggacgacagttgccattggaattatgcaaggaatttgaaagattaaatttgggaattgtccgaagaggtttcgttgcagccttagaagcgaagtccactctaattgatcaagttagagaagcccaaattaatgatcctgatattcaagagatcaagaagaatatgagaagaggaaaagctatcggtttcttagaggatgagcaaggaactgtatggttgggtgagagaatttgtgtccccgacaacaaagatttaaaagatgcaattctgaaagaagcccatgatactttatactctattcaccctggtagtacaaaaatgtaccaggatcgcaaggaaagattttggtgggcaagtatgaagcgtgaaatcgcagaatacgtagcactatgtgatgtttgtcaacgagtcaaggcagaacatcagaaacctgccggtttgctgcagcctttgaagattcctgaatggaaatgggaagaaatcggtatggattttatcactggtttgcccagaacgtcatctggccatgactctatttgggtaatagtcgacagacttaccaaggtggcacatttcattccggtaaagacaacttattccggaagtcgcttagcggaattgtatatggcaaggattgtgtgtttgcatggcgtccctaagaagatagtgtctgatcgaggaagtcagtttacttcaaatttttggaagaaacttcaggaagagatgggttctaagctgaactttagtactgcttatcatccgcagacagacggacaaaccgaaagggtgaatcaaattttggaagacatgttgagagcttgtgctttagatttcggtggaagttgggataagaatctaccctatgcagaattttcgtataataacagttatcaagctagtcttcagatggctccgtacgaagcactgtatggtcaaaagtgccgcactccgcttttgtgggatcaaacgggagaacgtcaggttttcgggacagatatcctaagggaagcagaagaaaaggtgaaaatcattcaagaaagattgcgtgtggctcagtctcgtcataagagttatgccgacaatcaccgcagagatttgagttgtatcctaagggagattatgtgtatcttcgtgtcacgcctcttcgaggagttcatcgttttcacaccaaaggaaaattggcaccgcgttttgtgggaccttataagattgtcagtagaagaggagaagttgcttatcagttggagttacctcaatctttggcaggagtccataatgtgttccatgtgtcgcaattgaagaaatgtttaagggtacctaccgaagaagctaatcttgaacaaatagaagtccaagaggatctgacttatgtggagaaaccaatccgtatcttggaaacaaatgagagaaggaccaggaatcgagttatccgtttttgcaaagtccagtggagtaatcactcggaagaagagtcaacttgggaacgagaagatgaattgaagtcagctcatccgtatctgttcgccagttcttccgaatctcgaggacgagattctgtt

SEQ ID NO: 22867 - DNA, 6117 bp, Oryza sativa; identical to SEQ ID NO: 15208
  Clone ID: TF_OsC359_7902

SEQ ID NO: 22868 - DNA, 4949 bp, Oryza sativa
  Clone ID: TF_OsC359_7935
ttcttatagtgagacataactgagtatatagcctggatcatcaaattgggaacttgtagtgacttccgatatggacgtcaattcaatcttgccatgtggggtgatcatgtcctattaggactcttgttgtaggttgtatacccattattatatggaaagttatctctaaatatagataaagatacaaacaaaatctccgggatctcctctaccttttctcctttggaatctttggctcaatcggtttggaatgagtttgattcgagttcgaatcggatcggctttcctctctccaagccgcgagtttccttcgccgttgctgtcgccgtgggccttcgccgccgcctccgagccccggagcgtcatcgccgccgtcgacccgaagagcttcgccgcttcctcctcgtcgccgtcgccgtccgttgtttctccgccgtcgttttggtcgtcggtgagttcgccgcgccgtccgctacccgttggtgccctttgttagcgtcctcgcgccgccgttcgccggcgagcgtgcgccgcctgagccgtcccagccgccgagccgccgccgccggggtgacgtcatcgctgacgccatcaagtccgtccgccgtgagccgctgtggacccgatcgatctcggccgtccatcttggatcgatgccgcgttacaagcctgagtacctgtttggtgttgagggttttgtccaggagttgcgtacgatgtcctttgccataggatttgggactgcccctttttatgcccagattcctcatgatcgtcatgaagagaagtgccgagtcaaagtcaccttgaacagtaatagtgaagatatcccctcagtgatgtttgaagctggaggaagaaactacatccatgcatgtcaggaggtggcaaggatcgccataggagagctccgtgatcgctacagtgatcaattggccgacactgagtatcgctaccatcctcgccaaccccagggaagtgaccgtggcagttaccttgagactgaaggaattgagaatgatgctaccacgaagcatttggttgagatgttgtgggctatggatgaaagtcgtgcggagactgtgttagccgctcaagatcgtgaagaccggaatcgtggtaagatttgcaagctagaagacaaggtggatcgtttggagaaggaattagccgcattgaagggagaagcaccgcctcagaaggccaggattcgtcttaccgcaaggaagagagctttatttgtccctcgctatcaactggcgccaaaggttcgtgtggtggagaaagaagttgccccagctcaagcggatcctccggagaaggtctcatttgcatcacatcagttgcatggccctgcctctgaatggtgggatcacttccgcctgaataggattactgctgaacctatcacttggcttgaattcaccgctgctttccggaagacgcatataccatcaggagtagtgtctctcaagaagaaggagttcaggtcgcttactcagggatctcgctctgttacggagtatctgcacgagttcaatcgtcttgctcgttatgctccggaagatgtgcgcaatgatgaagagcgccaggagaagtttttgggaggacttaatgatgagctttcttacccactcatggttggagattatcctgatttccagaaattagtggataaggctattcgtcaggaggacaagtacaatcgcatggagcagaagaaacgtcggattgctcaattcaagacacaacagggaaataatcagaagccgcgtcttactttaggaccccagtccatgccacatggaggttcttcgtctgttgttcgtccgcagcgtcagttcttcaacaacaatgctggcaacaacatccgtaatcaagctccacgtcctgttgcagctccagtacagcaacaacctgccaagagggagcaaggcagcaagcccgtggtgtgtttcaactgtggagacccaggacattatgctgacaagtgtccgaagccccgtcgcgtgaaggttgtccctgcccagagtaactctgctgtaccagcatccaaggcccgtgtcaatcatgtcgctgctgcagaagctcaagatgctccagatgtgattttggtccgggagtatcctgatgtgttcccagatgatttacctgccaatgagttggcagaagtcaagaggcaagtagacgatttgctacagaaaggatacatcagaccgagttcatcaccttggggagctccggttatttttgtggaaaagaaagatcatacccagaggatgtgtgtggactatcgtgcactaaacgatgtgactatcaagaataagtatccgctacccagaattgatgatttgtttgatcagcttaaaggtgccactgttttctccaagatagatcttcgatcagggtatcaccagttgagaatcaaagaggaagatatacctaagacagcttttaccactaggtatgggttgttcgaatgtactgttatgtcttttggacttaccaatgcccctgctttcttcatgaacttgatgaataaggtgtttatggaatacctagacaagttcgtggcggtctttattgatgatattcttatctactctcgaaccaaagaagagcatgaggaacatcttcgccttgcattggagaagctacgagaacatcaactgtatgctaagtttagcaagtgtgaattttggttgtctgaagtgaaattccttggtcacgtcatctcagccggaggagttgccgtcgatcctagtaacgtggaatccgtaaccaattggaagcaaccaaagacagtttcagagattcgcagtttcctaggcctcgcaggatattaccggaggtttatagagaatttttccaagattgctaagcccatgacacgactgcttcagaaagatgtgaagtacaagtggtcggaagaatgtgagcagagttttcaagagttgaagaatcgcttagtatcagctcctattttgactttgcctgatccaaagaagggtttccaagtgtattgcgatgcatccaaacttgggttaggttgtgttctgatgcaagatgggaaggtggttgcctatgcatctcgacagttacgtccgcatgaaaagaactaccctactcatgatcttgagttagctgcagtagttcatgcgttgaagatttggcgtcattatcttttcggtactcgtacagaggtatataccgatcacaagagtttaaagtatatctttactcagccggatctgaacatgagacaacggagatggttggaattaattaaggattatgacatgggaattcattatcatccgggaaaggctaatgttgtagcagacgctcttagcagaaaaggctattgcaatgctacaaaaggacgacagttgccattggaattatgcaaggaatttgaaagattaaatttgggaattgtcggtagaggtttcgttgcagccttagaagcgaagcccactctaattgatcaagttagagaagcccaaattaatgatcctgatattcaagagatcaagaagaatatgagaagaggaaaagctattggtttcttggaggatgagcaaggaactgtatggttgggtgaaagaatttgtgtccctgacaacaaagatttgaaagatgcaattctgaaagaagctcacgatactttatactccattcaccctggtagtactaagatgtaccaggatctcaaggaaagattttggtgggcaagtatgaagcgtgaaatcgcagaatatgtagcagtatgtgatgtttgtcagcgagtcaaggcagaacatcagaaacccgccggtttgttgcagcctttgaagattcctgaatggaaatgggaagaaataggtatggattttatcactggtttgcccagaacgtcatcgggccatgactctatttgggtgatagtcgacagacttaccaaagtggctcattttattccggtaaagacaacctattccggaagtcgcttggcggaattgtatatggcaaggattgtgtgtttgcatggcgtccccaagaagatagtgtctgatcgaggcagtcagtttacttcaaatttttggaagaaacttcaggaagagatgggttctaagctgaactttagcactgcttatcatccgcagacagacggacaaaccgaaagggtgaatcagattttggaagacatgttgagagcttgtgctttagatttcagtggaagttgggataagaatctaccctatgcagaattctcgtataacaacagttatcaagctagtcttcagatggctccttacgaagcactgtatggtcggaagcggagtgcgtgtcgcactccgcttttgtgggatcaaacgggagaacgtcaggttttcgggacggatatcctaagggaagcagaagaaaaggtaaagatcattcaagaaagattgcgagtggctcagtctcgacataagagttatgccgacaatcgccgtagagatttgagttttgaagaaggagactatgtgtatcttcgtgtcacgcctcttcgaggagttcatcgttttcacaccaagggaaaattggcaccgcgttttgtgggaccttataagattgtcagtagaagaggagaggttgcttatcagttagaattacctcaatctttggcaggagtccataatgtgttccatgtgtcgcaattgaaaaagtgtttaaggatacctaccgaagaagctaatattgagcagatagaagtccaagaggatttgacttatgttgagaaaccaatccatatcttggaaacaaatgagagaagaaccaggaatcgagttatccgtttctgcaaagttcaatggagtaatcactcggaagaagagtcaacttgggaacgagaagatgaattgaagtcagctcatccgcatctgttcgccagttcttccgaatctcgaggacgagattctgtttaa

SEQ ID NO: 22869 - DNA, 10187 bp, Oryza sativa
  Clone ID: TF_OsC359_7977
atgcccgttgggttatttccggtcgtgacagccaccaagacctctggcgctgctaccaccggctccgtgtcgtcaaggcggagggcgcggcgagcggcggctgttgctcgccgttcggctgccactccctcgtcagcacctctgacccgggaagatcagcgtggagggccagatgcccgcatcggtatcgagcgccggcgtaatggtcgacgtgctacccacgcaacggagggtgcctcctcgtccggagtgtcacctcaacacggacgcggggatcagccctccgtgcccccggttggtggtgtcggctgtagagcctttgtagcgagccttcggaacgtccgttggcccccaaggttccggcccaccatcgccgaaaaatatgacgggagcgtcaaccccgccgagtttctccaggtctacacgaccgggatcgaggccgccgggggtgatgacagggtgaagaagcggacttacacgcagtacagcgaagggatgatgagtcacttcgctcatacattcagcggtctgtcaagtccgcaacaccataccatgcatccctgcacacgcggtgatctacgcgttcaggggggtgtgcggcacaaccgcatgctcgaaaagatcgcctccaaggagccccagactaccgcggagctttttcagctcgcggaccgagtggctcgtaaggaggaggcctggacctggaacccctccggttccggtgtggcaacttcggccgcccccgggtccgctgctcagacagggcgacgtgacaggaggaggaagaagaggtcagcccattccgacgacgagggtcatgtcctcactgtcgagggcgcttcgcgggccacccgaaaggggaggcctgcgagcgacaaaaagaaggaggccggcgctcccagcagggagcgcccaaccggcaagtggtgcatcgtccacaacacctccctccacgacctcgcggactgccgcgcagtcaaaagtttggctgagcggacgagaaagtgggaggaggagaggaggcaggagcgccgagagggtaagtccccggcggtaccctccggcaatcggcgaagtgaggccaagcagaaggcccccgtcgaggacatcgatggcggcgatgatgacctaggctttcaggagcctggggccaccattgccactgtcgatgggggagcgtgtgctcacgtttctcgccggagcctcaaggccatgaagcgagagcttctggccgcggcccccactcatgaggcgacgcgtcgggcgcggtggtcggaggttgccctcaccttcgaccagaccgaccacccaccgtgtgttgcccggggaggacagatcgcgatggccccggggatggtgctctggccgtcccagccgattatcggtgtgacgccggggcacacatggccgttaggtcatatcgacctaccggtcaccttcggtggatccgtcaacttccgcacggagcgggtaaacttcgatgtggcggacctaagtctgccctacaacgcggtcctagggaggcccgcgttggtgaagttcatggcggcggtccattacgcttaccttcagatgaagatgccgggccccggtggccccatctctgtccatggcgacctcaaagtcgcgcttgcttgtatggagcagcgcgcggatcacctcgccgctgcgtccaagcccgagggtggcgacgagaggcttggcacctccgttcccgccgccccgaggcagaggatgatcacatgcgacgaggtcccggaagacgcgctcgtctccttcctgcgggcaaacgctgacgtcttcgcatggagaccggcggatatgcccggggtccccagggaggtgattgagcaccgtctcgccgtacggccgggcgcaaggccgatccggcagaaagtgcggcggcaggccccggaacgtcaagccttcatccgcgaggaggtggcgcgacttctggaggccggattcatccgcgaggtcatccatccggagtggctggcgaacccggtggtcgttcccaaggcgaatggcaaacttcggatgtgcatcgactacaccgaccttaacaaggcatgtcctaaggacccttaccccctgcctcgcatagatcagattgtcgactccacagcggggtgcgaccttttgtgttttctagatgcatactctggttaccatcagattcgcatggctagggaggatgaggaaaaaactacattcattacccccataggaacttattgttatacgacaatgcccttcgggttaaagaatgcaggtcctacttttcaacgtactactcgaatttctttgggtagccaaataggacgtaatgttgaggcttatgtcgatgacttggttgtgaagacgcgcgaccaagaaactttactttcagatctggcggaaactttcgagagtctccgctccgcccgcataaagctgaaccctgataagtgcgtgttcggtgtacctgcgggcaagcttctcggcaagcttagggatgtgcaatgcgtcaccggttgcatggccgccctaagtcggttcatatcgaggctgggagagaaggcgctacccttatttaagctcctcaaacgctccgggccgttcacttggacggaggaagctgaacgtgccctcactcagttgaaggcgtatctcagctctcccccagttttgatcgccccggagccagatgaacccttgctactctacttagcggcgaccccgcaagtagttagtgcggcgttggttgtggagcgcgatgaggacaatcctcattccgcgcatccccaccctgtgctggcttggcccgggagagagcagggaggagaggcccccgagccgaacggtggcccaaggcccccgacgaccggagctggccctctgcccgcttgtcagacggtgccaggtgcccccgacccccaggatggcccgggggccactgcgggaaggccgcacctatcgccctctgaccccgaggttaaccctgtgccgactcgacccgggagagagcagggagaagaggcccccgagccgaacggtggcctaaggcccccgacgaccggagttggccctttgcccgcttgtccgacgatgccaggagcccccgacccccaggacggcaccgaggccactgtgggaaggccgcgcctgtcgtcctccgaccccgaggtcgtcggcacagaagacgagtgcgccccgcgaggccgcttggacgaagagcgccccagggatgcggcccctggcgaagaggatcggccccaccgaaaggtgcagcggcccgtctactttgttagtgaggccctccgggacgccaagacccgataccctcaggcccagaagatgctttatgctattctgatggcttcgaggaaactgcgccattatttccaggcgcatcgggtcacggtggttacgtcttaccccctcggccaaatcttgcataatcgagagggtacaggacgggtggtctgtatggagtaccggtgctctgacccgcagatggatgcttacgtacgccaagtacggcgtatggagcgccatttcgacgggatagagcttcggcacgtgcccagacgggataacacgattgccgacgaactctcacggctcgcttcctcgcgagcccagaccccaccgggcgcctttgaagaaaggcttgcccagccgtcggcgcgacccgaccccttaggggagacggacgcgcctgaccggcccccgaggcccgtcggagtccaggcctcgggacccgaggggagtgctcccagctcccttagattgattgcttggatcgctgagatccaagcatacctcacagataagactctacccgaggaccgcgaagggagtgaacgcgtccagcgcatctccaaacgctacgtgctggtagaagggaccctctatcggcgcgcggctaacggaatcctcctgaagtgcattcctcgggaacaaggcgtcgagcttcttgccgatatccatgaaggcgaatgcggagcccactccgcctcgcgcaccttggttggcaaagcctttcgtcaaggtttctattggccgacagctctcaatgatgcggtcgacctggtccggcgatgcagagcgtgtcaattccacgccaagcaaatccatcagccggcccaggccctgcagatcataccactttcatggccatttgctgtctgggggctcgatatcctgggaccgtttaggcaggccccgggcgggtttgagtatctgtatgtcgcgatcgacaagttcactaagtggcccgaggcttatccggtcgtcaagatcgataagcactccgcacttaagttcattaagggcattacagcccggtttggggtgcctaaccgtattattacggataatggcacccaattcactagtgaacttttcggcgatcactgcgaagacatgggcatcaagctctgcttcgcctcccccgcccaccccagaagcaatggccaagtggagcgcgccaatgcggaaatcctcagaggccttaaaaccaagaccttcaacatcctcaagaagcacggcgattcgtggatcgaggagttgccagcggtgctctgggcgaaccgaaccacaccaagccgagcaaccggggaaacgcctttcttcctcgtctacggcgcggaagcggttctcccatccgagctcaccctgaggtcccctcgggccaccatgtactgcgaggctgatcaagatcagcttcgcagagatgacctcgactacttggaggagcgaaggcggcgcgcggccctccgagccgcgcgctaccagcagagcctacggcgctaccatcagcgccgcatccgggcccgatcactctgcgtcaacgacctcgtcctacgccgcgtccaaacgcgtgctggattgagcaagctctcaccaatgtgggagggtccgtatcgagtgatcagcgtcccccggccgggctccgttcggctggccgcgggcgacggcacagagctgcctaacccgtggaacatcgaacaccttcgtcgcttctacccctaataggggctcgagtcggctaaaatcgccaaaaggggcccagaaccgagccgtgccccggggcgtggttaactccgggggggaatcggcaaaaacccacaaccgggtcacccataaccctcggtcaccacgctcccggcctggccagtctcgacacgtggatctccccaggcactagccccgacccgagccatttgaggactagaacccgggtcgccagcctcgtcgccactgtcgcccacaccgccgtcatcgccctcctcgtcggagttgagggcgaacgcgagccgaggggccgaaccctcgaagctgtggacgatatggtcggcggcatcccggacctgcacgcgcgcgccgtcctcggtcccgggagggaactcgtccagcgccgtccatggggagaagtcggggtccctggcctggtaactcgccagtacgagctccaccgctcctcgggcgaggtccctcgaggatgagttaatcgtcccctcgagctcctcggggagccgctggagagtcccggccatctccgagaggcgctgggcgaggcccccctggttggcggcgtacttcacagtccgcccgccccagagacccgcctgccgcccggcgcggtctaaacgggacacggcatcgcgaagcatgctgggccctatctcgcctgccaggcgaagggcctcgacctccccggtggacgaatccagcgcgccctgcagatccgcgatggtgtgttcggcagctgcgaggcgggcggctaagtcgctgtcgcccgtggccgccccgccgctacgcgcccttgcatccagctcccttgcctgcgcctcgagttcagcggcccgctggttcagtgcggccctctcggcgcgggcactttccagattgcgacgcgcttgttcctcttgcgcagcctcgcggagggacaggctgtccgccagccgttgcgccgcggcctcggcctccttgagagctcgctcccgctcggtgagcgcgtcctcgcggaggcggagcgcggactcttcttcggcacaggcggcttcgtgcaccgccagtgtgacctcccgaatagcaacggcggcctcgcgatccgccaggtccctctccacggcgcaggcacgctcttccagcgccatggcacgggcctcaagggcttcttcgcgccgccgggatgccacctcggtctccgccgcccgccgttctcgggcagcggcagcgtcaaggaccccccgggcggcgtcgagctttttccctagctccgcctcccagctcccgtattgaaggcggagggtgtcctgcgcctcgttcatcacggtggtggcgatgagggcagccccccgctcctcctccacctccttggcgatctcccccagcaccttccgacgggcttcgagctctgagacgtgccggcggtgtgccttgcggcccacctccaccatggcctccaccgagcgtcgcccctcttcgacacgcgcccatgcggcgtcaagctccgcccgctctgcttgcagggcctccacttgggcacttaacccgtccaacaccgtggtgtttgcgacggccaaggcctgcagaaggggttctgcgctcagtggagcaacggaaggcgtggggaagagccgcctcggtgaggatgccgcgcggctcggcccgccgatggacatgccggactcagggatgtcccccggacctggcttgtcctgagcgtcgcccgagggagtgggcccaagcgatacgcccgcggcctcgtcgcgagctgcctcggaagtcgtcgccgcctcggcctggcgaagtctggcctcctcccgagcggcttcttcagcttggcgagctcggacggccacctgggcggcctccccggcttcccgtaggcgatccgcggcttctcgccggtcagattcccgcctccgagcctctgtggtcgccgggtcctcggcctcagactggccggacttggaatggcgggagggacgcgacgggatctcgcttggaggggaaataaggtttccccgggatggttctgtcccccccatcttgcggagccgtttcttcttccgctccccctcgggctgcgacgtcggcgtggccccctccgggcgcctgctgctggcacgcgccgccccgccccctcggggaggagatgggggaggggttccttcctgcttcctcttcccccgggcgtcggcagggcggccgctccccgggcccccgtcgcggggcccagaagcacgaccccctcccggggtagattgttcccccctgcggctcccgcccgcgccatcgtggcctcgaggagcccgctcctccgacgccccgaccgcctgcatgatggtcaggatggaggcgcggtctggatcgctgcagagggggaggactccttgaggaatgagggatgcctccacggagctgagattcagcacccgttggaccactatcttgaagtcctcaggagcccggtcccatctgaccccctggtgggtcctcatacagtcctcggacccggtgtactcccaggcgccccgggcgcgccgctggagtggcgcgatccggcgacgaagatagtcgccgaacaccatggcccctgtgagcccctgggatcgcaggcccgccaggcggtcgaggacggcgtcgtagccatctcccagatctaccggcgcccgccagttggaggcctgcgttggaggctggctcggaagtcggaggcgcgcttcgtcggcgaggggggtgtagaaccagtcgctcttccagtcatcccacttcttgcggaggacgcagggaatgtagcggttcagcaccggccctcgcggctggaagtagcaaccaccaaccaccgacggcggcgacaccggctgtacggtgaagaaccaccggaacagccgaagggatgggcgcaccccgatgaacatctcgcacaggtgcgcgaagatggccaatgtcattaccgcgttgggggtgaggtgcgccatctggagatcgtaaaactccagaacatccatgaagaaagaagaaaatggcggaaccagccctgccatagcaaaagggaggaagaagacggaccgccccgggtagcgtggcgccgggcatccctcgcccagcgagactatctcccggtcagtggcagattccggcatgaagcggcgcggcagcccggcctgtctctcgctcacgatgcgggaaggcggcagcacggcctcgccccgtcctgtcaggatgagagtctctaggcactcgtccctagccggagccagcgtgctagctcctggagatggcacgttggtcatcaccgacgacggcggcggctcggcgaagaagacggctcgggcggcggacactcgccggcgaacggcggcaccacggcaccaacggagggcaccagcacgtagaggacaacgcggcgaacacaccggtgaccaaaacggcggcggagaaggaacggacgacgacggcgacgagaaggaagcggcggctaccttcgggttgtcgacggcgacgaagctccggcgggttccgacggctgcgaaggggcggacgaggacggcggcgacttggcgatgacgacggcggtcttcccgagcgacggcgacggctggaacgacggcggcgcacggagttccgtgctcatcctccaagaaaccaatagcttttcctcttctcatattcttcttgatctcttgaatatcaggatcattaatttgggcttctctaacttgatcaattagagtgggcttcgcttctaaggattcttccgaccacttgtactttacatctttctgaagcagtcgtgtcatgggcttagcaatcttggaaaaattctctataaacctccggtaatatcctgcgaggcctaggaaactagtggtaaaagctgtcttaggtatatcttcctctttgattctcaactggtgataccctgatcgaagatctatcttggagaaaacagtggcacctttaagcggagctccccatggtgatgaacttggtctgatgtatcctttctgtagcaaatcatctacttgcctcttaacttctgccaactcattggcaggtaaatcatctgggaacacatcaggatactcccggaccaaaatcacatctggagcatcttgagcttctgcagcagcaacatgattgacacgggcctttgatgctggtacagcagagttattctgggtagggacaaccttcacacgtcggggcttcggacacttgtcagcataatgtcctggatctccacagttgaaacacaccacgggcttgctgccttgctccctcttggcaggttgttgctgtgctggagctgcaacaggacgtggagcttgattacggatgttgttgccagcattgttgttgaagaactgacgctgcggacgaacaacagacgaagaacctccctgtgacatgggctggggtcctaaagtaagacgcggcttctgattatttccctgttgtgtcttgaattgagcaatccgacgtttcttctgctccatgcgattatacttgtcctcctgacgaatagccttatccactaatttctggaaatcaggataatctccaaccatgagtgggtaagaaagctcatcattaagtcctcccaaaaacttctcctggcgctcttcatcattgcacacatcttccggagcataacgagcaagacgattgaactcgtgcagatactccgtaacagagcgagatccctgagtaagcgacctgaactccttcttcttgagagacactactcccgatggtatatgcgtctttcggaaagcagcggtgaattcaagccaagtgataggttcatcagtagtcctgttaaggcggaagtgatcccaccattcagaggcagggccatgcaactgatgtgatgcaaatgagaccttctcctgatcagtacactgaagtaaatccaacttcttctctatggcatgcagccaatcactagcttcaacaggattagtggtactagagaaaacaggcggcctcacacgaagaaattctgctaacttgttctgtggaggtgcatgattattcccttggttttgctgattctgaaattgctgcatcatcatgttcataagctgagtctgttgagcaagaacttgggccagagtgggattctctccattgttgttgttattggggttgttgggaccattcccattgctacgagtattcaccat

SEQ ID NO: 22870 - DNA, 5805 bp, Oryza sativa
  Clone ID: TF_OsC359_8111
gatttgtcaggaggatcagcgcaaccagatggatcgcaaaagaaagggagcttagttcagggcgcgtcaggggaacaaccatagtgccacccccggcaacggcggtctcggatgagagcggcgatggtgggtccagcgggcaagggcggcagtctcaagcgagagctcgggtggtggcggtggcttgcaaccatgcgaatcccgtcgacggcggcaacagtagtgccggatccagcacctcctccccctcccgtgctgacctcgccgcctctccaatgacgatgacggtggcagcagcagcgacgatagtggatccaggcacgatgacgacgatagtcgatccaggcgtcgcatcggtgatacattctagggtccgtgcgccgccgtcgtttcagccgtcgccgtcgctcgggaagaccaccgtcgtgctcgccaagtcgtcgccgtcctcgtccgccccttcgccgtcgccggagatcaccggagcagcttcgccgtcgttgacccgaaggttcccgccgcttcctcctcgatgctttaactggtaataatttgattagctcctggtttggaatggtatattcctggtttggagatagaactgtgcagccgatgccgcgttacaagcctgagtacctgtttggtgttgagggttttgtctaggagttgcgtacgatgtcctttgtcattggatttgggactgctcctttttatgcccagattcctcatgatcgtcatgaagagaagtgacgagtcaaagtcaccttgaacagtaatagtgaagatatcccctcagtgatgtttgaagctggaggaagaaactatatccatgcatgtcaggaggtggcaaggatcgccataggagagctccgtgatcgctacagtgatcaattggccgacactgagtatcgccaccatcctcgccaacctcagggaagtgaccgtggcagttaccttgagactgaaggaattgagaatgatgctaccacgaagcatttggtggagatgttgtgggctatggatgaaagtcgtgcggagactgtgttagcagctcaagatcgtgaagaccggaatcgtggtaagatttgcaagctagaagacaaggtggatcgtttggagaaggaattagccgcattgaagggagaagcaccgccgcagaaggccaggattcgtctcaccgcaaggaagagagctctatttgtccctcgctatcaactggcgccaaaggttcgtgtggtggagaaagaagttgctccagctcaagcggatcctccggtcatcatcataagtagtgatgaagaagaagaatccaagcgcaacaattctaagattgagtgggtagcaactcaagatgatgaagacgagccttcaatcgacctccgatgcttggaagaactagacaatgggaatggtcccaacaaccccaataacaacaacaatggagagaatcccactcttgctcaagttcttgctcaacagacacagcttatgaacatgatgatgcagcaatttcagaatcagcaaaaccaaggaaataatcatgcacctccacagaacaagttagcagaatttcttcgtgtgaggccgcctgttttctctagtaccactaatcctgttgaagctagtgattggctgcatgccatagagaagaagttggatttacttcagtgtactgatcaggagaaggtctcatttgcatcacatcagttgcatggccctgcctctgaatggtgggatcacttccgccttaacaggactactgctgaacctatcacttggcttgaattcaccgctgctttccggaagacgcatataccatcaggagtagtgtctctcaagaagaaggagttcaggtcgcttacccagggatctcgctctgttacggagtatctgcacgagttcaatcgtcttgctcgttatgctccggaagatgtgcgcaatgatgaagagcgccaggagaagtttttgggaggacttaatgatgagctttcttacccactcatggttggagattatcctgatttccagaaattagtggataaggctattcgtcaggaggacaagtacaatcgcatggagcagaagaaacgtcggattgctcaattcaagacacaacaggggaataatcagaagccgcgtcttactttaggaccccagcccatgccacagggaggttcttcgtctgttgttcgtccgcagcgtcatttcttcaacaacaatgctggcaacaacatccgtaatcaagctccacgtcctgttgcagctccagcacagcaacaacctgccaagagggagcaaggcagcaagcccgtggtgtgtttcaactgtggagatccaggacattatgctgacaagtgtccgaagccccgacgcgtgaaggttgtccctgcccagaataactctgctgtaccagcatccaaggctcgtgtaaatcatgtcgctgctgcagaagctcaagatgctccagatgtgattttgggtacgttccttgttaactcagttcctgcaacagtacttttcgattctggtgctacacattcattcttatctatgagttttgcgggaaatcatgggatggaagtagaagatcttagacgtcctttgatggttagtaccccaagtaatcaagcactctctttgcaacgtagcccctctgtcagaatagaaattcaaggagtaccatttctggccaatcttatcttgttagaatccaaagaccttgatgtcatcctagggatggactggttagccagacataaaggtgtgatagactgtgccaacaaaaaagtaactctcaccagctatgatggtcgagttgtaactgttcatgcattgtcatctgagtctttaaggtcaagactgaaccaaataactttggaagagattcctatagtccgggagtatcccgatgtgttcccagatgatttacctggtatgccgcctaaaagggatatagagttcacaatagatttggtacctggaacaactccgatccataagagaccttatcgaatggcagccaatgagttggcagaagttaagaggcaagtagatgatttgctacagaaaggatacatcagaccgagttcatcaccatggggagctccggttatttttgtggaaaagaaagaccatactcagagaatgtgtgtggactatcgtgcactaaacgatgtgactatcaagaataagtatccactacccaggattgatgatttgtttgatcagcttaaaggtgccactgttttctccatgatagatcttcgatcagggtatcatcagttgagaatcaaagaggaagatatacctaagacagcttttaccactaggtatgggttgttcgaatgtactgttatgtcttttggacttaccaatgcccctgctttcttcatgaacttgatgaataaggtgtttatggaatacctagacaagttcgtggtggtctttattgatgatattcttatctactctcggaccaaagaagagcatgaggaacatcttcgccttgcattggagaagctacgagaacatcaactgtatgctaagtttagcaagtgtgaattttggttgtctgaagtgaaattccttggtcacgtcatctcagccggaggagttgccgtcgatcctagtaacgtggaatccgtaaccaattggaagcaaccaaagacagtttcagagattcgcagtttcctaggcctcgcaggatattatcggaggtttatagagaatttttctaagattgctaagcccatgacacgactgcttcagaaagatgtgaagtacaagtggtcggaagaatgtgagcagagttttcaagagttgaaaagtcgcttaatatcagctcctattttgattttgcctgatccaaagaagggttttcaagtgtattgcgatgcatccaaacttgggttaggttgtgttctgatgcaagatgggaaggtggttgcctatgcctctcgacagttacgtccgcatgagaagaactaccctactcatgatattgagttagctgcagtcgttcatgcattgaagatttggcgtcattatcttttcggtactcgtacagaagtgtacaccgatcacaagagtttaaagtatatctttactcagccggatctgaacatgagacaacggagatggttggaattaattaaggattatgacatgggaattcattatcatccgggaaaggctaatgttgtagcagacgctcttagcagaaaaggctattgcaatgctacagaaggacgacagttgccattggaattatgcaaggaatttgaaagattaaatttgggaattgtcggtagaggtttcgttgcagccttagaagcgaagcccactctaattgatcaagttagagaagcccaaattaatgatcctgatattcaagagatcaagaagaatatgagaagaggaaaagctattggtttcttggaggatgagcaaggaactgtatggttgggtgagagaatttgtgtccccgacaacaaagatctaaaagatgcagttctgaaagaagctcatgatactttatactccattcaccctggtagtactaagatgtaccaggatctcaaggaaagattttggtgggcaagtatgaagcgtgaaatcgcggaatatgtagcagtatgtgatgtttgtcagcgagtcaaggcagaacatcagaaacccgccggtttgttgcagccattgaagattcctgaatggaaatgggaagaaataggtatggattttattactggtttacccagaacgtcatcaggccatgactctatttgggtgatagtcgacagacttaccaaagtggctcattttattccggtaaagacaacctattccggaagtcgcttggcggaattgtacatggcaaggattgtgtgtttgcatggcgtccctaagaagatagtgtctgatcgaggcagtcagtttacttcaaatttttggaagaaacttcaggaagagatgggttctaagctgaactttagtactgcttatcatccacagacagacggacaaaccgaaagggtgaatcagattttggaagacatgttgagagcttgtgctttagatttcggtggaagttgggataagaatctaccttatgcagaattttcatacaacaacagttatcaagctagtttacagatggctccttacgaagcactgtatggtcggaagtgccgcactccgcttttgtgggatcaaacgggagaacgtcaggttttcgggacggatatcctaagggaagcagaagaaaaggtaaaggtcattcaagaaagattgcgagtggctcagtctcgacataagagttatgccgacaatcgccgtagagatttgagttttgaagaaggagattatgtgtatcttcgtgtcacgcctcttcgaggagttcatcgttttcacaccaaaggaaaattggcaccgcgttatgtgggaccttataagattgtcagtagaagaggagaggttgcttatcagttagaattacctcaatctttggcaggagtccataatgtgttccatgtgtcgcaattgaagaagtgtttaagagtacctaccgaagaagctaatcttgaacagatagaagtccaagaggatttgacttatgttgagaaaccaatccgtatcttggaaacaaatgagagaagaaccaggaatcgagttatccgtttttgcaaactccaatggagtaatcactcggaagaagaatcaacttgggaacgagaagatgaattgaagtcagctcatccgcacctatttgccagttcttccgaatctcgaggacgagattctgtttaa

SEQ ID NO: 22871 - DNA, 7413 bp, Oryza sativa
  Clone ID: TF_OsC359_8129
atgacacgactgcttcagaaagatgtgaagtacaagtggtcggaagaatgtgaacagagttttcaagaattgaaaagtcgcttaatatcagctcctattttgattttgcctgatccaaagaagggttttcaagtgtattgcgatgcatccaaacttgggttaggttgtgttttgatgcaagatgggaaggtggttgcctatgcctctcgacagttacgtccgcatgagaagaactaccctactcatgatattgagttagctgcagtcgttcatgcattgaagatttggcgtcattatcttttcggtactcgtacagaagtgtacaccgatcacaagagtttaaagtatatctttactcagccggatctgaacatgagacaacggagatggttggaattaattaaggattatgacatgggaattcattatcatccgggaaaggctaatgttgtagcagacgctcttagcagaaaaggctattgcaatgctacagaaggacgacagttgccattggaattatgcaaggaatttgaaagattaaatttgggaattgtcggtagaggtttcgttgcagctttagaagcgaagcccactctaattgatcaagttagagaagcccaaaataatgatcctgatattcaagagatcaagaagaatatgagaagaggaaaagctattggtttcttggaggatgagcacggaacggtatggttgggtgagagaatctgtgtccccgacaacaaagatttaaaggatgcaattctgaaagaagctcacgatactttatactccattcaccctggtagtactaagatgtaccaggatctcaaggaaagattttggtgggcaagtatgaagcgtgaaatcgcagaatacgtagcagtatgtgatgtttgtcagcgagtcaaggcagaacatcagaaacccgccggtttgttgcaacctttgaagattcctgaatggaaatgggaagaaattggtatggattttattactggtttacccagaacgtcatcaggccatgactctatttgggtaatagttgacagacttaccaaagtggctcatttcattccgacagacggacaaaccgaaagggtgaatcaaattttggaagacatgttgagagcttgtgctctagatttcggtggaagttgggataagaatctaccttatgcagaattttcatacaacaacagttatcaagctagtttacagatggctccttacgaagcactgtatggtcggaagtgccgcactccgcttttgtgggatcaaacgggagaacgtcaggttttcggaacggatatcctaagggaagcagaagaaaaggtaaagatcattcaagaaagattgcgtgtggctcagtctcgtcataagagttatgccgacaatcgccgcagagatttgagttttgaagagggagattatgtgtatcttcgtgtcacgcctcttcgaggagttcatcgttttcataccaaaggaaaattggcaccgcgttttgtgggaccttataagattgtcagtagaagaggagaggttgcttatcagttggagttacctcaatctttggcaggagtacataatgtgttccatgtgtcgcaattgaaaaagtgtttaagggtacctaccgaagaagctaatattgagcagatagaagtccaagaggatttgacttatgttgagaaaccaatccgtatcctggaaacaactcctggtttggaatggtacattcctggtttggagatagaactgtgcagccggggtggttgttcagaatggttgggcctatacaacaggatgccgcgttacaagcctgagtacctgtttggtgttgagggttttgtccaggagttgcgtacgatgtcctttgtcattggatttgggactgcccctttttatacccagattcctcatgatcgtcatgaagagaagtgccgagtcaaagtcaccttgaacagcaatagtgaagatattccctcagtgatgttcgaagctggaggaagaaactacatccatgcatgtcaggaggtggcaaggatcgccataggagagctccgtgatcgctacagtgatcaattggccgacactgagtatcgttaccatcctcgccaaccccagggaagtgaccgtggcagttatcttgagactgaaggaattgagaattatgttaccacaagacatttggttgagatgttgtgggctatggatgaaagtcgtgcggagactgtgttagcagctcaagatcgtgaagaccggaatcatggtaagatttgcaagttagaagacaaggtggatcgtttggagaaggaattagccgcattgaagggagaagcaccgccgcagaaggccaggattcgtcttaccgcaaggaagagagctctatttgtccctcgctatcaactggcgccaaagatggtgaacactcgtagcaatgggaatggtcccaacaaccccaataacaacaatggagagaatcccactcttgctcaagttcttgctcaacaaacacagcttatgaacatgatgatgcagcaatttcagaatcagcaaaaccaagggaataatcatgcacctccccagaacaagttagcagaatttcttcgtgtgaggccgcctgttttctctagtaccactaatcctgttgaagctagtgattggctgcatgccatagagaagaagttggatttacttcagtgcactgatcaggagaaggtatcttttgcatcacatcagttgcatggccctgcctctgaatggtgggatcacttccgccttaacaggactactgctgaacctatcacttggcttgaattcaccgctgctttccgaaagacgcatataccatcgggagtagtgtctctcaagaagaaggagttcaggtcgcttactcagggatctcgctctgttacggagtatctgcacgagttcaatcgtcttgctcgttatgctccggaagatgtgcgcaatgatgaagagcgccaggagaagtttttgggaggacttaatgatgagctttcttacccactcatggttggagattatcctgatttccagaaattagtggataaggctattcgtcaggaggacaagtataatcgcatggagcagaagaaacgtcggattgctcaattcaagacacaacagggaaataatcagaagccgcgtcttactttaggaccccagtctatgccacagggaggttcttcgtctgttgttcgtccgcaacgtcagttcttcaacaacaatgctggcaacaacatccgtaataaagctccacgtcctgttgcagctccagtacagcaacaacctgccaagagggagcaaggcagcaagcccgtggtgtgtttcaactgtggagacccaggacattatgctgacaagtgtccgaagccccgtcgcgtgaaggttgtccctgcccagagtaactctgctgtaccagtatccaaggctcgtgtaaatcatgtcgctgctgcagaagctcaagatgctccagatgtaattttgggtacgttccttgttaactcagttcctgcaacagtacttttcgattctggtgctacacattcattcttatctatgagttttgcgggaaatcatgggatggaagtagaagatcttagacgtcctttgatggttagtaccccaagtaatcaagcactctctttgcaacgtagcccctcggtcagaatagaaattaaaggagtaccatttctggccaatcttatcttgttagaatccaaagaccttgatgtcatcctagggatggactggttagccagacataaaggtgtgatagactgtgccaacagaaaagtaactctcaacagctatgatggtcgagttgtaactgttcatgcattgtcatctgagtctttaaggtcaagactgaaccagataactttggaagagattcctatagtccgggagtattctgatgtgttcccagatgatttacctggtatgccgcctaaaagggatatagagttcagaatagatttggtacctggaacaactccgatccataagagaccttatcgaatggcagctaatgagttggcagaagttaagaggcaagtagatgatttgctacagaaaggatacatcagaccgagttcatcaccatggggagctccggttatttttgtggaaaagaaagaccatactcagagaatgtgtgtggactatcgtgcactaaacgatgtgactatcaagaataagtatccactacccaggattgatgatttgtttgatcagcttaaaggtgccactgttttctccaagatagatcttcgatcagggtatcatcagttgagaatcaaagaggaagatatacctaagacagcttttaccactaggtatgggttgttcgaatgtactgttatgtcttttggacttaccaatgcccctgctttcttcatgaacttgatgaataaggtgtttatggaatacttagacaagttcgtggtggtctttattgatgatattcttatctactctcgaaccaaagaagagcatgaggaacatcttcgccttgcattggagaagctacgagaacatcaactgtatgctaagtttagcaagtgtgaattttggttgtccgaagtgaaattccttggtcacgtcatctcagccggaggagttgccgtcgatcctagtaacgtggaatccgtaaccaattggaagcaaccaaagacagtttcagagattcgcagtttcctaggcctcgcaggatattatcggaggtttatagagaatttttccaagattgctaagcccatgacacgactgcttcagaaagatgtgaagtacaagtggtcggaagaatgtgaacagagttttcaagaattgaaaagtcgcttaatatcagctcctattttgattttgcctgatccaaagaagggttttcaagtgtattgcgatgcatccaaacttgggttaggttgtgttttgatgcaagatgggaaggtggttgcctatgcctctcgacagttacgtccgcatgagaagaactaccctactcatgatattgagttagctgcagtcgttcatgcattgaagatttggcgtcattatcttttcggtactcgtacagaagtgtacaccgatcacaagagtttaaagtatatctttactcagccggatctgaacatgagacaacggagatggttggaattaattaaggattatgacatgggaattcattatcatccgggaaaggctaatgttgtagcagacgctcttagcagaaaaggctattgcaatgctacagaaggacgacagttgccattggaattatgcaaggaatttgaaagattaaatttgggaattgtcggtagaggtttcgttgcagctttagaagcgaagcccactctaattgatcaagttagagaagcccaaaataatgatcctgatattcaagagatcaagaagaatatgagaagaggaaaagctattggtttcttggaggatgagcacggaacggtatggttgggtgagagaatctgtgtccccgacaacaaagatttaaaggatgcaattctgaaagaagctcacgatactttatactccattcaccctggtagtactaagatgtaccaggatctcaaggaaagattttggtgggcaagtatgaagcgtgaaatcgcagaatacgtagcagtatgtgatgtttgtcagcgagtcaaggcagaacatcagaaacccgccggtttgttgcaacctttgaagattcctgaatggaaatgggaagaaattggtatggattttattactggtttacccagaacgtcatcaggccatgactctatttgggtaatagttgacagacttaccaaagtggctcatttcattccggtaaagacaacttattccggaagtcgcttagcggaattgtatatggcaaggattgtgtgtttgcatggcgtccctaagaagatagtgtctgatcgaggcagtcagtttacttcaaatttttggaagaaacttcaggaagagatgggttctaagctgaactttagtactgcttatcatccgcagacagacggacaaaccgaaagggtgaatcaaattttggaagacatgttgagagcttgtgctctagatttcggtggaagttgggataagaatctaccttatgcagaattttcatacaacaacagttatcaagctagtcttcagatggctccttacgaagcactgtatggtcggaagtgccgcactccgcttttgtgggatcaaacgggagaacgtcaggttttcggaacggatatcctaagggaagcagaagaaaaggtaaagatcattcaagaaagattgcgtgtggctcagtctcgtcataagagttatgccgacaatcgccgcagagatttgagttttgaagagggagattatgtgtatcttcgtgtcacgcctttacgaggagttcatcgttttcataccaagggaaaattggcaccgcgttttgtgggaccttataagattgtcagtagaagaggagaggttgcttatcagttggagttacctcaatctttggcaggagtccataatgtgttccatgtgtcgcaattgaaaaagtgtttaagggtacctaccgaagaagctaatattgagcggatagaagtccaagaggatttgacttatgttgagaaaccaatccgtatactggaaacaaatgagagaagaaccaggaatcgagttatccgtttctgcaaagttcaatggagtaatcactcggaagaagaatcaacttgggaacgagaagatgaattgaactttggaatcgagttcgattcggatcggttttccctctctccaagccgaaggtttccttcgccgttgccgtcgccgtgggccttcgccgtcgcctccgagcccctttaaaaggacccccggtgtctcctctacccgtcgcagccctcgccttcgcctctcgtcgccggaagagccttagcgccccatgctccgccgtcgctccagctgtcgccgccgctcgggaagaccgccgacgtcatcgccaagtcgccgccgtcctcgtccgccccttcgcagccgttggaacccgccggagcttcgtcgccgtcgacaacccgaaggtagccgccgcttccttctcgtcgccgtcgccgtccgttgcttctccgccgtcgttttggtcgtcgcgccgccgttcgccggtgagcgtgcgccgcccgagccgtccgctccgccgagccgccgccgccgtcggtgacgtcatcgctgacgccatcggggtcgtccgccattccgtcgtttctggagagtccgttttcgcggaagaagagtttgaagagttccaaggccagcaaggcaagtcacacagatcccaaacaaccctttgagcatgccgactccaccgccactcccggatccggcccgcgggagcagctgaag

SEQ ID NO: 22872 - DNA, 1916 bp, Oryza sativa
  Clone ID: TF_OsC359_8165
ttggagatggatgaagtcgggcgtcgatggacatttttaggacaaatgaaggctacacgagctgcggcccggtagtcgagatgtcatggcacagggccggtgtcctgctgctaggggctcagtcctgcctgcctgtcccgggggttccggccgtaggtgggattgggtcggtactcttgtctatggctaggatgggttggaaactatgtcacgtcttccgtccgtataccgtggtggtatgtggcacgtggtcacacgtgaggaagatgtgtcttgtggcacttgtgggtgtgtcttgttgagtacggtggttgtactcagtcttgctcaatttttcccaaacccagaagaggagttcctggaggatgaaggctttggtgtctagctcgtgcctgccgtcaagtgcctgtggtcgtcgccctagtcttccgctgtttgtcgtttgtctttgtgtgtgctgggccttgcctcctgggacaaggattaatgcacgcacgtaaggaacgcccgttgggttatttccggtcgtgacaagcagtcgtgtcatgggcttagcaatcttagaaaaattctctataaaccttcgataatatcctgcgaggcctagaaaactgcgaatctctgaaactgtctttggttgcttccaattagttacggattccacattactaggatcaacggcaactcctcctgctgagatgacgtgaccaaggaacttcacttcagacaaccaaaattcacacttgctaaacttagcatacagttgatgttctcgtagcttctccaatgcaaggcgaagatgttcttcatgctcttctttggttcgggagtagataagaatatcatcaataaagaccaccacgaacttgtctaggtatttccatttaaacagcgcttttattcatcaagttcatgaagaaagcaggggcattggtaagtccaaaagacataacagtacattcgaacaacccatacctagtggtaaaagctgtcttaggtatatcttcctctttgattctcaactggtgatatcctgatcgaagatcgatcttggagaaaacaagggcacctttaagctgatcaaacaaatcatcaattctgggtagcggatacttattcttgatagtcacatcgtttaatgcacgataatccacacacattctctgggtatggtctttcttttccacaaaaataactggagctccccatggagatgaactcggtctgatgtatcccttctgaagcaaatcatctacgtgcctcttgacttctgccaactcattggctgccattctataaggtctcttatggatcggagttgttcctggtaccagatctattctgaactctatatcccttttaggcggcataccaggtaaatcatctgggaacacatcgggatactcccggactataggaatctcttccaaagttatctggttcagtcttgaccttaaagactcagaagacaatgcatgaacagttacaactcgaccatcattgctggtgagagttacttttctgttggcacagtctatcacacctttatgtctggctaaccagtccatccctaggatgacatctaggtctttggattccaaaatcacatctggagcatcttgagcttctgcagcagcgacatgattaacacgggcctttgatgctggtacggtagagttgctctgggtagggacaaccttcatgcgtcggggcttcggacacttgtcagcataatgtcctgggtctccacagttgaaacacaccacgggcttgctgccttgctccctcttggcaggttgttgctgtgttggagctgcaacagggcgtagagcttgattgcggatgttgttgccaacattgttgttgaagaactgacgctgcggacgaacaacagacgaagaacctccctgtggcat

SEQ ID NO: 22873 - DNA, 3961 bp, Oryza sativa
  Clone ID: TF_OsC359_8172
atggacatctctaggacaaatgaaggctacacgagctgcggcccggtaatcgagatgtcatggcacagggctggtgtcctgctgctaggggctcaatcctgcctacctgtcccggaggttccggccgtaggtggggttgggtcggtactcttgtctatggctaggatgggttggaaactatgtcatgtctcccgtccaaatgccgtggtgcctgccaagagggagcaaggcagcaagcccgtggtgtgcttcaactgtggagacccaggacattatgctgacaagtgtccgaagccccgacgcgtgaaggttgtccctgcccagagcaactctaccgcaccagcatcgaaggcccgtgtcaatcatgttgcagctgcagaagctcaagatgctccagatgtgattttgggtacgttccttgttaactcagttcctgcaacagtacttttcgattctggtgctacacattcattcttatctatgagttttgcgggaaatcatgggatggaagtagaagatcttagacgtcctttgatggttagtaccccaaataatcaagcactctctttgcaacgtagcccctctgtcagaatagaaattaaaggagtaccatttctggccaatcttatcttgttagaatccaaagaccttgatgtcatcctagggatggactggttagccagacataaaggtgtgatagactgtgccaacagaaaagtaactctcaccagcaatgatggtcgagttgtaactgttcatgcattgtcttctgagtctttaaggtcaagactgaaccagataactttggaagagattcctatagtccgggagtattccgatgtgttcccagatgatttacctggtatgccgcctaaaagggatatagagttcagaatagatttggtacctggaacaactccgatccataagagaccttatagaatggcagccaatgagttggcagaagtcaagaggcaagtagacgatttgcttcagaaaggatacatcagaccgagttcgtcaccatggggagctccggttatttttgtggaaaagaaagaccatacccagagaatgtgtgtggattatcgtgcactaaatgatgtgactatcaagaataagtatccgctacccagaattgatgatttgtttgatcagcttaaaggtgccactgttttctccaagatagatcttcgatcagggtatcaccagttgagaatcaaagaggaagatatacctaacacaacttttaccactaggtatggattgttcgaatgtactgttatgtcttttggacttaccaatgcccccgctttcttcatgaacttgatgaataaggtgtttatggaatacctagacaagtttgtggtggtctttattgatgacattcttatctactctcgaaccaaagaagagcatgaagaacatcttcgccttgcgttggagaagctacgagaacatcaactgtatgctaagtttagcaagtgtgaattttggctgtctgaagtgaagttccttggtcacgtcatctcagcaggaggagttgccgttgatcctagtaatgtggaatctgtaaccaactggaaacaaccaaagacggtttcagagattcacagattcctaggcctcgcaggatattatcggaggtttatagagaatttttccaagattgctaagcccatgacacgactgcttcagaaagatagttttcaagagttgaaaagtcgcttaatatcagctcctattttgattttgcctgatccaaagaagggtttccaagtgtattgcgatgcatcaaaacttgggttaggttgtgttctgatgcaagatggaaaggtggttgcctatgcatctcgtcagttacgtccgcatgagaagaactaccctactcatgatcttgaattggccgcagtggttcatgcgttgaaaatttggcgtcattatcttttcggtactcgtacagaggtgtataccgatcacaagagtttaaagtatatctttactcagccggatctgaacatgagacaaaggagatggttggaactaattaaggattatgacatgggaattcattatcacccaggaaaggctaatgttgtagcagacgctcttagcaggaaaggctattgcaatgctacggaaggacgacagttgccattggaattatgcaaggaatttgaaagattaaatttgggaattgtcagtagaggtttcgttgcagccttagaagcgaagcccactctaattgatcaagttagagaagcccaaattaatgatcctgatattcaagaaatcaagaagaatatgagaagaggaaaagctatcggtttcttggaggatgagcacggaactgtatggttgggtgagagaatctgtgtccccgacaacaaagatttaaaagatgcaattctgaaagaagctcatgatactttatactccattcaccctggtagtactaagatgtaccaggatctcaaggaaagattttggtgggcaagtatgaagcgtgaaatcgcagaatacgtagcagtatgtgacgtttgtcagcgagtcaaggcagaacatcagaaacccgccggtttgttgcagcctttgaagattcctgaatggaagtgggaagaaatcggtatggattttatcactggtttacccagaacgtcatcaggtcatgactctatttgggtgatagtcgacagacttaccaaagtagctcatttcattccggtaaagacaacctattccggaagtcgcttagcggaattgtatatggcaaggattgtgtgtttgcatggcgtccctaagaaaatagtgtctgatcgaggcagtcagtttacttcaaatttttggaagaaacttcaggaagagatgggttctaagctgaactttagtactgcttatcatccgcagacagacggacaaaaggaccgtataaggaccggtcttcgggcctctgttgcaaagcactaccgtacttccacatgtctagtgggtaaggcttagtttgtggctcagtcttgcctccttggacaaggaataatacacgcacgtaaggaacgcccgttgggttatttccggtcgtgacaataattgtaccagctgagagattaactccgtgcagcattgtgatgaaatctttttcctctttcggtattgctctatgtgaccttaggaatttcttgagtgaaaactttctaaccagaggatgtgtgtgttcttcaacaaactgaattacttcccacctagctcctttcctcttcactgtcatccttgctttgcaggcagcctgtcttgttctacttcttttcattttctttggggggcacgcttcacccgttttttcttctggaccacatttgttgcaaacaaacattactttgtcacgttctccatctttggctgacttccttgaagtgttgattttgattgaaaatccaacgcgctttgcgtacctgttgtagtgagcccttgcttcctcctctgagttgaaagtcaaggtgaggtacggcacttgtgtgctgcacggaatatcctgtgatggcgctgactgtgcttctgaatcatctgttccagtgtcttcacttgaaattgtgttggcagtagcagttgttgcgccagttgcaacactagtatgcattgtgtctgcacgatctgacatttcttcaaatacttgcatctcatcatcgccttcaaatatttgcatctcatcattggcttcaaatacttgcatctcatcattggctacattgtgtgcttgtaaacttccagcatcaccagtagtatacatagtttcaaagtcaaaagtgtcgtccaaatttatagcaggaatctccatgctagtgtcagtcagatttatagggaagtatgtttcatttctgtcttcatcatcaactagtaaatggtgtactggaggttcattttcaccagaaactaattccgggatactgttgaggtcaaagtccat

SEQ ID NO: 22874 - DNA, 3964 bp, Oryza sativa
  Clone ID: TF_OsC359_8188
atgtctttcgtgattagtctcacacctctcatcattgtaaaagatgcttaaactggtaataatttgattagctcctggtttggaatggtatattcctggtttggagatagaactgtgcagccggggtggttgttcagaatggttgggcctatacaacaggatgccgtgttacaagcctgagtacctgtttggcgttgagggttttgtccaggagttgcgtacgatgtcctttgtcattggatttgggaatgctcctttttatgcccagattcgtcatgatcgtcatgaagaaaagtgccgagtcaaagtcaccttgaacagcaatagtgaagatatcccctcagtaatgtttgaagctggaggaagaaactacatccatgcatgtcaggaggtggcaaggatcgccataggagagctccgtgatcgctacagtgatcagttggtcgacactgagtatcgctatcatcctcgccaaccccagggaagtgaccgtggcagttaccttgagactgaaggaattgagaatgatgttaccacaagacatttggttgagatgttgtgggctatggatgaaagtcgtgcggagactgtgttagcagctcaagatcgtgaagatcggaatcgtggtaagatttgcaagctagaagacaaggtggatcgtttggagaaggaattagccgcattgaagggagaagcaccgccgcagaaggccaggattcgtcttaccgcaaggaagagagctttatttgtccctcgctatcaactggcgccaaaggttcgtgtggtggagaaagaagttgccccagctcaagcggatcctccggtcatcatcataagtagtgatgaagaagaagaatccaagcgcatcaattccaagattgagtgggtagcaactcaagatgatgaagatgagccttcaatcgacctcctatgctcggaagaactagagaagttggagagtttagtggtgtgggagtcttcagtttgtaataatgaaactcagttaagatcaataaaagttaaaatggtgaacactcgtagcaatgggaatggtcccaacaaccccaataataacatcaatggagagaatcccactctggcccaagttcttgctcagcagacacagcttatgaacatgatgatgcaacaatttcagaatcagcaaaaccaagggaataatcatgcacctccacagaacaagttagcagaatttcttcgtgtgaggccgcctgttttctctagtaccactaatcctgttgaagctagtgattggctacatgccatagagaagaagttggatttacttcagtgtactgatcaggagaaggtctcatttgcatcacatcagttgcatggccctgcctctgaatggtgggatcacttccgtcttaacaggactactgctgaacctatcacttggcttgaattcaccgctgctttccggaagacgcatataccatcgggggtagtgtctctcaagaagaaggagttcaggtcgcttacccagggatctcgctctgttacggagtatctgcacgagttcaatcgtcttgctcgttatgctccggaagatgtgcgcaatgatgaagagcgccaggagaagtttttgggaggacttaatgatgagctttcttacccacttatggttggagattaccctgatttccagaaattagtggataaggctattcgtcaggaagacaagtacaatcgcatggagcagaagaaacgtcggattgctcaattcaagacacaacagggaaataatcagaagccgcgtcttactttaggaccccagtccatgccacagggaggttcttcgtctgttgttcgtccgcaacgtcagttcttcaacaacaatgctggcaacaacatccgtaatcaagctccacgtcctgttgcagctccagcacagcaacaacctgccaagagggagcaaggcagcaagcccgtggtgtgtttcaactgtggagatccaggacattatgctgacaagtgtccgaagccccaacgcgtgaaggttgtccctgcccagagtaactctgctgtaccagcatcaaaggcccgtgtcaatcatattgctgctgcagaagctcaaggtgctccagatgtgattttgggtacgttccttgttaactcagttcctgcaacagtacttttcgattctggtgctacacattcattcttatctatgagttttgcgggaaatcatgggatggaagtagaagatcttagacgtcctttgatggttagtaccccaagtaatcaagcactctctttgcaacgtagcccctctgtcagaatagaaattcaaggagtaccatttctggccaatcttatcttgttagaatccaaagaccttgatgtcatcctagggatggactggttagccagacataaaggtgtgatagactgtgccaacagaaaagtaactctcaacagctatgatggtcgagttgtaaccgttcatgcattgtcttctgagtctttaaggtcaagactgaatcaaataactttggaagagattcctatagtccgggagtatcctgatgtgttcccagatgatttaccgggtatgccgcctaaaagggatatagagttcagaatagatttggtacctggaacaactccgatccataagagaccttatcgaatggcagccaatgagttggcagaagttaagaggcaagtagatgatttgctacagaaaggatacatcagaccgagttcatcaccatggggagctccggtaatttttgtggaaaagaaagaccatactcagagaatgtgtgtggactatcgtgcactaaacgatgtgactatcaagaataagtatccactacccaggattgatgatttgtttgatcagcttaaagacaagttcgtggtggtctttattgatgatattcttatctactctcgaaccaaagaagagcatgaggaacatcttcgccttgcattggagaagctacgagaacatcaactgtatgctaagtttagcaagtgtgaattttggttgtccgaagtgaaattccttggtcacgtcatctcagccggaggagttgccgttgatcctagtaacgtggaatccgtaaccaattggaagcaaccaaagacagtttcagagattcgcagtttcctaggccttgcaggatattatcggaggtttatagagaatttttctaagattgctaagcccatgacacgactgcttcagaaagatgtgaagtacaaatggtcggaagaatgtgagcggagttttcaagagttgaaaagtcgcttaatatcagctcctattttgattttgcctgatccaaagaagggtttccaagtatattgcgatgcatccaaacttgggttaggttgtgttctgatgcaagatgggaaggtggttgcctatgcatctcgtcagttacgtccgcatgagaagaactaccctactcatgatattgagttagctgcagtcgttcatgcattaaagatttggcgtcattatcttttcggtactcgtacagaagtgtacaccgatcacaagagtttaaagtatatctttactcagccggatctgaatatgagacaacggagatggttggaattaattaaggattatgacatgggaattcattatcatccgggaaaggctaatgttgtagcagacgctcttagcagaaaaggttattgcaatgctacagaaggacgacagttgccattggaattatgcaaggaatttgaaagattaaatttgggaattgtcggtagaggtttcgttgcagctttagaagcgaagcccactctaattgatcaagttagagaagcccaaattaatgatcctgatattcaagagatcaagaagaatatgagaagaggaaaagctattggtttcttggaagatgagcacggaactgtatggttgggtgaaagaatctgtgtctgtcacgtcctgataaattcatcccaaaattaa

SEQ ID NO: 22875 - DNA, 9213 bp, Oryza sativa
  Clone ID: TF_OsC359_8238
taaaaagaaaagccctaaaaagtctttttttcaacccctccccctcttgggccggctcggcccatctctctccctctctctcctctcccccgcggcccattcggcctcctccccgcgcacgcgccgctgacgggagggcccgcccgccaccctcgctgacgggtggggcccacccgtcatccccttcctcccgccgctcccgccgcccgcgccctagcgccgccgccgccgccgtgaatcccgccgcccccgtccgccccgcgtgcaatcaagaggggggaattattccccgtgattccctccccctttccccccatttttccctctctctctctccctcggattcgtttggaaactttccccctaacctcgccggcgccattaatggcggccgggactcccgcgcccgtttccccctcctccggccaccccctccctctcttaaccctatataaaccctccccgtgcctccctccaccggtttcgcggcactcgccggcctctctctctcgccggaatcgagctcgcgccgtcgctctctctctccgccgtcgccgccgagctccggtccgccgccgtcgtcgccccggaccaccttccccctcggggccgcctccttcagcttcgccgcatcctcaccgacctcgtccacccctccgtttcgcacgccgaccgccggagcaccgtcgaccccgtccacccaagccgcgccgccgccttcctccgctccgatgtaagttggcccggcctgggggaggcgggacgttacacgcgccgcctcccgtcggctgtgccggcgtggccgccttcgggcgcgccccgcggctgccgtgtggggcccggctgtcagccgcccacgcccttaggtgcggctgacgcgtgggacccacggcgtcggccggtgcgagcccgggtgcgcccggtccaccgtggaccgtggggctgccgcgtgggccccacccccgtggacccggcaaatgaaggctacacgagctgcggcccggtagtcgacatgtcatggcacagggctggtgtcctgctgctaggggctcagtcctgcctacctgtcccggaggttccggccgtagcgtcgtgtgccctagcttcgccgtcgccgccgccgctccagccgtgctccgccgccgttccagacgtcgccgtcgctcgggaagaccgtcgtcgtggtcgccaagtcgtcgccgtcctcgtccgccccttcgccgtcgccggagatcgtcggagcttcgtcgccgtcgacaacccgaaggtttccgccgtttcctcctcgtcgccgtcgtcgttcgttgtttttccgccgccgttttggtcaccggtgtgttcgccgcgtcgtcctctacgtgctggtgccctccgtttgcgtcctcgcgccgccgttcgccggcgagcgtgcgccgcccgagccgtccgctccgccgagccgccgccgctgtcggtgacgtcattgccgacgtcatcggggtcgtccgccgtgagccggcctgagtacctgtttggtgttgagggttttgtccaggagttgcgtacgatgtcctttgccattggatttgggactgcccctttttatgcccagattcctcatgatcgtcatgaagaaaagtgccgagtcaaagtcaccttaaacagcaatagtgaagaggtcccctcagtgatgttcgaagctggaggaagaaactacgtccatgcatgtcaggaagtggcaaggatcgccataggagaactccgtgatagctacagtgatcagttggccgacactgagtatcgctaccatcctcgccaaccccagggaagtgaccgtggcagctaccttgaaactgaaggaattgagaatgatgctaccacaaggcatttggttgagatgctgtgggctatggatgaaagtcgtgcggagactgtgttagcggctcaagatcgtgaagaccggaatcgtggtaagatttgcaagctagaagacaaggtggatcgtttggagaaggaactagctgcattaaagggagaagcaccgccgcagaaggccaggattcgcctcaccgcaaggaagagagctctattcgtccctcgctatcaattggcgccaaaggttcgtgtggtggagaaagaagttgccccatcccaagcggatcctccggtcatcatcataagtgatgaagaagaagaatccaagcgcaacaattccaagattgagtgggtagcaacccaagatgatgaagacgagccgaacgagccttcaatcgacctccgatgcttggaagaactagattttcccccggtttctcttcttgtgccatgttcctgccagatggtgaatactcgcagcaacgggaatggtcccaacaaccccaataacaataacaatggagagaacccaactctggcccaagttcttgctcaacagacacagcttatgaacatgatgatgcagcaacttcagaatcagcagaaccaaggaaataaccatgcacctcctcagaataagttagcagaatttcttcgtgtgaggccgcctgttttctctagtaccactaatcctgttgaagctggtgattggctgcatgccatagagaagaagttggatttacttcagtgcactgatcaggagaaggtatcttttgcatcacatcagttgcatggctctgcctttgaatggtgggatcacttccgcctgaataggactactgctgaacctatcacttggcttgaattcaccgctgctttccggaagacgcatataccatcaggagtagtgtctctcaagaagaaggagttcaggtcgcttactcagggatctcgctctgttacggagtatctgcacgagttcaatcgtcttgctcgttatgctccggaagatgtgcgcaatgatgaagagcaccaggagaagtttttgggaggacttaatgacgagctttcttacccactcatggttggagattatcctgatttccagaaattagtggataaggctatacgtcaggaggacaagtacaattgcatggagcagaggaaacgtcggattgctcacttcaaggcacaacaagggagtaatcagaagccgcgttttactttaggaccccagtctatgccacagggaggttcttcgtctgttgttcgtccgcagcgtcagttcttcaacaacaatgctggcaacaacatccgcaatcaagctccacgtcctgttgcagctccaacacagcaacagcctgccaagagggagcaaggcagcaagcccgtggtgtgtttcaactgtggagacccaggacattatgctgacaagtgtccgaagccccgtcgcgtgaaggttgtacctgcccagagtaactctgctgtaccagcatcaaaggcccgtgtcaatcatgtcgctgctgcagaagctcaagatgctccagatgtgattttggatgatattcttatctattctcgaaccaaagaagagcatgaagaacatcttcgccttgcattggagaagctacgagagcatcaactgtatgctaagttcagcaagtgtgaattttggttgtctgaagtgaagttccttggtcacgtcatctcagcaggaggagttgccgttgatcctagatattaccggaggtttatagagaatttttccaagattgctaagcccatgacacgactgcttcagaaagatgtgaagtacaagtggtctgaagaatcgccgtgtgccctagcttcgccgtcgccgccgccgctccagccgtgctccgccgccgttccagacgtcgccgtcgctcgggaagaccgtcgtcgtggtcgccaagtcgtcgccgtcctcgtccgccccttcgccgtcgccggagatcgtcggagcttcgttgccgtcgacaacccgaaggtttccgccgtttcctcctcgtcgccgtcgtcgttcgttgtttttccgccgccgttttggtcaccggtgtgttcgccgcgtcgtcctctacgtgctggtgccctccgtttgcgtcctcgcgccgccgttcgccggcgagcgtgcgccgcccgagccgtccgctccgccgagccgccgccgctgtcggtgacgtcattgccgacgtcatcggggtcgtccgccctcctggtttggaatggtacattcctggtttggagatagaactgtgcagccgggatggttgttcagaatggttgggcctatacaacaggatgccgcgctacaagcctgagtacctgtttggtgttgagggttttgtccaggagttgcgtacgatgtcctttgccattggatttgggactgcccctttttatgcccagattcctcatgatcgtcatgaagagaagtgccgagtcaaagtcaccttaaacagcaatagtgaagaggtcccctcagtgatgttcgaagctggaggaagaaactacgtccatgcatgtcaggaagtggcaaggatcgccataggagaactccgtgatagctacagtgatcagttggccgacactgagtatcgctaccatcctcgtcaaccccagggaagtgaccgtggcagctaccttgagactgaaggaattgagaatgatgctaccacaaggcatttggttgagatgctgtgggctatggatgaaagtcgtgcggagactgtgttagcagctcaagatcgtgaagaccggaatcgtggtaagatttgcaagctagaagacaaggtggatcgtttggagaaggagctagccgcattgaagggagaagcaccaccgcagaaggccaggattcgtcttaccgcaaggaagagagctctattcgtccctcgctatcaattggcgccaaagatggtgaatactcgcagcaacgggaatggtcccaacaaccccaataacaataacaatggagagaacccaactctggcccaagttcttgctcaacagacacagcttatgaacatgatgatgcagcaacttcagaatcagcagaaccaaggaaataaccatgcacctccccagaacaagttagcagaatttcttcgtgtgaggccgcctattttctctagtaccactaatcctgttgaagctggtgattggctgcatgccatagagaagaagttggatttacttcagtgcactgatcaggagaaggtatcttttgcatcacatcagttgcatggctctgcctctgaatggtgggatcacttccgcctgaataggactactgctgaacctatcacttggcttgaattcactgctgctttccggaagacgcatataccatcaagagtagtgtctctcaagaagaaggagttcaggtcgcttactcagggatctcgctctgttacggagtatctgcacgagttcaatcgtcttgctcgttatgctccggaagatgtgcgcaatgatgaagagcgccaggagaagtttttgggaggacttaatgacgagctttcttacccactcatggttggagattatcctgatttccagaaattagtggataaggctatacgtcaggaggacaagtacaattgcatggagcagaggaaacgtcggattgctcacttcaaggcacaacaggggagtaatcagaagccgcgctttactttaggaccccagtctatgccacagggaggttcttcgtctgttgttcgtccgcagcgtcagttcttcaacaacaatgctggcaacaacatccgcaatcaagctccacgtcctgttgcagctccaacacagcaacagcctgccaagagggagcaaggcagcaagcccgtggtgtgtttcaactgtggagacccaggacattatgctgacaagtgtccgaagccccgtcgcgtgaaggttgtccctgcccagagtaactctgctgtaccagcatcaaaggcccgtgtcaatcatgtcgctgctgcagaagctcaagatgctccagatgtgattttgggtacgttccctgttaactcagttcctgcaacagtacttttcgattcaggtgctacacattcattcttatctatgagttttgcgggaaatcatgggatggaagtagaagatcttagacatcctttgatggttagtaccccaagtaatcaagcactctctttgcagcgtagcccctcggtcagaatagaaattaaaggagtaccatttgtggccaatcttatcttgttagaatccaaagaccttgatgtcatcctagggatggactggttagccagacatagaggtgtgatagactgtgccaacagaaaagtaactctcaccagtaatgatggtcgagtggtaactgttcatgcattgtcttctgagtctttaaggtcaagactgaatcaaataactttggaagagattcctatagtccgggagtatcccgatgtgttcccagatgatttacctggaatgccgcccaaaagggatatagagttcagaatagatctggtaccaggaacaactccaatccataagagaccttatcgaatggcagccaatgagttggcagaagtcaagaggcaagtggacgatttgcttcagaaaggatacatcagaccgagttcatcaccatggggagctccggttatttttgtggaaaagaaagatcatacccagaggatgtgtgtggactatcgtgcattaaatgatgtgactatcaagaataagtacccgttacccagaattgatgatttgtttgatcagcttaaaggtgctaccgttttctccaagatagatcttcgatcagggtatcaccagttgagaatcaaagaggaagatatacctaagacagcttttaccactaggtatggattgttcgaatgtacggttatgtcttttggacttaccaatgcccccgctttcttcatgaacttgatgaataaggtgtttatggaatacctagacaagttcgtggtggtctttattgatgacattcttatctactctcgaaccaaagaagaacatgaagaacatcttcgccttgcattggagaagctacgagagcatcaactgtatgctaagttcagcaagtgtgaattttggttgtctgaagtgaagttccttggtcacgtcatctcagcaggaggagttgccgttgatcctagtaatgtggaatccgtaaccaactggaaacaaccgaagacagtttcagagattcgcagtttcctaggcctcgcaggatattaccggaggtttatagagaatttttccaagattgctaagcccatgacacgactgcttcagaaagatgtgaagtacaagtggtcggaagaatgtgagcagagttttcaagagttgaaaagtcgcttaatatcagctcctattttgattttacctgatccaaagaagggtttccaagtgtattgcgatgcatccaaacttgggttaggttgtgttttgatgcaagatgggaaggtggttgcctatgcatctcgtcagttacgtccgcatgagaagaactaccctactcatgatcttgagttagccgcagtagttcatgcgttgaagatttggtgtcattatcttttcggtactcgtacagaggtatataccgatcacaagagtttaaagtatatctttactcagccggatctgaacatgagacaaaggagatggttggaattaattaaggattatgacatgggaattcattatcacccgggaaaggctaatgttgtagcagacgctcttagcaggaaaggctattgcaatgctaccgaaggacgacagttgccattggagttatgcaaggaatttgaaagattaaatttgggaattgtcagtagaggtttcgttgcagccttagaagcgaagcccactctaattgatcaagttagagaagcccaaattaatgatcctgatattcaagaaatcaagaagaatatgagaagaggaaaagctatcggtttcttggaggatgagcaaggaactgtatggttgggtgaaagaatctgcgtccccgacaacaaagatttaaaagatgcaattctgaaagaagctcatgatactttatactccattcaccctggtagtactaaggtgtaccaggatctcaaggaaagattttggtgggcaagtatgaagcgtgaaatcgcagaatacgtagcagtatgtgatgtttgtcagcgagtcaaggcagaacatcagaaacctgccggtttgctgcagcctttgaagattcctgaatggaagtgggaagaaatcggtatggattttatcactggtttacccagaacgtcatcaggccatgactctatttgggtaatagtcgacagacttaccaaagtggctcatttcattccggtaaagacaacttattctggaagtcgattggcggaattgtatatggcaaggattgtgtgtttgcatggcgtccctaagaagatagtgtctgatcgaggcagtcagtttacttcaaacttttggaagaagcttcaggaagagatggtttctaagctgaattttagtactgcttatcatccgcagacagacggacaaaccgaaagggtaaatcagattttggaagacatgttgagagcttgtgctctagatttcggtggaagttgggataagaatctaccctatgcagaattttcgtacaacaacagttatcaagctagtcttcagatggctccttacgaagcactgtatggtcggaagtgccgcactccgcttttgtgggatcaaacgggagaacgtcaggttttcgggacagatatcctaagggaagcagaagaaaaggtgaaaataattcaggaaagattgcgagtggctcaatctcgtcataagagttatgccgacaatcgccgtagagatttgagttttgaagaaggagattatgtgtatcttcgtgtcacgccttttcgaggagttcatcgttttcataccaaaggaaaattggcaccgcgttttgtgggaccctataagattgtcagtagaagaggagaggttgcttatcagttggagttacctcaatctttggcaggagtccataatgtgttccatgtgtcgcaattgaaaaagtgtttaagggtacctaccgaagaagctaatcttgaacagatagaagtccaagaggatttgacctatgttgagaaaccaatccgtatcttggcaacaagtgagagaagaaccagaaatcgagttatccgtttttgcaaagtccagtggagtaatcactcggaagaagaatcaacttgggaacgagaagatgaattgaagtcagctcatccgcatctgttcgccagttcttctgaatctcgaggacgagattctgtttag

SEQ ID NO: 22876 - DNA, 1689 bp, Oryza sativa
  Clone ID: TF_OsC359_8239
atgtcatggcagagggttggtgccctgctgctaggggctcagtctcgcctgcctgtcccgggggttccggccgtaggcgggattaggtcggtactcttgtctatggctaggatgggttggaaactatgtcacgtcttccgtctgtataccgtggtgatgtttaacagagaaaaaggaaagaatgtcagcaggcatgcctccagtaactcaagttttcaactccatccaccactagcctcaagagagttaacaagggtacacccttggtccattccaagcatgctgcttggttcacagctaccattggttggaagtcaagaccaaaatcagtatgtgtttgatcgagcatttgccacccaggtcaatgagcttccaatgccagaagaggatgtccccttttgtcaggattgtagagagcaaggacactatgccctgaattgtccatgggtatataccaaagaagctccttcctttggtttagcagggcaggcatcgctaaaccagcctcctcgcaccaagtcaagcttgcagcctagtgtgcaaagcagagagcccaatgaagagaatccattgaatcccgggaattgctttcctcctagcctttcgtaccacgtggggtcacgtactaagcacgccaaaggcaagaagagtaagaatcagaagagaaaagcgccgatgcgaactgaagaagaagtacgtaagatgactattaccagcaccgaatggcctccagcagggataactattcctagacgtcaaagaggaaataccttccgaggtgcacggcagttgacccagcacctcctaagccatggtggcagagtatctgatagtgaagggtcagatcaagtctcctcggattatgaatatgagtccccccgacgtctcggcgaggaagagatggaattaaaagcatgcacccgttgcggagaaattggacacattgctagcatgtgtctcacactctgccctcattgtgaagaagaccatccaccaggggagtgtcccacccgcaaggtcacatgttttctatgcgaaggtacaaaccatgtgcccaaggattgccaactcagtgtgttgttgaccaagaccgcagaaatccaacgaacaaccctacgattgtctcatcagctagtcagctccaacagcaacctcgacgatatcatccacagcaccaatgctcctcctgctgcacctgactctgcaataaatcatagcaataataccttcagcaccaaccattctctgcactgacagcctcagcaatgaattgtcgtcgatggaagaagttgtttctctccccgacgtgaagtgggtaacttgtatgaggttgactccaaagatatgaactatgcaaagttctggaactgaagccccatcttcaagtgccgcaacccagtcgaagtcagctaaaggttcaaccagggacaagtcaggtgaagagaagattccatctatcttcttgctagcctcctcgaatctcggggacgagattcttctccctccttctctggggctcccctttccctcggcccactccctcctccctctctctcccgggctgcctttcccccccctcttccctcccggcctgctcggcccaggccgctgtcacgtcctgataaattcatcccgaaaataaaaatcatcttctaaaaggaataatagaattaattaaaattcgaaaag

SEQ ID NO: 22877 - DNA, 4467 bp, Oryza sativa
  Clone ID: TF_OsC359_8266
atgacgagggcgacggtgctccggcggtcggcgagcgaaacggaggcgcggacgaggtcgacggcgatgcggcgatgccgagggaggtggcgccgagccgggaggaagaccggagcgacggcggcggcgaaccgaaggtcgacggcgacggcggagagagaggagcacggcgctagcacgattccgacggcgagagcgagcggctttcacattgaattttacttattcttttgcacaattttgaggatgaattttagagtcgatttgggacgcgacattgaagctagtgattggctacatgccatagagaagaagttggatttacttccgtgtactgatcaggagaaggtctcatttgcatcacatcagttgcatggccctgcctctgaatggtgggatcacttccgtcttaacaggactactgctgaacctatcacttggcttgaattcaccgctgctttccggaagacgcatataccatcgggggtagtgtctctcaagaagaaggagttcaggtcgcttacccagggatctcgctctgttacggagtatctgcacgagttcaatcgtcttgctcgttatgctccggaagatgtgcgcaatgatgaagagcgccaggagaagtttttgggaggacttaatgatgagctttcttacccacttatggttggagattaccctgatttccagaaattagtggataaggctattcgtcaggaagacaagtacaatcgcatggagcagaagaaacgtcggattgctcaattcaagacacaacagggaaataatcagaagtcgcgtcttactttaggaccccagtccatgccacagggaggttcttcgtctgttgttcgtccgcaacgtcagttcttcaacaacaatgctggcaacaacatccgtaatcaagctccacgtcctgttgcagctccagcacagcaacaacctgccaagagggagcaaggcagcaagcccgtggtgtgtttcaactgtggagatccaggacattatgctgacaagtgtccgaagccccgacgcgtgaaggttgtccctgcccagagtaactctgctgtaccagcatcaaaggcccgtgtcaatcatgttgctgctgcagaagctcaagatgctccagatgtgattttgggtacgttccttgttaactcagttcctgcaacagtacttttcgattctggtgctacacattcattcttatctatgagttttgcgggaaatcatgggatggaagtagaagatcttagacgtcctttgatggttagtaccccaagtaatcaagcactctctttgcaacgtagcccctcggtcagaatagaaattcaaggagtaccatttctggccaatcttatcttgttagaatccaaagaccttgatgtcatcctagggatggactggttagccagacataaaggtgtgatagactgtgccaacagaaaagtaactctcaacagctatgatggtcgagttgtaaccgttcatgcattgtcttctgagtctttaaggtcaagactgaatcagataactttggaagagattcctatagtccgggagtatcctgatgtgttcccagatgatttaccgggtatgccgcctaaaagggatatagagttcagaatagatttggtacctggaacaactccgatccataagagaccttatcgaatggcagccaatgagttggcagaagttaagaggcaagtagatgatttgctacagaaaggatacatcagaccgagttcatcaccatggggagctccggttatttttgtggaaaagaaagaccatactcagagaatgtgtgtggactatcgtgcactaaacgatgtgactatcaagaataagtatccactacccaggattgatgatttgtttgatcagcttaaaggtgccactgttttctccaagatagatcttcgatcagggtatcatcagttgagaatcaaagaggaagatatacctaagacagcttttaccactaggtatgggttgttcgaatgtactgttatgtcttttggacttaccaatgcccctgctttcttcatgaatttgatgaataaggtgtttatggaatacctagacaagttcgtggtggtctttattgatgatattcttatctactctcaaaccaaagaagagcatgaagaacatcttcgccttgcattggagaagctacgagaacatcaactgtatgctaagtttagcaagtgtgaattttggttgtccgaagtgaaattccttggtcacgtcatctcagccggaggagttgccgtcgatcctagtaacgtggaatccgtaaccaattggaagcaaccaaagacagtttcagagattcgcagtttcctaggccttgcaggatattatcggaggtttatagagaatttttccaagattgctaagcccatgacacgactgcttcagaaagatgtgaagtacaaatggtcggaagaatgtgagcggagttttcaagagttgaaaagtcgcttaatatcagctcctattttgattttgcctgatccaaagaagggtttccaagtgtattgcgatgcatccaaacttgggttaggttgtgttctgatgcaagatgggaaggtggttgcctatgcatctcgtcagttacgtccgcatgagaagaactaccctactcatgatattgagttagctgcagtcgttcatgcattaaagatttggcgtcattatcttttcggtactcgtacagaagtgtacaccgatcacaagagtttaaagtatatctttactcagccggatctgaatatgagacaacggagatggttggaattaattaaggattatgacatgggaattcattatcatccgggaaaggctaatgttgtagcagacgctcttagcagaaaaggttattgcaatgctacagaaggacgacagttgccattggaattatgcaaggaatttgaaagattaaatttgggaattgtcggtagaggtttcgttgcagctttagaagcaaagcccactctaattgatcaagttagagaagcccaaattaatgatcctgatattcaagagatcaagaagaatatgagaagaggaaaagctattggtttcttggaagatgagcacggaactgtatggttgggtgaaagaatctgtgtccccgacaacaaagatctaaaggatgcaattctgaaagaagctcatgatactttatactccattcaccctggtagtaccaagatgtaccaggatctcaaggaaagattttggtgggcaagtatgaagcgtgaaatcgcagaatacgtagcagtatgtgatgtttgtcagagagtcaaggcagaacatcagaaacccgccggtttgttgcaacctttgaagattcctgaatggaaatgggaagaaataggtatggattttatcactggtttacccagaacgtcatcaggccatgactctatttgggtgatagtcgatagacttaccaaagtggctcatttcattccggtaaagacaacctattctggaagtcgcttggcggaattgtatatggcaaggattgtgtgtttgcatggcgtccctaagaagatagtgtctgatcgaggcagtcagtttacttcaaatttttgggagaaacttcaggaagagatgggttctaagttgaactttagtactgcttatcatccgcagacagacggacaaaccgaaagggtgaatcaaattttggaagacatgttgagagcttgtgctctagatttcggtggaagttgggataagaatctaccctatgcagaattttcgtacaacaacagttatcaagctagtctacagatggctccttacgaagcactgtatggtcggaagtgccgcactccgcttttgtgggatcaaacgggagaacgtcaggttttcgggacggatatcctaagggaagcagaagaaaaggtaaagatcattcaagaaagattgcgagtggctcaatctcgtcataagagttatgccgacaatcgccgcagagatttgagttttgaagaaggagattatgtgtatcttcgtgtcacgcctcttcgaggagttcatcgttttcagaccaaaggaaaattggcaccgcgttttgtgggaccttataagattgtcagcagaagaggagaggttgcttatcagttggagttacctcaatccttggcaggagtccataatgtgttccatgtgtcgcaattgaaaaagtgtttaagggtacctaccgaagaagctaatattgaccagatagaagtccaagaggatttgacttatgttgagaaaccaatccgtatactggaaacaaatgagagaagaaccaggaatcgagttatccgtttctgcaaagttcaatggagtaatcactcggaagaagaatcaacttgggaacgagaagatgaattaaagtcagctcatccgcttctgttcgccagttcttccgaatctcgaggacgagattctgtttaa

SEQ ID NO: 22878 - DNA, 4089 bp, Oryza sativa
  Clone ID: TF_OsC359_8286
atgccgcgttacaagcctgagtacctgtttggtgttgagggttttgtccaggagttgcgttcgatgtcctttgtcattggatttgggactgcccctttttatgcccagattcctcatgatcgtcatgaagagaagtgccgagtcaaagtcaccttgaacagtaatagtgaagatatccccttagtgatgtttgaagctggaggaagaaactacatccatgcatgtcaggaggtggcaaggatcgccataggagagctccgtgatcgctacagtgatcaattggccgacactgagtatcgctaccatcctcgtcaaccccagggaagtgaccgtggcagctatcttgagactgaaggaattgagaatgatgctaccacgaagcatttggttgagatgttgtgggctatggatgaaagtcgtgcggagactgtgttagccgctcaagatcgtgaagaccggaatcgtggtaagatttgtaagttagaagacaaggtggatcgtttggagaaggaattagccgcattgaagggagaagcaccgccgcagaaggccaggattcgtcttaccgcaaggaagagagctctatttgtccctcgctatcaactggcgccaaaggttcgtgtggtggagaaagaagttgccccagctcaagcggatcctccggtcatcatcataagtagtgatgaagaagaagaatccaagcgcaacaattccaagattgagtgggtagcaactcaagatgataaagacgagccttcaatcgacctccgatgcttggaagaactagagtgactttttccccggtttctcttcttgtgccctgtccatgccaatggtgaacactcgcagcaacgggaatggtcccaacaaccccaataacaacaatggagagaatcccattctggcccaagttcttgctcaacagacacagcttatgaacatgatgatgcagcaatttcagaatcaggaaaaccaaggaaataaccatgcacctccccagaacaagttagcagaatttcttcgtgtgaggccacctgttttctctagtaccactaatcctgttgaagctagtgattggctgcatgccatagagaagaagttggatttacttcagtgcactgatcaggagaaggtctcatttgcatcacatcagttgcatggccctgcctctgaatggtgggatcacttccgccttaacaggactactgctgaacctatcatttggcttgaattcaccgctgctttccggaagacgcatataccatcaggagtagtgtctctcaagaagaaggagttcaggtcgcttacccagggatctcgctctgttacggagtatctgcacgagttcaatcgtcttgctcgttatctccggaagatgtgcgcaatgatgaagagcgccaggagagtttttgggaggacttaatgatgagctttcttacccactcatggttggagattatcctgatttccagaaattagtggataaggctattcgtcaggaggacaagtacaatcgcatggagcagaagaaacgtcggattgctcaattcaagacacgacagggaaataatcagaagccgcatcttactttaggaccccagcccatgccacagggaggttcttcgtctgttgttcgtccgcagcgtcagttcttcaacaacaatgctggcaacaacatccgtaatcaaggtccacgtcctgttgcagctccagcacagcaacaacctgtcaagagggagcaaggcagcaagcccgtggtgtgtttcaactgtggagatccaggacattatgctgacaagtgtccgaagccccgacgcgtgaaggttgtccctgcccagaataactctgctgtaccagcatccaaggctcgtgtaaatcatgtcgctgctgcagaagctcaagatgctccagatgtgattttgggtacgttccttgttaactcagttcctgcaacagtacttttcgattctggtgctacacattcattcttatctatgagttttgtgggaaatcatgggatggaagtagaagatcttagacgtcctttgatggttagtaccccaagtaatcaagcactctctttgcaacgtagcccctctgtcagaatagaaattcaaggagtaccatttctggccaatcttatcttgttagaatccaaagaccttgatgtcatcctagggatggactggttagccagacataaaggtgtgatagactgtgccaacaaaaaagtaactctcaccagctatgatggtcgagttgtaactgttcatgcattgtcatctgagtctttaaggtcaagactgaaccagataactttggaagagattcctatagtccgggagtatcctgatgtgttcccagatgatttacctggtatgccgcctaaaagggatatagagttcagaatagatttggtacctggaacaactccgatccataagagaccttatcgaatggcagccaatgagttggcagaagttaagaggcaagtagatgatttgctacagaaaggatacatcagaccgagttcatcaccatggggagctccggttatttttgtggaaaagaaagatcatactcagagaatgtgtgtggactatcgtgcactaaacgatgtgactatcaagaataagtatccactacccaggattgatgatttgtttgatcagcttaaaggtgccactgttttctccaagatagatcttcgatcagggtatcatcagttgagaatcaaagaggaagatatacctaagacagcttttaccactaggtatgggttgttcgaatgtactgttatgtcttttggacttaccaatgcccctgctttcttcatgaacttgatgaataaggtgtttatggaatacttagacaagttcgtggtggtctttattgatgatattcttatctactctcgaaccaaagaagagcatgaggaacatcttcgccttgcattggagaagctacgagaacatcaactgtatgctaagtttagcaagtgtgaattttggttgtccgaagtgaaatttcttggtcacaaagatgtgaagtacaagtggtcggaagaatgtgaacagagttttcaagaattgaaaagtcgcttaatatcagctcctattttgattttgcctgatccaaagaagggtttccaagtgtattgtgatgcatccaaacttgggttaggttgtgttctgatgcaagatgggaaggtggttgcctatgcctctcgacagttacgtccgcatgagaagaactaccctactcatgatattgagttagctgcagtcgttcatgcattgaagatttggcgtcattatcttttcggtactcgtacagaagtgtacaccgatcacaagagtttaaagtatatctttactcagccggatctgaacatgagacaacggagatggttggaattaattaaggattatgacatgggaattcattatcatccggggaaggctaatgttgtagcagacgctcttagcagaaaaggctattgcaatgctacagaaggacgacagttgccattggaattatgcaaggaatttgaaagattaaatttgggaattgtcggtagaggtttcgttgctgtcggtgatatgggaccgggagtattgcgcccggaggcttgaggcagatggaatcgcccacgtggcctggcaccttcggggacgtcgggcccgagggtgaggtgtccgccctcctcctgatttccccgagggggggtcgggttgctcctgccccggccccgagggccgaggtggcgactggcggtctgacgcacgcctcgccccatcccgtcaggatgagagcctccaagcactcgtccctagccggagccggcgtgttagctcctggaggtggcacgttggacccggtcagatatatgtcaggcttcatcctaaccattacaggcaagatattgtatgaagaagggcgaacatgcagattgttaaactgacacgtggtggacaagaatgaccgatttgtgaccggtctgacactggtcatgtcgccagcagacagccatgttcccacgtcgcgcctgcctccggcggaagtggaggtaggtatgggccgtcccat

SEQ ID NO: 22879 - DNA, 6375 bp, Oryza sativa
  Clone ID: TF_OsC359_8350
tttttttttttttttttttttttttttaaagatctacaacatctcaaatattcttaactcatactcatgtgaatctagttcccaggatatacactagattcacactttcatcttaagcatggacatacatagcagacacatttaagaagaaaaggacttaaagacttacatcaacttgaagaaaagaacttaaagacttaaagtcaacttaatagttacataggccgaccggccaaatagatatataagagaacaagggaagcttatctacccaaaccacaagcacaccaactaggggtttacccccattaagttccaagtcctagaagaagcagtcgattacccgcatcactcaaagactaaatctaaaaccttgaatcaggaaaagtgtcagcatctaaatcacttcttcaccgtttaagcaatcatcgagattctagacaaggctagggatgtctgcagagccacagcgacggcgaagctccatggcggcatggcacaactccaggaatgacgtcggctgctcgatctgtaaggggagtcacggagagaatggaatcgatgatggaagcgattgaatggagttggagaacacgatgtcgatctccaagatcgctgcgccattggatgggttttcttggggtatcttgaagaggacgtcgaggtgatcctggtggcgcaagggttcggcttggggtggttcggttcggtcggaacgacgatgagaacccgatgacggcgtccagtgcgcgctccagagcatcgtcggcgagctctgcgttcccgtggatcatgtcaccatgtgcctcaataccaccacggtacctcggaaaggagttgtgacaataccccttatacaacacaatccactgcagcgcaccttcctggatcataatcacccccttataacaaggcatggactccccagcgacccccgtgggcttatctccgccacttctcagtctggtgccccgcaatgaaccacgggcggacggccttgatgacgtcagcggtgacgtcaccgacggcagcggcggctcggcggggcggacggctcgagcggcgcacgctcgccggcgaacggcggcgcgaggacacaaatggaaagcaccaagacaaagcgggcggcacggcgaactcaccggcgaccaaaacggcgacggaagatcaacggacggcgacggcgacgaggaggaaacggcgaagcttttcgggtcgacgacggcgatgacgctccggcggtcttcggcggcggcgaaggggcggacgaggacggcgacgacttggcgatcacgacggtggccttcccgagcgacggcgacggattcttctgaccacttgtacttcacatctttctgaagcaatcgtgtcatgggcttagcaatcttggaaaaattctctataaacctccggtaatatcctgcgaggcctaggaaactgcgaatctctgaaactgtctttggttgtttccaattggttacggattccacattactaggatcgacggcaactcctcctgctgagatgacgtgaccaaggaatttcacttcagacaaccaaaattcacacttgctaaacttagcatacagttgatgttctcgtagcttctccaatgcaaggcgaagatgttcttcatgctcttctttggttcgagagtagataagaatgtcatcaataaagaccaccacaaacttatctaggtattccataaacaccttattcatcaagttcatgtagaaagcaggggcattggtaagtccaaaagacataacagtacattcgaacaacccatacctagtggtaaaagctgtcttagggatatcttcctctttgattcttaactggtgataccctgagcgaagatctatcttggagaaaacggtggcacctttaagctgatcaaacaaatcatcaattctgggtagcgggtacttattcttgatagtcacatcgtttagtgcacgatagtccacacacatcctttgggtatggtctttcttttccacaaatataaccggagctccccatggtgatgaactcggtctgatgtatcctttctgaagcaaatcatctacttgcctcttaacttctgccaactcattggcaggtaaatcatctgggaacacatcagaatactcccggaccaaaatcacatctggagcatcttgagcctctgcagctgcaacatgattgacacgggcctttgatactggtgcggtagagttgctctgagcaggaacaaccttcacgcgacggggcttcggacacttgtcagcataatgtcctgggtctccacagttgaaacacaccacgggcttgctaccttgctccctcttagcaggctgttgctgtgttggagctacaacagggcgtggaacttgattgcggatgttgttgccagcattgttgttgaagaactgacgctgcggacgaacaaccgacgaagaacctcccggtggcatggactgaggtcctaaagtaagacgcggcttctgattattcccctgttgcgtcttgaattgagcaatccggcgtttcttctgctccatgcgattgtatttgtcctcctgatgaatagccttatccaccaacttctggaaatcagaataatctccagtcatgagtgggtaagaaagctcatcattaagtccttccaagaacttctcctgacgctcttcatcattgtgcacatcttccggagcataacgagctagacgattgaactcgtgcagatactccgtaacagagcgagatccctgggtaagcgacctgaactccttcttcttgagagacaccactcccgatggtatatgcgtcttccggaaagcagtggtgaattcaagccaagtgataggttcagcagtagtcctattcaggcggaagtgatcccaccattcagaggcagggccatgcaactgatgtgatgcaaatgagaccttctcctgatcagtgcattgaagcaaatccaacttcttctctatggcatgcagccaatcaccagtttcgacaggattagtggtactagagaaaacaggcggcctcacacgaagaaattctgctaacttgttctggggagttgcatggttatttccttggttctgctgattctgaagttgttgcatcatcatgtgcataagctgagtctgttgagcaagaacttgagcaagagtggggttctctccattgttgttattggggttgttgggaccattcccgttgtctagttcttccgagcatcggaggtcgattgaaggttcgttcggctcttcttcatcatcctgagttgctacccactcaatcttggaatgagtgtgcttgggttcttcttcatcatcactcacgttgacgaccggaggatctgctggggcaacttctttctccaccacacggacctttggcgccaattgataacgagggacaaataaagctctcttccttgcggtaagacgaatcctggccttctgcggcggtgcttctcccttcaacgcagctagttccttctccaaacgatccaccttgtcttctagcttacaaatcttaccacgattccaatcttcacgatcttgagccgctaacacagtttccgcacgactttcatccatagcccacagcatctcaaccaaatgtcttgtggtaacatcattctcaattccttcagtctcaaggtaactgctacggtcactcccctgtggttgacgaggatggtaacgatactcagtgtcggccaactgatcactgtagcgatcacggagctctcctatggcgatccttgccacctcctgacatgcatggatgtagtttcttcctccagcttcgaacatcaccgatggaatatcttcactattactgttcaaggtgactttgactcggcacctctcttcatgacgatcatgacgaatctgggcataaaaaggggcagtcccaaatccaatgacaaaggacattgtacgcaactcctggacaaaaccctcaacaccaaacaagtactcaggcttgtagcgcggcatggcggacggctttgatgacgtcagcggtgacgtcaccgacggcggcggcggctcggcggggcggacggctcgggcggcgcacgctcgccggcgaacggcggcgcgaggacacaaacggaaagcaccaagacaaagcgggcggcacggcgaactcaccggcgaccaaaacggcgacggaagatcaacggacggcgacggcgacgaggaggaaacggcgaagcttttcgggtcgacgacggcgatgacgctccggcggtcttcggcggcggcgaaggggcggacgacgacggtgacgacttggcgatcacgacggtggccttcccgagcgacggcgacggctggaacgacggcggcgcacggctggagcggcggcggcggcggcaaagctagggcacacgacgctagggcgattccgacgacgagaggcgaaggcgagggtggcggcgggtagaggagacaccggggagccttttaaaggggctaggaggcggcggcgaaggcccacggcggccggtgacgagaaggaaacttcgtggcttgaaggaaagaggccgatccgaatcgaactcgattccacgattcaattcatcttctcgttcccaagttgattcttcttccgagtgattactccattgaactttacaaaaatggataactcgattcctggttcttctctcatctgtttccaagatacggattggtttctcaacataggtcagatcctcttggacttctatctgttcaagattagcttcttcggtaggtacccttaaacactttttcaattgcgacacatggaacacattatggactcctgccaaagattgaggtaactccaactgataagcaacctctcctcttctactgacgatcttataaggtcccacaaaacgcggtgccaattttcctttggtgtgaaaacgatgaacccctcgaagaggcgtgacacgaagatacacataatctccttcttcaaaactcaaatctctgcggtgattgtcggcataactcttatgtcgggactgggccactcgcaatctttcttgaatgacctttaccttttcttctgcttccctcaggatatcagtcccgaaaacctgacgttctcccgtttgatcccacaaaagcggagtgcggcacttccgaccatacagtgcttcgtaaggagccatctgaagactagcttgataactgttgttgtacgaaaattctgcataaggtagattcttatcccaacttccaccgaaatctaaagcacaagctctcaacatatcttccaaaatctgattcaccctttcggtttgtccgtctgtctgcggatgataagcagtactaaagttcagcttagaacccatctcttcctgaagcttcttccaaaaatttgaagtaaactgactgcctcgatcagacactatcttcttagggacgccatgcaaacacacaatcctggccatatacaattccgccaaccgacttccagaataagttgtctttaccggaatgaaatgagccactttggtaagtctgtcgactatcacccaaatagagtcatggcctgatgacgttctgggtaaaccagtgataaaatccatacctatttcttcccatttccattcaggaatcttcaaaggctgcaataaaccggtgggtttctgatgttctgccttgacgcgctgacaaacatcacatactgctacgtattctgcgatttcacgcttcatacttgcccaccaaaatcgttccttgagatcctggtacattttggtactaccagggtgaatggagtataaagtatcatgagcttctttcagaattgcatcttttaaatctttgttgtcggggacgcaaattctctcacctaaccatacagttccttgctcatcttccaagaaaccgatagcttttcctcttctcatattcttcttgatctcttgaatatcaggatcattaatttgagcttctctaacttgatcaattagagtgggcttcgtttttaaggctgcaacaaaacctctactgacaattcccaaatttaatctttcaaattcctctgtacgagtaccaaaaagataatgacgccaaatcttcaatgcatgaaccactgcagctaactcaatatcatgagtagggtagttcttctcatgcggatgtaactgacgagatgcataggcaaccaccttcccatcttgcatcagaacacaacctaacccaagtttggatgcatcgcaatacacttggaaacccttctttggatcaggtaaaatcaaaataggagctgatatcaagcgattcttcaactcttgaaaactctgctcacattcttccgaccacttgtacttcacatctttctgaagcagtcgtgtcatgg

SEQ ID NO: 22880 - DNA, 6136 bp, Oryza sativa
  Clone ID: TF_OsC359_8355
ttattgcgtcataattcaattttaaccgatttaagtgttttaatccgatttaatcttcaaaaattcataactaattcatcttagctccgatttagttggttcaagtctctaaatttttctaaaattgagatctacacattaaaaattccgtcgtttccgaagagtccgttttcgccggagaagagtttgaagagttccaaggccagcaaggcaactcctggtttggaatggtacattcctggtttggagatagaactgtgcagccgatgccgcgttacaagcctgagtacctgtttggtgttgagggttttgtccaggagttgcgcacgatgtcctttgtcattggatttgggactgcccctttttatgcccagattcctcatgatcgtcatgaagagaagtgccgagtcagagtcaccttgaacagcaatagtgaagaggtcccctcagtgatgtttgaagctggaggaagaaactacatccatgcatgtcaggaggtggcaaggatcgccataggagagctccgtgatcgctacagtgatcaattggccgacactgagtatcgctaccatcctcgccaacctcagggaagtgaccgtggcagttaccttgagactgaaggaattgagaatgatgctaccacaaggcatttggttgagatgttgtgggctatggatgaaagtcgtgcggagactgtgttagcggctcaagatcgtgaagaccggaatcgtggtaagatttgcaagttagaggacaaggtggatcgtttggagaaggaactcgccgcattgaagggagaagcaccgccgcagaaggccaggattcgtctcaccgcaaggaagagagctctatttgtccctcgctatcaattggcgccaaaggttcgtgtggtggagaaagaagttgccccagctcaagcggatcctccggtcatcatcataagtagtgatgaagaagaagaatccaagcgcacccgttccaagattgagtgggtagcaactcaagatgatgaagacgagccgaacgagcctacaatcgacctccgatgcttggaagaactagacaatgggaatggtcccaacaaccccaataacaacaacaatggagagaatcccactctggcccaagttcttgctcaacagacacagcttatgaacatgatgatgcagcaatttcagaatcagcaaaaccaagggaataatcatgcacctccccaaaacaagttagcagaatttcttcgtgtgaggccgcctgttttctctagtaccactaatcctgttgaagctagtgattggctgcatgccatagagaagaagttggatttacttcagtgtactgatcaggagaaggtctcatttgcatcacatcagttgcatggccctgcctctgaatggtgggatcacttccgccttaacaggactactgctgaacctatcacttggcttgaattcaccgctgctttccggaagacgcatataccatcgggagtagtgtctctcaagaagaaggagttcaggtcgctttcccagggatctcgctctgttacggagtatctgcacgagttcaatcgtcttgctcgttatgctccggaagatgtgcgcaatgatgaagagcgccaggagaagtttttgggaggacttaatgatgagctttcttacccactcatggttggagattatcctgatttccagaaattagtggataaggctattcgtcaggaggacaagtacaatcgcatggagcagaagaaacgtcggattgctcaattcaagacacaacagggaaataatcagaagccgcgtcttactttaggaccccagcccatgccacagggaggttcttcgtctgttgttcgtccgcaacgtcagttcttcaacaacaatgctggcaacaacatccgtaatcaagctccacgtcctgttgcagctccagcacagcaacaacctgccaagagggagcaaggcaacaagcccgtggtgtgtttcaactgtggagatccaggacattatgctgacaagtgtccgaagccccgacgtgtgaaggttgtccctgcccagaataactctgctgtaccagcatccaaggctcgtgtaaatcatgtcgctgctgcagaagctcaagatgctccagatgtgattttgggtacgttccttgttaactcagttcctgcaacagtacttttcgattctggtgctacacattcattcttatctacgagttttgcgggaaatcatgggatggaagtagaagatcttagacgtcctttgatggttagtaccccaagtaatcaagcactctctttgcaacgtagcccctctgtcagaatagaaattcaaggagtaccatttctggccaatcttatcttgttaaaatccaaagaccttgatgtcatcctagggatggactggttagccagacataaaggtgtgatagactgtgccaacagaaaagtaactctcaacagctatgatggtcgagttgtaactgttcatgcattgtcatctgagtctttaaggtcaagactgaaccagataactttggaagagattcctatagtccgggagtatcctgatgtgttcccagatgatttacctggtatgccgcctaaaagggatatagagttcagaatagatttggtacctggaacaactccgatccataagagaccttatcgaatggcagccaatgagttggcagaagttaagaggcaagtagatgatttgctacagaaaggatacatcagaccgagttcatcaccatggggagctccggttatttttgtggaaaagaaagaccatactcagagaatgtgtgtggactatcgtgcactaaacgatgtgactattaagaataagtatccactacccaggattgatgatttgtttgatcaacttaaaggtgccactgttttctccaagatagatcttcgatcagggtatcatcagttgagaatcaaagagtatgggttgtttgaatgtactgttatgtcttttggacttaccaatgcccctgctttcttcatgaacttgatgaataaggtgtttatggaatacctagacaagttcgtggtggtctttattgatgatattcttatctactctcgaaccaaagaagagcatgaagaacatcttcgccttgcattggagaagctacgagaacatcaactgtatgctaagtttagcaagtgtgaattttggttgtctgaagtgaaattccttggtcacgtcatctcagccggaggagttgccgtcgatcctagtaacgtggaatccgtaaccaattggaagcaaccaaagacagtttcagagattcgcagtttcctaggccttgcaggatattatcggaggtttatagagaatttttccaagattgctaagcccatgacacgactgcttcagaaagatgtgaagtacaagtggtcggaagaatgtgaacagagttttcaagaattgaaaagtcgcttaatatcagctcctattttgattttgcctgatccaaagaagggttttcaagtgcattgtgatgcatccaaacttgggttaggttgtgttctgatgcaagatgggaaggtggttgcctatgcctctcgacagttacgtccgcatgagaagaactaccctactcatgatattgagttagctgcagtcgttcatgcattgaagatttggcatcattatcttttcggtactcgtacagaagaatttgaaagattaaatttgggaattgtcgatagaggtttcgttgcagccttagaagcgaaccccactctaattgatcaagttagagaagcccaaattaatgatcctgatattcaagagatcaagaagaatatgagaagaggaaaagctattggtttcttggaggatgagcacggaactgtatggttgggtgagagaatctgtgtccccgacaacaaagatttaaaggatgcaattctgaaagaagctcatgatactttatactccattcaccctggtagtactaagatgtaccaggatcttaaggaaagattttggtgggcaagtatgaagcgtgaaatcgcagaatacgtagcagtatgtgatgtttgtcagcgagtcaaggcagaacatcaaaaacccgccggtttgttgcaacctttgaagattcctgaatggaaatgggaagaaattggtatggattttattactggtttacccagaacgtcatcaggccatgactctatttgggtgatagtcgacagacttaccaaagtggctcatttcattccggtaaagacaacttattccggaagtcgcttagcggaattgtatatggcaaggattgtgtgtttgcatggcgtccctaagaagatagtgtctgatcgaggcagtcagtttacttcaaatttttggaagaaacttcaggaagagatgggttctaagctgaactttagtactgcttatcatccgcagacagacggacaaaccgaaagggtgaatcaaattttggaagacatgttgagagcttgtgctctagatttcggtggaagttgggataagaatctaccctatgcagaattttcgtacaacaacagttatcaagctagtcttcagatggctccttacgaagcactgtatggtcggaagtgtcgcactccgcttttgtgggatcaaacgggagaacgtcaggttttcggaacggatatcctaagggaagcagaagaaaaggtaaagatcattcaagaaagattgcgtgtggctcagtctcgtcataagagttatgccgacaatcgccgcagagatttgagttttgaagagggagattatgtgtatcttcgtgtcacgcctctacgaggagttcatcgttttcataccaagggaaaattggcaccgcgttttgtgggaccttataagattgtcagtagaagaggagaggttgcttatcagttggagttacctcaatctttggcaggagtacataatgtgttccatgtgtcgcaattgaaaaagtgtttaagggtacctaccgaagaagctaatattgagcagatagaagtccaagaggatttgacttatgttgagaaaccaatccgtatcctggaaacaagtgagagaagaaccaggaatcgagttatccgtttttgcaaagtccagtggagtaatcactcggaagaagaatcaacttgggaacgagaagatgaattgaactttggaatcgagttcgattcggatcggttttccctctctccaagccgcgagtttccttcgccgttgccgtcgccgtgggccttcgccgccgcctccgagcccctttaaaaggacccccggtgtctcctctacccgtcgccaccttcgccttcgcctctcgtcgtcggaaaagccctagcgccccgtgcgccgccgtcgtttcagccgtcgccgtcgctcgggaagaccgccgtcgtgctcgccaagtcgtcgccgtcctcgtccgccccttcgccgtcgccggagatcaccggagcagcttcgccgccgtcgacccgaagagcttcgccgcttcctcctcgtcgccgtcgccgtccgttggtcttccgccgccgtttaggtcaccgtgccgccgttcgccggcgagcgtgcgccgttcgagccgtcttctccgccgagccgccgccgctgtcggtgacgtcaccgctgacgtcatcggggtcgtccgccattccgtcgtttccggagagtccgttttcgcggaagaagagtttgaagagttccaaggccagcaaggcaagtcaccagaatatgtggctctatgtgatgtatgtcagcgggtcaaggcagaacatcagaaaccagccggtctgttacaaccgttgaagattccagagtggaagtgggaagaaataggaatggattttataaccggtctacccagaacgtcggcaggacatgattctatttgggtagtggttgatagattgactaaagtcgctcactttataccggttaaaacaacctatacgggacataagcttgcagagttatacatggccagagtgacagatggtcagacggaaagagtaaaccaaattttagaagatatgttgagagcctgtgttctagattttggtggaagttgggataagaatttgccgtacgcggaattctcatataacaacagttatcaagctagtttgcaa

SEQ ID NO: 22881 - DNA, 5577 bp, Oryza sativa
  Clone ID: TF_OsC359_8381
aaagatgactttattttcctatgggttataatttgactagcatggaccttatatattggattggttcagctagatgttatttatagttgcttagccgtgcttagaaacattagctcattaatgggataaatcatgcttcactatcacttatggatatttaatggaagctcacgatggtcaatcgtgattggttaattaattaaattgtcaactaaaacttgataatggtgggttgtgagcacatggttttgatggtcgtgctcatgacaattaaggaccggttcacgagtttcggttgtgaaacattaaccgtgccaaccacaagccagcatgggcaacgggctttatcttttgtatagcatggttcattgcggggcaccagactgagaagtggcggagataagcccacgggggtcgctggggagtccatgccttgtttataagggggtgattatgatccaggaaggtgcgctgcagtggattgtgttatgcgaggggtattgtcacaactccttttcgagataccgtggtggtattgaggcacatggtgacatgatgtggggttgtgtcttgtgggtacagtggtacacctctgatcagagtaaaactattcgaatagccgtgcccgcggttatggctcctggtttggaatggtatattcctggtttgaagatagaactgtgcagccgggatggttgttcagaatggttgggcctatgcaacaggattcctcatgatcgtcatgaagagaagtgccgagtcaaagtcactttgaacagtaatagtgaagatatcccctcagtgatgttcgaagctggaggaagaaactacatccatgcatgtcaggaggtagcaaggatcgccataggcgagctccgcgatcgctacagtgatcagttggccgacactgagtatcgctaccattctcgtcaaccccagggaagtgaccgtggcagctaccttgagactgagggaattgagaatgatgctaccacaaggcatttggttgagatgctgtgggctatggatgaaacccgtgcagagactgtgttagcagctcaagatcgtgaagatcggaatcgaggtaagatttgcaagctagaggacaaagtggatcgattggagaaggaactagccgcgttgaagggagaagcaccaccgcagaaggccaggatttgtcttaccgcaaggaagagagctctatttgtccctcgctatcaattggcaccaaaggtccgtgtggtggaaaaagaagttaccccagccctagcggatcctccggtcgtcaacatggtggtcactcgcagcaacgggaatggccccaacaacaacaataacaacaacaacaatggagagaatcccacacttgcccaagtcctggctcaacaggcacagcttatgaacatgatgatgcagcaactccagaaccagcagaaccagggaaataaccatgcacctccccagaacaagttagcagaatttcttcgtgtgaggccgcctactttctctagtaccactaatcctgttgaagctggcgattggctgcatgccatagagaagaagttggatttgcttcagtgcactgatcaggagaaggtctcatttgcatcacaccagttgcatggccctgcctctgaatggtgggatcacttccgcctgaataggactactgctgaacctatcacttggcttgagttcaccgctgctttccggaagatgcatataccatcgggagtggtgtctctcaagaagaaggaatttaggtcgctcacccagggatcccgctctgttacggagtatctacacgagttcaatcgtctggctcgttatgctccggaagatgtgcgcactgatgaagagcaccaggagaagttcttggaaggacttaatgatgagctttcttacccactcatgactggggattatcatgatttccagaagttagtggataaggctattcgtcaggaggacaagtacaatcgcatggagcagaagaaacgccggattgctcaattcaagacacaacaggggaataatcagaggccgcatcttactttaggaccccagtccatgccacagggaggttattcgtctgttgttcgtccgcagcgtcagttcttcaacaacaatgctggcaacaacatccgcaatcaagttccacgtcctgttgcagcctcgacacagcaacaacctgccaagagggagcaaggcagcaagcccgtggtgtgtttcaactgtggagacccaggacattacgctgacaagtgtccgaagccccgatgcgtgaaggttgtccctgcccagagcaactctaccgtatcagcatcaaaggcccgtgtcaatcatgttgctgctgcagaagctcaaggtgctccagatgtgattttgggtacgtttcttgttaactcagttcctgcaacagtgcttttcgattctggtgctacacattcattcttatctatgagttttgcgggaaatcatgggatggaagtagaagatcttagatgtcctttgatggttagtaccccaagtaatcaagcactctctttgcaacgtagcccctctgtcagaatagaaattcaaggagtaccatttctggccaatcttatcttgttagagtccaaagaccttgatgttatcctagggatggactggttagccaggcataagggtgtgatagactgtgctaacagaaaagtaactctcaccagcaatgatggtcgagttgtaactgttcatgcattgtcttctgagtctttaaggtcaatactgaaccaaataactttggaagagattcctatagtccgggagtatcccgatgtgttctcagatgatttacctggtatgccgcctaaaagggatatagagttcagaatagatttggtaccaggaacaactccgatccataagagaccttatcgaatggcagccaacgagttggcagaagtcaagaggcaagtggacgatttgcttcagaaaggaattgatgatttgtttgatcagcttaaaggtgccactgttttctccaagatagatcttcgatcagggtatcatcagttgagaatcaaagaggaagatatacctaagacagcttttaccactaggtatgggttgttcgaatgtactgttatgtcttttggacttaccaatgcccctgctttcttcatgaacttgatgaataaggtgtttatggaatacctagacaagttcgtggtagtctttattgatgatattcttatctactcccgaaccaaagaagagcatgaagaacaccttcgccttgcattggagaagctacgagagcatcaactgtatgctaagtttagcaagtgtgaattttggttgtctgaagtgaagttccttggtcacgtcatctcagcaggaggagttgccgtcgatcctagtaatgtagaatccgtaaccaactggaaacaaccaaagaccgtttcagagattcgcagtttcctaggcctcgcaggatattatcggaggtttatagagaatttttccaagattgctaagcccatgacacggctgcttcagaaagatgtgaagtacaagtggtcagaagaatgtgagcagagttttcaagagttgaagaatcgcttaatatcagctcctattttgatcttacctgatccaaagaagggattccaagtgtattgcgatgcatccaaacttgggttaggttgtgttctgatgcaagatgggaaggtggttgcctatgcatctcgtcagttacgtccgcatgagaagaactaccctactcatgatcttgaattagctgcagtagttcgtgcgttgaagatttggcgtcattatcttttcggtactcgtacagaggtgtataccgatcacaagagtttaaagtatatctttactcagccggatctgaacatgagacaaaggagatggttggaattaattaaggattatgacatgggaattcattaccacccaggaaaggttaatgttgtagcagacgctcttaggaggaaaggctattgcaatgctacggaaggacgacagttgccattggaattatgcaaggaatttgaaagattaaatttgggaattgtcagtagaggtttcgttgcagccttagaagcgaagcccactctaattgatcaaattagagaagcccaaattaatgatcctgatattcaagaaatcaaaaagaatatgagaagaggaagagctatcggtttcttggaggatgagcaaggaacagtatggttgggcgagagaatctgtgttcctgacaacaaagatttaaaagatgcaattctgaaagaagctcatgatactttatattccattcaccctggtagtaccaaaatgtaccaggatctcaaggaaagattttggtgggcaagtatgaagcgtgaaatcgcagagtacgtagcagtatgtgatgtttgtcagcgagtcaaggcagaacatcagaaacctgccggtttgttgcagcctttgaagattcctgaatggaaatgggaggaaatcggtatggatttcatcactggtctacccagaacgtcatcaggccatgactctatttgggtgatagtcgacagacttaccaaagtggctcatttcatcccagtaaagacaacctattccggaagtcggttggcggaattgtatatggcaaggattgtgtgtttgcatggcgtccctaagaaaatagtgtctaatcgaggcagtcagtttacctcaaatttttggaagaagcttcaggaagagatgggttctaagctgaactttagtactgcttatcatccgcagacagacggacaaaccgaaagggtgaatcagattttggaagacatgttgagagcttgtgctttagacttcggtggaagttgggataagaatctaccttatgcggaattctcgtacaacaacagttatcaagctagtcttcagatggctccgtacgaagcactgtatggtcgaaagtgccgcactccacttttgtgggatcaaacgggagaacgtcaggttttcgggacggatatcctgagggaagcagaagaaaaggtgaaaatcattcaagaaagattgcgtgtggcccagtctcgtcataagagttatgccgacaatcgccgcagagatttgagtttcgacgaaagagattatgtgtatcttcgtgtcacgcctcttcgaggagttcatcgttttcacaccaaaggaaaattggcaccgcgttttgtgggaccttataagattgtcagtagaagaggagaggttgcttattagttggagttacctcaatctttggcaggagtccataatgtgttccatgtgtcgcaattgaagaagtgtttaagggtacctaccgaagaagctaatcttgaacagatagaagtccaagaggatctgacctatgttgagaaaccaatccgtatcttggaaatagatgagagaagaaccagaaatcgagttatccgtttttgtaaagtccaatggagtaatcactcggaagaagaatcaacttgggaacgagaagatgaattgaagtcagctcatccgcatctgttcaccagttcttccgaatctcgaggacgagattctgtt

SEQ ID NO: 22882 - DNA, 5850 bp, Oryza sativa
  Clone ID: TF_OsC1528_2087
atggccaagaaccccaaggcggccaagaaccgccgccccacgacgcggagacctcgcgccgccgccgccgccgccaccgcctccgcctccgcggacatcgaggacctggcgccgccgtccgggtgcagggcagcagtggggctcaccacggccgccgcggcggtgcgcgcggagctgctgcggtggtacgacgccaaccggcgcgacctgccatggcggcgcgccgcggagccggcggggagcgggagcgggagcgggcgcggcgaggagaagagggcgtacgcggtgtgggtgtcggaggtgatgctgcagcatacgcgggtgcccgtggtggtcgactactactcccggtggatggcccgctggcccaccgtggacagcctcgccgctgccacgcaggaggaggtgaacgagatgtgggcggggctcgggtattaccggagggctcgatttcttctcgagggagcaaagcaaattgttgaaaaaggcgagttccctcgcacagcatcagcactccgtgaagttcgtggcattggggattacacagcaggagccattgcttccatagccttcaatgaggttgtccctgttgtggatggaaatgtccgagttatcagcaggctttacgctattcctgataacccaaaagaatcctcaactgtgaagagattctgcactcggcgtcagcaggacgccgagctcgccgcagcagaagagcgcaggcgagcaacggctcggaccggtgcagcagcagcgagggcggccagactggcggcagcggagttggcagcagccagggcggaggcggaggcggaggcggcggaagatgcggcacgtgcggcggaggtagaggttgagaccttgcgcagcagcatcaacggctccatcgccggcgacatcaccgccgacagggagcttgaggagctggcaagaggaagggcacgggagcgagcagagcggtgggtagcagcccacctccatggcggcggcggcggcccaagggaccgcgcgcccgccgacgggaacccaaacgggcgcgagcgtgctggcggtagcccggagcccgcacgcggccctcgcaggcagcacggctctctctcccctgaccggcgccatggtcaccacggcgtccagacggtggtcagggactttggtcccggcggtgggtggcctaccctcaccaaaaccaactacatcgagtgggccgcggtgatgagggtgaggctccaggtgcggcatgtgggaggcagtccgttctcgctttcccagaagcggactgccaaggaggcctgggacgccatcgctgcggcacgcatcggcagcgaccgcgcccgcaagtccacactgcaggcactccgcaaggagtgggagaacctggccttcaagccaggtgaggatgttgatgactttgctctccgtctcaacactctcttgcagaaaatggtgcagtacggtgacgacacctacgacgaggagagagctgtcgagaagctcttccgctgcgtccctgagaagtacaggcagatcgctcgctcgatcgaatctctgttggacctctccacgatgtcgatcgaggaggcgttaggtcgcctcaaggtcgtcgatggtgatgagccacagcctctctcggggcccatcaccatcggcgggaagctccatctcactcgggagcagtgggaggcctctcaaggtgacaggaggaagggggagtcatcttccccgacaggcggccgtaagccgcgcaaggcgcggggaggtgtccagctacgaggtgcccagggcgttgccaccggcaaccacaagccggcacgagacgacgcctgccgcaactgtggcaagcttggccattgggccaaagactgtcaacagccacgacgtggccaggcccacgtcgcacgggtggaggaagagccggctctgctcctggctcacgcaagcatcgagctacctccagcggcaccggccgcagcggctttcctccaccttgatgagccgaaggtactcgtctccctctgcaacggctccagcaacgacaaggctgatgggtggtacctcgacaccggcgccacccatcacatgaccggccgacgggagttcttcaccgagttcgactctagcgtccgaggctccgtcaagttcggggacgcctccggcgtggagatcaagggtgttggctccgtcaccttcaccgccaagtccggtgagcacaggctgctcactggagtctactacatccccgcattgaggaattctatcatcagcgtgggacagctggatgagaacggctcacgcgtgatggtcgaggacggactcatgaggatttgggatcgccgtcgtcgccttcttgccaaggtaaccagaggcactaatcgactctacatcctcagcgcgcaggtcgcacaaccagtttgcctcgccgctcgtcgggacgacgaggcgtggcagtggcacgagcgcttcgggcacctccacttcgaggccctgaagcagctcagtgccaaggagatggtgcgaggcatgccgtgccttgaccacgtggagcagctctgcgacgtctgcgtggtgacgaagcagcggcggctcccctttccccagcagacgagcttccgagccaaaaagcggctcgagctcgtgcacgaggacttgtgtggcccagtgacaccggccacaccaggaggacgacgttacttcctactgctcgtcgacgacctctcccgctacatgtgggtgatggtcctcggcagcaagggagaggctgcggacgccatcaggcatgcgcaggctgctgcagaggcagagtgcggccgcaagctgcgcgtgctgcgcaccgacaacggcggcgaattcacagcggctgaattcgcgtcgtactgcgctgatgagggcattcagcgccactacaccacgccgtacagcccgcagcagaacggcgtcgtcgagcggcgcaaccagacggttgtggggatggctcgggccctcctcaagcagagggggatgccggccatcttctggggggaggtggtggtgacggccgcctacatcctcaaccgctcgcctaccaaggccctcgatggcaggacaccgtacgaggcttggcatgggcgcaagccggcggtctcccacctgcgggtcttcggctgcctcgcgttcgctaaggagcttggccacatcggcaagctcgacgacaggagcaccccaggggtgttcatcggctatgcagagggctcgaaggcctaccgcatcctcgacccggagacacagcgtgtgcgcactgcgcgtgacgttgtgttcgatgaagggcgagggtgggtatgggacaaggcggtggacgatggttcgattccgacgtacgacgacttcaccgtcgagtacgtccacttcgagggagctgggggagtaggcagctcttcttcacctagcgtgtctaccctagcccctgaatctccaccgactccaacaccaacacaccctcgggccacgacttcgactacgacgagctcttcgtcgacaccaccccagccagtgactccacatgctccagtaccaacagccactcctccaagcacgtctactctgacgccagctcgtgttgagcgtagcccggtggagttcgctactccgctctcccacgacggggagcgcatcgacgcgtacaacgacggcgagcagctacggtaccgtacgatggaggatcttctcggcgaccagccggtgccgggactggtgcctcgcgacctagaggcgcagttgcaccttgcgtgcgacgacggtgagcctcggtcttttgcagaggccgagaaacacgcggcatggcgtgccgcgatgcagtcggagatggacgcggttcaggagaaccgcacctgggagcttgctgacctccctcgtggtcaccgcgcgatcacccttaagtgggtgttcaagctaaagagggatgaagccggagccatcatcaagcacaaggctcgcttggtggcacgcggtttcgtgcagcaggaggggatcgactacgacgatgccttcgctcccgtggcacggatggagtccgtgcgactccttcttgcgctggctgctcaggaaggctggggcgtccatcacatggacgtcaagtcggcgtttctaaacggcgacttgaaggaggaggtctacgtgcaccagccgccgggatttgtgatccccggcaaggagggcaaggtgctacgcctgcacaaggccctctacggcttgcagcaggcaccgagggcgtggaatgccaagttggattccacgctcaaggggatgggcttcgagcaaagcccgcacgaggcggccatctaccggcggggcaatggaggaaatgccttgctggtgggtgtctacgtcgacgacttagtgatcaccggcaccaaggatgcggaggtcgcggcgttcaaggaggagatgaaggccaccttccagatgagtgatcaggggcctctctccttctacctggggatcgaagtgcacaaggacaactccgggatcacgcttcgacagaccgcctacgccaagcgcgtcgttgagctggctgggctcaccgattgcaacccagctctcactccgatggaggagagactgaagctgagccgcgacagcacggcggaggaggtggatgctacacagtaccgacgtcttgtggggagccttcgctacctcacccacacacggccggacttggccttctccgtcggctacgtcagtcggttcatgcagcgaccgacgacggagcaccagcaggctgtgaagaggatcatccgctacgttgcggggactctcgaccacggtctctactacccaaggtgtcctggcaaggcacacttcgtcgggtacagcgacagcgaccacgccggcgacatcgacaccagcaagagcacgagcgggattctcttcttcctcggcaagtgcctcgttagctggcagtcggtcaagcagcaggtggtggccctgtccagctgcgaggccgagtacatggcggcctccgccgcttcgacccaggcgctctggcttgctcgactgcttagtgatctcctcggcagagacactggaacggtggagctcagggtggatagcaagtctgctctagccctggcaaaaaaccccgttttcacgaacggagcaagcacatccgggcagctcactggtgaactggtcgacccttctaggccaggagacttcaaccaagcaattatggaactaggagcaacactctgcagaaagacgaagcccggttgctcccagtgccctgtctccaaccactgccaagcactcacactttccaaccaaagtgcttccgtaaaagttacagactacccacgagtggttccaaaagccaagccacggtctgattttgctgctgtttgtgttgttcaaatcaatgataatctctttctattgatcaagaggccagaagagggcctgctcgctgggctctgggagttcccatctgttcttgtgagcgaagagaagactgatgtgctgaataggagaaaagagatggacaaatatttgaagcaggtccttagcatagatgttaaaaggagatccagtgtgatcctcagggaagatgttggccaacatgttcacattttctctcacattcgcctgacgatgtttgttgagctgatgattttgaacctcaaagatgatggggataaattatgcatggagggacaagataacagcaaactgagattcattgacgaaaatgcagtcgactcaataggattgatatcagggatccggaaggtgtacaacatggtcaaggccttcaaggagaagaggccgaaagagcagagccaagtaccatcgaggaaaaggagtagacggctgaagtag

SEQ ID NO: 22883 - DNA, 1781 bp, Oryza sativa
  Clone ID: TF_OsC359_7442
atggaggatgaaccgctgccggctgccctcgtcgccttctcgccggccccggtcgtcgtcgtcgtcgtcgtcctctcgtcgtcctcatcgtcgtggcgttcgtccctccgtcaagccgttctcgttcgtcgtcctcgcttcgtcaagtgctgcagccccgtcgtcgtcttcgtcctcggctccgcgtcgtcaagcctcgtgccggccgcgtctcgccttcgtccaaggatcgccgccgaagccgtcccctcgccgttcgtctccgttgtgcccgtctgtctccaccgcgcccgttcgtcgttgtcgttcccacgcctcgtcgcgtggtgggcaaatgaaggctacacgagctgcggcccggtagtcgagatgtcatggcacaggggctggtgtcctgctgctagggggctcaatcctgcctgcctgtcccgggggttccggccgtaggtggggttgggtcggtactcttgtttatggctaggatgggttgggaactatgtcacgtcttccgtccgtataccgtggtgatgtttaacagagaaaaaggaaagaatgtcagagggtatgcctccagtaactcaagttttcaactcaatccaccactggcctcaagagagttaaccagggcacacccttggtccattccaagcatgctgcttagttcccagctaccattggttggaagtcaagaccaaaatcagtatgtgtttgatcgagcatttgccacccagatcaatgagcttccaatgccagaagagcatgtccccttttgtcatgattgtagagaataaggacactatgccttgaattgtccatgggtatatgccaaagaagccccttcctttggtttaacagggcagacatcgctaaaccagcctcctcgcaccaagtcaagcttgcagcctagtgtgcaaagtagagagcccaatggagagaatccattgaatcccgggaattgctttcctcctagcctttcgtaccacgtggggtcacgtactaagcaagccaaaggcaagaagagtaagaatcagaagagaaaagcaccgatgcgaactgaagaagaagtacgtaagatgactattaccagcaccgaatggcctccagcagggataactattcctagacgtcaaagaggaaataccttccgaggtgcacgacagttgacccagcacctcctaagccatggtggcagagtatctgatagtgaagggtcagatcaagtctcctcggatgttgaagatgagtctccccgacatctcggcgaggaagagatggaatcaaaggcatgcacccgttgtggagaaattggacacattgctagcaggtgtctcacactctgccctcattgtgaagaagaccatccaccaggtgaatgtcccacccgcaaggtcacatgttttctgtgcgaaggtaccaaccatgtgcccaaggattgccaactcagtgtgttgttgaccaagaccgcagaaatccaacgaacaaccctacgattgtctcatcagctagtcagctccaacagcaacctcgacgatatcatccacagcaccaatgctcctcctgctgcacctgactctgcagtaaatcatagcaataataccttcaacaccaaccattctctgcaccgacggcctcagcaaagaattgtcgtcgatggaagaagttgtgtctctccccgacctactccaggccgagcgaagggcaatcaatctcaggagtgcgataccaagcagaagaccgttatctgcttcaaatagcaatcagaaggaagcttctcctgtgaa

SEQ ID NO: 22884 - DNA, 2391 bp, Oryza sativa; identical to SEQ ID NO: 15269
  Clone ID: TF_OsC1528_1824

SEQ ID NO: 22885 - DNA, 4702 bp, Oryza sativa
  Clone ID: TF_OsC1528_2130
cgacgtacgcgtcgaatggtccgaaaaattggctcctcacccttgcgcagatgcagcctccttttgcagttttgttttgctgcaaattcggattcgtttttgttttggaaacgttccgaaaaatccggtgcgtgcaaacggcgtggagtccggataagttacgcgcgacttatccggttcggttacgcgcagtagagattgtgcgggcgccctgatcaagcgacctttctctatataaaccgacctgccgtcttcacgcaacacaagcgaaatcaatctagggtttgcctcctactctgtactgcgccgtcgctcgtagactactccatccctctcgccggcgtgcaccggcgatcgggagagcaggtctccggaacctctgccttcgacgtcctgcaccaggagaaggcagcaataaggtttttgggaagcgcttcgcgcgactgctccctgtttgttcacgacggctcgccttcctcttcgctcgcgtgtttcgtgccttcgtagacacctgcgaaaagtttcgaccaagcagccggtctttccgtcacctcggtacgtgttcaatatgttgcgcatatttgatctgttcatgttatactgtgtagtttacatgtatagatctaatgatgcgttcatgctagttttcatctgtaatgttatgatttatttatggaatagattaaatcattatacgtctataatctcaacaatccaaaaaccttattataggcactgtgattttactatggctggttttgccgatgcactgaggccggataaattcaccggtgtgcattttaagagatggcagatcagggtcactctgtggctgacagctatgaaatgcttctgggtgagtactggcaaacctgaaggagttcttactgctgaacagcagaagcaattcgaggaagccactactctctttgtgggatgcattcttagcattcttggcgatcgtctggtcgaggtgtatatgcatatgaccgacgctaaggagttgtgggatgcactgaatactaaattcggtgctactgatgctagcaatgatctgtatatcatggagcagtttcatgactacaaaatggctgacaaccgttctgtagtcgaacaggctcatgagatacaaaccatggctaaggaactcgaactccttaagtgtgtcttacccgacaaatttgtggccgggtgcattattgcaaaactacctccatcttggaggagtttcggtactgcactcaaacacaagagacaggaatactccgttgaggggttgattgcgtctcttgatgttgaggagaaagctcggaaaaaagatgccgcgtctaagggcgatggtgggcagtccagtgccaatgttgtgcacaaggcccagaacaagagcaaggggaaatacaaagctcagcagaccaccaacttcaagaagcagaagaagaacaacaacaatcctaatcaggatgagaggacttgctttgtgtgtggccaagttggtcatctggttaggaagtgtccacagcgcaaggggatgaaggcacctgcagggcagacttctaagtctgctaatgtgaccattggcaacactggagatggaagcgggtatggtaatttacctactgttttttcagttaatcaatctactaattggtgggttgatactggggccaatgtacatgtttgtgctgacatctcattgttttcttcttatcaggtcgcacggggttccaccgtcctaatggggaatgggtcacatgcttctgttcatggtgttggcacggtagatctgaagtttacttcgggaaagatcgtgcagctgaagaacgtgcagcatgtcccttctatcgacaggaatcttgttagtggctcccgtctgactagagacggatttaagttggtttttgagtctaataaagtagtcgtgtctaaacatggatattttattggtaaaggttatgagtgcgaaggcctgttccgcttttccctttctgatttctgcaataagtctgtgaaccatatttgtggcagtgtggatgatgaggctaatgtttggcattcacgtttatgtcatattaattttggcttgatgtctcggctttccagcatgtgtttaattcctaagttttccattgtcaaaggttctaagtgccatagttgtgtgcaatcgaagcaacctcgcaagcctcacaaggctgccgaggagagaaacttggcaccactagaactcctacattcagatctttgtgaaatgaatggggtgttgacgaagggtggaaaacgatatttcatgacattgattgatgatgctactagattttgctatgtgtacttgttgaaaacgaaagacgaggctctagactattttaaaatttataaggcagaagttgaaaatcaacttgacagaaagataaaaaggcttaggtctgatcgtggtggagagtttttctcgaacgagtttgacttattctgtgaggaacatggcatcatacatgagaggacgcctccctattctcccgagtctaatgggattgctgaaaggaagaaccgcacactgactgacttggtgaatgccatgttggacaccgcgggactgcctaaggcatggtggggggaggcattgttgacctcaaatcatgtgttaaacagagttcctaacagaaataaggacaaaacaccatatgagatatggattggtagaaaaccatcactttcttatttgcgcacatgggggtgcttggcgaaagtcaatgtaccaataacgaagaagcgcaaacttggacctaagactgtggactgtgtttttctgggatatgctcatcatagcattgcctatagatttttaatagttaaatccgaggtaccggacatgcatgttggtacaattatggagtctcgtgatgctaccttctttgagagctttttcccaatgaaggatacacatagtggttcgaaccaaccctctgaaataattcccagttcaatcacaccaccagaacaaactgaacatacacatgaacttgtctctgaggaggatgtcagtgaagctcctcgaaggagtaagagacaaaggacggctaagtcttttggtgatgatttcactgtgtacctcgtggatgacactcctaagtcaatttcagaagcatatgcatctcctgatgcagactactggaaggaggctgtccgtagtgaaatggattccattatcgctaacgggacttgggaggtgacagagcgaccctatgggtgtaaacctgtggggtgcaagtgggtgttcaagaagaagcttaggcctgacggtactattgaaaagtacaaggctcggcttgttgctaagggctatactcagaaagaaggcgaagatttctttgacacttactcacctgttgctagattgaccacaattcgtgtgctactttccctagcagcctcacatggtcttctcgttcatcaaatggacgttaagacagcttttcttaatggagagctggatgaggagatctatatagatcaacctgatgggtttgtagttgaaggtcaagaaggcaaagtgtgcaaattgttgaagtctttgtatggtctgaaacaagctcctaagcaatggcatgagaaatttgacaaaacattgatatctgcaggctttgcagtcaatgaggcagataaatgtgtgtactatcgccatggtgggggtgagggagttattttgtgcttgtatgttgacgacatactgatatttgggacaaaccttgaggtgataaatgaggttaaatcattcttgtctcaaaattttgatatgaaagatttgggagtagctgatgttatcttaaacattaagctaattagaggtgagaatgggattacactcttgcagtcccattatgtggagaagatcttgaatcgctttggctacattgatagtaagccttctccaacaccttatgatcctagcttgttgcttcgcaagaacaagagaattgctaggaatcaactggaatactcccaaatcattggctcgttgatgtacctggctagtgcaactaggcctgatatctcctttgctggttatagtgattctaactggatctctgatgtggatgagatcaaagccactagtggatatgttttcacactgggtggtggtgctgtttcatggaagtcttgcaaacagacaattttgacgaggtcaaccatggaagcagagctaacggcactggatactgctactgttgaggcagaatggctgcgtgatctattaatggatctgcctgttgttgaaaaaccggtgccggctatccttatgaactgtgacaatcaaacgacatgtgaaaagacgattgaagtctgtcaggaaattaagaaactccggagttataacgttggattacatccaaacagcgagaaacctggcagatcccttcacgaagggactatcacgaaatgtgatagacaatgcatcgaaggagatgggtttgagacccattggcggcaaaggggaagggtggcggcggcgactggtggtgccaaaggggagggtggcatggttgagggagtagatcaaggaaggatatatcggcagcggccaaggggtgcaatggcgcggcttggtgccagtggcgcttggtggcaacagccgcggggagggggtggcttagtccagatcctacggcctcaaagacggcaacaacggatggcacagggaagccagtag

SEQ ID NO: 22886 - DNA, 2656 bp, Oryza sativa
  Clone ID: TF_OsC359_5530
atggatgaagtcgggggtcgatggacattctccagggcaaatgaaggctacacgagctgcggcccggtagtcgagatgtcatggcacagggttggtgccctgctgctaggggctcagtcctgcctgcctgtcccggaggttccggccgtaggtgggattgggtcggtactcttgtgtatggctaggatgggttggaaactatgtcacgtcttccgtctgtataccgtggtgatggataacactggtaacaaaggctatgggaatgatggatccgatgactcaagaacccaagccaatgggaatgagagaagcatcaacgaaacctcaccagagctaatccaagttgtggttaaccaaaccaacatgttggcaacagcctttcaactattacagaattggaacaacccagcaggggcaaccaacgttcaagtacctacagtccagcaacagtgcaagttatcagaatttctcaaaactgggcctccaacctttgccatggccgtcgatcctatggaagccagtgattggttgcgcacaatcgagaagaagctagggttgattcagtgcaccgaccaggagcgggttggcttcgcaactcatcagttggttggaccggcttcagagtggtgggatagctacgaagcatcacggccagaaggacataccatcacctggaacgagttttcatctgtattcaagagatcacatgttcccgcaggaatgatcacactaagaaaacgagagtttcgctacctgaagcaaggagatttgaccgtcacagagtacctgcacgagttctatcgtttggctcactatgcaccagaagatgtggaaacggatgaagacaaacaagagaagtttctccaggggttaaaagatgagcttgcagtgcaactacttctagaggattatgaaaattttgagaaacttgtggacaaagccatgcaactcgaaagtgagcataatcggatgacgaactgcaagagaaggattgtcaacatcccagtatttccatgtggaaaccaaggacagcgcactgagccacttcagatcaccggatcttctgttgcgcatcaagagtttccgccccaagaagatggacacaatgcagacaacaacattagcaatactaatgatgatgatgttaccaccaacaaccatgcttcttgccccaatagtgaccactcgaatcaagcgtgcaatgtcaacatcattcaccaagatgtcgacgatagtatcaatgatggcacccaaaatgacaaccctagtaattgggactctgggaaagactccgatggtgatagcaactatggtaccactgatgccaatgttagcaaggagttccagccaccaattccaactccaagtcagaatgactgtccccagacggatagctcagcaaagaagacgttgatttgctacaattgcaaagaaccagggcattactcgagggactgcctgcaaccaaggcaaagtcgacctccacattaccgccaatttacacgaagcagacatcccaatcgtattgtggtcactggagcaaacgccgtacccgtttcactgaaaggcagcaagccaaaggacctcatcgtccccagaagcgtccgcaatccacattaaagaataccacctgttagaggttgacgccaaagatatgaattatgagaagttctggaactgaagtcccatcttcaagtgccacaatccagtcgaagtcagctagaggtgcaaccagggaaaagtcaggtgaagagaagattccatctgcaacacccgcgcgcgcgccgctgacgggcgggcccgcccgccaccctcgctgacgggtggggcccacccgtcatcgcctacctcgcgccgcgcccgccgctcgcccgtgccctagcgccgccgccgccgccgaatccgccgcatcccgccgtccccgcgcgccataaagagggggaaatcactccccgtgattccctctcccttttcccccgtttttccctctctctctctccctcggattcgtttggaatctctcccgaaatcctcgccggcgtcattgatggagccgagatcgccgcgccggtttccctctcatccggccgccctctctccctcccgacgctatataatcgttccccgtgcctccctcctccgtttccgccgctcgccgctctctctctccgtcggaatcgtgcccgcgccgtcgtcctctctctccgccgtcgccgacgagctccggttcgccgccgccgtcgctccggacttcctcccctctcggcgtcgcctccttcggcttcgccgcgtcctcgtcgaccccgtccgctcctccgtttcgcccgccgaccgccggaacatcgccgtcctcgtcgatccgaaccgcgccgccgccttcctccgctccggtcgtcgtttccgccgtcctcgtcgtcccggggtgagccgaggaccgccgcttcgcttccctcttccctcccctctctcggccgccgctccgccgcgccgttggtcgccggcggcgaccatcggggcgcgggtgcgccgccttccgtcggccgtgccggcgaggccgccttcgggcgcgccccgcggctgccaggtgggcccggccgtcagccgcccgcgcccgcgggtgcggctgacgcgtgggacccacggcgccggccggcgt

SEQ ID NO: 22887 - DNA, 3177 bp, Oryza sativa
  Clone ID: TF_OsC359_5531
atggataatactggtaacaaaggctatgggaatgatggatccgatgactcaagaacccaagccaatgggaatgagagaagcatcaacgaaacctcaccagagctaatccaagttgtggttaaccaaaccaacatgttggcaacagcctttcaactattacagaattggaacaacccagcaggggcaaccaacgttcaagtgcctacagtccagcaacagtgcaagttatcagaatttctcaaaactgagcctccaacctttgccattgccgtcgatcctatggaagccagtgattggttgcgcacaatcgagaagaagctagggttgattcagtgcaccgaccaggagcgggttggcttcgcaactcatcagctggttggaccggcttcagagtggtgggatagctacgaggcatcacggccagaaggacataccatcacctggaacgagttttcctctgtattcaggagatcacatgttcccgcgggaatgatcacactaagaaaacgagagtttcgctacctgaagcaaggggatttgaccgtcacagagtacctgcacgagttctatcgtttggctcactatgcaccagaagatgtggaaacggatgaagacaaacaagagaagtttctccaggggttaaaagatgaacttgcagtgcaactactcctagaggattatgaagattttgagaaacttgtggacaaagccatgcaactcgaaagtgagcataatcgaatgacgaactgcaagagaaggattgtcaacatcccagtaattccatgtggtaaccaaaggcagcgcactgagccacttcagatcaccgggtcttctgttgtgcatcaagagttcctgctccaagaagacggacgcgatgcagacaacaacactagcaatactaatgatgatgataccaccaacaaccatggttcttgccccattagtgaccactcgaataaagcgtgcaatgtcagtagcattcaccaagatgtcaatgatagtatcaatgttggaacccagaatgacaaccttagcaattttgacactgagaaagactccaatggtgatagcaactatggtaccactgatgccaatgttagcaaggatttccaaccaccgattccaactccaagtcagaatgatcgtcctcagacggatagctcagcaaagaagacgttgatttgctacaattgcaaagaaccagggcattactcgagggactgcctgcaaccaaggcaaaatcgacctccacattaccgccaatttacaagaatcagacatcccaatcgtattgtggtcactggagcaaacaccgtacccgtttcactgaaaggcagcaagccaaaggacctcatcgtccccagaagcgtccgcaatccacgacatgaagtgggtaacttgtatgaggttgactccaaagatatgaactatgcaaagttctggaactgaatccccatcttcaagtgccgcaacccagtcgaagtcagctaaaggttcaaccagggataagtcaggtgaagagaagattccatctgcaccccgcgcgcgcgcgccgctgacaggcgggcccgcccgccactctcgctgacgggtgggacccacctgtcatctccctccccgcgccgcgcccgccgccgcccgtgccctagcgccgccgccgccgccgaatccgccgcttcccgccttccccgcgcgccataaagaggggcgaattactccccgcgtttccctctcccgattccccctcttttccctctctctctccctcggattcgtccgatttgaatcccgcaatcatcgccggcgtcttcaatggcggccgagatctccgcgcgcgattccttcctccccggccgccttctctcccttccgacgctataaaatcgtccctcgtgcttcgctcttccgtttccgccgctcgccgctcgctctcgccgtcggtttcgtgcccgcgccgtgctcctctctctccgccgtcgccgccgagctccgtttcgccgccgtcgtcgctccggtcctcctcccgactcggcgccacctccatcggcttcgccgagtggttgccgaccccgtccgccgctccgcttcgcccgccgaccgccggagcaccgtcgtcatcgtcatcccgaaccgcgccgccgctttcctccgctccggccgccgttctcgtcgtcgtcgttgtcccggggtgagccgaagaccgccgttcgctttcccccttccctccgctctctcgggcgccgctccaccgcgccgatggtcgccggcggtgaccatcggggcgcgggcgcgccgctcccgtcggccgtgccggcgaggccgccttcgggcgcgccctcgcggctgccaggtgggcccggccgtcagccgcccgcgcccgcgggtgcggctgacgcgcgggacccacggcgccgaccgccgccagccgcgtgcgcccggtccaccgtggaccgagcggctgacgcgtgggcccccacccccgtggacccgatgccgcgctacaagcctgagtacttgtttggtgttgaggggtttgtccaggagttgcgtacgatgtcctttgtcataggatttgggactgcccctttttatgcccagattcctcatgatcgtcacgaagaaaagtgccgagtcaaagtcaccctaaacagtaatagtgaagatatcccctcagtgatgttcgaagctggaggaagaaactacattcatgcatgtcaggaggtggcaaggatcgccataggagagctccgtgatcgctacagtgatcagttggccgacactgagtatcgctaccatccttgccaaccccagggaagtgaccgtggcagttaccttgagactgagggaattgagaatgatgctaccacaaggcatttggttgagatgctgtgggctatggatgaaacccgtgcggagattgtgttagcagctcaagatcgtgaagaccggaatcgtggtaagatttgcaagctagaggacaaagtggattgtttggagaaggaactagccgcattgaagggagaagcaccaccgcagaaggccaggattcgtcttaccgcaaggaagagagctctatttgtccctcgctaccaattggcgccaaaagtccgtgtggtggagaaagaagttaccccagccctagcggatcctccggtcatcaacataagtgatgattaa

SEQ ID NO: 22888 - DNA, 1648 bp, Oryza sativa
  Clone ID: TF_OsC359_5621
atggataatactggtaacaaaggctatgggaatgatggatccgatgactcaagaacccaagccaatgggaatgagagaagcaccaacgaaacctcaccagagctaatccaagttgtggttaaccaaaccaacatgttggcaacagcctttcaactattacagaattggaacaacccagcaggggcaaccaacgttcaagtgcctacagtccagcaacagtgcaagttatcagaatttctcaaaactgagcctccaacctttgccattgccgtcgatcctatggaagccagtgattggttgcgcacaatcgagaagaagctagggttgattcagtgcaccgaccaggagcgggttggcttcgcaactcatcagctggttggaccggcttcagagtggtgggatagctacgaggcatcacggccagaaggacataccatcacctggaacgagttttcctctgtattcaggagatcacatgttcccgcgggaatgatcacactaagaaaacgagagtttcgctacctgaagcaaggagatttgaccgtcacagagtacctgcacgagttctatcgtttggctcgctatgcaccagaagatgtggaaacggatgaagacaaacaagagaagtttctccaggggttaaaagatgaacttgcagtgcaactactcctagaggattatgaagattttgagaaacttgtggacaaagccatgcaactcgaaagtgagcataatcggatgacgaactgcaagagaaggattgtcaacatcccagtaattccatgtggtaaccaaagacagcgcactgagccacttcagatcaccggatcttctgttgtgcatcaagagttcctgccccaagaagacggacgcaatgcagacaacaacactagcaatactaatgatgatgataccaccaacaaccatggttcttgccccattagtgaccactcggataaagcgtgcaatgtcagtagcattcaccaagatgtcaacgatagtatcaatgttggaacccagaatgacaaccttagcaattttgacactgagaaagactccaatggtgatagcaattgtggtaccggtgatgccaatgttagcaaggatttccaaccaccaattccaactccaagtcggaatgatcgtccccagatggatagctcagcaaagaagacgttgatttgctacaattgcaaagaaccagggcattactcgagggactgcctgcaaccaaggcaaaatcgacctccacattaccgccaatttacacgaatcagacatcccaatcgtattgtggtcactggagcaaacgccgtacccgtttcaccgaagggcagcaagccaaaggacctcatcgtccccagaagcgtccgcaatccacattaaagaataccacctgttagaggttgactccgaagatatgaatcatgagaagttcggaaacggaagcatcactgaactaccgcaacctagtctgagtcagccaaaaggtgcaccctggtccaagtcaggtgaagagaagattccatccgcaacaggaggtcaagccaagcagttccgagtggtaaagttttgctggaagttcgtcaagacgcaacggaagaagtcagacaagaagagaagaccgcccaacctatcctcttgctag

SEQ ID NO: 22889 - DNA, 1350 bp, Oryza sativa; identical to SEQ ID NO: 15280
  Clone ID: TF_OsC359_5989

SEQ ID NO: 22890 - DNA, 1509 bp, Oryza sativa; identical to SEQ ID NO: 15285
  Clone ID: TF_OsC359_6507

SEQ ID NO: 22891 - DNA, 1617 bp, Oryza sativa; identical to SEQ ID NO: 15289
  Clone ID: TF_OsC359_6591

SEQ ID NO: 22892 - DNA, 2661 bp, Oryza sativa
  Clone ID: TF_OsC359_7474
ccccgccggaatcgagctcgcgctgtcgctctctctctccgcaatcgccgccgagctccggtccgctgccgtcgtcgccccggaccaccttccccctcggcgccgcctccttcggcttcgccgcatcctcgccgacctcgtccacccctccgtttcgctcgccgaccgccggagcaccgccgaccccgtccacccgagccgcgccgccgccttcctccgctccggtcgccgtttccgtcgtcgccgtcgacccggggtgagccgtggaccgccgcttcgtttccccccttccttcccctctctcggccgccgctccgccgtgcctatggccgctgccggcgaccataggggcgcgggcgcgccgcctcccgtcggctgtgccggcgtggccgccttcgggcgcgccccgcggctgccgcgtggggcccggccgtcagccgcccgcgccctcgggcgcggctgacgcgtggggcccacggcgccggccggtgcgagcccgtgtgcgcccggtccaccgtggacccacctcggccatataaggaccggtcttcgggcctctgttgcaaagcactaccgtacttccacatgtctagtgggacaaatgaaggctacacgagctgcggcccggtagtcgagatgtcatggcacagggccggtgtcctgctgctaggggctcagtcctgcctacctgtcccgggggttccggccgtacgtgggattgggtcgatgtacacctctgatcagagtaaatctattcgaatagccgagccctcggatatgggcaagcctagcaatgtacccaagtcagtgtttcaattcttaaaatttgctcaacaactaaaatgtggaatggttggcctgggttggcttgggacgagctgggacccagggtcgggttgccagttcggtctgaatcatcgtaggccttgggttaaggcaggcctgaagcgcctttgtaataatatggataatactggtaacaaaggctatgggaatgatggatccgatgactcaagaacccaagccaatgggaatgagagaagcaccaacgaaacctcaccagagctaatccaagttgtggttaaccaaaccaacatgttggcaacagcctttcaactattacagaattggagcagcccagcaggggcaaccaacgttcaagtgcctacagtccagcaacagtgcaagttatcagaatttctcaaaactgagcctccaatctttgccattgccgtcgatcctatggaagccagtgattggttgcgcacaatcgagaagaagctagggttgattcagtgcaccgaccaggagcgggttggcttcgcaactcatcagctggttggaccggcttcagagtggtgggatagctacgaggcatcacggccagaaggacataccatcacctggaacgagttttcctctgtattcaggagatcacatgttcccgcaggaatgatcacactaagaaaacgagaatttcgctacctgaagcaaggagatttgaccgtcacagagtacctgcacgagttctatcgtttggctcgctatgcaccagaagatgtggaaacggatgaagacaaacaagagaagtttctccaggggttaaaagatgagcttgcagtgcaactactcctagaggattatgaagattttgagaaacttgtggacaaagccatgcaactcgaaagtgagcataatcggatgacgaactgcaagagaaggattgtcaacatcccagtaattccatgtggtaaccaaagacagcgcactgagccacttcagatcaccggatcttctgttgtgcatcaagagttcctgccccaagaagacggacgcaatgcagacaacaacactagcaatactaatgatgatgataccaccaacaaccatggttcttgccccattagtgaccactcgaataaagcgtgcaatgtcagtagcattcaccaagatgtcaacgatagtatcaatgttggaacccagaatgacaaccttagcaattttgacactgagaaagactccaatggtgatagcaactatggtaccactgatgccaatgttagcaaggatttccaaccaccaattccaactccaagtcagaacgatcgtcctcagacggatagctcagcaaagaagacgttgatttgctacaattgcaaagaaccagggcattactcgagggactgcctgcaaccaaggcaaaatcgacctccacattaccgccaatttacacgaagcagacattccaattgtattgtggtcactggagcaaacgccgtacccgcaaagagtgaaatcttcaactcggtatcagatgctacacggagtgaaaagtgcaagcaccggttaccaggcaatgccatgacttgggaagatgatccaatgggaaagaacacatcaagtggtaacttgtctgaggttgactccgaagatatgaatcatgagaagttctggaacggaagcatcactgaactaccgcaacctagtctgagtcagccaaaaggtgcaccctggtccaagttaggtgaagagaagattccatccgcaacaggaggtcaagccaagcagttccgagtggtaaagttttgctggaagtttgtcaagacgcaacggaagaagtcagacaagaagagaagaccgcccaacctatcttcttgctag

SEQ ID NO: 22893 - DNA, 1520 bp, Oryza sativa; identical to SEQ ID NO: 15274
  Clone ID: TF_OsC359_8210

SEQ ID NO: 22894 - DNA, 795 bp, Oryza sativa; identical to SEQ ID NO: 15292
  Clone ID: TF_OsC1713_4581

SEQ ID NO: 22895 - DNA, 4635 bp, Oryza sativa
  Clone ID: TF_OsC1713_3911
ctaatcttgatgtgcctgctccaaacccatcttcttccggagttcaagaaaccgaactcgtccaacaggcttagtcagtatatctgcaagctgatcttctgttcgcacatactccacagcgatttgcttcttctccacacactccctgataaaatgaaatcgagtgtcaatgtgcttacttcgatcatggagtaccggattcttgcagagattgattgctgatttgttatcaactttcatcacagtttggccagggtcctctccaagtaattctgccaatagcctattgagccaaatcccttgacaagcaccagtagtagcagcaatatactcagcttcacatgacgacaaagctaccaccttttgtttctgagattgccagctgatcaaactgtctcccagcatatacagtacacctgtggtgctcttcctatcatccaaatccccagccatatcactgtcactgaacccaatcaatctgagttcacccttttcccttctcccaaaccagcagccaacatcaagagtacctgcaatgtatctcagaatatgcttcactgctgcccaatgttcagaagttggtttctccataaatctgctcacatacccgacagagtaagcaagatctggccttgtgttcaccaaatacctgagacttcccacagtgcttctatacatggttgaatcaactccttcccctccactctccctcttcagtttcaacctagcttccatgggaacttgagtagaattgcagccttccattcctgtcttttctaggatttttgctgcataagcagtttgtgacagaaacactccatcatccttttggacaacctccattcccagatagtaactcagcagacctaagtcactcatgcgaaatttcttcttcatctcctcatacactgcactctcagtttcagacttgatgaaattcagagaaatcaaagtgttgtgcagttttgcattccatgctcggggagcctgctttagcccatacaaagctttcttgagcctcaacacctggccttcttttcctttctcaataaaaccaggtggctgcacaacataaacttcctcttccaaatcaccattcaggaaagcagacttcacatccatgtgatgaatctcccatcctttgtttgcagctactgcaatcaggagcctcacagtttccattctagccactggggcaaacacttcctcaaaatcaattccttgttgttgcacatatccctttgctaccaaccttgctttgtgtttcaccacaactcctgatggatcctttttcaccttatagacccactttaacccaattgctttatgtccaacagggagctcagcaaagctccaagtctgattgtcttcaatggactttagctcctcttgcattgcctgcctccaacacaactgttgttcagcttctgcaagactcattggttcctcacttgccagcaagcattggtcgctataatcaaaatcaaggacaggttcagtagcagataggatatcctgcactcggcgatacctgatagggccttcatttgtccctggcgtgacagagtttggtggtgagcaaaactccacccccgccggcacttccggtggtgagggcggagtggccgtcgacgccgggtacgtgcctccctgcacaggcgtgctagcctgttcgcccaagtcggcaacaacagagtccacgggattcacaaagaaatccaccgtgaattcctcctcttcagtcgcctctgtctcaggatcacgccacgcccatgtcgccgcctcgtcgaagacgacatcacgcgacacgcaaacgcgccgcaccacagggtcatacatgcgatacgccttcgacccctgttcatagccaataaacaccatcctcgtacctcgatcgtcgagcttgcgcaggttcggcttcaccgtcttgacgtagcctacacagccaaacaccctcaagtgttcgaccgagggacgtcgcccatgccacgcctcatggggggtcacgccattcaatgccttcgtcggcgaccggttcagcacatacaccgccgccacaaccgcctccccccagaagcacgccggcatcccagccgccttaagcatggagcgcgccgccgcaaccacggtctgattccgccgctccacgactccgttctgctgaggggagtaaggagcagtgagctctcgcctcatcccatgatcggcgcagtagtccatgaactccacggaggtaaattcccccccacgatctgtcctcagagcccgcagctttcgcccggactccagctcaacgccgacttggaactgcttgatcgccgtcgccgcttcatgcttgccggagaggagccgtatccacatatgccggctcatatcgtcgacgaggagcaggaaatacttcctgccgcctggggtcgcaggcgtgatcggcccacacaagtcgccgtgcaccagttcgagcgcctcctgtgctctaaacttggcctcctccgggaacgggagtcgtcgttgcttgcccgcgagacaaccgtcgcacagttgatcagtgtgatcaatgatcggaagcccgcggaccatgttcccctgggccagcctccggagcgactggaagttcaagtgtccgaaacgcgcatgccaccgccatgccgtgtcgccaccgctcgccgccatgcagactggatttgcaatatgcagcttgagtatatagagataatttatgtctcgttttacctttgcgaggagaagaccatcgggatcacggagtgtgcagaccccgccccagatatgtgcgtcgtagccgcgcgcgtcgagacggccgacactgatgatgttcttgcgcagcttcgggatgtagtacaccgtgtcgagagaccgatgatcaccattcttgcatcggaacaccacggtcccgcgcccctggatttcaatcacagagccgtcgccaaacttcaccgtcccaacaacgccggtgtcgagctcggcgaacgccgaacgcactccagtcatgtggttggtggcgccggtatccagaaaccaatctcttgtcacctcctcctcaccaccatcctcgtggtccaggatcaccttcttctccgtgaggtgtacctcctgtccaccaggtgttcgtccgagtgtcgcctcgccagcaagtgacacccctacgacatgtgccataagcaacgtcggttcttcctcggcggcttgcaccaggttcgcctctccccggcgttggcgtcgtggcttgcggcactgccttgcatagtgaccaaattcatcacaattgaagcactttaccctcgagatgtcgcggctgctgttcgcaccagtggccgcctctttgccctttggcgacccaccgggcttgcctcggtgattctgcgtgccgggcgcgccgcggcccttattgccgctgttgccggagccctcctgctcccgctgcttcacacgtgcctgccattgttcctccgtgaggtacaattttccgccatcgcttccctcctcatcatcgctgtaagaatccactgttgacagccgcccaactagctcctccagcgccatggtcttcacatcgagcagctgctcgagagagatagccaccggcttatacttcttgggaacaacgcgcagcagcttcttgttgacgtgttcatcttccatgactccacccatgtcgcgaatgtccgcgacgacggcagtgagccgcatcgcaaactcctccggcgtctccctctccttgaatcgcatcgactcaaattgacgacggaagccctgctccttcgcctcacgcacacggtcaacgccgacccgcatggtcttgatggcgtcccacgccgccttcgccgtgtcatgctttgccagcccgcgcaacatctcacgcggcaccgcctgaaggattgccgagagagccgcccaatcttcacgaaactccgcgtagccgggatcgatcgccgtccacagcccctgcgcctgcaggttgacgcgcatcaggagcgcccaatccgggtagtttgtcctcgagaggactgggaggcgagcggtgtgcgatgcgtctctcccctgagacacgagcggaagtaatgcgccgtctgctccattccccccgccgctgccgcttgcgccgccgcggccgttgccgctccccccgccgccaccgccaccacgacggccaggcggtgtgtatgacatcgccggatcgttccagtactgcaccgacagcgccacgtcgccggcgtacggcagcaggatcttctggatcgactccccgaccctaccgtagtccaggctagcgagagccacgtcggcctcgccgacgacgagctccgcgccttggttgtagcagtggatctcggggaggccggagcaagggttgacggcgatgcggtcggcgagcgggaagaagtggttgagcaacgacggcaagccggcggcgaacgccgcgacgacgtcgtggaagccgccggcggaggtgggtgggttggggtagatgcagatcatggagacctggatggactgcgggaggaggtcgaggttggagacggcgaggacgtgcggccggagggactcgtcggaggcctgcacgagtcgccggctcacgacccgaacttgcagctcgccgccattgatgcaggtggccat

SEQ ID NO: 22896 - DNA, 4281 bp, Oryza sativa
  Clone ID: TF_OsC1713_4549
ctaatcttgatgtgcctgctccaaacccatcttcttccggagttcaagaaaccgaactcgtccaacaggcttagtcagtatatctgcaagctgatcttctgttcgcacatactccacagcgatttgcttcttctccacacactccctgataaaatgaaatcgagtgtcaatgtgcttacttcgatcatggagtaccggattcttgcagagattgattgctgatttgttatcaactttcatcacagtttggccagggtcctctccaagtaattctgccaatagcctattgagccaaatcccttgacaagcaccagtagtagcagcaatatactcagcttcacatgacgacaaagctaccaccttttgtttctgagattgccagctgatcaaactgtctcccagcatatacagtacacctgtggtgctcttcctatcatccaaatccccagccatatcactgtcactgaacccaatcaatctgagttcacccttttcccttctcccaaaccagcagccaacatcaagagtacctgcaatgtatctcagaatatgcttcactgctgcccaatgttcagaagttggtttctccataaatctgctcacatacccgacagagtaagcaagatctggccttgtgttcaccaaatacctgagacttcccacagtgcttctatacatggttgaatcaactccttcccctccactctccctcttcagtttcaacctagcttccatgggaacttgagtagaattgcagccttccattcctgtcttttctaggatttttgctgcataagcagtttgtgacagaaacactccatcatccttttggacaacctccattcccagatagtaactcagcagacctaagtcactcatgcgaaatttcttcttcatctcctccttgaaaaaatcaatttcacttgcttgagccccactgataatcagatcatccacatacactcccactatcaaccttgagcttcctgttcctctcacatacactgcactctcagtttcagacttgatgaaattcagagaaatcaaagtgttgtgcagttttgcattccatgctcggggagcctgctttagcccatacaaagctttcttgagcctcaacacctggccttcttttcctttctcaataaaaccaggtggctgcacaacataaacttcctcttccaaatcaccattcaggaaagcagacttcacatccatgtgatgaatctcccatcctttgtttgcagctactgcaatcaggagcctcacagtttccattctagccactggggcaaacacttcctcaaaatcaattccttgttgttgcacatatccctttgctaccaaccttgctttgtgtttcaccacaactcctgatggatcctttttcaccttatagacccactttaacccaattgctttatgtccaacagggagctcagcaaagctccaagtctgattgtcttcaatggactttagctcctcttgcattgcctgcctccaacacaactgttgttcagcttctgcaagactcattggttcctcacttgccagcaagcattggtcgctataatcaaaatcaaggacaggttcagtagcagataggatatcctgcactcggcgatacctgatagggccttcatttgtccctggcgtgacagagtttggtggtgagcaaaactccacccccgccggcacttccggtggtgagggcggagtggccgtcgacgccgggtacgtgcctccctgcacaggcgtgctagcctgttcgcccaagtcggcaacaacagagtccacgggattcacaaagaaatccaccgtgaattcctcctcttcagtcgcctctgtctcaggatcacgccacgcccatgtcgccgcctcgtcgaagacgacatcacgcgacacgcaaacgcgccgcgccacagggtcatacatgcgatacgccttcgacccctgttcatagccaataaacaccatcctcgtacctcgatcgtcgagcttgcgcaggttcggcttcaccgtcttgacgtagcctacacagccaaacaccctcaagtgttcgaccgagggacgtcgcccatgccacgcctcatggggggtcacgccattcaatgccttcgtcggcgaccggttcagcacatacaccgccgccacaaccgcctccccccagaagcacgccggcatcccagccgccttaagcatggagcgcgccgccgcaaccacggtctgattccgccgctccacgactccgttctgctgaggggagtaaggagcagtgagctctcgcctcatcccatgatcggcgcagtagtccatgaactccacggaggtaaattcccccccacgatctgtcctcagagcccgcagctttcgcccggactccagctcaacgccgacttggaactgcttgatcgccgtcgccgcttcatgcttgccggagaggagccgtatccacatatgccggctcatatcgtcgacgaggagcaggaaatacttcctgccgcctggggtcgcaggcgtgatcggcccacacaagtcgccgtgcaccagttcgagcgcctcctgtgctctaaacttggcctcctccgggaacgggagtcgtcgttgcttgcccgcgagacaaccgtcgcacagttgatcagtgtgatcaatgatcggaagcccgcggaccatgttcccctgggccagcctccggagcgactggaagttcaagtgtccgaaacgcgcatgccaccgccatgccatgtcgccaccgctcgccgccatgcagactggatttgcaatatgcagcttgagtatatagagataatttatgtctcgttttacctttgcgaggagaagaccatcgggatcacggagtgtgcagaccccgccccagatatgtgcgtcgtagccgcgcgcgtcgagacggccgacactgatgatgttcttgcgcagcttcgggatgtagtacaccgtgtcgagagaccgatgatcactattcttgcatcggaacaccacggtcccgcgcccctggatttcaatcacagagccgtcgccaaacttcaccgtcccaacaacgccggtgtcgagctcggcgaacgccgaacgcactccagtcatgtggttggtggcgccggtatccagaaaccaatctcttgtcacctcctcctcaccaccatcctcgtggtccaggatcaccttcttctccgtgaggtgtacctcctgtccaccaggtgttcgtccgagtgtcgcctcgccagcaagtgacacccctacgacatgtgccataagcaacgtcggttcttcctcggcggcttgcaccaggttcgcctctccccggcgttggcgtcgtggcttgcggcactgccttgcatagtgaccaaattcatcacaattgaagcactttaccctcgagatgtcgcggctgctgttcgcaccagtggccgcctctttgccctttggcgacccaccgggcttgcctcggtgattctgcgtgccgggcgcgccgcggcccttattgccgctgttgccggagccctcctgctcccgctgcttcacacgtgcctgccattgttcctccgtgaggtacaattttccgccatcgcttccctcctcatcatcgctgtaagaatccactgttgacagccgcccaactagctcctccagcgccatggtcttcacatcgagcagctgctcgagagagatagccaccggcttatacttcttgggaacaacgcgcagcagcttcttgttgacgtgttcatcttccatgactccacccatgtcgcgaatgtccgcgacgacggcagtgagccgcatcgcaaactcctccggcgtctccctctccttgaatcgcatcgactcaaattgacgacggaagcccttctccttcgcctcacgcacacggtcaacgccgacccgcatggtcttgatggcgtcccacgccgccttcgccgtgtcatgctttgccagcccgcgcaacatctcacgcggcaccgcctgaaggattgccgagagagccgcccgatcttcacgaaactccgcgtagccgggatcgatcgccgtccacagcccctgcgcctgcaggttgacgcgcatcaggagcgcccaatccgggtagtttgtcctcgagaggactgggaggcgagcggtgtgcgatgcgtctctcccctgagacacgagcggaagtaatgcgccgtctgctccattccccccgccgctgccgcttgcgccgccgcggccgttgccgctccccccgccgccaccgccaccacgacggccaggcggtgtgtatgacat

SEQ ID NO: 22897 - DNA, 1101 bp, Oryza sativa
  Clone ID: TF_OsC1713_5093
ctactgctgctttgaaactggtggctgagctgtaacacttgaggacgcaactggcactgcattggctcctgtgacgacaatgttgttgacttgaccttgcggctgctgatgcttcggcttcggacactttcttgcgaagtgacctggctcataacagttgaaacatacttgctgctcccttccactactgttattttcttgagactgatcctgctgaactggctccgatagagtagcttgcttgatgttaacttcattgcttgcattagtctctgaattgatctcaccaccgatgttcaactgttgcgattgttcttgagatgttagacttgattcaccaacttgggatggcttgatatgctgcctctggctactgccctgtgcctcctggaaaacagtcattcttctcttacggttgtccatcctgttcttcttatcttccagttgaattgctttgtcaaccagctcatgaaaatcagcatagtcatgagagatcaacgtaactgacagttcatccttcaggccttccaagatcttctcctgcctttcctcgtcagtacagacatcttctggagcataacgtgctagacggttgaactcataaagaaacttagtcacggtacgatccttttgcttcaatgtcctgaactcacgcttcttcaaagcaacaactcctgcaggtatgtgtgtcttcttcaatccttcggtaaactcttcccaagtgattggttgtccttctgctctgttcatccggaagtgatcccaccattctgaagcatatccatgcaactgatgtgaagcgaacacaactttctcttgatctgtgcactggagcaattccaacttcttctcaatagtgtgtagccaatcacctgcttccactaggttgatagtgctagaaaaggtaggcggcttcacacaaaggaaatcagctaacttgttctggggcggtggagcattgttgttcccttggttgagatggttctgcatctgctgcatcatcatgtttattaactgagtctgttgagccagaacttgagcaagggttgggttctcttcattgttattgtttccacttccactagcatgagtgttcaccat

SEQ ID NO: 22898 - DNA, 1494 bp, Oryza sativa; identical to SEQ ID NO: 15313
  Clone ID: TF_OsC359_6138

SEQ ID NO: 22899 - DNA, 1614 bp, Oryza sativa
  unsure (1)..(1614): unsure at all n locations
  Clone ID: TF_OsC359_7273
atggcacagggctggtgtcctgctgctagggggctcaatcctgcctgcctgtcccgggggttccggccatgtgccttttgtatcatgtttgttcggtgtaccccggcttttcctgggacggggattaatacactagcattcgggaaaagaataagtgaaacaaacaacacatcaacaagaagagttagttcctttaaggtcctgtccctagttctgatgtttaacagagaaaaaggaaagaatgtcagcgggtatgcctccagtaactcaagttttcaactcaatccaccactagcctcaagagagttaacaagggcacacccttggtccattccaagcatgctgcttagttcacagcgaccattggttggaagtcgagaccaaaatcagtatgtgtttgatcgagcatttgccacccaggtcaatgagcttccaatgccagaagagcatgtccccttttgtcatgattgtagagaacaaggacactatgcccttaattgtccatgggtatatgccaaagaagccccttcctttggtttagcagggcagacatcgctaaaccagcctcctcgcaccaagtcaagcttgcagcctagtgtacaaagaagagagcccattagagagaatccattgaatcccggaaaatgctttcctcctagcctttcgtaccacgtggggtcacgtactaagcaagccaaaggcaagaagagtaagaatcagaagagaaaagcaccgatgcgaactgaagaagaagtacgtaagatgactattaccagcaccgaatggcctccagcagggataactattcctagacgtcaaagaggaaataccttccgaggtgcacgacagttgacccagcacctcctaagccatggcggcagagtatctgatagtgaagggtcagatcaagtctcctcggattatgaagatgagtctctccgacatctcggcgaggaagagatggaatcaaaagcatgcccccgttgtggagaaattggacacgttgctagcatgtgtctcacactttgccctcattgtgaggaagaccatccaccaggtggatgtcccacccgcaaggtcacatgttttctatgcgaaggtacaaaccatgtgcccaaggattgccaactcagtgtgttgttgaccaagactgcagaaatccaacgaacaaccctacgattgtctcatcagctagtcagctccaacatcaacatcgacgatatcatccccagcaccaatgctcctcctgctgcacctgactctgcagtaaatcatagcaataataccttcaacaccaaccattctctgcaccgacggcctcagcaaagaattgtcgtcgatggaagaagttgtgtctctccccgacgagctgatctcgacgcatgacatgaagtgggtaacttgtatgaggttgactccaaagatatgaactatgcgaagttctggaactgaagccccatcttcaagtgccgcaacccagtcgaagtcagctatcttcttgctagcctcctcgaatctcggggacgagattcctgtaagggggggtggatttgtcacgtcaggggatcctctagagtcgacggcgtgcacaccaatgagatctcatnngcacgg

SEQ ID NO: 22900 - DNA, 1310 bp, Oryza sativa
  Clone ID: TF_OsC1713_5368
gcacgaggtctcgactcctcgtctcctgggccgccgccgccgccgccgccgagcagaggcgatctccacccgcgagcagcggcgccgtcgccggtgtgctgcttctcccgtcggaccctcgccgttcaagatgcctcgctatgatgaccgtgatcgctacgatgaccgttacggcggcaacacgaggctgtacgtaggtcgtctttcctcgcgcacccggacccgggaccttgaagaccttttcggcagatatgggagagtgcgatatgtggatatgaagcacgagtttgcatttgttgaatttagtgatgctcgggatgctgatgaggcaaggtacaacctggatggtcgggactttgatggaagccgcatgattgttgagtttgctaaaggggttccacgtggccctggaggatcacgtgaatatatgggcagaggaccaccacctggttctggccgctgctttaactgtgggattgatgggcactgggcccgtgactgcaaagctggagactggaaaaacagatgctatcggcgtggaagaagctactcaagatccccatcccctcgtcgtgggaggagccgtggtaggagctacagcaggagccgtagcaggagctacagccgctcccagtctccaaggagggatagccgtaatgaaaggagatcaaggagccctcgtgacagtcggagccctaggggaagcccccgtgacagtcgcagccctagggggagcccccgtgacagtcgcagccctaaggggagccctcgcgacacccagagccctaggggaagccctcgtgatagccgcagccctaggagaagtgcttcaccacccaacgggaggaaccgcagccctacccctaatgccagcaggagtcctgcaccaagggacagcaggagcccaatgagagctgacagccgtagccctgctgaccatgagcgccgtgacatgagtacagctgccaatggccggagcccaagccccagggattatgaagacaatggcaatcatcgggcctcgcctagaggaagcgcatccccttgaatgagaggaagcacatccccttaaatgagatgttaggggatgtatcagtcttaaagtttatgaatcaatttaaacctgttggagattttagtcatatctatgaacctgttgggatttgagtggatctgtatcctatttgttattgacgcctttcataagttgatagaccatgccatctgttggttgtactccgaactgcataaaatggaatttgcggcccaccgcggtttctggaacatatcggctattgcttgctcttgct

SEQ ID NO: 22901 - DNA, 577 bp, Oryza sativa
  Clone ID: TF_OsC81339_1
gcttttattgaatttgagacaaaggaggcttgtgagcgggcattcttcaagatggacaattgtttgattgatgatcgaagaatacatgttgactttagtcaaagtgtttcaaaactgtggggtcagttcagacaaagcaaaagaaatgcaaataaagatggatgcttcaagtgtggcgcccctgatcacatagccaaagactgtgaccagggcactgagcagaaaaacaaaggcccaagttatgtcctgaaagatgaaaacactcagcgtggtggaaataaccgtcgaagctatgatcttgtctttgatgaagatggtgaaaattatactgatcagcaagatcctggaagtactggccgaagaaagattcaaagaacagatgatcgcaaatcagggctgccacctcggggtgaccatgacaggattagccggagaggaactcacagtgatgagaatggtagagaaggtggtaaagaaggtgatagggaccgagggattcgtaagcacgaggactaccaccgttacaataaatctggtgaacggagctctagtagatacgatgatcgtggctacagca

SEQ ID NO: 22902 - DNA, 5638 bp, Oryza sativa
  Clone ID: TF_OsC11275_1
atggagggagtaccagctgctggagccaatgcttccagctcgccccaaccccgcccccggcgtcaccaccagcgccaccagcttccacgcctccactgccgccacgagagccgaaccacgcagacctaagccagagagatcgcgagagggagcctccgctccttcgcttagcggcggcggagaccatggcgagctccggggaggaagggcgggtggtggtggacctccgctcggcggcggagtcggcgggcggcggcggcgacgaggaaggcccacgccggcgccgctcgcacgagatcgagtccctttgcatgcgctgcggcgactacggcaccacgaggcttctgacgacgatggttccccgctaccgcgaggtggttatgatggcttgcgagtacccgcagagcggtgagaagaacaatgaggtgcaccttgcttgagagctccagccgaacggagattgtgaatcgattggagatctcgcgcgagctcaacgagatactgtaccgtcagcttgggaaatatgagtccgcaactattaagattccataattgaactgtgagttcccttcatacgctagccatggatccctttcaacatggcaagggagtattatgtggatctctcgacactcaccagcgaggatatcactgagcgtgtcaaggaggacatggacacatcgtctgctgacccgcctacacaccccaacccataatgtactcaatgttgtaacatgcagtgttttgcacgatagtagtagtgacaaaaaggggagcgatcctccaagcagtcgcaaggtggagctcgtcagcgacctcactcgtatcgcaagaaaagaggttttggtggcggcgtaggaggcgagaaagggaacaccaatcgggacacggcaccaaacagatgccacaattgtggccgtcttggccattgggccaaggactgtcgccagcccaagaaagaagccgctcacctagcccaaggtgatgacgatgacgacgtcctgctgctttcgcgggcatgcgagcttgaagatgacgatgccactttgttgatggcccacgcttgcgagctcaatgatggccccatcatcgcgccatctcctgtctccctcgttgaaccgcgagtgcaggtgagcctaggagccacggacgctgaggacaaggaggcgtggtaccttgacacaggagccaccaaccacatgacaggccgtggtgacgtctttgctgagctcgatcgaagcgtcaccggcaccgtcaaatttggagacagctccatcgtagacatcaagggtgccggtaacgtcatcttcaccggcaagaatggcgagcacaaggttctcagtggcgtctactacattccgcgcctcaagagctcaatcatcagcatcggtcagcttgatgaaagcgggacgcgtgtgctggtcgaggacggcatcatgcgtatctgggaccgccgccgccgccgccgtcttcttgccaagatcaagcggggacgaagccgtctatacgtcctccgcctcgaggttgctaggccgatttgcttggctacgcgacacgatgatgttgcctggcgctggcacgagcgcttcgggcacatccacttcggctcgctagagaagatgggccgacaagagctcgtgcgtggcctgcctcgactggagcatgtcgagcagctttgcgacacgtgtgtcatcaccaagcatcggcgcgctgcctttccaaaggcagccaagtaccgcgctcaggagccgctagatctcgtccatggcgacatctgtggccctatcacgccggcaacgccaggtggccggcgttacttcttgctgctggtcgacgatgccacacgatacatgtgggtggcgctcctagcagccaagagcaatgcacctgacgccatcaagagaattcagatggcagccgagactcactgtgggcgcaagctgtgtgtatttcgcacggacaacggcggcgagttcacgtcgcttgagttcgccacctactgcactgatgagggtatccaacgtcatttctccgcgccctacgccccacaacaaaatggcgtggtcgagcggcggaatcagacagtggtgtccatggcgcgcgcccttctcaaacagaggggaatgcctgcggagttttggggggaggctgtcagcacggctgtcttcctcctcaatcgtgcaccgtccaaaagcctcactggcaagacgccgtatgaagcttggcacggcaagaagccgatggtcagcttcctacgtaccttcgggtgcctggcgtacgtgaaggagctaaacgatgtgcgcaagctcgacgaccgcagcacacccggcgtcttcattggctatgaagaaggggtgaaggcatatcgtgtcctggatccaaggacacggcgtgtacgtctcgcccgtgatgtcatctttgacgagagccgcgggtgggactggacggcagcaagcggcacagatgctcgaccgagcagcgatttcgccatcgagtaccatgttgagaagaccactgggcatcctatccctagtgtggggggaggcgtggtgaccccatcagcatccccaacgccactacaagagacttcaccagcaacccctgccacaccagcaccaagtcctagcgttgccccaacagagttcgtgtcacctccctcacacgacgaggagaggatcgacgcggcgcactccaacacccctgtccgctaccgcacagtcgacaacttgatcggggagaatgccccggcaccagggattgcaaaacgggaactcgaggaggcgtctttgctcctcgctggacctggtgagcccatgctcgtttgcagagccggagggtgatgatgcatggcgagcagccatgcgtgaagagatggacgcggtgaatcgcaatgggatttgggagcttgttgatctcccacatggccatcgcccaattggactcaaatgggtctataaattgaagaagaacgaggccggaaaggtggtcaagcacaaagctcgtctcgtcgccaggggatttgtccagcaacctgggattgattttgacgaggtgtttgcgcccgtcgcgcgcatggagtcaattcgtctcctgcttgcggtcgccgcccaaaaagggtggcacgtccatcacatggacgtgaagtctgcctttctcaatggagatttggcagaggaggtgtatgtgaagcagccccctggttttgtcgtcgccggagaagaagacaaggtcctccgcctgcgcaaggctctttatggcctgcggcaggcgccaagagcctggaatgcgaagcttgattgtactctgaaggagctcggtttcgaccaaagcaagcatgagcacgccatgtaccgacgaaacaatggtggctctgctctactcgtcggggtctatgtagatgaccttgtgatcaccgggccatcgacaagagcaattgaacaattcaaggaagaaatgaaggcaaagtttcagatgagtgatcttggcttgctctctttctaccttggaattgaggtgaagcaaggagatgatggaatctccctgaaccaggggcgctatgctcagcgcattgtggagtcggctggcctcaaggactgcaacccttgcgccactccaatggaagaaaggctcaagctgagccgtgatagcacggcacctcccgttgatgcaacaaaatatcgacggctggttggtagccttcgctatcttgtgcacacacggccagacctagcatttgctgttgggttcgtgagtcgcttcatggagcggccaactgaggagcacatggtggccgtgaagcgcattctacgctatgtcgctggcacgatggagtacggacttcattacaaaagggagaaagaggagcagcggctgattggttacagcgacagcgacctcgccggcgacattgatacaaggagaagcacaagtggcatgttgtttttccttggttcaagcttggtgagttggcaatccatcaagcagagagtggtggctttatcttcctgtgaagcagaatatgttgcagccaccaatgctgccacacaaggaatctggttggctcgattgctcggcgaacttcttgggaagcaacctaaagcgatcgagctaaaggtggacagcaagtctgccttggcgctggcaaagaaccctgtcttccatgagcgcagcaagcatattgatttgcgctatcacttcatcagaagctgcttggaggaaggaagcatcagcgccagcttcatcaccaccatggaccagctcgctgacattctaacgaaggcattggggcgagttcgattccatgagcttgttgcaaggattggagtgatactgaaccgtcaggttgtgaaatctgattcagcaactattaagattccagaactggactttgagatccctccagaagctcaacgtggatcactttcaacagtggaagggattattatgcgagctgtggatgagctgcaggcacttcaagatgaaagaaagaaagtggatcctcaaaaggccgaagctattgataaatttttagcaaaattgagatctcttggattaggagaagctgctttcacctttgttcttgatgatcctgctggaaatagcttcattgaaaaccagaatgcaccttcatcagatcctttgttatctgtgagattctatgaaaggatgcgtgagcaacaggcagcacttggttttcttgttgaaccatccacagaagaacctggggatcagcctgttaatcatgcttcaactgtggaagggaactctgaggtgttgcaggagccccacggttcggttggagctgttgcaggtcgccgtgctatagctcaaggaaaccctgatgaagttgctgcagcgctgtgcagatattcagcaccagaagagtgtctggtctttgacctttggttagaaatcccatattttcgtgaggttattgttatggcaacaacatgcgacatgtgcggctatcgcaactcagagttgaagcctggtggtgaaatcccagccaaaggaaagaaaattacactacgtgtgcagaacggaaaagatcttacacgtgatgtcataaagtcagattcagctggcgtaaaagtacctgaactcgagttggagctagcaagtggaacattgggtggtattgttacaacagttgaaggtttaattgtgaaaatatgcgaggctctgcagagagtgcatggattccatttgggtgatagcacactggaatggaaaaagaagaaatgggaggatttcaacgatagattatccaagcttctaagtttacaagagccttggactttaattatcgatgatggattggcagcttcatttgttgctccagctaccgattctttagaagatgacaaccagctaaccattgaggagtatgtgaggagctgggagcagaatgaggagcttggcttgaatgacatggacacatcgtctgctgacgccgcctacaacaccaccaacccataatgtactcaatgttgtaacatgtgatattatcaaatatacttattgtgctccatgttgtagtaagttgcgatatttctcattttaaatcctcaagttttgtgttagccatagcttttgtttatgagacgatcgaagatattcagttgaccaaatttgcttt

SEQ ID NO: 22903 - DNA, 4602 bp, Oryza sativa
  Clone ID: TF_OsC11275_2
atggagggagtaccagctgctggagccaatgcttccaggtcgccacaacaccgcggccgccatcactcgttatcgccaacaccacggcgaggacgaggtcgaggcgctgctgttcgagaggttgttgtgcagcggactgtcagggaggttggcggcgctgctgctttccccaccctcacgcgaaccaactacaccgagtggtcgctgctgatgaaggtgatgctgcaagcccgtggcctttgggacgcggtggagcatggtgaatgcgatgagcaagaagacaggatggcaatggaggccatcctacgcgctgtccccagcgagatgatctcgctgctcgccaccaaggactccgcgaaggacgcctgggatgccatcaaagtgatgcgcgtcggcgtggaccgcgtgaggaaggcgaaggcgcaacagctgcaccgggagtatgaatccatctcgttccatgatggtgaatcgatcgacgacttcgccctacggctcacaagcctagtgtctcagcttgggacattaggagaacgaatcgaggagcagaacgtcatcgagaagttcttgcgcgtcgtcccagagcgattttcccaaatcgctgtgtcgattgagaccctgttggatctctcgacactcaccatcgaggacgtcactgggcgtctcaaggtggcggaggaacggcgaccagctccaacgtcgacgactactccagccggaggccagcttctcctcacggaggagcagtggctcgcacggcagaaggagcgacaaaaaggggagcgatcctccaagcagtcgcaaggtggagctcgtcagcgacctcgctcccatcgcaagaaaagaggttttggtggcggcgtaggaggcgagaaagggaacaccaatcgggacacggcaccaaacagatgccacaattgtggccgtcttggccattgggccaaggactgtcgccagcccaagaaagaagccgctcacctagcccaaggtgatgacgatgacgacgtcctgctgctttcgcgggcatgcgagcttgaagatgacgatgccactttgttgatggcccacgcttgcgagctcaatgatggccccatcatcgcgccatctcctgtctccctcgttgaaccgcgagtgcaggtgagcctaggagccacggacgctgaggacaaggaggcgtggtaccttgacacaggagccaccaaccacatgacgggccgtggtgacgtctttgctgagctcgatcgaagcatcaccggcaccgtcaaatttggagacagctccatcgtagacatcaagggtgccggtaacgtcatcttcaccggcaagaatggcgagcacaaggttctcagtggcgtctactacattccgcgcctcaagagctcaatcatcagcatcggtcagcttgatgaaagcgggacgcgtgtgctggtcgaggacggcatcatgcgtatctgggaccgccgccgccgccgccgtcttcttgccaagatcaagcggggacgaagccgtctatacgtcctccgcctcgaggttgctaggccgatttgcttggctacgcgacacgatgatgttgcctggcgctggcacgagcgcttcgggcacatccacttcggctcgctagagaagatgggccgacaagagctcgtgcgtggcctgcctcgactggagcatgtcgagcagctttgcgacacgtgtgtcatcaccaagcatcggcgcgctgcctttccaaaggcagccaagtaccgcgctcaggagccgctagatctcgtccatggcgacatctgtggccctatcacgccggcaacgccaagtggccggcgttacttcttgctgctggtcgacgatgccacacgatacatgtgggtggcgctcctagcagccaagagcaatgcacctgacgccatcaagaaaattcagatggcagccgagactcactgtgggcgcaagctgtgtgtatttcgcacggacaacggcggcgagttcacgtcgcttgagttcgccacctactgcactgatgagggtatccaacgtcatttctccgcgccctacgccccacaacaaaatggcgtggtcgagcggcggaatcagacagtggtgtccatggcgcgcgcccttctcaaacagaggggaatgcctgcggagttttggggggaggctgtcagcacggctgtcttcctcctcaatcgtgcaccaaccaaaagcctcactggcaagacgccgtatgaagcttggcacggcaagaagccgatggtcagcttcctacgtaccttcgggtgcctggcgtacgtgaaggagctaaacgatgtgcgcaagctcgacgaccgcagcacacccggcgtcttcattggctatgaagaaggggtgaaggcatatcgtgtcctggatccaaggacacggcgtgtacgtctcgcccgtgatgtcatctttgacgagagccgtgggtgggactggacggcagcaagcggcatagatgctcgaccgagcagcgatttcgccatcgagtaccatgttgagaagaccactgggcatcctatccctagtgtggggggaggcgtggtgaccccatcagcatccccaacgccactacaagagacttcaccagcaacccctgccacaccagcaccaagtcctagcgttgccccaacagagttcgtgtcacctccctcacacgacgaggagaggatcgacgcggcgcactccaacacccctgtccgctaccgcacagttgacaacttgatcggggagaatgccccggcaccagggattgcaaaacgggaactcgaggaggcgtctttgctcctcgctggacctggtgagccatgctcgtttgcagaggcggagggtgatgatgcatggcgagcagccatgcgtgaagagatggacgcggtgaatcgcaatgggatttgggagcttgttgatctcccacatggccatcgcccaattggactcaaatgggtctataaattgaagaagaacgaggccggaaaggtggtcaagcacaaagctcgtctcgtcgccaggggatttgtccagcaacctgggattgattttgacgaggtgtttgcgcccgtcgcgcgcatggagtcaattcgtctcctgcttgcggtcgccgcccaaaaagggtggcacgtccatcacatggacgtgaagtctgcctttctcaatggagatttggcagaggaggtgtatgtgaagcagccccctggttttgtcgtcgccggagaagaagacaaggtcctccgcctgcgcaaggctctttatggcctgcggcaggcgccaagagcctggaatgcgaagcttgattgtactctgaaggagctcggtttcgaccaaagcaagcatgagcacgccatgtaccgacgaaacaatggtggctctgctctactcgtcggggtctatgtagatgaccttgtgatcaccgggccatcgacaagagcaattgaacaattcaaggaagaaatgaaggcaaagtttcagatgagtgatcttggcttgctctctttctaccttggaattgaggtgaagcaaggagatgatggaatctccctgaaccaggggcgctatgctcagcgcattgtggagtcggctggcctcaaggactgcaacccttgcgccactccaatggaagaaaggctcaagctgagccgtgatagcacggcacctcccgttgatgcaacaaaatatcgacggctggttggtagccttcgctatcttgtgcacacacggccagacctagcatttgctgttgggttcgtgagtcgcttcatggagcggccaactgaggagcacatggtggccgtgaagcgcattctacgctatgtcgctggcacgatggagtacggacttcattacaaaagggagaaagaggagcagcggctgattggttacagcgacagcgacctcgccggcgacattgatacaaggagaagcacaagtggcatgttgtttttccttggttcaagcttggtgagttggcaatccatcaagcagagagtggtggctttatcttcctgtgaagcagaatatgttgcagccaccaatgctgccacacaaggaatctggttggctcgattgctcggcgaacttcttgggaagcaacctaaagcgatcgagctaaaggtggacagcaagtctgccttggcgctggcaaagaaccctgtcttccatgagcgcagcaagcatattgatttgcgctatcacttcatcagaagctgcttggaggaaggaagcatcagcgccagcttcatcaccaccatggaccagctcgctgacattctaacgaaggcattggggcgagttcgattccatgagcttgttgcaaggattggagtggtcaagattagttcagaatagaacagcatggactaaggggagattgttagtataatccttgttctagttagttatttggtttccttagacagtaagctataggctgcagctgttactcggttgtcagacagctgctattagtggtagtagtcaattttgattttacctctagcaggaacatagcagcagcagtattgtcggttcagcaaccgacctatccatgtactataaatatagctattgtgctaacataagtaagcttttcagctc

SEQ ID NO: 22904 - DNA, 1917 bp, Oryza sativa; identical to SEQ ID NO: 15365
  Clone ID: TF_OsC1713_4371

SEQ ID NO: 22905 - DNA, 3249 bp, Oryza sativa; identical to SEQ ID NO: 15364
  Clone ID: TF_OsC1713_4499

SEQ ID NO: 22906 - DNA, 2775 bp, Oryza sativa
  Clone ID: TF_OsC1713_4966
cacaagagacaagagttcagtgtttctgatctcattggctctttgggtgttgaggagaaggcgagggcaaaggacgtccggggcaaaaaggttgagggaggttctagtgccaatatggtacagaagaagaaccctcatgcatcccacgataacaagaaagttaagcctgatgtcaaatccaaggctacaaccaattttaagaagaaagacaagggaaaggcaaaggtagactgctttgtgtgtgacaagtctgggcattgggccaaggactgtcctgagcgcaaagacagaaagtctgccaacatggtcattagcgagggcggaggaacatcggggtacggtcgggagaggttcctccttgttgatgggaaacgggtcgcttgcggctgttcatggtgttggtacggtcgatctgaagtttacttcgggaaagaccgtgcagctgaagaacgtgcagcatgtcccttcaataaagaagaatctagttccaagtgccatacttgtgttcaatcgaaacaacctcgcaagcctcacaaggcatctgaggtgaggaatttggcacctctagaacttgttcattccgatttgtgcgaaatgaacggcgtgttgactaaagggggaaagaaatatttcatgacactgatagatgattgcactagattttgctatgtgtatctattgaaaactaaggatgaggcattgcatttctttaaaatctataaagctgaggtagaaaaccaacttgaaaggaaaatcaaacggttgaggtctgatagaggtggggagtatttttccaatgagtttgcatccttttgcgaagagtttggaattattcatgagatgacgcctccctattcaccccaatcaaatggggtggccgaaagaaagaaccgtactctaactgagatggtgaatgccatgttagacactgcggggctttccaaggaatggtggggtgaggcagttttgactgcgtgtcatgtcctgaataaaattccaatgaagcataaggaaataacaccattcgaggaatgggaaaggaagaaattaaatctctcatacctacgaacatggggctgtttggccaagcactttgcaccgatagaacacaatgatcaaacgcctgaggaaaatcctgagaaggacaacattgtagatactcgcaagagtaagagacaaagggttgcaaaatcctttggagatgactacattgtatacctcgtggatgacaccccaagaaccatagaagaggcatattcatctcctgacgctgactactggaaggaagcagtacgcagtgaaatggactcgattatgtctaatgatacttgggaagtcgttgagcgtccatatgggtgcaagcccgtaggatgcaaatgggttttcaagaaaaagcttaagcctgatggtacaatcgaaaagtacaaggcaaggcttgtggccaagggttatacccaaaaggaaggcgaggacttcttcgacacatactcactagttgctcgcttgaccacgattcgagtactacttgctctggcagcctctcatggtcttctcgtccatcagatggacgttaagacagctttcctaaacggagagctggaggaggagatctatatggatcaaccagacgggtatgtactagaaggtcaggagggaatggtgtgtaaactattgaaatccttgtatggcctcaagcaagcacctaagcaatggcatgagaagtttgacaccacacttacatctgcaggctttgttgtgaacgaagctgacaaatgtgtatactatcgctatggtgggggagaaggggtgatcttgtgcttatatgtcgatgacatactgatctttgggaccagccttaatgtgattgaggaggtcaaagactatctgtccaagagttttgaaatgaaagatttgggagaggctgatgttattcttaacatcaaactacaaagaggagatgagggtgggattacacttgtgcaatcccactatgtggacaaggttttgagtcgctttggatatagtgactgcaagccagctcctactccctatgatcccagcgtgctattaaggaaaaaccgaagaatagcaagggatcagctgagatactctcaaatcattggttcattgatgtacttggctagcgcaacgaggcctgacatctcatttgctgtaagcaagctgagccggtttgtctcaaatccgggagatgatcattggcaggctctggaaagagtaatgcgctatctaaagggtactatgagctatggaattcactataccgggtatccaaaagtactagaagggtatagtgactcaaactggatatctgatgctgatgagataaaagccacaagtggatatgtgttcacacttggaggtggcgatgtttcctggaagtcttgtaagcagaccatcttaacgaggtcaacaatggaagcagaacttacagcactagatactgcgacagttgaggccgagtggcttcgtgaactcctgatggatttgccggtggttgaaaaaccagtgccagctatcctaatgaactgcgataatcaaacaatgattattaaagtgaacagttcaaaggacaacatgaagtcatctagacacatcaagagaagactgaaatctgtcagaaagcagaaaaactccggagtgatagcattggactatgtccaaacggctagaaatctggcagatcagtttaccaaggggctaccacgtaatgtgatagacagtgcatcgagggaaatgggcttgatacccacctaa

SEQ ID NO: 22907 - DNA, 3156 bp, Oryza sativa; identical to SEQ ID NO: 15337
  Clone ID: TF_OsC1713_3871

SEQ ID NO: 22908 - DNA, 1894 bp, Oryza sativa
  Clone ID: TF_OsC359_6897
atgtcatggcacagggccggtgtcctgctgctagggggctcaatcctgcctgcctgtcccgggggttccggccgtaggtggggttgggtcggtactcttgtttatggctaggatgggttgggaactatgtcacgtcttccgtctgtataccgtggtgatgtttaacagagaaaaaggaaagaatgtcagcgggtatgcctcaagtaactcaagttttcaactcaatccaccactggcctcaagagagttaaccagggcacacccttggtccattccaagcatgccgcttagttcacagctaccattggttggaagtcaagaccaaaatcagtatgtgtttgatcgagcatttgccacccaggtcaatgagcttccaatgccagaagaggatgtccccttttgtcacgattgtagagaacaaggacactatgccctgaattgtccatgggtatatgccaaagaagccccttcctttggtttagcagggcagacatcactaaaccagcctcctcacaccaagacaagcttgcagcctagtgtgcaaagtagagagcccaatggagagaatccatggaatcccgggaattgctttcctcctagcctttcgtaccacgtggggtcacgtactaagcaagccaaaggcaagaagagtaagaatcagaagagaaaagcgccgatgcgaactgaagaagaagtacgtaagatggctattagcagcaccgaatggccttccgcagggataactattcctagacgtcaaagaggaaataccttccgaggtgcacgacagttgacccagcaccttctaagccatggtggcagagtatctgatagtgaagggtcagatcaagtctcctcggatgatgaagatgagtctccccgacatctcggtgaggaagagatggaatcaaaagcatgcacccgttgtggagaaattggacacgttgctagcatgtgtctcacactctgcgcttattgtgaagaagaccatccaccaggggagtgtcccacccgcaaggtcacatgttttgtgtgcgaaggtacaaaccatgtgcccaaggattgccaactcagtgtgttgttgaccaagaccgcagaaatccaacgaacgaccctacgattgtctcgtcagctagtcagctccaacagcaacatcgacgatatcatccacaacaccaatgctcctcctgctccacctaactctgcaataaatcatagcaataatatctttagcaccaaccattctctgcaccgacagcctcagcaaagaattgtcgtcgatggaagaagttgtgtctctccccgacgacatgaagttgataacttgtgttaggttgacgccgaagatatgaatcgtgagaagttctggatctgaagccccatcatcaagtgccacaacccagtcgaagtcagctaaaggttcaaccagagataagtcaggtgaagagaagattccatccgcaacaggagatcgagccaagcagtccagagtggaggagttcctccccgtgcttccctccttcgtttccgccgctcgccgccctctctccccgtcggaatcgagcccgcgccgtcgtcctctctctccgccgtcgccgccgagctccggttcgccgccgtcgtcgccccggacttcctcccgtctcggcgtcacctccatcggcttcgccgcgtcgtcgtcgacctcgtccgctcctccgtttcgcccgccgaccgccggagcaccgtcgtcctcgccgtcccgaaccgcgccgccgctttcctccactccggtcgtcgtttccgccgtcctcgtcgtcccggggtgagccgtggaccgcccctttcgcttccctctcttctccgctctctcgggcgccgctccgccgcgccggtggtcgccggcggtgaccat

SEQ ID NO: 22909 - DNA, 4301 bp, Oryza sativa
  Clone ID: TF_OsC1713_4599
atgtctggagttgccgccgccactgctggcggaggtggtacgccgccgccgccgacaggagctggatctggatctggatccggagctggtgcgccaggaggtgccgtgaacgacaacaacaacggaggcaattctgtctcaccatccagcggagggccattctcggggtataatcttctcctcctgctactgttgttagcgctatcgctatactatgtgcgctatgttgttgttcctgttctacatgatgcctctagcatattatcgcgttactggtatgttcctgtttctgacattcatgatgcgcatagtattctactggttatgttaagatcaccctacactgcttatgccatgatcattgtttcaatttcttggattaaaatatgccgattaatgactatatttccaacaatccaaaaacctgataggtctttttcggtagttggctttgctgctgcactgaaaccacatgcttttgatggttcaaactataagagatggaaagcacgtgcactattgtggttgacagcgatgcagtgcttctatgtttcacggggcaaacgaagtgaaccacctctttctcctgaggaagaggccaagttcgaggcttcggattgcctgttccatggagcattgatcagtgtacttgctgacaacatagtggacgtgtacatgcacatgccttctgggaaggacatgtgggatgcacttgaggccaagttcggagtctctgacgccggcagtgagctgtatgtcatggagcagttctatgactacaagatggtcgatgaccgttctgtagtagaacaagctcatgagattcagatgctggctaaggaacttgagaacaacaactgtgagttgccggacaagtttgtggcgggtggcattattgccaaactaccacattcttggtcggactttgccacttctctaaagcacaagagacaagagttcagtgttcctgatctcattggctctttggttgttgaggagaaggcgagggcaaaggacgtccggggcaaaaaggttgagggaggttctagtgccaatatggtacagaagaagaaccctcatgcatcccacaacaacaagaaagtcaagcctgatgtcaaacccaaggctgcaaccaattttaagaagaagggcaagggaaaggcaaagggagactgctttgtgtgtggcaagtctgggcattaggccaaggactgtcctgagcgcaaagacaggaagtctgccaacatgatcattagcgagggcggaggaacatcagggtacggtaaaatattacctacagttctctctgtttttcattcacctgattggtgggtggatactggtgctaatattcatgtatgtgctgacatttctctgttttcttcttatcaggtcgggagaggttcctccttgttgatgggaaacgggtcgcttgcggctgttcatggtgttggtacggtcgatctgaagtttacttcgggaaagaccgtgcagctgaagaacgtgcagcatgtcccttcaataaagaagaatctagttagcggctctctattgtgtagagaaggttttagacttgtgtttgagtccaataaatgtgtcgtatctaaatatgggacttttgttggaaaaggttatgacagctgaggcttgttccgcttttctttgaatgacatgtgtaataatcataatgctgtgaaccacattagtgagaatgatgagtctaatgtgtggcattcgcgactctgtcatgtgaatttcggttgtatgacgcgcttagctaacatgagtttaattccaaaattcactttggtcaaaggttccaagtgccatacttgtgttcaatcgaaacaacctcgcaagcctcacaaggcatctgaggcgaggaatttggcacctctagaacttgttcattccgatttgtgcgaaatgaacggcgtgttgactaaagggggaaagaaatatttcatgacactgatagatgattgcactagattttgctatgtgtatctattgaaaacaaaggatgaggcattgcattactttaaaatctataaagctgaggtagaaaaccaacttgaaaggaaaatcaaacggttgaggtctgatagaggtggggagtatttttctattgagtttgcatccttttgcgaagagtttggaatttttcatgagatgacgccaccctattcaccccaatcaaatggggtggccgaaagaaagaaccgtactctaactgagatggtgaatgcaatgttagacactgcggggctttccaaggaatggtggggtgaggcagttttgactgcgtgtcatgtcctgaataaaattccaatgaagcataaggaagtaacaccattcgaggaatgggaaaggaagaaattaaatctctcatacctacgaacatggggctgtttggccaaggtaaatgtacctatagccaaaaagcggaaacttggaccaaaaactgttgattgtgtgtttcttggttatgctatccacagtgtgggttatagattcttaatagtaaactctggagtacccgacatgcatgttggtacaattcttgagttcagagatgctacattctttgagaatgaatttcctataaaatatacacctagcacttctagtaaagaaactgtcatgccccatgagcactttgcaccgatagaacacagtgatcaaacgcctgaggaaaatcctgaggaggacaacattgtagatactcgcaagagtaagaaacaaagggttgcaaaatcctttggagatgactacattgtatacctcgtggatgacaccccaagaaccatagaagaggcatattcatctcctgacgctgactactggaaggaagcagtacgcagtgaaatggactcgattatgtctaatggtacttgggaagtcgttgagcgtccatatgggtgcaagcccgtaggatgcaaatgggttttcaagaaaaagcttaggcctgatggtacaatcgaaaagtacaaggcaaggcttgtggccaagggttatacccaaaaggaaggcgaggacttcttcgacacatactcaccagttgctcgcttgaccacgattcgagtattacttgctctagcagcctctcatggtcttctcgtccatcagatggacgttaagacagctttcttaaatggagagctggaggaggagatctatatggatcaaccagacgggtatgtactagaaggtcaggagggaatggtgtgtaaactattgaaatccttgtatggcctcaagcaagcacctaagcaatggcatgagaagtttgacaccacgcttacatctgcaggctttgttgtgaacgaagctgacaaatgtgtatactatcgctatggtgggggagaaggggtgatcttgtgcttatatgtcgatgacatactgatctttgggaccagccttaatgtgattgaggaggtcaaagactatctgtccaagagttttgaaatgaaggatttgggagaggttgatgttattcttaacatcaaactacaaagaggagatgagggtgggattacacttgtgcaatcccactatgtggacaaggttttgactcctactccttatgatcccagcgtgctattaaggaaaaaccgaagaatagcaagggatcaactgagatactctcaaatcattggttcattgatgtacttggctagcgtaacgaggcctgacatctcatttgctgtaagcaagctgagccggtttgtctcaaatccgggagatgatcattggcaggctctggaaagagtaatgcgctatctaaagggcactatgagctatggaattcactataccgggtacccaaaagtactagaagggtatagtgactcaaactggatatctgatgctgatgagataaaagccacaagtggatatgtgttcacacttggaggtggcgctgtttcctggaagtcttgcaagcagactatcttaacgaggtcaacaatggaagcagaacttacagcactagatactgcgacagttgaggccgagtggcttcgtgaactcctgatggatttgccagtggttgaaaaaccaatgccagctatcctaatgaactgcgataatcaaacagtgattattaaagtgaacagttcaaaggacaacatgaagtcatctagacacatcaagagaagactgaaatctgtcagaaaaactccggagtgatagcattggactatgtccaaacggctagaaatctggcagatcagtttaccaggaggctaccacgtaatgtgatagacagtgcatcgagggaaatgggcttgatacccacc

SEQ ID NO: 22910 - DNA, 1413 bp, Oryza sativa; identical to SEQ ID NO: 15350
  Clone ID: TF_OsC359_7479

SEQ ID NO: 22911 - DNA, 2718 bp, Oryza sativa
  Clone ID: TF_OsC359_8167
atgcgaactgaagaagaagtacgtaagatgactattaccagcaccgaatggcctccagctgggataactattcctagacgtcaaagaggaaatactttccgaggtgcacgacagttgacccagcacctcctaagccatgacggcagagtatctgatagtgaagggtcagatcaagtctcctcggattatgaagatgagtctctccgacatctcggcgaggaagagatggaatcaaaagcatgcccccgttgtggggaaattggacacattgctagcatgtgtctcacactctgcactcattgtgaagaagaccatccaccaggggagtgtctcacccgcaaggtcacatgttttctgtgcgaaggtacaaaccatgtgcccaaggattgccaactcagtgtgttgttgaccaagaccgtagaaatccaacgaacaaccctacgattgtctcatcagctagtcagctccaacagcaacatcgacgatatcatccacagcaccaatgctcctcctgctgcacctgactctgcagtaaatcatagcgataataccttcagcaccaaccattctctgcaccgacagcctcagcaaagaattgtcgtcgatggaagaagttgtgtctctccccgaccaggcaaagaagtaggtcgaaaggtgattgataagagaaatttgtatgaggttgactccaaagatacgagttataagaagttctggaactgaagccccatcttccaatgccgcatcccagtcgaagtcagctatcttcttgctagcctcctcgaatctcggggacgagattcttgtaaggggggtggatttgtcacgtcctgataaattcatcccgaaataaaaatcattccctaaaactccccgccgtcgtcccctctctcccgtgccgccggccgtcttcagccgcccctgccgccgcgttagcacgccggccggccgtgccgtcgcctcctccagcgtcgcagccgcctcctcttcgccggcctgcccctctgtttcccgcgaagacctccggccgtgcctcccccgccggcccccgtggcgttgccgcccctgttccgcctccggccgcctctgccgcgtcccctgtgcgccggccgacgtcgcccccccctctcccggccccggcccgccctcctcttcccccggccccgccccggcgtcgcccgtctttcgtcggctcgccgttgcgcgccccgcctctccctcggtctcgtcggccccccctccggccgccccttttgccgtgcccgtgcgccggccgcccctccgcgctccatcgtcgtcgtctccgttcatcctcgttgacgactcctccggtcggtcgttagtcctcgccggctcgtcgtctcgctgcgccgccaccctcgtcgtcatcgtaccggcgtgttccgcgccgtcctcgtctctgtgcagctgctgccgtctgccctcatcacctcctcgccggttcctgtcgtcgtcctctcgtcattcctggttgtcgtggcgttcgtccctccgtcaagccgttctcgtccgtcgtccgcgtccgtcaagtgtgccgctgcagccccgtcgtcgtcttcgtccttgcctccgcgtcgccaagcgttgcgccggccgcgtctcgctcgtgtaccggtgtcggtagtcgttcgcttgtgcgtgtggtgaccgtgttagtgtgcccgctcggtagccgcgtggtttccacgtgtgcagcccgtgtggtgtctagtggagtccgtttgtcggccactcgcctcggttgacacacgggatctgcttctgtcgaccagtggaccatctctgtgtactcggttttctttttatgtattgttattgcttctttataggcttgtagctttgcttgtgtgcttcgcgtagtcttcgtcgttccggaggttcccgaagcgtggtttgcggtcgtcgccgaaggttcggaaggccgttatctctctccccctctattcaaaacccccaaaatggttttaggctgggctcgaggtgcgtggttgggttttgttagtcgtacctcgagtactataaggattaagctcgggcctctgttgcaaagcactaccgtacttccacatgtctagtgggtaaggcttagtttgtggcttagtctggttataaacaaaagtacacggatggagatggacgaagtcgggggtcgatggacatctctaggacaaatgaaggctacacgagctgtggcccggtagtcgagatgtcatggcacagggctggtgtcctgctgctaggggctcggtcctacctacctgtctcggaggttccggccgtaggcggggctgggtcggtactcttgtctatggctaggatgggttcggaactatgtcacgtctttcgtccgtataccgtggtggtatgtggcacgtggttacatgtgaggaagatgtgtcttgtggcacttgtgggtgtgtcttgttgagtacggtggttgtactcagtcttgctcaatttttcccaaacccagaagaggagttcctggaagatgaaggcttcggtgtctagctcgtgcctgccgtcaagtgtctgtggtcgtcgccctagtcttccgctgtttctcgtttgtctttgtgtgtgctgggccttgcctcctgggacaaggattaatgcacgcacgtaaggaacgcccgttgggttatttccggtcgtgacaagttggtatttagcaagtgtgagttctggttgtccgaa

SEQ ID NO: 22912 - DNA, 4807 bp, Oryza sativa
  Clone ID: TF_OsC359_8335
aacagaatctcgtcctcgagattcggaagaactggcgaacagatgcggatgagctgacttcaattcatcttctcgttcccaagttgattcttcttccgaatgattactccattggactttacaaaaacggataactggattcctggttcttctctcatctatttccaaaatacggattggtctctcaacataggtcagatcctcttggacttctatttgttcaagattagcttcttcgataggtacccttaaacactttttcaactttgacacatggatcacattatgaacacctgccaaggattgaggtaactccaactgataagcaacctcacctctttgactgacaatcttataaggtcccacgaaacgtggtgccaattttcctttggtgtggaaacgatgaacccctcggagaggcgtgacacgaaggtacacatgatctccttcctcaaaacttaaatcactgcggcgattgtcggcataactcttatgacgagactgagctatacgcaatctttcttgaatgatctttaccttctcttctgcttccctcagaatatcagtcccgaaaacttgacgttctcccgtttgatcccacaaaagcggagtgcggcacttccgaccatacaacgcttcataaggagccatttgaagactagcttgataactgttgttgtacgagaattccgcgtaaggcagattcttatcccaacttccaccgaagtctaaagcacaagctcttaacatgtcttccaaaatctgatttaccctttcggtttgtccgtctatctgcggatgataagcggtactgaagttcaacttggaacccatctcttcctgaagcttcttccaaaactttgaagtaaactggctacctcgatcggatactattttcttaggaacgccatgcaaacacacaatccttgccatatacaattctgccaaacggcttccgaaatatgttgtcctcaccgggatgaaatgagccactttggtaagtctgtcgactatcacccaaatagagtcatggcccgatgacgttctgggtagaccagtgatgaaatccataccgatttcctcccacttccattctggtatcttcaaaggctgcaacaaacctgcgggtttctgatgttctgccttgactcgctgacaaacatcacacacagctacatactctgctatctcacacttcatacttcatacttgcccaccaaaatttttccttgagatcttggtacatcttggtactaccagggtaaatggagtataaagtgtcgtgagcttccttcagaattgcatctttcaactccttgttctctgggacacagattctctcacccaaccatacggttccttgctcatcttccaaatacccgatagcctttcctcttctcatattcttcttgatctcttgaatatcaggatcattgatttgagcttctctaacctggtcaatgagagtgggcttcgcttctaaagttgcaacaaaacctctactgacaattcccaaattcagtctttcaaattccttgcataattcccatggcaactgttgtccttccgtagcattgcaatagcctttcctgctgagagcatctgctacaacattagcctttccgtggtgattatgaattcccatgtcataatccttaatcaattccaaccatctccgttgtctcatgttcagattcggctgggtaaagatatacttcaaactcttgtgatccgtgtacacctctgtacgagtaccgaaaagataatgacgccaaatcttcaacgcatgaaccactgcagctaactcaagatcatgagtagggtagttctcatgcggacgtaactgacaagatgcataggaaaccaccttcccatcttgcatcagaacacaacctaacccaagcttagatgcgtcgcagtacacttggaaacccttcttaggatcaggcaaaatcaaaatgggtgctgatattaagcgacttttcagctcttgaaaactctgctcacattcttctgaccacttgtactttacgtctttctgaagcagtcgtgtcatgggcttaggaatcttggagaaattctctataaacctccggtaatagcctgcaagacccaggaaactacgaatctctgagactgtctttggttgtttccagttggttacggattccacattactaggatcaatggcaactcctccggctgagatgacgtgaccaagaaactttacttcggacaaccaaaattcacatttgctaaacttggcatacaattgatgctctcgtagcttctccaatgcaaggcgaagatgttcttcatgctcttctttggttcgggagtagataagaatgtcatcaataaagactaccacgaacttgtctaggtattccataaacaccttattcatcaagttcatgaagaaagcgggggcattggtaagtccaacagacataacagtacattcaaacaacccataccgagtggtaaaagccgtcttaggtatatcttcctctttgatcctcaactggtgataccttgatcgaagatcgatcttggagaaaacggtggcatctttaagctgatcaaacaagtcatcaattctaggcagagggtacttattcttgatagtcacatcatttagtgcacgatagtccacacacatcctctgggtatgatctttcttttccacaaaaatgaccggagctccccatggagacgagcttggtctgatgtatcctttctgaagcaaatcatctacttgcctcttgacctctgctaattcgttggctgccattctataaggtctcttatggattggagttgttcctggtaccagatctattctgaattctatatctctcttgggcggcataccaggtaaatcatccaggaacacatctgggtactcccgtactatgggaatctcttccaaagttatttggttcagacttgaccttaaaggcccgtaaggcaatgaatgaacagttacaacttgaccgtcattgctggtgagagttacttttctattggtacagtctatcacaccattatatttggctaaccagtccatccctaggatgacatcaaggtctttggattctaacagaataaggttggccagaaatggtacaccctgaatctctattctgacggaggggctacgttgcgatgagagtgcttggttactcggggtactaaccatcaaaggacgtctaagatcttctacctccatcccatgatttcccgcaaaactcatagataaaaaggaatgtgtagcaccagaatcgaaaagcactgttgcaggaactgagttaacagggaacgtacccaaaatcacatctggagcactttgagcttctgcagcagccacatgattgacatgagcctttgacgctggtgcggaggagttgttctgggcagggacaatcttcacgcggcggggcttcggacacttgtcagagtaatgtcctggttcaccacaattaaagcacactcctggcttgttcccttgctccctcttggcaggctgatgctgagttggagttgcaacaggacgtggagcttggctgcgattgttgttgctagcattgttgttgaataactgacgctgcggacgaacaacagacgaagaccctccttgtgacactgcctgaggtcccatagcaagacgcggcctctgactattcccctgctgagctttgaagtgagcaatccggtgtttcttcttctccatacggttgtacttgtcctcctggcgaatagccttatccaccaacttctggaaatcatgataatccccagtcattagtgggtaagaaagctcatcattcagtccttccaagaatttctcttggcgctcttcatcggtgcacacatcttccggagtatagcgaggcagacgattgaactcatccaagtatttagtgacaaagcgagatccctgagtgagcaccctgaactccttcttgagagacacaactcctgagggtatgtgcgttttccggaaagcagcggtgaactcaagccaagtgattggttcagcagtagtcctgttgaaacggaagtgatcccaccactcagaggcagggccatgaaggtgatgtgaagcaaaggagactttctcttgatcagtgcagttgacaaccggaggatccgctggggctggggcagcttctttttccaccacacgaaccttaggcgccaactggtagcgagggacaaaaagagctcccttccttgcggtaagacgaaccctggccttttgtggtggtgcttctcccttcaacgcggctagttccttctccaaacgatccaccttgtcctccagcttgcaaatcttaccacgattccggtcttcgcgatcttgagctgctaacacaatctcaacgcgggtctcatccatggcccacagcatctcaaccaaatgtctggtggtagcatcattctcaatccctgcaggttcaagatagctaccacggtcgtttccctggggttgacgaggatggtagcgatactcagtgtcggccaactgatcattgtagctttctcggagctctcctatggtgatccttgccacctcctgacaagcatgaatgtagcttccccctccagcctcgaacatcaccgatgggatatcttcacgattactgttcaaggtgactttgatacagcacttctcttcatcacgatcatgaggaatctgggcatacaaaggagcagtcccaaatcctatggcgaaggacatcgtacgcaactcctggacaaatccctcagtaccaaacaagtactcaggcttgtagcgcggcat

SEQ ID NO: 22913 - DNA, 1024 bp, Oryza sativa; identical to SEQ ID NO: 15442
  Clone ID: TF_OsC359_5811

SEQ ID NO: 22914 - DNA, 1410 bp, Oryza sativa
  Clone ID: TF_OsC359_7032
atgtcatggcacagggccggtgtcctgctgctagcggctcagtcctgcctacctgtcccgggggttccggccgtaggtggggttgggtcggtactcttgtctatggctaggatgggttggaaactatgtcacgtcttccgtctgtataccgtggtgatgtataacagagaaaaaggaaagaatgtcagcgggtatgcctcaagtaacttaagtttccaactcaatccaccactggcctcaagagagttaaccagggcacacccttggtccattccaagcatgctgcttagttcacagctaccattggttggaagtcaagaccaaaatcagtatgtgtttgatcgagcctttgccacccaggtcaatgagcttccaatgccagaagagcaggtccccttttgtcatgattgtagagagcaaggacactatgccctgaattgtccatgggtatatgtcaaagaagccccttcccttggtttagcagggcagacatcgctaaaccagcctcctcacaccaagtcaagcttgcagcctagtgtgcaaagtagagagctcaacggagagaatccattgaatcccgggaaatgctttcctcctagcctctcgtaccacgtggggtcacatactaagcaagccaaaggcaagaagagtaagaatcagaagagaaaagcaccgatgcgaactgaagaagaagtacgtaagatgactattaccagcaccgaatggcctccagcagggataactattcctagacgtcaaagaggaaatactttccgaggtgcacgacagttgacccagcacctcctaagtcatggtggcagagtatctgatagtgaagggtcagatcaagtctcctcggatgatgaagatgagtctccccgacatctcggcgaggaagagatggaatcaaaggcatgcacccgttgcggggaaattggacacgttgctagcatgtgtctcacactctgcactcattgtgaagaagaccatccaccaggggagtgtcccacccgcaaggtcacatgttttctgtgcgaaggtacaaaccatgtacccaaggattgccaactcagtgtgttgttgaccaagaccgcagaaatccaacgaacaaccctacgattgtctcatcagctagtcagctccaacagcaacatcgacgatatcatccccagcaccaatgctcctcctgctgcacctgactctgcaatgaatcatagcaataataccttcagcaccaaccattctctgcaccgacagcctcagcaaagaattgtcgtcgatggaagaagttgtgtctctccccgacctactccaggccgagcgaagggcaatcaacctcaggagggcgataccaagcagaagaccgttattcgcttcaaccagcaatcagaaggaagcttctcctgtgaa

SEQ ID NO: 22915 - DNA, 1878 bp, Oryza sativa
  Clone ID: TF_OsC359_8226
agaagtcaagaacccatttttgtgctttgttcctgcttgttatatggagtttattagagtaaaagccttttcttttccgttggtcgtgtagacgctgcagcttcggaagatccgcttttcgtggaagttgaagccgacgtttgggaaagcgagcaaggcaagtcgcatcatctccccctctattcaaaatcctcaaaatggttttaggctgggctcggggtgcatggtttagatagtagcacctcggccatataaggaccggtcttcgggcctctgttgcaaagcactaccgtacttccacatgtctagtgggtaaggcttagtttgtggctcagtccggttataaacaaaagtacacggatggagatggaagatgtcgggggtcgatggacatctgtcccgggggttccggccgtaggtgggattgggtcggtactcttgtctatggctaggatgggttggaaactatgtcacgtcttccgtccgtataccgtggtgctaaaatgtggaatggttggcctgggttggcttgggacgagctgggacccagggtcgggttgccagttcggtctgaatcatcgtaggccttgggttaaggcaggtttacccttttcttccttcttcaaatttcaactagtactagatggtcagatgtttaacagagaaaaaggaaagaatgtcagcgggtatgcctcaagtaactcaagttttcaactcaatccaccactggcctcaagagagttaaccagggcacacccttggtccattccgagcatgctgcttggttcacagctaccattggttggaagtcaagaccaaaatcagtatgtgtttgatcgagcatttgccacccaggtcgatgagcttccaatgccagaagaggatgtccccttttgtcacgattgtagagagcaaggacactatgccctgaattgtccatgggtatatgccaaagaagctccttcctttggtttagcagggcaggcatcgctaaaccagcctcctcgcaccaagtcaagcttgcagcctagtgtgccaagtagagagcccaatggagagaatccattgaatcccgagaattgctttcctcctagcctttcgtaccacgtggggtcacgtactaagcaagccaaaggcaagaagagtaagaatcagaagagaaaagcaccgatgcgaactgaagaagaagtacgtaagatgactattaccagcaccgaatggcctccagcagggataactattcctagacatcaaagaggaaataccttccgaggtgcacgacagttgacccagcacctcctaagccatggtggcagagtatctgatagtgaagggtcagatcaagtctcctcggatgatgaagatgagtctccccgacatctcggcgaggaagaaatggaatcaaaggcatgcacccgttgtggagaaattggacacgttgctagcatgtgtcttacactctgccctcattgtgaggaagaccatccaccaggtgaatgtcccacccgcaaggtgacatgttttctgtgcgaaggtacaaaccatgtgcccaaggattgccaactcagtgtgttgttgaccaagaccgcagaaatccaacgaacaaccctacggttgtctcatcagctagtcagctccaatagcaacatcgacaatatcatccacaacaccaatgctcctcctgctccacctgactctgcaataaatcatagcaataataccttcagcaccaaccattctctgcaccgacagcctcagcaaagaattgttgtcgatggaagaagttgtgtctctccccgacctactccaggccgagcaaagggcaatcaatctcaggagggcgataccaagcagaagaccgttctctgcttcaaatag

SEQ ID NO: 22916 - DNA, 4977 bp, Oryza sativa
  Clone ID: TF_OsC1713_5087
ttaccagttgccgaatagatgcgggtactccgtcctcaagaattcttcgccttcccaggtggcttcgtcctcagtgtgattactccattgtaccttgtacatacgccacactttgctcctagtcctcttttctgcttcatccaatatccggatcgggtgttctggatatgtgagatcattgctaatgtgaatctcttccagcggggcttgttcttccggcactcgtaagcatttctttaattgggacacatggaagactgggtgcacatcggcgatatattctggtagctgtaactgatatgcgacttctcctcgcctggcgatgatctggaatggccccacatatcttggtgccagttttcctttaaccttaaacctttttgttcccctcatcggagaaacctttagataaacgtaatctccttccttaaattccaggtttcttcttcgagtgtcggcgtaactcttttgtcgtgattgtgctacttttagacgatcacggatcaagcgaaccttttcttcggcttcttgaataatgtcaggtccaaataccgcccgttctccagtctcggaccacattagcggggtacgacatcgtcgaccaaacaatgcctcattgggtgacatctttaggcttgcttgaaagctgttgttgtaagagaattcggcgtagggcaaacacctctcccagtccttgctaaaatccagagcacaagccctcagcatgtcctccaggacctggttggttctctccgtctggccatctgtctgtggatgataagcggtgctaaatgcgaggtaacttcccagggcttcatggactttctcccagaaatgtgaggtaaactgtgtgcctcgatcagatataatcttcttaggtataccatgaagacacactatcctggtcatatacaactcggcgagttttgcactgctataatttgtcttaacgggaatgaatctcgccgtcttggtgagtcgatccacgattacccaaatggaatcatatcctgttgcggtcttgggcaatccaacaatgaaatccatacctatctcatcccatttccattcgggaatcctgagaggttgcaacaaacctgccggcctctggtgttcagccttcaccttctggcatacgtcgcagagtgctacgtattcggccacatctctcttcatgttgggccaccagtatccttccttcagatcttggtacatcttcgtacttccggggtgcaatgaatatgccgattcgtgagcttcctttaaaattaatcccctcagtccaccctgttcgggtacgtaaattctctttttataccatagaacatctttttcgtcggttgaaaattcctttgcacgtccggcagctaagcgttccttcacctctcggacttcctcattgtccttctgggcttcttctatttgggttctcaaaagaggttgaatatccagggtgtttatctgtccatggggtactatatgtaggttcagctgcgccatttcctccctaagctcagggaccatcccttccgttctcagatgattgcaatggctcttacgactcagagcgtcggctacgacgtttgctttgcctgggtgataatgaacctctaaatcatagtccttgattaattctaaccatcgcctttgcctcaagttgagatctgactgggtgaagatatactttagactcttgtggtcagtgtagatatcgcaatggtttccaatcagataatgtctccaaatctttagtgcatgaaccacagctgcgagttctaggtcatgggtagggtagttttcctcatgtggtcgcaattgtcgcgacgcataggccaccacttttccctcctgcatcagtacacctcctagtccttgcctcgacgcatcacaatatacaacaaagtctttcctgatgtcgggaagaactaaaataggtgctgaggtcagcttttctttgagctgctcaaagcttccttgacactgttccgaccatgcaaacttcttttccttcttgagtaattgtgtcattggtcgggctatcttagagaacccttcaatgaaccttcggtagtatccagccaagcctagaaaactccggatttcagtcaccgatttgggtgctttccattccgtgacagcctccactttagcagggtccactgctactccaccggctgagattacgtgacccagaaaagcgacttccttcaaccaaaattcgcacttgctgaattttgcgtataacttgtgctttcggagtttctggagaaccaatcttaagtgttccgcatgttcttcctcatctttggagtagattagaatgtcatcaatgaataccaccacaaacttatccaagtaatccatgaatactttgttcataagattcatgaagtatgctggggcattggttagaccaaacgacattactgtgaattcatacaacccatagcgtgttgaaaacgcggttttggggatatcctcggtcctaatcttcagttggtggtatcctgatcgaaggtctatctttgaaaacaccttagctcccttaagttggtcgaagaggtcatcaatccgtggtaggggatacttatttttgatagtcacttcgttcagtgatcggtagtctacacacattctcatgctaccgtctttctttttaacaaataacactggggctccccaaggtgacgaactggggcgtacaaatcccttctcttgcaactccctaatttgctttttaagttcttctaactcattgaccggcatccgatatggtctcttggatatgggggcagttccgggtatcaggtcaataatgaactctatgtcacgatctggtggcattccaggtaaatcttctgggaacacatcaggaaatcgctgcactactggcattccctttaggggtagcatggtaaatatacctccggcacgttcggttagcctaggatcttgatccatggttgctctcatatccgatccccagggtgtggtcagggtaacttctctacgtctacagtcaattactcctctatgctttgctaaccaatccatacccaaaatgacatcaagagtttggggtattagcaccataagattggagggaaataccacatccctaaggcggatgggtacgtcaatgcaagctgtatccactgctatctcacccccaggcgaatgtactaacattggttgtcttaatttaactctggttaaattgtgttgttgacttgctttcaaagatataaatgaatgcaatgctcctgaatcgaagagaactttaattggagtggagttgagtgaaaacatacccatcagtacgccttgatcttcctgggcctcttcagctcgaacatggttcacttgcccgcgcccaaatccagtggtggtcctgttcggttgcggagtcttgaataggcctcgcccgacagcaggggtagtagtgccgcgaacagtcattgcgttcgcgccagttcggacaggggttttgcgtggatgagggcagttgttagcgtagtgcccgtatttcccacagttgaagcagtccacattcttcttggccccaggggcagccaaagttggtgtaggggtgcggttctgaagtgcaactggcctgttgaagttgctaagtgcagcgggacggttggtcaccatgacagggggcttccatccggacggagtggctcccttaagtcgctgaggcattgtctgaggtgggcgactcatagcaagcctcctcttgcggttgtgttccaccgtcctttgatcgttctctagcctgacgaccttgttgatcaggctctggaaactctcgtgatcctgcccgatcataggtccacgcaattcatcattcagcccttctatgaacttgtcgatcttttcttcttcatccgccaggtctccaattgcgtagcgagccaactgagtgaacttgtttagatactcctgcaccgttgtattcccttgccgcagtcttctaaactcgttcttcttcatgcgcatcactgcagtaggtacgaaattctcgcgaaacgctgcagtgaactcctcccaggtgggttctccagcaccgtcttctcgggcctccttgtaggtatcccaccaatcaccagcgggtccttccagctggttcactgcgaagatcaccttgtcggcttcgcgtaccctgactagagtcagtttcttttctatgatgcggagtccccacggctcggaagtagtggcctctaaatctggcttgggcttcttgcccggaggtcgtgtgctcttgcgggcattgctgagggtacgagggcctccgatgaaggtaatgcgggggacaggagtcgcgtcctctgaaggatcagtgatgtccggctctatctctggctcggtgtcggtcccctctgtctcggagtcgacctgaatcggagtctctaaactggaccctggctggagctgtgccttcagcgagtctatctcgctgccccaagcctgatgctcctcctctagctgaagctgttgtgctgtgaggtcagttaccttggtctccaactctcccatacgcctctgctggtcgtcgatctccaacagggcctcctcgtagaagtcgtccacagcctcagcccatcgggacagtcgagtcaccatcgggttatagcagcaaggtatgtcctgaactgtgcagacagagttgctctcctcccgaaacggatggtgagcaaactcggtactcgctaactctgcccagtgaatagaactaagtcagaggaaggcctcccgggctgcgtcctgcatcgcggtctccggtaagtcacgacggtggcgtgtcgagaagctgtagtctgactctgaagggactcgcggatgaacctcaatccggccctcccaaaagggtccacattgtctcactcggtagatcggaaatctggggtaccgaaggcgcctcatcacccgatgtagctctatgacgtatccctctgagcggggtacgcccat

SEQ ID NO: 22917 - DNA, 3836 bp, Oryza sativa; identical to SEQ ID NO: 15552
  Clone ID: TF_OsC1528_1929

SEQ ID NO: 22918 - DNA, 1248 bp, Oryza sativa; identical to SEQ ID NO: 15562
  Clone ID: TF_OsC1713_4811

SEQ ID NO: 22919 - DNA, 2940 bp, Oryza sativa; identical to SEQ ID NO: 15570
  Clone ID: TF_OsC1713_3954

SEQ ID NO: 22920 - DNA, 2469 bp, Oryza sativa; identical to SEQ ID NO: 15581
  Clone ID: TF_OsC91_2446

SEQ ID NO: 22921 - DNA, 4932 bp, Oryza sativa
  Clone ID: TF_OsC1713_5219
ctattgagcgccatcgtctgcatcaccctcctggtaataggcatagggatcctccgaagcttcatctccggcctcggcggcggcggcccaaggcggcaacgctcggtaccacacctggcgcggcgcggtggcttcgaggcgacggcgcggcgcatgaaggcggcggcgcggcgcacaacggcggcggcccatggagaaggaggagaagggggaaaatggaaaggatgggtgtggggtggaaaaggggaggggccgggttttataagggcgtgggggaggggcggacggcctcatggcgacgcgacaggcggtgcgcggtgtggctggcggcgatggcgacgggcgggcggcgcggcgcggggctcggcgcgacggcgacggcgatgcaacgatgacgggcgagcggcgcggcagggtgcggggcgcgaggcggcgacgcgacgggcgagcggcgcgcggggcgcgtggcgcgaggcggcgacgcgacgggcgagcggcgataggacggccgacggcgacggcgcggcagcggcggcacggggcgcgagataacgcgacggcgacggcgacggcgatgacacgcggcgacgggcggcgacgtgacggcggcgcggggctcgaggcgatggaacggcagcgcggggctcggggcggccacgcgcggggcagagtgggaggggggttagggcggtcttcgaacagatgcgggtattctgtcttcaagaattcttcactttcccaagtggctttatcctcagtgtgattactcaattgtaccttgtacatatgccacactttggccctagtcctcttttctacttcatccagtatccgaactggatgctctgggtacgtgagatcattgctaatatgaatttcctccaacggagcttgctcctccggcactcgcaagcacttctttaattgggacacatggaagactggatgcacatcggcgatgttttctggtagctgtaactgatatgcaacttctcctcgtctagcgatgatttggaaaggtcccacatatcttggtgctagtttccctttaaccttaaacatttttgtacctctcatcggagaaaccttcagatatacataatccccttccttaaattctagatctcttctccgggtgtcagcgtaactcttttgtcgtgattgtgccacttttagacggtcacggattaggcgaaccttttcttcggcttcttggataatgtcaggtccaaataccgtccgttctccagtctcggaccacattagtggggtacgacatcgtcgaccaaataatgcctcatttggcgacatctttaggctcgcttggaaactgttgttgtaggagaattcggcgtagggcaaacatttctcccaatccttgctaaaatccaaagcacaagctctcaacatgtcctccaagacctggtttgttctctctgtctggccatctgtttgtgggtgataagctgtgctaaaagcaaggtaacttcctagggcttcatgtactttttcccagaaatgcgaggtaaactgtgtgcctcgatcggatataattctcttaggcacaccatgaagacatactatccttgtcatgtataactcagctagcttggctccgctataatttgtcttgacggggatgaaccttgcagtcttagtgagtcggtccacgattacccaaatggaatcgtaaccagttgcggtcttatgcaatccaacgataaagtccatacctatctcgtcccatttgcattctggaatcctaaggggttgcagcaaacctgccggtcgctggtgctcggccttcaccctctggcatacgtcgcagagtgctacgtattctgctacatcccttttcatgttgggccaccagtatccttccttcaggtcctggtacatcttcgtacttccggggtgtaatgaatatgctgattcgtgagcttcccttagaattaatcccctcagtccaccctgttcgggtacgtaaatcctcttcttataccatagtgtttccttctcatcaattgagaattctttcgcacaaccagcggctatgcgctccttcacctcttggatctctccgttgtccttctgggcttcctctatctgggtcctcaaaaggggctggatgtccaaggtgtttatttgaccataaggaactaaatgtaaattcagttgggctatttcctccttaagttcaggggttatcccttccatcctcagatgattgcaatggctctttcgacttaaagcgtcggccacaatgtttgctttgcctgggtgatagtgaacctctagatcataatccttgattagttccaaccatcgcctttgcctcaagttgagatctgactgggtgaaaatatacttcagactcttgtagtcagtgtagatatcgcaatggtttccaatcaaatagtgtctccaaatctttagctcatgaaccacgactgctagttctaggtcatgggtagggtaattttcctcgtgtggtcgcagttgtcgcgatgcataagccacgtcctttccttcttgcatcagtactcctccccagtctagaataggcgccgaggtcagcttttctttgagctgctcaaagctttcctgacactgttctgaccacacaaacttcttttccttcttgagtagttgtgtcattggtcgggttatcttagagaacccctcaatgaaccttcggtagtatccggccaagcctagaaaactccgaatttcagtcacagatttgggtgctttccattccgtaacagcctccactttagcaggatccactacaactccaccggctgagattacgtggcctagaaaggcgacttcttttaaccagaactcacatttactaaactttgcatataatttatgcttccgaagtttctcgagtaccaaccgcaagtgctccacatgctcttcctcgtctttggagtagattaaaatatcatcgatgaatactaccacaaatttgtccaagtaatccatgaacactttgttcataagattcataaagtatgccggggtgttggttaatccaaacgacattactgtgaactcatataatccatagcgtgttgagaacgcagtcttgggtacatccccggtcctaattttcaattggtggtatcctgatcgaaggtcaatcttagagaacaccttagctcctttaagttgatcgaaaagatcatcaatccgtggaagtggatacttgttaaatcccttctcttgcaactctctgatttgctttttaagttcctccaactcattgactggcatccgataaggtctcttggatatgggagcagttccgggtatcaggtcaataatgaactctatgtcacgatctggtggcattccaggtaaatcttctggaaacacatcgggaaatcgctgcactatgggcattcctttcaggggtagcatggtaaatatgcctccggcacgttcgattagtctaggatcttgatccatggttgctctcatatccgatctccagggtgtggtcagggtaacttttctacgtctacagtcgattactcctctgttcttcgtcaaccaatccatacccaatatgacatccagggtctgaggtatcaaaaccaaaaggttggagggaaacaccacatccctaagacgaataggtacgtctatgcaagcatgactcacagttatctcgcccccaggtgagtgtactatcataggctttctaagtcccactagggttaagttgtgcttttgactagccttccgagatatgaatgaatgcgatgcaccagaatcgaagagaactttaaccggggtggaattgatagagaacatacccattagtacgccctggtcttcctgggcctcttcagctcgaacatggttcacttgtccgcgtccaaatccggtagcggtcctgttagtttgcggagtcttgaatagacctcgtccggcagcaggggtagtagttccacgaacagtcattgcattagcgccagtacggacaggagttttgcgtggatgagggcagttgttggcgtagtgcccatactccccgcagttgaagcagtccacattcttcttggctccaggggcagccagagttggtgtaggggtgcggttctgaatcacaaccggcctgttgaaattactaggcgcggcgggacggttgggtgccacaatagggggcttccacccagacgaagtggctcccttgagtcgctgaggcactccctgaggtgggcgattcatagcaagcctcctcttgtggttgtgctctacagtcctttgatcgttctccagcctaacgactttgttgatcaggctctggaagctctcatggtcttgcccaatcataggtccgcgcaattcatcattcagcccttctatgaacttgtcgatcttttcctcttcatctgcgaggtctccaattgcatagcgggccaactgagtgaaccggttcagatattcctgcaccgttgtgttcccttgtcgcatccttctaaactcgttcttcttcatacgcattaccgcagcaggcacgaagttctcttgaaatgctgcagtgaactcttcccaagtgggttctccagcatcctcttcccgagcttccttgtaagtatcccacctatcaccagcgggtccctccagttggtttactgcgaagatcactttgtcggcttcgcgtacccggacaagagtcagtttcttctctatgatgcgtagccaatcttctgcctccatgggctcgtctgccgtagtgaacgtgggtggcttggtcctcataaactctccaaagcttgatcgtccgcggttgccttggttgtttgcaatggcttgcagaagttgggtttgagtggccataactccggccagggtggttaggtcaggtgtttgagtttcttcattgctgattgacgcccgacgtcggcttgccat

SEQ ID NO: 22922 - DNA, 5454 bp, Oryza sativa
  Clone ID: TF_OsC1713_5309
ttaccggttttcgaatagatgtgggtactctgtcctcaagaattcttcgctttcccatgtggcttcatcctcagtgtgattgctccattgtaccttgtacatacgccacactttgctcctagtcctcttttcggcttcatccaatatccggatcgggtgttctggatatgtgagatcattgctgatgtgaatttcttccagcggagcttgctcttctggcactcgtaaacatttctttagctgagatacatggaagactgggtgtacatccgcgatattctctggcaactgtaactgataggcaacttctcctcgcctggcaatgatctggaatggtcccacatatcttggtgccagttttcctttgaccttaaacctttttgttcccctcatcggagaaacctttagataaacgtaatctccttccttaaattccaggtctcttcttcgagtgtcggcgtaattcttttgtcgtgactgtgctactttcagacggtcacggatcaaacgaaccttttcttcggcttcttgaataatgtcaggtccaaataccgcccgttccccagtctcggaccacattagcggggtacgacatcgtcgaccaaacaatgcctcattgggtgacatctttaggcttgcttgaaagctgttgttgtaggagaattcggcgtagggcaaacatctctcccaatccttgctaaaatccagagcacaagccctcagcatgtcttccaggatctggttggttctctctgtctggccatctgtctgtggatgataggccgtgctaaatgcgaggtaactccctagggcttcatggactttctcccagaaatgtgaggtaaactgggtgcctcgatcagatataatcctcttaggtataccatgaagacacactatcctggtcatgtacaactcggctagcttagcactgctatagtttgtcttaacgggaatgaatctcgccgtcttggtgagtcgatccacgatcacccaaatggaatcatatcctgttgcggttttgggcaatccaacaataaaatccatacctatctcatcccatttccattcgggaatcctgagaggttgcaacaaacctgccggcctctggtgttcagccttcaccttctctcggacttccttgttgtccttctggacttcttctatttgggttctcagaagaggttgaatgtccagggtgtttatctgtccacggggtactatatgtaggttcagctgagctatttcctccctaagcttagggaccatcccttccattctcagatgattgcaatggctcttacgactcagagcatcggctacaacgtttgctttgcctgggtgatagtgaacctctaaatcatagtccttgattaattctaaccatcgcctttgcctcaagttgagatctgactgggtgaagatatactttagactcttgtggtcagtgtagatatcacaatggtttccaatcagataatgtctccaaatctttagcgcatgaaccacagctgcgagttctaggtcatgggtagggtagttttcctcatgtggtcgtaattgtcgcgacgcataggccacaacttttccgtcctgcatcagtactcctcctagtccttgcctcgacgcatcacaatatataacaaagtctttcctgatgtcgggaagaactaaaataggcgctgaggtcagcttttccttgagttgctcaaagctttcctgacactgttctgaccacacaaacttcttttccttcttgagtagttgtgtcattggtcgggctatcttagagaacccttcaatgaaccttcggtagtatccagccaagcctagaaaactccgaatttcagtcacagatttgggtgctttccattccgtgacagcctccactttagcaggatccactgctactccaccggccgagattacgtggcctagaaaagcgacttcttttaaccagaactcgcacttgctgaattttgcatataacttatgcttccgaagtttctggaaaaccaatcgtaagtgttccgcatgttcttcctcatctttggagtagatcagaatgtcatcgatgaataccaccacaaacttatccaagtaatccatgaatactttgttcataagattcatgaagtatgccggggcattggttagaccaaacgacattactgtgaattcatacaacccatagcgtgttgaaaacgcggttttgggaatatcctcggtcctaatcttcagttggtggtatcctgatcgaaggtcgatctttgagaacaccttagctcccttaagttggtcgaagaggtcatcaatccgtggtagtggatacttgtttttgatagttacttcgttcagtgatcggtagtctacacacattctcatgctaccatctttctttttaacaaacaacactggggctccccaaggtgacgaactggggcgtacaaatcccttctcttgcaactctttgatttgctttttaagttcttctaactcattgaccggcatccgatatggtctcttggatatgggggcagttccgggtatcaggtcaataatgaactctatgtcacgatctggtggcattccaggtaaatcttctgggaacacatcaggaaatcgctgtactacgggcattccctttaggggtagcatggtaaatatacccccagcacgttcggttagcctaggatcttgatccatggttgctctcatatccgatccccagggtgtggtcagggtaacctctctacgtctacagtcaattactcctctatgctttgctaaccaatccatacccagaatgacatcaagagtttggggtattagcaccataagattggagggaaataccacatccctaaggcgaattggtacgtctatgcaagcatgactcacagttatctcgcccccaggtgagtgtactatcataggctttctaagtcccacgagggtcaagttgtgcttttgactagccttcagagatataaatgaatgcgatgcaccagaatcgaagagaactttaaccggggtggaattgatagagaacatacccattagtacgccctgatcttcctgggcctcttcagctcggacatggttcacttgtccgcgcccaaatccagtggtggtcctgttcgattgcggagtcttgaataggcctcgcccgacagcaggggtagtagtgctgcgaacagtcattgcattcgcgccagttcggacaggggttttgcgtggatgagggcagttgttagcgtagtgcccgtattccccacagttgaagcagtccacattcttcttggctccaggggcagccaaagttggcgtaggggtgcggttctgaagtgcaactggcctgttgaagttgctaagtgcagcgggacggttggtcaccatgacagggggcttccatccggacggagtggcttccttaagtcgctgaggcactgtctgaggtgggcgactcatagcaagcctcctcttgcggttgtgttccaccgtcctttgatcgttctctagcctgacgaccttgttgatcaggctctggaaactctcgtgatcctgcccgatcataggtccacgcaattcatcattcagcccttctatgaacttgtcgatcttttcttcttcatctgccaggtctccaattgcgtagcgagccaactgagtgaacttgtttagatactcctgcactgttgtattcccttgccgcagtcttctaaactcgttcttcttcatgcgcatcactgcagcaggtacgaaattctcgcgaaacgctgcagtgaactcctcccaggtgggttctccagcaccgtcttctcgggcccccttgtaggtatcccaccaatcaccagcgggtccttccagctggttcactgcgaagatcaccttgtcggcttcgcgtaccctgactagagtcagtttcttttctatgatgcgtagccagtcttctgcttccatgggctcatcggccgtagcgaacgtgggcggcttggtcctcatgaactctccaaagcttgaccctccgcggttgccttggttgctcgcgatagcttgcagaagttgagtttgggtggccataattccggccagagcgtttaagtcgggtgtctgagtttcgtcattgctggttgttgcacgacgtcggcttgccatcataaataaccggagtccccacggctcagaggtagtggcctctggatctggcttgggcctcttgcccgggggtcgtgtgctcttgcgagcagtgctgagggtgcgagggcctccgaggaaggtgatacagggaacaggagcctcatcctctgaaggatcagtgatgtctggctcgatctctggctcggtgtcggtcccctctgtctcggagtcgacctggatcggagtctccaaattggaacccagctgcggagaaggtgtagggatcagtggagtgtgaaccaactccggaacaggtggctgtgtcgctgtagggtccactaggtagggcgctgactcagtagctagcatactagcctctcccagaagagcgtggaacgccggtgggtacggcggggtgaggaagaagtagcggtcacggcctaccgctgtggaagtagaagcccctgtagtgctgatcttggctgctcgaagctgctcctccagctggctgacgtgctcctgactctctctcagctgctcctcaagagtatccatcatcccgcggcgatcgttgtactggtcggataactgctggaactgatcgccgtggacctggagctgtgccttcagtgagtctatctcactgccccaagcctggtgctcctcctccaactgaagctgctgtgccgtgaggtcggtcacctcagtctctaactcccccacacgtctctggtggtcgtcaatctccaacagagcctcctcgtagtagtcatctactgcctcagcccatcgtgacaaccgagtcaccatcgggttgtagcagcagggcgtgtcctgaactgtgcaaactgagttgccctcctcccggaacgggtgatgagcaaactcggtactcgctaactcagctcggtggatagagctgagtcggaggaaggcctcccgggcagcatcctgcatcgcggtctctggcaggtctcggtggtgacgtgtctgaaagctgtagtccaactcggaagggactcgggggtgaatctcgacccgagcctcccaaactgagccacactgcctcactcggtaagacgggaacccagggtatcgcagacgcctcaacatccgatgcagctcaatgacatacccctctgattgaggtaagctcaactcccaggtagcgggtgaatccgaatctgccatcggtgagttcgccgcgtcgccctctacccgttggtgccctccgttcgcgtcgtcgagccgtcgttcgccggcgagcttgcgctcccgagccgccgccggtgctgacgtcatcgctgacgtcat

SEQ ID NO: 22923 - DNA, 6426 bp, Oryza sativa
  Clone ID: TF_OsC1713_5419
ttacaggttttcgaataggtgggggtattctgtcttcaagaattcttcgctttcccaagtggcttcatcctcagtgtgattactccattgtactttgtacatacgccacactttggttctagtcttctttttagcttcatccaatatccggactaggtgttctggatacgtgagatcattgctgatatgaatttcttccaacgtagcttgttcttccggcactcgcaagcacttctttaactgagacacatgaaagactgggtgcacatcggcgatattttctggtagctgtaactggtatgcaacttctcctcgtctagccgtgatttgaaaaggtctcacatatcttggcgctagttttcctttgaccttaaaccttttcgttcccctcatcggagaaacctttagataaacgtagtctccttccttcaattccaggtttcttcttcgggtgtcggcgtaactcttctgtcgtgattgtgccacttttagatggtctcgaatcaggcgaaccttttcttcggcttctttgataatgtcaagtccaaatatcgcccgttcacctgtctcggtccacattagtggggtacgacatcgtcgaccaaataatgcctcatttggcgacatctttaggctcgcttggaaactgttgttgtaggagaattcggcgtagggcaaacatctctcccagtctttgctaaaatccattgcacaaactctcagcatgtcctccaaaacctggttggttctctccgtctggccatctgtctgtggatgataagctgtgctaaacgcaaggtaacttcctagggcttcatgtactttctcccagaaatacgaggtaaactgtgtgcctcgatcagatataatcctcttaggtacaccatgaagacacactatcctggtcatgtacaactcggtgagtttagcactgttatagtttgtcttgacggggatgaatcttgccgtcttggtgagtcgatccacaatcacccagatggaatcgtaccctgttgcggtcttgggcaatccaacaataaaatccatacctatctcatcccatttccactcgggaatcctaaggggttgcagcaaacctgccggtcgctgatgctcagccttcaccttttggcacacgtcacagagtgctacgtattctgccacatctctcttcatgttgggccaccagtatccttccttcagatcctggtacatcttcgtacttccggggtgtaatgaatatgctgatttgtgagcttcctttagaattaatcctctcagtccaccctgttcaggtacataaatcctctttttataccataggacatccttctcgtcggttgaaaattcctttgcaaatcctgcaactagacgttccttcacctctcggatttcctcgttgtccttctgggcctcttctatttgggttctcaaaagaggttgaatgtccaggttgtttatctgtccatgaggtaccatatgtaggtttagttgggctatttcctccttaagctcaggagccatcccttccgtcctcagatgattgcaatggctcttccgactcaaagcgtcggccacaacgttggccttgccggggtgatagtgaacctctagatcatagtccttgattaattccagccatcgcctttgcctcaagttgagatctgactgggtgaaaatatacttcagactcttgtggtcagtgtagatatcgcaatggtttccaatcaaatagtgtctccaaatatttagcgcatgaaccacagctgcgagttctaggtcatgggtagggtagttttcctcatgtggtcgcaattgtcgtgatgcataggccacaacctttccgtcctgcatcagtactcctcctagtccctgccttgatgcatcacaatatataacaaagtctttccagatgtccggaagaactaaaataggcgacgaggtcagcttttctttgagctgctcaaagctttcctgacactgttctaaccacacaaacttcttttccttcttgagtagttgtgtcattggtcgggctatcttagagaatccttcaataaaccttcggtagtatccggctaagcctataaaactccgaatttcagtcacaaatttgggtgctttccattccgtaacggcctcaactttagcaggatccattgctactccaccggctgagattacgtggcctagaaaagcgacttcttttaaccagaactcacatttactaaactttgcatataatttatgcttccgaagtttctcgagtaccaatcgcaagtgttccgcatgttcgtcctcatctttggagtagattagaatatcatcaatgaatactaccacaaatttgtccaagtaatccatgaacactttgttcataagattcataaagtatgccggggcgttggttaacccaaacgacattactgtgaactcatacaatccatagcgtgttgaaaacgcggtcttgggtatatccccggtcctaattttcaattggtggtatcctgatcgaaggtcaatcttagagaacaccttagctcctttgagttgatcaaaaagatcatcaatccatggtagtggatacttgttcttgatagttacttcgtttagtgaacggtagtctacacacatcctcatgctaccatctttcttcttgacgaatagcactggggctccccaaggtgacgaactggggcgtacaaatcccttttcttgcaattctctgatttgctttttaagttcctccaactcattgactggcatccgataaggtctcttggatatgggagcagttccgggtatcagatcaataatgaactctatgtcacgatctggtggcatcccaggtaaatcttccctctgttctttgttaaccaatccatacccaatatgacacccacggtctggggtatcaaaaccataaggttggagggaaacaccacatccagttatctcgcccccaggtgagtgtactatcataggctttctaagtcccactagggttaagttgtgtttttgactagcttgtccgcgtccaaatctggtagcggtcctgttagtttgcggagtcttgaatagtcctcgtccggcagcaggggcagtagttccactaacagtcattgcattagcgccagtatggacaggagttttgcgtggatgagggcagttgttggcgtagtgcccatactccccgcaattgaagcagtccacattcttcttggctccaggggcagccagagttggtgtaggggtgcgattctgaatcgcaaccggcctgttgaaatttctaggtgcggcggggcggttggttgccacaatagggggcttccacccagacgaagtggctcccttgtgtcgctgaggcactccctgaggtgggcaattcatagcaagcctcctcttgcggttgtgccctacagtcctttgatcgttctccagcctaacgaccttgttgattaggctccggaaactctcatgatcttgcccaatcataggtccacgcaactcatcattcagcccttctatgaacttgtcgatcttttcttcttcatttgcgaggtctccaattgcatagcgggccaactgagtgaatcggtttagatattcctgcaccgttgtgttcccttgttgcagccttctaaactcgttcttcttcatacgcattaccgcagcaggcacgaagttctcatgaaatgctgcagtgaactcttcccaagtgggttctccagcatcctcttcccgagcttccttgtaagtatcccaccaatcaccagcgggtccctccagttggtttactacgaagatcactttgtcggcttcgcgtacccggacaagggtcagtttcttctctatgatacgtagccaatcttctgcctccataggcttgtctgccatagcgaatgtgggtggtttggtcctcataaactctccaaagctcgatccgccgcggttgccttggtcatttgcaatggcttgcagaagttgggtttgagtggccataactccggccagggtggttaggtcaggtgtctgagtttcttcattgttggttgacgcccgacgtcggcttgccatctgtgtaggccgattaagtaagtatcctaattttctaactagctcttgtggttttatcccattaagggagttgttttggtgtgaactgagtccccacggctcagaagtagtggcctctggatctggcttgggcttcttgcccgggggtcgtgtgctcttgcgggcagtgctgagggtgtgagggcgtccgaggaaggtgatgcggggaacaggggtctcatcctctgaaggatcagtgatgtctggctcgatctctgctcggtgtcggtcccctctgtctcggagtcgacctggatcggagtctccaaactcgaacctagtaccccaagcctggtgctcctcctctagctgaagctgctgcactgtgaggtcagtcacctcggtctctaactctcccacacgcctctgctggtcgttgatctctaacagagcctcctcgtaaaagtcgtctactgcctcagcccatcgtgacagtcgagtcactatcgggttgtagcagcaaggtgtgtcctgggccgtgcagacggagttgctctcctctcgaaacgggtggtgagcaaactcagtactcgccaactcagctcggtggatagagctaagtcggaggaaggcctcccgggctgcatcctgcatcgcggtctcaggtgaatcgtgatggtggcgtgtcgaaaagctgtagtctgcctctgaaggaactcgtggcctcatgtcagcttgtgcctcccatccaaatccacactgcctcactcggtaagtagggaacctcgagtatctcaaacacctcatcatacgcgatggcgacaccactgtagacacccgcctcgcggacgtggcgcggcactcggtgcggtgcggcgtcaccgaggtcggcggcgtggcggctcaaatgcggcggcgcgaaggcggtggcgtggtggcacaacggcgacacgggggtgacgcgacggtggcgcggcggcgcggggcgcgaggcggcgataggacgcgcgcgcggcgatggaacggcgacagcgacggcgcggcagtggcggcaaggggcgcgaggcggcgatggaacgcgcgcggcgacgggacatcgacggcgacggcgacaacggtggcgcgcggctcggggcgggacgcgacgtgcggcgacgcgacgggcggcgacacgagatcgaggcggcgacagcgacgggtgttacacttcagtcattcatcgatatcatcaatgacctccgagtacgtgggttgtcggggtatgaagtcgctgccgacttcattggtttgaacagcgaaaccgtggagcgccgtgttggccaggtgatgatgagcggccccacgatggcgagcaacgtccctgcccctctttgcgagaaaggggcagctgagggcgaagctgcaatcaacgctctccctctaactgacgtcatcgggccgctcgtggaccaccaggcggcggcatcgctgaaggaggacgtcgccaaggaagcgtccgatgttgcccccgttgctgccacgaccagtggcggcaccgttccgaagaaggggaggaagttttcctccgtgctcggtaaccgtcggaaagcacccactccatcggcctcggatgcgtctcccccacctccgcgacggcagaggctggtgacacttggcgagaagcggctcgtcttgatggccattacgggaatttttcatagggcggtgtgggcgaaggcggcacaagacgggtctggagggaactctagtgcgtctcctgcagtggccttgacagatgtcgtggtcgtgcccaggagccgtgaggcgacgcccagcggccctgccggcgaccttgtgcctgctcgaggcccacccgctgacgtcctcacctgggaggagctccaaatcgagatggggcgcatcctccaggctggcgctcgtggcataggtcgcgagattgcggcggcgagggcggcggcggcttcgtcggcgaacgaacgcgccgacaagttggcgcgttacctggcggaggttcgcgaggacctccagaagatgagggagctggtggccggcaacgagcggcaatggcaggggctcgagcaccgcatgtcgaagctcgagaacaacctgtcggacatccgtggctcgctgcgggttacctacaccggcctgcaccagctcaccggggagtgcagtgtcacgaccaccatcccggtgaatcccgatgagttctcgctgatgacttcgctcgcgaaactagcgatgatgatggaggcgatcccctccaagcatgcggccaggatcggggaggagacgtcaaacgggatctacaccgggacgtgtcacatcctcgcgtgcgtaaggttggcgcaccctgaactcgatctctag

SEQ ID NO: 22924 - DNA, 7249 bp, Oryza sativa
  Clone ID: TF_OsC359_6331
gtgacaagttggtatcagagccaccttgaccttaggataagccaaatgatgccgccccattcaccgagaaatttgatcaaggtgttaggattcgtcagggagctgaggttgatggcttttgaggtaggctatgaagttgctcctgagtatcgccggatttcccatgaccccgacgaggagaagtgtcgtgttcgtgtaacgttggctagtgatcgtgaagaccttccgtccattaagttcgaagctggaggaagatcgtacagccaggcttgtcaagaagcagctctggtggccattggagagttgcgtcaacgctttgaagaagagttggattcatcagctttccagtatcatcctcacaagcctcatggtcaagactatggaacctatacctgtcctgatggtgaagagagtgccactctgatgcatgcggtgcatatgcttagtgctatggatgcagtaagtgtggagcgagacaaagcagctcatgacagggaaaattggaatcgaggcaagatttgcaagttggagagcaaggtgtatcgtctacagaaggaattagctgaacttaaaggagaaacgccgcctccaacacccaagcttcacctcatcgcaagaaagagaacctgtccgccacctcgtctccagttagcttcgaagattcgcgtgatgggtgaagctgtgcccgatcgtgctgaacctgtcatcgacatcataagtgatgaggaagaagaggaagaccctgaagaaagagagccagctactccagaggaagaagatccatcgcttcgttccgacgcaaggcgcaccaccaatcccgtagaagcaggagattggctgcatgcggtggagaagaagttggacttgatccagtgtactgagcaggagaaagtttcttttgcttcgcatcaactgcatggacctgctgctgaatggtgggatcattttcgccaaggcagggctgaaggagagcctattacgtggcaggaattcacggccgctttcaagaagacgcacataccagcgggtgttgtagctctaaagaagagagaatttagagcactcaaccagggatctcgttcggtcaccgagtacctccatgatttcaaccgtttagctcgctatgctccagaagatgttcgttcagatgaagaacgtcaggagaagtttttagagggactgaatgatgagttgtcttatgctttgatgtctacggattttcgggatttccagcagttggtggacaaggcgattcgtcaggaagacaagtataaccggatggagcagaagaaacgcagggctgcccaattcaaggcacaacagggcagtaaccagaggccgcgtctcgttactggacctcaagctccatcgtaccctcaaggaggatcttcatcagttgtccgctcccaacgccagttctacaacaacaatactggtaatcgtggcaatgacaaccgcaacatggttgttcgtcctgcagcaactccagttcagaaccagcccgttaggaaggaacagggaagcaagccaggggtgtgcttcaattgtggtgatccaggacattatgctgataagtgtcctaagcctcggcgcgtgaagaacgttccagccccgaacaactccaatgctccagcaccaaaggcacgtgttaatcatgttgcagcagtagaagctcagaatgcaccagatgtggttttgggtacgtttcctgttaactctatacccgcaactgtgctttttgattccggtgctacacattcctttttgtctaaaagttttgcgagcaatcatgggatggaagttattagtcttgggagacctttactagttaataccccaggcaatcaagtgttttcgacacagtattgtccttccgttattataggaatagaagaagttcttttcccgtcctcccttatcttgctagaatccaaagatctagatgttatcttagggatggattggttatctcgtcacagaggagttatagattgtgccaaccgtaaggtgactttaaccagtagcaatggggaaacagtttctttctttgtgtcctctcctaaatctcatggggtgatcttaaaccaagttgctctacaagagatccccatagtacaagactacccagacgtgtttcccgaggatttgccaggtatgccacctaagagagacatagagtttcggatagacttggtacctggaaccaaccctatccataagagaccatacagaatggcagcaaatgagttagctgaggtgaagagacaggtggatgatttgcttcagaaaggatatatcagacccagtacttcgccatggggagcaccagtcatctttgtggagaagaaagatcatactcagagaatgtgtgtggattatcgagcgttgaatgaggttaccatcaagaataagtatcctctacccagaattgatgacctgtttgatcaactggaaggtgctacagttttctccaagatagatctccgttctggatatcatcaacttcgaatccatgaggaagatataccaaagaccgccttcacaactcggtatgatttattcgaatgtaccgttatgtcatttggactcactaatgccccagcctttttcatgaatctgatgaacaaggtgtttatggaatatctggataagtttgtcgtggtgtttattgatgacattcttatttactccaagacgaaggaagaacatgaagagcatcttcgtctagctttagagaaactacgtgagcatcaggtttatgccaagttcagtaaatgtgaattttggttgtccgaagtgaagtttcttggtcatgtcatctcgtctggaggagtggcagtagatccaagcaatgtggagtcagtgttaagttggaagcaacccaagacggtttcagaaattcgtagtttccttggacttgcggggtattaccgcaggtttattgagaacttttcaaagatcgccagaccaatgactcgtctgcttcagaaggaagtgaagtacaagtggacggagggttgtgaacaaagtttccaagaactgaagaaaaggctagtgactgcgcctgtgttagttttgcctgattcgaggaaaggtttccaagtgtattgtgatgcgtcccgacacggtttgggttgtgtgttgatgcaagaaggaaaggtggttgcctatgcatctaggcaattacgtcctcatgagaataactacccaacgcatgacctagagttggcagctgtggtgcatgcattgaagatttggcgtcattatcttttcggtaaccgtacagagatatatacggatcataaaagtttgaagtacattttcactcaacctgatttgaacatgcgtcagcgaagatggttagagttgattaaagactatgatatggaaatccactatcacccggggaaagcaaatgttgtagccgatgctcttagcaggaaaagctactgtaatatgtcagaaggtcgacgtttaccttgggagttatgccaagaatttgaaaagatgaacttgggaatagtcagcaaaggttttgtggctactttggaagctcaacctactctgtttgatcaagttagagaagctcaagtgaatgatcctgatatccaagaaataaagaacatcagaagccagccggtctgttacaaccattgaagattccagagtggaagtgggaagaaataggaatggattttataaccggtctacccagaacgtcggcagaaacaacttacacggggaataagcttgcagagttatacatggccagagtggtatgtttgcatggtgttcctaagaagatagtgtcagatagaggaagccagtttacttcgaagttttggcagaagttacaatcagaattgggtacccgtttgaatttcagtactgcttatcaccctcaaacagatggtcagacggaaagagtaaaccaaattttagaagatatgttgagagcttgtgttctagattttggtggaagttgggataagaatttgccgtatgcggaattctcatataaccatagttatcaagctagtttgcaaatgtctccgaatgaagcattatatggtcgaaagtgccgtacgccgctcctttgggatcaaaccggtgaacgtcaagtttttgggactgacatattgcgagaggcggaagaaaaagtgaagattatccaagaaaggttgcgcgttgcccagtcgcgtcagaagagctatgccgacaatcgtcgcagagatttggttttcgaagaaggagattatgtataccttcgggtcacgccgttacgaggtgttcatcgtttccaaaccaaagggaaattagcaccgcgttttgtaggaccttttaagatcgtgagtcgaagaggtgaagtagcttatcagttagagttgcctccgtcaatggcgggaatacatgacgtgttccatgtgtctcagttgaagaaatgtttacgagtacctacggaggaagcagatcctgatcgtatagagcttcaagaagatttaacttatgttgagaagccagttagaattttggaacgccgccgcgacgctctccaagtccgccgccgtcgccggccgtcttcagcaacgccgccgcgcatgcctcgccattcaccaagaaatttgatcgaggtgttaggattcgtcagggagctgaggttgatggcttttgaagtaggttatgaagttgctcccgagtatcgccagatttcccatgaccccgacgaggagaaatgtcgtgttcgtgtgacgttggctagtgatagtgaagaccttccgtcttttaagttcgaagctggaggaagatcgtactgccatgcttgtcaagaagcagctttggtggccattggagagttgcgtcaacactttgaagaagaattggattcatcagctttccagtatcatccccacaagcctcatggtcaagactatggaacctatacctgtcctgatggtgaagagagtgccactctgatgcatgcggtgcatatgcttagtgctatggatgcagtaagtgtggagcgagacaaagcagctcatgacagggaaaactggaatcgaggcaagatttgcaagttgaagagcaaggtgtaccgcctacagaaggaattagctgaacttaaaggagaaacgccgccgccaacatcctagcttcgcctcactgcaagaaagagaacctgtccgccccctcgtctccagttagcttcgaagattcgcgtgatgggtgaagctgtgcccgatcgtgttgagcctgtcatcgacatcatggtgaacacgcgcactggcactggaagtggaagtggaagtggagccaataacaatgaagagaacccaacgctagctcagattttggctcaacaaacacaactgatcaatctgttagtgcagcaggcacagaatcagcaggcaaataatcaaaaccagaatccacccccacctccccaaaacaagttggcagatttcttgcgtgtgagtccccctactttttcgagcaccaccaatccagtagaagcaggagattggttgcatgcggtggagaagaagttggacttgatccagtgtactgagcaggagaaagtttcttttgcttcgcatcagttgcatggacccgctgctgaatggtgggatcattttcgccaaggcagagcgggaggagaacctattacttggcaggaattcacaactgcttttaagaagacgcatataccaacgggtgttgtagctctaaagaagagagaatttagagcactcaaccagggatctcgttcggtcaccgagtacctccatgatttcaaccgtttagctcgctatgctccagaggatgttcgcactgatgaagaacgtcaggagaagtttttggagggactaaatgatgagttgtcttatgctttgatgtctacggatttccgggatttccaacaattggtggacaaggcgattcgtcaggaagacaatcgtggcaatgacaaccgcagtgtggttgctcgtcctgcagcaactccagttcagaaccagcccgttaggaaggagcaggggagcaaaccagtgatatgcttcaattgtggtgatccgggacattatgctgataagtgtccgaagcctcggcgtgtgaagaacgctccagccccgaacaactccagtgctccagcaccgaaggcccgtgtcaatcatgttgcagcagcagaagctcagaatgcaccagatgtggttttgggtacgtttcctgttaactctatacccgcaactgtgctttttgattccggtgctacacattcctttttgtctaaaagttttgcaagcaatcatgggatagaagttattagtcttgggagacctttactagttaataccccaggcaatcaagtattttcgacacagtattgtccttctgttactatagaaatagaagaagttcttttcccatcctctcttatcttgctagaatccaaagacctagatgttatcttagggatggattggttatctcgtcatagaggagttatagattgtgccaaccgtaaggtgactttaaccaatagcaatggggaaactgtttctttctttgcgtcctctcctaaatctcatggtgtggttttaaaccaagttgctctacaagagattcctatagtacaagactacccagatgtgtttcccgaggatttgccgggtatgccacctaagagagacatagagtttcggatagacttggtacctggaactaaccctatccataagagaccatatagaatggcagctaacgagttagcagaggtgaagaaacaggtggatgatttgcttcagaaaggatacattagacccagtacttcgccatggggagcaccagtcatctttgtggagaagaaagatcatactcaaagaatgtgcgtggattatcgagcgttgaatgaggttactatcaagaataaataccctttacctagaattgatgacctgtttgatcaattggaagagtttgtcgtggtgtttatcgatgacattctcatttactccaagacgaaagaagaacatgaagagcatcttcgtctagctttagagaaactacgtgagcatcagctttatgccaagttcagtaaatgtgaattttggttgtccgaagtgaagtttcttggtcatgtcatctcgtctggaggagtggcagtagatccaagcaatgtggagtcagtattaagttggaagcaacccaagacggtttcagaaattcgtagtttccttggacttgctgggtattt

SEQ ID NO: 22925 - DNA, 3735 bp, Oryza sativa; identical to SEQ ID NO: 15624
  Clone ID: TF_OsC359_6443

SEQ ID NO: 22926 - DNA, 3711 bp, Oryza sativa
  Clone ID: TF_OsC359_6551
gtgacaagttggtatcagagccaccttgaccttaggataagccaaatgatgccgccacattcaccgagaaatttgatcgaggtgttaggattcgtcagggagctgaggttgatggcttttgaggtaggctatgaagttgctcccgagtatcgccaaatttcccatgaccccgacgaagagaagtgtcgtgttcgtgtgacgttggctagtgatcgtgaagaccttctgtccattaagtttgaagctggaggaagatcgtacagccatgcttgtcaagaagtagctttggtggccattggagagttgcgtcaacgttttgaagaagagttggattcatcagctttccagtatcatcctcacaagcctcatggtcaagactatggaacctatatctgtcctgatggtgaagagagtgccactctgatgcatgcggtgcatatgcttagtgctatggatgcagtaagtgtggagcgagacaaagcagctcatgacagggaaaactggaatcgaggcaagatttgcaagttggagagcaaggtgtaccgtctacagaacgaattagctgaacttaaaggagaaacgccgccgccaacacccaagcttcgcgtcacactaagaaagagaacctgtccgccacctcgtctccagttagcttcgaagattcgcgtgatgggtgaagctgtgcccgatcgtgctgaacctgtcatcgacatcataagtgatgaggaagaggaggaagaccctgaagaaagagagccagctactccagaggaagaagatccatcgcttcgttccgacgcaaggcgcaccaccaatccagtagaagcaggagattggctgcatgcggtggagaagaagttggacttgatccagtgtactgagcaggagaaagtttcttttgcttcgcatcagttgcatggacctgctgctgaatggtgggatcattttcgccaaggcagggctgaaggagagcctattacgtggcaggagttcacggccgctttcaagaagacgcacataccagcgggtgtcgtagctctaaagaagagagaatttagagcactcaaccagagatctcgttcggtcactgagtacctccatgatttcaaccgtttagctcgttatgctccggaagatgttcgcaccgatgaagagcgtcaggagaagttcttggagggactaaatgatgagttgtcttatgctttgatgtctacggatttccgggatttccagcagttggtggacaaggcgattcgtcaggaagacaagtataaccggatggagcagaagaagcgcagggctgcccaattcaaggcacaacagggcagtaaccagagaccgcgactcgttactggacctcaagctccatcgtaccctcaagtaggatcttcatcagttgtccgtccccaacgccagttctacaacaacaatactggtaatcgtggcaatgacaaccgcaacatggttgctcgtcctgcagcaacttcagctcagaatcagcccgtcaggaaggaacagggaagcaagccagtgatatgcttcaattgtggtgacccaggacattatgctgataagtgtcctaagcctcggcgcgtgaagaacgctccagccccgaacaactccaatgttccagtaccgaaggcacgtgttaatcatgttgcagcagtagaagctcagaatgcaccagatgttgttttgggtacgtttcctgttaactctatacccgcaactgtgctttttgattccggtgctacacattcctttttgtctaaaagttttgcgagcaatcatgggatggaagttattagtcttgggagacctttactagttaataccccaggtaatcaagtattttcgacacagtattgtccttctgttactatagaaatagaagaagttcctttcccatcctcgcttatcttgctagaatccaaagatctagatgttatcctagggatggactggttatctcgtcacagaggagttatagattgtgccaaccgtaaggtgactttaaccagtagcaatggggaaactgtttctttctttgcgtcctctcctaaatctcatggtgtgaccttgaaccaagttgttctacaagagatacctatagtacaagactacccagacgtgtttcccgaggatttgccaggtatgccacctaagagagacatagagtttcggatagacttggtacctggaacaaaccctatccataagagaccatacagaatggcagctaatgagttagctgacgtgaagagacaggtggatgatttgcttcagaaaggatacattagacccagtacttcgccatggggagcaccagtcatctttgtggagaagaaagatcatacttagagaatgtgcgtggattatcgagcgttgaatgaggtcactatcaagaataaggatcctctacccagaattgatgacctgtttgatcaattgaaaggtgctacagttttctccaagatagatctccgttctggatatcatcaacttcgaatccgtgaggaagatataccaaagaccgccttcacaactcggtatggtttgttcgaatgtaccgttatgtcatttggactcactaatgccccagcctttttcatgaatctgatgaacaaggtgtttatggaatatctggataagtttgtcgtggtgtttattgatgacattcttatttactccaagacgaaggaagaacatgaagagcatcttcgtctagctttagagaaactacgtgagcatcagctttatgccaagttcagtaaatgtgaattttggttgtccgaagtgaagtttctttgtcatgtcatctcgtctggaggagtggcagtagatccaagcaatgtggagtcagtgttaagttggaagcaacccaagacggtttcagaatttcgtagtttccttggacttgctgggtattaccgcagttttattgagaacttttcaaagatcgccagaccaatgactcgtctgcttcagaaggaagtgaagtacaagtggacggatgattgtgaacaaagtttctaagaactgaagaaaaggctagtgactgcgcctgtgttaattttgcctgattcgaggaaaggtttccaagtgtattgtgatgcatcccgactcggtttgggttgtgtgttgatgcaagaaggaaaggtggttgcctatgcatctaggcaattacgtcctcatgagaataactatcctacgcatgacctagagttggcagctgtggtgcatgcattgaagatttggcgtcattatcttttcggtaaccgtacagagatgtatacggatcataaaagtttgaagtacattttcactcaacctgacttgaacatgcgtcagcgaagatggttagaattgattaaagactatgatatggaaatccactatcacccggggaaagcaaatgttgtagccgatgcccttagcaggaaaagctactgtaatatgtcagaaggtcgacgtttaccttgggagttatgccaagaatttgaaaacttgaacttgggaatagtcaacaaaggttttgtggccgctttacaagctaaacctactctgtttgatcaagttagatgtcacgcccggaaattcactagtaatttccgaactaaaggaatcgaatcgggaagaaatcgaactcggtttttttagggataaaacaaaacgagttcgattcggatccaaacctccacgattcgtttt

SEQ ID NO: 22927 - DNA, 4899 bp, Oryza sativa; identical to SEQ ID NO: 15620
  Clone ID: TF_OsC359_7191

SEQ ID NO: 22928 - DNA, 2290 bp, Oryza sativa; identical to SEQ ID NO: 15627
  Clone ID: TF_OsC359_7547

SEQ ID NO: 22929 - DNA, 5136 bp, Oryza sativa
  Clone ID: TF_OsC359_7557
atgatgccaccccattcaccgagaaatttgatcaaggtgttagggttcgtcagggagctgaggttgatggcttttgaggtaggctatgaagttgctcccgagtatcgccaaatttcccatgaccccgacgaggagaagtgtcgtgttcgtgtgacgttggctagtgatagtgatgaccttccgtcttttaagttcgaagctggaggaagatcgtacagccatgcttgtcaagaggcagctttggtggccattggagagttgcgtcaacgctttgaagaagagttggattcatcagctttccagtatcatcctcacaagcctcatggtcaagactatggaacctatacctgtcctgacggtgaagagagtgccactctgatgcatgcggtgcatatgcttagtgctatggatgcagtaagtgtggagcgagacaaagcagctcatgacagggaaaactggaatcgaggcaagatttgcaagttggagagcaaggtgtaccgtctacaaaaggaattagctgaacttaaaggagaaacgccgccgccaacacccaagcatcgcctcactcaaagaaaaagaacctgtccgccacctcgtctccagttagcttcgaagattcgcgtgatgggtgaagctgtgcccgatcgtgctgaacctgtcatcgacatcataagtgatgaggaagaggaggaagaccctgaagaaagagagccagctactccagaggaagaagatccatcgcttcgttccgacacaaggcggatggtgaacacgcgcaccggaagtggaagtggaagtggaagtggagctactaacaatggaggagatcccacgctagctcagattctggcccaacaaacacaactgatcaatctgttagtgcagcaggcacagaatcagcaggcaaacaatcagaaccagaatccacccccacctccccaaaacaagctggcagatttcttacgcgtgagaccccctaccttttccagcaccaccaatccagtagaagcaggagattggctgcatgcggtggagaagaagttggatttgatccagtgtactgagcaggagaaagtttcttttgcttcgcatcaactgcatggtcctgctgctgaatggtgggatcattttcgccaaggcagggctgaaggagagcctattacgtggcaggaattcacggccgctttcaggaagacacacataccgtcgggtgttgtagctctaaagaagagagaatttagggcactcaaccagggatctcgatcggtcaccgagtacctccatgatttcaaccgtttagctcgttatgctccggaagatgttcgcaccgatgaagagcgtcaggagaaattcttggagggactgaatgatgagttgtcttatgctttgatgtctacggatttccgggatttccagcagttggtggacaaggcgattcgtcaggaagacaagtataaccggatggagcagaagaagcgcagggctgcccaattcaaggcacaacagggcagtaaccagaggccgcgtctcgttactggacctcaagttccatcgtaccctcaaggaggatcttcatcagttgtccgtccccaacgccagttctacaacaacaatactagtaatcgtggcaatgacaaccgcaacgtggttgctcgtcctgcagcaacttcagctcagaaccagcctgtcaggaaggaacagggaagcaagccagtgatatgcttcaattgcggtgatccaggacattatgctgataagtgtcctaagcctcggcgcgtgaagaacgctccagccccgaacaactccaatgttccagcaccaaaggcacgtgttaatcatgttgcagcagcagaagctcagaatgcaccagatgtggttttgggtacgttccctgttaactctatacccgcaactgtgctttttgattccggtgctacacattcctttttgtctaaaagttttacgagcaatcatgggatggaagttattagtctcgagagacctttactagttaataccccaggcaatcaagtattttcgacacagtattgtccttccgctactatagaaatagaagaagttcctttcccatcctcgcttatcttgctagaatccaaagatctagatgttatcttagggatggattggttatcttgtcacagaggagttatagattgtgccaaccgtaaggtgactttaaccagtagcaatggggaaacagtttctttctttatgtcctctcctaaatctcatggtgtgatcttaaaccaagttgctctacaagagatccccatagtacaagactacccagacgtgtttcccgaggatttgccaggcatgccacctaagagagagatagagtttcggatagacttggtacctggaaccaaccctatccataagagaccatacagaatggcagctaatgagttagttgaggtgaagagacaggtggaagatttgcttcagaaaggatacatcagacccagtacttcgccatggggagcaccagtcatctttgtggagaagaaagatcatactcagagaatgtgcgtggattatcgagcgttgaatgaggttactatcaagaataagtatcctctacccagaattgatgacctatttgatcaattggaaggtgctacagttttctccaagatagatctccgttctggatatcatcaacttcgaatccgtgaggaagatataccaaagaccgccttcacaactcggtatggtttgttcgaatgtaccgttatgtcatttggactcactaatgccccagcctttttcatgaatctgatgaacaaggtgtttatggaatatctggataagttagtcgtggtgtttattgatgacattcttatttactccaagacgaaggaagaacatgaagagcatcttcgtctagctttagagaaactacgtgaacatcagctttatgccaagttcagtaaatgtgaattttggttgtccgaagtgaagtttcttggtcatgtcatctcgtctggaggagtggcagtagatccaagcaatgtggagtcagtgttaagttggaagcaacccaagacggtttcagaaattcgtagtttccttggacttgcggggtattaccgcaggtttattgagaacttttcaaagatcgccagaccaatgactcgtctgcttcagaaggaagtgaagtacaagtggacagaggattgtgaacaaagtttccaagaactgaagaaaaggctagcgactgcgctggtgttaattttgcctgattcgaggaaaggtttccaagtgtattgtgatgcatctcgactcggtttgggttgtgtgttgatgcaagaaggaaaggtggttgcctatgcatctaggcaattacgtcctcatgagaataactacccaacgcatgacctagagttggcagctgtggtgcatgcattgaagatttggcgtcattatcttttcggtaaccgtacagaggtgtatacggatcataaaagtttgaagtacattttcactcaacctgatttgaacatgcgtcagcgaagatggttagagttgattaaagattatgatatggaaatctactatcacccggggaaagcaaatgttgtagccgatgctcttagcaggaaaagctactgtaatatgtcagaaggtcgacgtttaccttgggagttatgccaagaatttgaaaagttgaacttgggaatagtcagcaatggttttgtggccgctttggaagctaaacctactctgtttgatcaagttagagaggctcaagtgaatgatcctgatatccaagaaataaagaagaacatgagaagaggaaaagccatcggttatgtagaagatgagcaaggtactgtgtggttgggagaaagaatttgcgtcccagaaaataaggagttgaaggataccatcatgaaagaagctcatgaaactttgtattccattcaccctggaagcactaagatgtaccaagacctaaagcaacaattctggtgggccagtatgcgacgtgagatagcagaatatgtggctctatgtgatgtatgtcagcgggtcaaggcagaacatcagaagccagccggtctgttacaaccgttgaagattccagagtggaagtgggaagaaataggaatggattttataaccggcctacccagaacgtcggcaggacatgattctatttgggtagtggttgataggttgacaaaagtcgctcacttcataccggtcaaaacaacctacacggggaataagcttgcagagttatacatggccagagtgaaattacaagtagagatgggtacccgtttgaatttcagtaccgcttatcacccgcaaacagatggtcagacggaaagagtaaaccaaattttagaagatatgttgagagcctgtgttctagattttggtggaagttgggataagaatttgccgtacgcggaattctcatataacaacagttatcaagctagtatgcaaatggctccgtatgaagcattatatggccgaaagtgccgtacgccgctcctttgggatcaaaccggtgaacgtcaagtttttgggacggacatattgcgagaggcagaagaaaaagtgaagattatccaagaaaggttgcgcgttgctcagtcacgtcagaagagctatgccgacaatcgtcgcagagatttggctttcgaagaaggagattatgtataccttcgggttacgccgttacgaggtgttcatcgtttccagaccaaagagaaattggcaccgcgtttcgtgggaccttttaagattgtgagtcgaagaggtgaggtagcttatcagttggaattgcctccgtcaatggcgggaatacatgacgtgttccacgtgtctcagttgaagaaatgtttacgtgtacctacggaggaagcagatcctgatcgtatagagcttcaagaagatttaacttatgttgagaagccagtcagaatcttggaagtaagcgagaggaataccaggaatcgtgttatacggttctgcaaggttcagtggagcaatcattcagaagaagaagccacttgggagcgagaagatgaattgaagtcagctcatcctcatctcttcgccagttcttctgaatctcgaggacgagattccgtttaa

SEQ ID NO: 22930 - DNA, 3942 bp, Oryza sativa
  Clone ID: TF_OsC6326_15
tgcgagtgaacctgcaggctcagggtctgtgggaagctgttgacaccggcgacgtgccctttcatgaagatcgtcaggctctttcggccatcctgcgagccgtgccggctgagatgctccggccgctcgcggagaaggacaatgccaaggacgcctgggatgcgctcaagtccatgcgagtgggcacggatcgcgtgagagaatcctgtgcgcagaagctacgccaagcgtttgagtccatgcaattcaagcccgacgaatcggtcgaggatttcagtcttcatcttcagtgggttgtcagcgacctccgtcttcttggtgacgacatcaccgaggaaaaaatcatgtgcaagtttctgcgtgttgtgccccgcaggtatcgtcagatggctctttcaattgaaaccttgattgacctcacaactctctccattgaggacctcactggccggcttctcaccgttgatgatcaccctgattccgacagtgaggacgcgggtcaggcactgttcggcaagaaggaggagcaggcgcgggccaacaaggggttaggccagtcctcatcccgtggcagcggtaccgggactggctcatcggagcggcgacaacgcggccgtggtgggtgcggtcgtgacggtgctggcggcaagcacaaacctggcgccaatcagggtggaggccgtgacgtgtccaaggacaagtgtcgctactgcggcgaattgggccattgggccaaagactgccgcaaggctaaacgcgaccgcgacaagcttgcgcatgcccatttgcttggggatgacgagcccacactgctgatggcccaggtgtgcgagctcgttcccactacggagcctgagcttatcaacggcgaggtgaatttgaataaggagcgcgcgcttgtctctctccgcgaagaaggggagccggtcgaccccgactggatcctggacatggccgcctccaaccacatgactgggcttgacaccaccatgcgtggtacggtcaagttcggcgacacctctgcggatcgagggacgcggcactatgctgttcgcctgcaagaacggtgactactgcgggcttattggtgtctacttcatccccaagcttcgcagcaacatggtcagcctcgggcagctcaacaaggtcgggtgcaagacggtgatcgaggatggcgctctaaccctgcgtgacccacggtggcgcttgttgtgccgtgttcgccgtgggagagagcgcctgtatgtgcttcaggtggagctggcccagctggtgtctctcgcagcaaggagctccgaagacgcgtggctctagcatgccaggtttgggcatctcaacttcgactccctgcgcacactctacgcccatggcttggcgcatgggttgccgaagctggagcgtgtcaggcaagtctgcgacgggtgtctcatcagcaagcagcgtcgagtgccgttccccacagcggcgacgttccgagccacgagtcggctcgaccttgttcatggcaacatctgcgttcccatctcgcctcccacgcacggtggtaaaaagtattttttgttgctgattgatgacatgtctcgctatatgtggctatttctgctgacatccaaaagtgaggctccggcaaccatcaagcggttcaaagcgggagtggaggtggagactgcctgcaagctgcgcgttctccgcactaatcgtgggggggagttcacctccattgagttcggcttgtattgcgcgaacgagggcgtggctcggcaactaacggcgccgtactcgcctcaacaaaatggcgtcatcaagcgccgcaaccaaacggttgtgtccatggcaagatgcatgatgaaggcgaagcacatgcccaggaagttctggggagaagcggtgaggaccgccgtcttcatcctcaaccggtcgcccacgaaagctgtccccaacaagaccccttacaaggcgtggcacggacgaacgcctgccgtgccattacttcaagacctttggctgcgtcgttcacatcaaggaggtgaagcctcatctcaagaagcttgaagaccgcagcaagatgatggtttttctcggctatgagccgggaaccaagggctaccgtgtctatgacccggatgccaaccgtgtcgtcatcacacgcgacgccgtctttgatgaagtaacgtcgtggccatggggggaacccgttgaacatggagaggcatccacagacgactcgttcaccgtctactatgaggtggcctcaagcatcgtggcggcaagtcggcctcctagcgtcgaggccatgtcacccacaccctccgcgcagctcgcaacgcctccagacacaccctctgtggagttcgtgtcgccgccgagctcgacgccagacgtcgacgacgaccagggcgcgccgcgtcgctaccggagcatggcgaacatcctcgacacgacggcgccggtggagctcgattcggacgagctctacctggcagccgcggaggagccggcgaacctctctgaagcagagcaggatgaacactggcggcaagcgatgcttgatgaaatcaaatccattgaggagaacagcccttggatactcactgagctcccggccggccagcgtccaatcggcctcaagcgggtgttcaagttgaacaacaacgagaccggccccgtgatccggcacgaggcccggctcgtggcaaagggctacgtccagcgccatggaatcgactttgatgaagtcttcgccccggttgcgcggatggaatccgtgcgacttctcctcgccgtcgcagcttatctcgggtggactgtgcatcacatggacatcaaatcggcgttccttaacagagagctggaggaggaggtatacgtctcgcagccgccgggcttcattgacgacaagcatccaagtcaggtcttgcacctgaaccgagctctgtatggccttcgtcaagcccgacgaacctggaacgcgtagctggacactcgccttcatgaactaggcttcaagcggagcgccaccgagcacgcggtgtacacacgtggcgagggatccaagcggctaatcattggcgtcgatctcggattgctcagctactacctcaggatcgaggtgcgtcaaggcagtgacgacatcaccatcaactagtcagcatacgcacagaagctactcaagatcggtgggctggtggactgcaactcaacttgtgtccccatggagcctagactgaagctgatgaagaacagcgataggccggccatcgacgccactctgtatcgcagcctcgtgggtagcctgcgttaccttgtgcacacgtggcctgactttgcctttgccgtcggctctgtgagccgattcatggaatcgccacgcgatgatcatctgttggtggtgaagcacatcctgcggtatgtagctggtactcagaactttggatgttgtttggcaagatcaggggaaacgggaatttgtctgctgggtttttcagacagtgatttggggggagacattgatgatcggaagagcacctcaggggctttgttctttctcggctccagtccaattgcttggcaatctcagaagcagaaggtggtggccctttcctcttgtgaagcagaatacattgccgccacaggagcggcttgcctcggcatttggctagcgcgtttgctggctgaagtgctgggcactgaaccagagatggccatcctcaaggtcgacaacaagtcggtgatctcactgtgcaagaatcctgtgttccacgatagaagcaaacatatcgacactcgatatcacttatcaggcagtgcatagaggagaagaaagatgatgttgagttcatccccacggacgaacaggtggcggacattctgaccaagccactcgtgtgcatcaagttccaagaatttcgcaacaaggcgggcgtggtccagattgtcacttgg

SEQ ID NO: 22931 - DNA, 4899 bp, Oryza sativa; identical to SEQ ID NO: 15655
  Clone ID: TF_OsC359_5740

SEQ ID NO: 22932 - DNA, 1991 bp, Oryza sativa
  Clone ID: TF_OsC359_5990
ctcctggtttggaatggtgtattcctggtttggagatagaactgtgcagccgggatggttgttcagaacgattgggcctatgcaacaggatgccgcgctacaagcctgagtacttgttcggtactgaaggatttgtccaggagttgcgtacgatgtccttcctcatagggtttggaattgcccctttgtatgcccagatcccgcatgatcgtgatgaagaaaaatgcggagtcaaagtcaccttgaatagcaaccgtgaagatattccatcagtgatgttcgaggctggaggaggaagctacattcatgcttgtcaggaggtggcaaggatcgccataggagaactccgggaaagctataatgatcggttggccgacaccgagtaccgctaccatcctcgtcaaccccagggaagtgattgtggcagctactttgaaccggctgggatcgagaacgacgctaccacaaggcatttggttgagatgctatgggctatggatgaaacccgcgctgagattgtaatagccgctcaagatcgtgaagaccggaatagggggaagatctgcaagctagaagacaaggtggatcatttggagaaggagctagccgcgttgaagggagaagcaccaccgcagaaggccagagtccgtctaccgcaaggaagagagctctattcgtccctcgctatcagttggcaccaaaggttcgtctggtggaaaaagaagctaccccagcggatcctccggttgtcaatcactactaatcccgtcgaagctggtgattggttgcacgccatagagaagaagttggatctgctccagtgcacagaccaggagaaggtctccttcgcatcacaccagctgcatggccctgcttcggaatggtgggatcacttccgcctcaacaggactacccctgaacctatctcttggcttgaattcaacgctgctttccggaagacgcatataccctcgggagtggtgtctctcaagaagaaggaattcaggtcactcacacaaggttcccgcactgtcaccgagtatctgcacgagttcaatcgtctggctcgttatgctccggaagaggtgcgcactgatgaagagcgtcaggagaggttcttaaaaggacttaatgatgaactttcctacccacttatgactggagattatcatgatttccagaagttagtggataaagctattcgccaggaggacaaatacaaccgcatggagcagaagaaacgccggattgctcatttcaaggcacagcaggggaatagtcaaaggccacgccttactttgggaccccagtccatgccacagggagctccacgccctgttgcatctccaacacagcaacagcctgccaagagggagcaaggcagtaagcccggggtgtgcttcaactgtggagacccaggacattacgctgacaagtgtccgaagccccgccgcgtgaaggtcgtccctgcccagaacaacccctccgcacccgcagccaaggctcgtgtcaaccatgttgctgctgcagaagctcaaggtgctccagatgtgattttgggtacattccctgttaactcagttcctgcaaccgtgctttttgattctggtgctatgcattcatttttatccatgagttttgcgggaaatcaagggatggaggtaaaggaacttagacgtcctttgatggttagtactccgagtaaccaagcactctcctcacaacgtagcccctctgtcagaatagagatccaaggtgtacctttcctggccaaccttattctgttagaatccaaagaccttgatgtcatcctagggatggactggttagccagatataaaggtgtgatagattgtgctaatagaaaagtaactctcaccagtaatgatggtcgagttgtaactgttcatgcattatcttctgagtctataaggtcacgtctgaaccaattgactttggaagagattcctatagtccgggagtatcccgat

SEQ ID NO: 22933 - DNA, 4924 bp, Oryza sativa; identical to SEQ ID NO: 15657
  Clone ID: TF_OsC359_6290

SEQ ID NO: 22934 - DNA, 6593 bp, Oryza sativa
  Clone ID: TF_OsC359_6530
acttattccggaagtcggttggcggaattgtatatggcaaggattgtgtgtttgcatggcgtccctaaaaaaatagtgtctgatcgaggcagtcagtttacttcaaatttttggaagaagcttcaagaagagatgggttctaagctgaactttagtactgcttatcatccacaggcagacggacaaaccgaaagggtgaatcagattttggaagatatgttgagagcttgtgctttagacttcggtggaagttgggataagaatctaccttatgcagaactttcgtataacaacagttatcaagctagtcttcagatggctccttacgaagcactgtatggtcggaagtgccgcactccgcttttgtgggatcaaaagggagaacgtcaggttttcgggactgatatcctaagggaagcagaagagaaggttaagatcattccagaaagattgcgtgtggcccagtctcgtcataagagttatgccgacaatcgccgcagagatttgagttttgaagaaggagattatgtgtaccttcgtgtcacgcctgttcgaggagttcatcgtgttcacaccaaaggaaaattggcaccgcgttttgtgggaccttataagattgtcagtagaagaggagaggttgcttatcagttagagttacctcaatctttggccggagtccctaatgtgtgtccatggtgtccgcaattgaaaaagtgtttaagggtacctaccgaagaagcctaatcttgaccagatagaagtcccagaggatctgacctatgttgagaaaccaatccgtattttggaaatagatgagagaagaacccgaaatcgagttatccgtttttgccaagtccaatggagtaatcactccgaagaagaatcaacttgggaacgagaagatgaattgaattctggattcgaggtcgaatcggatcgatctctttcctccgaaccccaatgtttctttcgcgtcgccggtcgccgtgggccttcgccgctgcctccttgcccctataaaaggatccccggtgtcgccgctacccgccaccaccattgtcttcgtctctcgccgtcggaagcgccctagcgccccgtgcttcgccgtcgttccggtcgtcgtcatcgctcggggaggtcgccatcgtggtcgccaagtcgccgccgtccttgtccgcccctttgccgtcgctgtagaccgccggagcaccgccgttgttgtcaagccgaaggtctccgccgcttcttttttgtcgccgccgccgtccgttcatcttccgccgacgttttggtcatcgcgccgtcgttcgccggcgagcaagcgcgcccgaaccggtgaaccccccaaccgccgccggaggtgacgttcccgctgacgtcatgggggccgtctgccattccgacgtttccggagagtccgttttcgcaggagaagaatttgaatagttccaaggccagcaaggcaactcctggtttggaatggtatattcctggtttggagatagatctgtacagccgggtatggttgttcaggatggttgggcctgagcagcatgatgccgcgctacaagcctgagtacttgtttggtgttgagggatttgtccaggagttgcgtacgatgtcctttgccataggatttgggactgcccctttttatgcccagattcctcatgatcgtcacgaagagaagtgccgagtcaaagtcaccttgaacagtaatagtgaagatatctcctcagtgatgttcgaagctggaggaggaaactacatccatgcatgtcaggaggtggcaaggatcgccataggagagcttcgcgatcgctacagtgatcagttggccgacactgagtatcgctaccatcctcgccaaccacagggaagtgaccgtggcagctaccttgagactgagggaattgagaatgatgctaccacaaggcatttggttgagatgctgtgggctatggataaaactcgtgcggagactgtgttagcggctcaagatcgtgaagaccggaatcgtggtaagatttgcaagttagaggacaaagtggatcgtttggagaaggaactagccgcattgaagggagaagcaccaccgcagaaggccaggattcgtcttaccgcaaggaagagagctctatttgtccctcgctaccaattagcgctaaagatggtgctcactcgcagcaacgggaatggccccaacaacaacaataacaacaacaacaatggagagaatcccacacttgcccaagtcctggctcaacaggcacagcttatgaacatgatgatgcagcaactccagaaccagcagaaccagggaaataaccatgcacctccccagaacaagttagcagaatttcttcgtgtgaggccgcccactttctctagcaccactaatcatgttgaagctggtgattggctgcatgccatagaaaagaagttggatttgcttcagtgcactgattaggagaaggtctcatttgcatcacaccagctgcatggccctgcctctgaatggtgggatcacttccgcctgaacaggactactgctgaacctatcacttggcttgaattcaccgctgctttccggaagacgcatataccatcgggagtggtgtctctcaagaagaaggaattcaggtcgctcactcaggggtctcgctctgttactgagtatctgcacgagttcaatcgtctggctcgttatgctccggaagatgtgcgcactgatgaagagcgctaggagaggttcttggaaggacttaatgatgagctttcttacccactcatgactggggattatcatgatttccagaagttagtggataaggctattcgccaggaggacaagtacaatcgcatggagcagaagaaacgccggattgctcacttcaaggcacaacaggggaatagtcagaggccgcgtcttactttaggaccccagtccatgccacagggagtttcttcgtctgttgttcgtctgcagcgtcagttcttcaacaacaatgctggcaacaacatccgcaatcaagctccacgccctgttgcagcttcgacacagcaacagcctgccaagaaggagcaaggcagcaagcccggggtgtgcttcaactgtggagacccaggacattacgctgacaagtgtccgaagccccgacgcgtgaaggttgtccctgcccagagcaactctaccgcaccagcatcaaaggctcgtgtcaatcatgttgctgctgcagaagctcaaggtgctccagatgtgattttgggtacgttccttgttaacttagttcctgcaacattgcttttcgattctggtgctatacattcattcttatctatgagttttgcgggaaatcatgggatggaagtagaagatcttagacgtcctttgatggttagtaccccaagtaatcaagcactctctttgcaacatagcccctctgtcaggatagaaattcaaggagtaccatttctggccaatcttatcctgttagaatccaaagaccttgatgtcatcctagggatggactggttagccagatataaaggtgtgatagactgtgccaacagaaaagtaattctcaccaacaatgatggtcgagttgtaactgttcatgcattgtcttctgagtctttaaggtcaagtctgaaccaaataactttgaaagagattcctatagtccgggagtatcccgatgtgttcccagacgatttacctggtatgccgtctaaaagggatatagagttcagaatagatttggtaccaggaacaactccgatccataagagaccttatagaatggcagccaatgagttggtagaagtcaagaggcaagtagacgatttgcttcagaaaggatacatcagaccgagttcatctccatggagagctccggttatttttgtggaaaagaaagatcatacccagaggatgtgtgtggactatcgtgcactaaatgatgtgactatcaagaataagtatccgctgcccagaattgatgatttgtttgatcagcttaaaggtgccaccgttttctccaagatagatcttcgatcagggtatcaccagttgagaatcaaagaggaagatatacctaagacagcttttaccactaggtatgggttgttcgaatgtactgttatgtcttttggacttaccaatgcccccgctttcttcatgaacttgatgaataaggtgtttatggaatacctagacaagttcatggtggtctttattgatgacattcttatctactcccgaaccaaagaagagcatgaagaacatcttcgccttgcactagagaagctacgagaacatcaactgtatgccaagtttagcaagtgtgaattttggttgtctgaagtgaatttccttggtcacgtcatctcagcaggaggagttgccgtcgatcctagtaatgtggaatccgtaaccaactggaaacaaccaaagacagtttcagagattcacagtttcctaggcctcgcaggatattatcggaggtttatagagaatttttccaagattgctaagcccatgacacgactgcttcagaaagatgtgaagtacaagtggtcagaagaatgtgagcagagttttcaagagttgaagaatcgcttaatatcagctcctattttgattttacctgatccaaagaagggtttccaagtgtattgcgatgcatccaaacttgggttaggttgtgttctgatgcaagatgggaaggtggttgcctatgcatctcgtcagttacgtccgcatgagaagaactaccctactcatgatcttgagttagctgcagtggttcatgcgttgaaaatttggcgtcattatcttttcggtactcgtacagaggtgtacaccgatcacaagagtttaaagtatatctttactcagccggatctgaacatgagacaacggagatggttagaattaattaaggattatgacatgggaatttattatcacccgggaaaggctaatgttgtagcagacgctcttagcaggaaaggctattgcaatgctacggaaggacgacagttgccattagaattatgcaaggaatttgaaagattaaatttgggaatggtcagtagaggtttcgttgcagccttagaagcaaagcccactctaattgatgaagttagagaagcccaaattaatgatcctgatattcaagaaatcaagaagaatatgagaagaggaaaagctatcggtttcttggaggatgagcaaggaacggtatggttgggtgagagaatctgcgtccccgacaacaaagatttaaaagatgcaattctgaaagaagctcatgatactttatactccattcaccctggtagtaccaaaatgtaccaggatctcaaggaaagattttggtgggcaagtatgaagcgtgaaatcgcagaatacgtagcagtatgtgatgtttgtcagcgagtcaaggcagaacatcagaaacccgctggtttgctacagcctttgaagattcctgaatggaagtgggaggaaatcggtatggatttcatcactggtctacccagaacgtcatcaggccatgactctatttgggtgatagtcgacagacttaccaaagtggctcatttcatcccagtaaagacaacctattctggaagtcggttggcggaattgtatatggcaaggattgtgtgtttgcatggcgtccctaagaaaatagtatctgatcgaggcagtcagtttacttcaaagttttggaagaagcttcaggaagagatgggttctaagctgaactttagtactgcttatcatccgcagacagacggacaaaccgaaagggtgaatcagattttggaagacatgttgagagcttgtgctttagacttcggtggaagttgggataagaatctaccttatgcagaattttcgtacaacaacagttatcaagctagtcttcagatggctccttacgaagcactgtatggtcgtaagtgccgcactccgcttttgtgggatcaaacgggagaacgtcaggtcttcgggacggatatcctgagggaagcagaagaaaaggtgaaaatcattcaagaaagattgcgtgtggcccagtctcgtcataagagttatgccgacaatcgtcgtagagaactaagttttgacgaaggagattatgtgtaccttcgtgtcacgcctcttcgaggagttcatcgttttcacaccaaaggaaaattggcaccgcattttgtgggaccttataagattgtcagtagaagaggagaggttgcttatcagttggagttaccttaatctttggcaggagtccataatgtgttccatgtgtcgcaattgaaaaagtgtttaagggtacctaccgaagaaaccaatcttgaacagatagaagtccaagaggatctgacctatcttgagaaaccaatccgtatcttggaaatagatgagagaagaaccagaaatcgagttatccgtttttgcaaagtccaatggagtaatcactcggaagaagaatcaacttgggaacgagaagatgaattgaagtcagctcatccgcatctgttcgccagtttttctgaatctcgaggacgagattctgtt

SEQ ID NO: 22935 - DNA, 3363 bp, Oryza sativa; identical to SEQ ID NO: 15653
  Clone ID: TF_OsC359_6754

SEQ ID NO: 22936 - DNA, 1521 bp, Oryza sativa
  Clone ID: TF_OsC359_7433
atggcatttgaagtaggttacgaggttgcccccgagtattgccagattccctatgaccccaatgaggagaagtgtcgtgttcgcgtgacgttgactagtgatcgtgaagaccttccgtcgataaagtttgaagctgggggaagaaagtacagccatgcttgtcaggaagcagccttggtggccattggagagctacgtcatcgctttgatgaggagttagagtcatcagctttccagtatcacccacacaagcctcatggtcaagactatggaacttacaactgtcccgaaggtgaaggtagtgccactgtgatgcacgccgtgtatatgcttagcgccatggatgcagtaggcgtggagcgggagaaagcagctcatgatagggaaaactggaaccgtggcaggatttgtaagttggagagcaaggtgtaccgtctgcagaaggaactagctgagcttaagggagaagcaccaccgccagcacccaagctacgcctcaccgcaaggaagagaacccgtccaccacctcgtctccagttagcttcgaagactggtgtggtgggagacgctgtgcctgatcatgctaaacctgtcatccatgtcttaagtgatgaggaagaagaggaagacctagaagaaagagagccagctactccagaggaggaagatccatctcttcattctgacgcaaggcgagacatgttgcttacatcaatggtgggatgtaactacatgagtttagttcttttgcttgtcagagactcgttatgccccagaagatgtcgcactgatgaagaacatcaggagaagtttttagagggattgaatgatgagttgtcttatgcattgatggctatggattactgggatttccagcagttgatggacaaggcgattcgccaagaagacaagtataataggatggaacagaaaaagcgtagggctgctcatttcaaggcacaacagggtagtagccagaggccgcacattgctttgggacctcaagctgcaccatacccacagggaggatcctcttcagttgctcgccctcaacgccagttctacaacaacaacactggtaatcgcagcaacgataatcgtaatatggtcactcgtcctgtagcagctccaactcagaatcatcctgtcaggaaggaacagggaagcaagccaggggtgtgcttcaattgtggtgatccaggacattatgctgataagtgtcccaagcctcggcgtgtgaagaatgctcctgttcagaacaactccaatgctccagcaccgaaggctcgtgttaatcatgttgcagccgcagaagcccagaatacacctgatgtggttttggaggaggagtgcttcaatgaagtggctaaacagccgggcccacatgtcagtgactcggcggcaagagaagcagaggcagcaggagagcaacggcgaccaacagcgttcgtggcggcgtattggcttcatcatatgtgggcgtcgttctgctgggacctaggcgatgtcagtggcgcaatg

SEQ ID NO: 22937 - DNA, 4422 bp, Oryza sativa; identical to SEQ ID NO: 15651
  Clone ID: TF_OsC359_7456

SEQ ID NO: 22938 - DNA, 6596 bp, Oryza sativa
  Clone ID: TF_OsC359_7538
aggtttcgttgcagccttagaagagaagcccactctaattgatcaagttagacaagcccaaattaatgatcctgatattcaagaaatcaagaagaatatgagaagaggaaaagctatcggtttcttggaggatgagcaaggaactgtatggttgggtgagagaatctgcgtccccgacaacaaagatttaaaagatgcaattctgaaagaagctcatgatactttatactccattcaccctggtagtaccaaaatgtaccaggatctcaaggaaagattttggtgggcaagtatgaagcgtgaaatcgcggaatacgtagcagtatgtgatgtttgtcagcgagtcaaggcagaacatcagaaacccgccggtttgctacagcctttgaagattcccgaatggaagtgggaggaaatcggtatggatttcatcactggtctacccagaacgtcatcaggccatgactctatttgggtgatagtcgacagacttaccaaagtggctcatttcatcccagtaaagacaacttattctggaaatcggttggcggaattgtatatggcaaggattgtgtgtttgcatggcgtccctaagaaaatagtgtctgatcgaggcagtcagtttacttcaaagttttggaagaagcttcaggaagagatgggttctaagctgaactttagtactgcttatcattcgcagacagacggacaaaccgaaagggtaaatcagattttggaagacatgttgagagcttgtgctttagacttcggtggaagttgggataagaatctaccttatgcagaattttcgtacaacaacagttatcaagctagtcttcagatggctccttacgaagcactgtatggtcggaagtgccgcactccgcttttgtgggatcaaacgggagaacgtcaggttttcgggatggatatcctgatggaagcagaagaaaaggtgaaaatcattcaagaaagattgcgtgtggcccagtctcgtcataagagttatgccgacaatcgccgcagagatttgagttttgaagaaggagattatgtgtatcttcgtgtcacgcctcttcgaggagttcatcgtttccacactaaaggaaaattggcaccgcattttgtgggaccttataaggttgtcagtagaagaggagaggtcgcttatcagttggagttacctcaatctttggcaggagtccataatgtgttccatgtgtcgcaattgaaaaagtgtttaagggtacctactgaagaagctaatcttgaacagatagaagtccaagaggatctgacctatattgagaaaccaatccgtattttggaaatagatgagagaagaaccaggaatcgagttatccgtttttgcaaagtccaatggagtaatcactcggaagaagaatcaacttgggaacgagaagatgaattgaaccgtggattcgagttcgattcggatcggtctctttcctccgagccttaactttccttctcgtcgccggtcaccgtgggccttcgccgcagccttccaacccctataaaaggatccccaagcccgccgctacccgtcgccaccctcgccttcatctctcgtcgctggtagagtcctagcctcccgtgcttcgtcgttgttccagtcatcgccgtcgctcgggaaggtcgccatcgtggtcgccgtcgcgtcgccttcctcgtccaccccttcgccgtcgcggaagaccgccggagcatcgccgtcgtcgtcaagccaaaggactccgccgccttttcctcgacgccgccgccgtccgttcattttccgccgctgttttggtcatcggtgagttcgccgcgtcgctctctacgtcgttcgccggtgagcatgcgcgcccgagccgccgccggaggtgacgtcaccgctgacgtcatcgtggccgtctgccattccgacgtttccggagagtccgttttcgcaggggaagattttgaagagttccaaggccagcaaggcaactcctggtttggaatggtatattcctggtttggagatagatctgtatagccggatgccgcgctacaagcctgagtacttgtttggtgttgagggatttgtccaagagttgcgtacgatgtcctttgccataggatttgggactgcccctttttatgcccagattcctcatgatcgtcacgaagagaagtgccgagtcaaagtcaccttgaacagtaatagtgaagatatcccctcagtgatgttcgaagctggaggaagaaactacatccatacatgtcaggaggtggcaaggatcgccataggggagctccgcgatcgctacagtgatcagttggccgacactgagtatcgctaccatcctcgtcaaccactgggaagtgaccgtggcagctaccttgagactaagggaattaagaatgatgctaccacaaggcatttggttaagatgctgtgggctatggatgaaacccgtgcggagactgtgttagcggctcaagatcgtgaagaccggaatcgtggcaagatttgcaagttagaggacaaagtggatcgtttggagaaggaactagctgcattgaagggagaagcaccaccgcagaaggccaggattcgtcttactgcaaggaagagagctctatttgtccctcgctaccaattggcaccaaaggtccgtgtggtggaaaaagaagttaccccagccctagcggatcctccggtcgtcaacatggtgctcactcgcaacaacgggaatgaccccaacaacaataataacaacagcaatggagagaatcccacacttgcccaagtcctggctcaacaggcacagcttatgaacatgatgatgcagcaactccagaaccagcagaaccagggaaataaccatgcacctccccagaacaagttagcagaatttcttcgtgtgaggccgcccactttctctagtaccactaatccagttgaagctggtgattggctgcatgccatagagaagaagttggatttgcttcagtgcgccgatcaggagaaggtctcatttgcatcacaccagctgcatggccctgcctctgaatggtgggatcactttcgccttaacaggactactgctgaacctatcacttggcttgaattcaccgctgctttccggaagacgcatataccatcgggagtggtgtctctcaagaagaaggaattcaggtcgctcactcaggggtctcgctctgttaccgagtatctgcacgagttcaatcgtctggctcgttatgctccggaagatgtgcgcactgatgaagagcgccaggagaagttcttggaaggacttaatgatgagctttcttatccactcatgactggggattatcctgatttccagaagttagtggataaggctattcgccaggaggacaagtacaatcacatggagcagaagaaacgccggattgctcacttcaaggcacaacaggggaatagtcagaggccgagtcttactttaggaccccagtccatgccacagggaggttcttcgtttgttgttcgtccgcagcatcagttcttcaacaacaatgctggcaacaacatccgcaatcaagctccacgccctgttgcagcttcgacacagcaacaacctgccaagaaggagcaaggcagcaagtccggggtgtgcttcaattgtggagacccaggacattacgctgacaagtgtccgaagccccgacgcgtgaaggttgtccctgcccagagcaactctaccgtaccagcatcaaaggcccgtgtcaatcatgttgctgctgcagaagctcaagatgctccagatgtgattttgggtacgtttcttgttaacttagttcctacaacagtgcttttcgattctggtgctacacattcattcttatctatgagttttgcgggaaatcatgggatggaagtagaagatcttagacatcctttgatggttagtaccccaagtaatcaggcactctctttgcaacgtagcccctctgtcagaatagaaattcagggagtaccatttctggccaatcttatcctgttagaatccaaagacattgatgtcatcttagggatagactggttagccagatataaaggtgtgatagactgtgccaacagaaaagtaactctcaccagcaatgatggtcgagttgtaactgttcatgcattgtcttctgagtctttaaggtcaagactgaaccaaataactttggaagagattcctgtagtccgggagtatcccgatgtgttcccagacgatttacctggtatgccgcctaaaagggatatagagttcagaatagatttggtaccaggaacaactccgatccataagagaccttatagaatggcagccaatgagttggcagaagtcaagaggcaagtagacgatttgcttcagaaaggatacatcagaccgagttcatctccatggggagctccagttatttttgtggaaaagaaagaccatacccagaggatgtgtgtggactatcgtgcactaaatgatgtgactatcaagaataagtatccgttgcccagaattgatgatttgtttgatcagcttaaaggtgccaccgttttctccaagatagatcttcgatcaggatatcaccagttgagaatcaaagaggaagatatacctaagacagcttttaccactaggtatggattgttcgaatgtactgttatgtcttttggacttaccaatgcccccgctttcttcatgaacttgatgaataaggtgtttatggaatacctagacaagttcgtggtggtctttattgatgacattcttatctactcccgaaccaaagaagagcatgaagaacatcttcgccttgcactagagaagctacgagaacatcaactgtatgctaagtttagcaagtgtgaattttggttgtctgaagtgaagttccttggtcacgtcatctcagcaggaggagttgccgtcgatcctagtaatgtggaatccgtaaccaactggaaacaaccaaagacagtttcagagattcgcagtttcctaggcctcgcaggatattatcggaggtttatagagaatttttccaagattgctaagcctatgacacggctgcttcagaaagatgtgaagtacaagtggtcagaagaatgtgagcagagttttcaagagttgaagaatcgtttaatatcagctcctattttgattttacctgatccaaagaagggtttccaagtgtattgcgatgcatccaaacttgggttaggttgtgttctgatgcaagatgggaaggtggttgcctatgcatctcgtcagttacgtccgcatgagaagaactaccctactcatgatcttgagttagctgcagtggttcatgcgttgaagatttggcgtcattatcttttcggtactcgtacagaggtgtataccgatcacaagagtttaaaatatatctttactcagccggatctgaacatgagacaacggagatggttggaattaattaaggattatgacatgggaattcattatcacccgggaaaggctaatgttgtagcagacgctcttagcaggaaaggctattgcaatgctacggaaggacgacagttgccattggagttatgcaaggaatttgaaagattaaatttgggaatggtcagaagaggtttcgttgcagccttagaagcaaagcccactctaattgatcaagttagagaagcccaaattaatgatcctgatattcaagaaatcaagaagaatatgagaagaggaaaagctatcggtttcttggaggatgagcaaggaactgtatggttgggtgagagaatctgcgtccccgacaacaaagatttaaaagatgcaattctgaaagaagctcatgatactttatactccattcaccctggtagtaccaaaatgtaccaggatcttaaggaaagattttggtgggcaagtatgaagcgtgaaatcgcggaacacgtagcagtatgtgatgtttgtcagcgagtcaaggcagaacatcagaaacccgccggtttgctgcagcctttgaagattcccgaatggaagtgggaggaaatcggtatggatttcatcactggtctacccagaacgtcatcaggtcatgactctatttgggtgatagtcgacagacttaccaaagtggctcatttcatcccagtaaagacaacttattctggaagtcggttggcggaattgtatatggcaaggattacagacggacaaaccaaaagggtaaatcagattttggaagacatgttgagagcttgtgctttagacttcggtggaagttgggataagaatctaccttatgcagaattttcgtacaacaacagttatcaagctagtcttcagatggctccttacgaagtactgtatggtcggaagtgccgcactccgcttttgtgggatcaaacgggagaacgtcaggttttcgggatggatatcctgagggaagcagaagaaaaggtgaaaatcattcaagaaagattgcgtgtggcccagtctcgtcataagagttatgccgacaatcgtcgtagagatctaagttttgacgaaggagattatgtgtaccttcgtgtcacgcctctttga

SEQ ID NO: 22939 - DNA, 3795 bp, Oryza sativa
  Clone ID: TF_OsC359_7558
atggctgctgtccgaatgaccctccgatgggatgggtcataccaacctccactccgccggaagcagatgccgcgctacaagcctgagtacttgtttggtgttgagggatttgtccaggagttgcgtacgatgtcctttgccataggatttgggactgcccctttttatgcccagattcctcatgatcgccacgaagagaagtgccgagtcaaagtcaccttgaacagtaatagtgaagatatcccctcagtgatgttcgaagctggaggaagaaactacatccatgcatgtcaggaggtggcaaggatcgccataggagagctccgcgatcgctattgtgatcagttggccgacactgagtatcgctaccatcctcgtcaaccacagggaagtgaccgtggcagctaccttgagactgaaggaattgagaatgatgctaccacaaagcatttggttgagatgctgtgggctatggatgaaacccgtgcggagactgtgttagcagctcaagatcgtgaagaccggaatcgtggtaagatttgcaagctagaggacaaagtggatcgtttggagaaggaactagccgcgttgaagggagaagcaccaccgcagaaggccaggattcgtcttactgcaaggaagagagctctatttgtccctcgctaccaattggcgccaaaggtccgtgtggtggagaaagaagttaccccagccctagcggatcctccggtcgtcaataataagttagcagaatttcttcgtgtgaggccgcccactttctctagcaccactaatcctgttgaagctggtgattggctgcatgccatagaaaagaagttggatttgcttcagtgcactgatcaggagaaggtctcatttgcatcacatcagctgcatggccctgcctctgaatggtgggatcatttccgccttaacaggactactgctgaacctatcacttggcttgaattcaccgctgctttccggaagacgcatataccatcgggagtggtatctctcaagaagaaggaattcaggtcgctcactcaggggtctcgctctgtcactgagtatctgcacgagttcaatcgtctggcccgttatgctccggaagatgtgcgcactgatgaagagcgccaggagaagttcttggaaggacttaatgatgagctttcttacccactcatgactggggattatcctgatttccagaagttagtggataaggctattcgccaggaggacaagtacaaccgcatggaacagaagaaacgccggattgcttacttcaaggcacaacaggggaatagtcagaggccgcgtcttactttaggaccccagtccatgccacagggaggttcttcgtctgttgttcgtccgcagcgtcagttcttcaacaacaatgctggaaacaacatccgcaatcaagctccacgccctgttgcagctccaacacagcaacagcctgccaagaaggagcaaggcagcaagcccggggtgtgtttcaattgtggagacccaggacattacgctgacaagtgtccgaagccccgacgcgtgaaggttgtccctgcccagagcaactctaccataccagcatcaaaggcccgtgtcaatcatgttgctgctgcagaagctcaagatgctccagatatgattttgggtacgtttcttgttaacttagttcctgcaacagtgcttttcgattctggtgctacacattcattcttatctatgagttttgcgggaaatcataggatggaagtagaagatcttagacgtcctttgatggttagtaccccaagtaatcaggcactctctttgcaacgtagcccctctatcagaatagaaattcaaggagtaccatttctggccaatcttatcttgttagaatccaaagaccttgatgtcatactagggatggactggttagccagatataaaggtgtgatagactgtgccaacagaaaagtaactctcaccagtaatgatggtcgagttgtaactgttcatgcattgtcttctgagtctttaaggtcaagtctgaaccaaataactttggaagagattcctgtagttcgagagtatcccgatgtgttcccagacgatttacctggtatgccgcctaaaagggatatagagttcagaatagatttagtaccaggaacaactccgatccataagagaccttatagaatggcagccaatgagttggcagaagtcaagagacaagtagacgatttgcttcagaaaggatacatcagaccgagttcatctccatggggagctccggttatttttgtggaaaagaaagaccatacccagaggatgtgtgtggactatcgtgcactaaatgatgtgactatcaagaataagtatccgctgcccagaattgatgatttgtttgatcagcttaaaggtgccaccgttttctccaagatagatcttcgatcagggtatcaccagttgagaatcaaagaggaagatatacctaagacagcttttaccactaggtatgggttgtttgaatgtactgttatgtcttttggacttaccaatgcccctgctttcttcatgaatttgatgaataaggtgtttatggaatacctagacaagttcgtggtggtctttattgatgacattcttatctactcccgaaccaaagaagagcatgaagaacatcttcgccttgcactagagaagctacgagaacatcaactgtatgctaagtttagcaagtgtgaattttggttgtctgaagtgaagttccttggtcacgtcatctcagcaggaggagttgccgtcgatcctagtaatgtggaatccgtaaccaactggaaacaaccaaagacagtttcagagatttgcagtttcctaggcctcgcaggatattatcggaggtttatagagaatttttccaagattgctaagcccatgacacgactgcttcaggaagagatgggttctaagctgaactttagtactgcttatcatccacagacagacggacaaaccgaaagggtgaatcagattttggaagatatgttgagagcttgtgctttagacttcggtggaagttgggataagaatctaccttatgcagaattttcgtacaacaacagttatcaagctagtcttcagatggctccttacgaagcactgtatggtcggaagtgccgcactccgcttttgtgggatcaaacgggagaacgtcaggttttcgggacggatatcttgagggaagcagaagaaaaggtgaaaatcattcaagaaatattgcgtgtggcccagtctcgccataagagttatgccgacaatcgtcgtagagatctaagttttgacgaaggagattatgtgtaccttcgtgtcacgcctcttcgaggagttcatcgttttcacaccaaaggaaaattggcaccgcgttttgtgggaccctataagattgtcagtagaagaggagaggttgcttatcagttggagttacctcaatctttggcaggagtccataatgtgttccatgtgtcgcaattgaaaaagtgtttaagggtacctaccgaagaaactaatcttgaacagatagaagtccaagaggatctgacctatgttgagaaaccaatccgtatcttggaaatagatgagagaagaaccaggaatcgagttatccgtttttgcaaagttcaatggagtaatcactcggaagaagaatcaacttgggaacgagaagatgaattgaagtcaactcatccgcatctgttcgccagttcttccgaatctcgaggacgagattctgtttaa

SEQ ID NO: 22940 - DNA, 3681 bp, Oryza sativa
  Clone ID: TF_OsC359_7854
atggtgctcactcgcagcaacgggaatggccccaacaacaacaacaacaacaacaatggagagaatcccacacttgcccaagtcctggctcaacaggcacagcttatgaacatgatgatgcagcaactccagaaccagcagaaccagggaaataaccatgcacctccccagaacaagttagcagaatttcttcgtgtgaggccgcccactttctctagtaccactaatcctgttgaagctggtgattggctgcatgccatagaaaagaagttggatttgcttcagtgcaccgatcaggagaaggtctcatttgcatcacatcagttgcatggccctgcctctgaatggtgggatcacttccgccttaacaggacaactgctgaacctatcacttggcttgaattcaccgctgctttccggaagacgcatataccatcgggagtggtgtctctcaaaaagaaggaattcaggtcgctcactcaggggtctcgctctgttaccgagtatctgcacgagttcaatcgtctggctcgttatgctccggaagatgtgcgcactgatgaagagcgtcaggagaagttcttggaaggacttaatgatgagctttcttacccactcatgactggggaacagaagaaatgccggattgctcacttcaaggcacaacaggggaatacttcgacaccgcaacaacctgccaagagggagcaaggcagcaagcccggggtgtgcttcaattgtggagacccaggacattacgctgacaagtgtccgaagccccgacgtgtgaaggttgtccctgaccagagcaactctaccgtaccagcatcaaaggcccgtgtcaatcatgttgttgctgcagaagctcaagatgctccagatgtgattttggaaaagaaagatcatacccagaggatgtgtgtggactatcgtgcactaaatgatgtgactatcaagaataagtatccgctgcccagaattgatgatttgtttgatcagcttaaagccgaggggagggggcgcgcggaccgggtccacgggagtggggcccacgcggcagcctcacggtccacggtggaccggccactcggcgcgcccgagggcggccaagccggcgcagccggcgggaggcggcgcgcctgtgccccgatggtcgccgccggctaccaccagcgcgacggagcggcgcccgagagaggggagggaaagggggaaacgaagcggcggtccacggctcaccacgggtcgacggcgacgatggaaacggcgaccggagcggaggaaggcggtggcgcggctcgggtcgacggggtcgacggcgttccggcggtcggcgagcgaaacggaggggtggacgaggtcggtgaggatgcggcgaagccgaaggaggcggcgtcgaggtgggaggtggtccggggcgacaacggcggcggaccggagctcggcagcgacggcggagagagagagcgacggcgcgagctcgattccggcggggagagagggcggcgagtggcggaaacggtggtggggagctcggggagggtttatatagggttgggagtgagagagggtggccggaggagggggaaatgggcgcgggagacccggccgccattaatggcgccggcgagcaagtgtgaattttggttgtctgaagtgaagttccttggtcacgtcatctcagcaggaggagttgccgtcgatcctagtaatgtggaatccgtaaccaactggaaacaaccaaagacagtttcagagattcgccgtttcctaggcctcgcaggatattatcggaggtttatagagaatttttccaagattgctaagcccatgacacgactgcttcagaaagatgtgaagtacaagtgcctcgcgacgccgtcgtcaccgttgctccagccgtgctccgccatcgctccagtcatcgccgtcgctcggggaggtcgccatcgtggtcgccgttgcgtcgccgtcctcgtccgccccttcgccgttgctgtcgaccgccggaacaccgccgccgtcgtcaagccgaaggtcgccgccgcttcttccttgacgccgtcgccgtccgttgatcttccgccgccgttttggtcaccggtgagttcgccgcgtcaccctctacgtgctggtgccctccgttcgcgtcgtcgcgccgtcgttcgccggcgagtttgcaagcccgagccgccgccggtggtgacgtcaccgctgacgtcatcgtcgtcgtctctcgtggtccggccgtggaccggagaagattttgaagagttccaaggccagcaaggcaatttgttattatgtgcctcggctgatttctggacgaggatttacacacatatgccgcgcttcaagcctgagtacttgttcggtactgagggatttgtccaggagttgcgtacgttgtcctttgccataggattcgggactgcccctttgtatgcccagattcctcatgatcatgatgaagagaagtgccatgtcaaagtcaccttgaacagtaatcgtgaagatatcccatcggtgatgttcgaggctggagggggaagctacattcatgcttgtcaggaggtggcaaggatcaccataggagagctccgcgaaagctacaatgatcagttggccgacactgagtatcgctatcatcctcgccaaccccagggaagtgaccgtggcagctaccttgaacctgcagggattgagaatgatgctaccaccaggcatttggttgagatgctgtgggccatggatgagacctgcgctgagattatgttagcagctcaagatcgcgaaggccggaatcgtggtaagatttgcaagctggaagacaaggtggatcgtttggagaaggaactagccgcattgaagggagaagcaccaccacaaaaagctagggttcgtcttaccgcaaggaagagagctctatttgtccctcgctaccagttggcgccaaaggttcgtgtggtggaaaaagaagccgcctcagccccagcggatcctccgatcgtcaacatggtgtttactcgcagcaatgggaatggccccaacaacaacaacaccaccaacaacaataatggagagaatcccacgcttgcccaagtcctggctcaacaggcacaggttatgaatatgatgatgcagcaactccagaaccaacagaaccagggaaacaaccatgcacctccccagaacaagttagcagaatttcttcgtgtgaggccgcccactttttctagcactaccaatccagttgaggctggtgattggctgcatgccatagaaaagaagttggacctgcttcagtgcaccgatcaagaaaaagtctccttcgcgtcacatcagcttcatggccctacctctgagtggtgggatcatttccgtctaaataggactaccgtggaaccaatcacttggcttgagttcactgctgctttccggaagacgcacataccatcgggagtggtgtctctcaagaagaaggaattcagggcactcactcagggatctcgctctgtcaccgaatacttgcatgaattcaatcgtctggctcgctatgcttcggaagatgtgtgcaccgatgaagagcgtcaagagaagttcttggaaggactgaatgatgagctctcttacccattaatgactggggattatcatgattttccagaagttggtggataa

SEQ ID NO: 22941 - DNA, 4411 bp, Oryza sativa
  Clone ID: TF_OsC359_8131
gtcgccctcttttgtttgccccctttcccgagctctctagtgccccgtggagtcgccgccgcgccgccctagtcgccgccatcgccggccgccgctcagccgcgccgcgccgccgcttgcgtcgtcgccgccgccttttctcgccgccgttaggtgcgcgtgagggagagctagctcggccgccccctctccgctgtcgtcggtcgccgtgaagccgccgccaccgttgaccgatccgccgccgccacataacctggtcgccggccaccatccgtcgtcgttcgtcgcgttggtgagtaccgttgagatcgcgtcttcgccctctacgcgtaggtgccctccaatagtccggccgagcctccgtagcgccggcgaggtcgtgccggctttatcttttgtatagcatgattcattatagtgtgctagactgtgaagcggcgagaagtccgtgggggtcgctggggagtccattgcctctggttttgagggggagattatgatccaggaacggtgcactgtgatgccgccccattcaccgagaaatttgatcaaggtgttaggattcgtcagggagctgaggttgatggcttttgagtatcatcctcacaagcctcatggtcaagattatggaacttacacctatcctgatggtgaggagagtgccactctgatgcaggcggtgcatatgcttagttctatgtatgcagtaagtgtggagcgagacaaagccgctcatgacagggaaaactggaatcgaggcaagatttgcaagttggagagtaaggtgtaccgtctacagaaggaattagctgagcttaaaggagagacgccgccgccaacacccaagcttcacctcaccgcaaggaagagaacctgtccaccacctcgtctccagttagcttcgaagcttcgcgtgatgggagatgctgtgccagatcgtgctgaacctgtcatccacgtcttaagtgatgaggaagaagaggaatacccagaagaaagaatggtgaacacgcgcactggaagtggaagtggagctgctaacaatggaggagattccacgctagctcagattttggcccaacaaacacaactgatcaatctgttagtgcagcaggcacagaatcagcaggcaaacaaccagaaccagaatcaacccccacctccccaaaacaagttggcagatttcttacgtctgcatggtcccgctgctgaatggtgggatcactttcgccaagccagggctgaaggagaacctatcacttggcaggaattcacggccgctttcaagaacacgcacataatgacaggtgttgtagctctgaagaagagagaatttagagcgctcaaccagggatctcgttcggtcactgagtacctccatgatttcaatcgtttagctcgctatgctccaaaatatgttcgcaccgatgaagaacgtcaggagaagtttttggagggactgaatgatgagttgtcttatgctttgatgtctacggatttccgggatttccagcagttagtggacaaggctattcgtcaggaagacaagtacaatcgaatagagcagaagaagcgcagggctgcccaatttaaggctcaacagggcagtaaccagaggtcgcgtctcgttacgggacctcaagctacatcataccctcaaggaggatcttcgtcagttgctcgccctcaacgccagttctacaacaacaatactggtaatcgtggcaatgacaaccgcaacgtggtcgctcgtcctgcagcaactccagctaagaaccagcctgtcaggaaggaacagggaagcaagccaggggtgtgcttcaattgtggtgatccagggcactatgctgataagtgtcctaagcctcggcgtgtgaagaacgctccagccccgaacaactctaatactccagcaccgaaggcacgtgttaatcatgttgtagcggcagaagctcagaatgcaccagatgtggttttgggtatgccacctaagagagacatagagttccggatagacttggtccctggaaccaaccctatccataagagaccttacagaatggcagctaatgagttagctgagataaagaggcaggtggatgatttgcttcagaaaggatatatcaggcccagtacttcgccgtggggagcaccagtcatctttgtggagaagaaagatcatactcagagagtgtttatggaatatctggataagtttgtcgtggtgtttattgatgacattcttatttactccaagacaaaagaagaacatgaagagcatcttcgtctagctttagagaaactacgtgagcatcagctctatgccaagttcagtaaatgtgaattttggttgtctgaagtgaagtttcttggtcatgtcatctcatccggaggagtggcagtagatccaagcaatgtggagtcagtgttaaattggaagcaacccaagacggtttcagaaattcgtagtttccttggacttgcggggtactaccgcaggtttattgagaacttctcaaagatcgccagaccaatgactcgtctgcttcagaaggatgtgaagtataagtggacagaagattgcgagcaaagtttccaagaactgaagaaaaggctagtgactgcgcctgtgttaattctgcctgattcaaggaaaggttttcatgtgtattgtgatgcatcccgactcggtttgggttgtgttttgatgcaagaaggaatggtggttgcctatgcatctaagcaattacgtcctcatgagaataactacccgacgcatgacctagagttggcagctgtagtgcatgcattgaagatttggcgtcattatcttttcggtaaccgtacagagatgtatacggatcataaaagtttgaaatggttagagttgattaaagattatgatatggaaatccattatcacccgggtaaagcaaatgttgtagccgatgccctcagcaggaaaagctattgtaatatgtcagaaggtcgacatctaccttgggagttatgccaagaatttgaaaagctgaatttggggatagtcagcaaaggttttgtggctgctttagaagctcaacctaccttgtttgatcaagttagagaagctcaagggaatgatcctgacatccaagaaatcaaaaagaacatgagaagaggaaaagccatcggttatgtagaagatgagcaaggaactgtgtggttaggagaaagaatttgggtacctgataacaaggagttgaaggataccatcgtgaaagaagctcatgaaactttgtattccattcaccctagaagcactaagatgtaccaagacctaaagcaacaattctggtgggctagtatgcgacgtgagatagcagaatatgtggctctatgtgatgtatgtcagcgagtcaaggctgaacatcagaagccagccggtctgttgcaaccattgaagattccagagtggaagtgggaagaaatagagctatacatggccagagtggtatgtttgcatggagttcccaagaagatagtgtcagatagaggtagtcagtttacctcgaagttttggcagaagctacaagtagagatgggtacccgtttgaatttcagtaccgcttatcaccctcaaacagacggtcagacagaaagagtaaaccaaattttagaagacatgttgagaccatgtgttctagattttggtagaagttgggataagaatttgccgtacgcggaattctcatataacaacagttatcaagctagtttgcaaatggctccgtatgaagcattatatggccgaaagtgtcgtacgccgctcttgtgggatcaaaccggtgagcgtcaagtttttgggacagacatattgcgagaggcagaagaaaaagtgaagattatccaagaaaggttgcgcgttgctcagtcacgtcagaagagctatgccgacaatcgtcgcagagatttgactttcgaaggagattatgtgtaccttcgggttacgccgttacgaggtgttcatcgtttccagaccaaagggaaattggcaccgcgtttcgtgggaccttttaagatcgtaagtcgaagaggtgaagtagcttatcagctagagttgcctccgtcaatggcgggaatacacgacgtgttccacgtgtcacagttgaagaaatgtttgcgtgtacctacggaggaagcagatccggaacatatagagcttcaagaagatttaacctatgttgagaagccagtcagaatcttggaagtaagtgagaggaataccaggaatcgcgttatacggttctgtaaggttcagtggagcaatcattcagaagaagaagccacttgggagcgagaagatgaattaaagtcagctcaccctcatctcttcgccggttcttctgaatctcgaggacgagattccgtttaa

SEQ ID NO: 22942 - DNA, 6981 bp, Oryza sativa
  Clone ID: TF_OsC359_8471
cagatctcaggcgaaggtgtggttccgccaaatcttcaatgcatgcaccacagctgccaattctaggtcatgcgttgggtagttattctcatgaggacgtaattgcctagatgcataggcaaccacctttccttcttgcatcaacacacaacccaaaccgagtcgggatgcatcacaatacacttggaaacctttcctcgaatcaggcaaaattaatacaggcgcagtcactagccttttcttcaattcttggaaactttgttcacaatcctctgtccacttgtacttcacttccttctgaagcagacgagtcattggtctggcgatctttgaaaagttctcaataaacctgcggtaataccctgcaagtccaaggaaactacgaatttcggaaaccgtcttgggttgcttccaacttaacactgactccacattgcttggatctactgccactccaccagacgagatgacatgaccaagaaacttcacttcggacaaccaaaattcacatttactgaacttggcataaagctgatgctcacgtagtttctctaaagctagacgaagatgctcttcatgttcttcctttgtcttggagtaaataagaatgtcatcaataaacaccacgacaaacttatccagatattccataaacaccttgttcatcagattcatgaaaaaggctggggcattagtgagtccaaatgacataacggtacattcgaacaaaccataccgagttgtgaaggcggtctttggtatatcttcctcacggattcgaagttaataatatccagaacggagatctatcttggagaaaactgtagcaccttccagttgatcaaacaggtcatcaattctgggtagaggatacttattcttgatagtaacctcattcaacgctcgataatccacgcacattctctaagtatgatctttcttctccacaaagatgactggtgctccccatggcgaagtactgggtctgatgtatcctttctgaagcaaatcatccacctgtctcttcacctcagctaactcattagctgccattctgtacggtctcttatggatagggttggttccaggtaccaagtctatccgaaactctatgtctctcttaggtggcatacctggcaaatcctcgggaaacacgtctgggtagtcttgtactatggggatctcttgtagagcaacttggtttaagatcacaccatgagatttaggagaggacacaaagaaagaaactgtttccccattgctattggttaaagtcaccttacggttggcacaatctataactcctctgtgacgagataaccagtccatccctaagataacatctagatctttggattctagcaagataagcgaggatgggaaaggaacttcttctatttctatagtagcggaaggacaatactgtgtcgaaaatacttgattgcctggggtattaactagtaaaggtctcccaagactaataacttccatcccatgattgctcgcaaaacttttagacaaaaaagaatgcgtagcaccggaatcaaaaagcacagatgcgggtatagagttaacaggaaacgtacccaaaaccacatctggtgcattctgagcttctgctgctgcaacatgattaacacgtgcctttggtgctggagcattggagttattcggggctggagcgttcttcacgcgccgaggcttaggacacttatcagcataatgtcctggatcaccacaattgaagcacacccctggcttgcttccctgttccttcctgacgggctggttctgagctggagttgctgcaggacgagcaaccatgttgcggttgtcattaccacgattaccagtattgttgttgtagaactggcgttgggggcggacaactgatgaagatcctccttgagggtacgatggagcttgaggtcccgtaacgagacgcggcctctggttactgccctgttgtgccttgaattgggcagccctgcgcttcttctgctccatccggttatacttgtcttcctgacgaatcgccttgtccaccaactgctggaaatcccggaaatccgtagacatcaaggcataagacaactcatcattcagtccctccaagaacttctcctgacgctcttcatcggtgcgaacatcttccggagcataacgagctaaacggttgaaatcatggaggtactcggtgaccgaacgagatccttggttgagtgctctaaattctctcttctttagagctacaacacccgttggtatatgtgtctttttgaaagcggccgtgaattcctgccacgtaataggctctccttcagccctgccttggcgaaaatgatcccaccattcagcagcaggtccatgcagttgatgcgaagcaaaagaaactttctcctgctcagtacactggatcaagtccaacttcttctccaccgcatgcagccaatctcctgcttctactggattggtagtgcgccttgcgtcggaacgaagcgatggatcttcttcctctggagtagctggctctctttcttcagggtcttcctcctcttcctcatcacttatgatgtcgatgacaggttcagcacgatcgggcacagcttcacccatcacgcgaatcttcgaagctaactggagacgaggtggcggacaggttctctttcttgcagtgaggcgaagcttgggtgttggcggcggcgtttctcctttaagttcagctaattccttctgtagacggtacaccttgctctccaacttgcaaatcttgcctcgattccagttttccctgtcatgagctgctttggctcgctccacacttactgcatccatagcactaagcatatgcaccgcatgcatcagagtggcactctcttcaccatcaggacaggtataggttccatagtcttgaccatgaggcttgtgaggatgatactggaaagctgatgaatccaactcttcttatttatttcttctgattattattatcatcacattcacggagaaagcagcatccaaacatgatagatgctactagcaaatatcgataattaattatccagtaacccggataactaattaaataattaattaagcaaaggcctaattaattaattactaaggaagttaatccatgccacccccaaacatggggcagccaaagaaaccagtgtgctgcaggttgcaccggccgtagtccgccatcgtgctcgccgtcctcaccgtcgcggcagcggcggcgggctacggcggctacggcgacgtcggcgagtactgccgcgtggggaaggcggtgtcccggaacccggtcccatcgtgccggaactacatcgcgcggtggtgcgccgtcgccgggggccgcctggactccggcaagcagccgccgcggcagctcctggagccgtgctgccgggagctcgccgcagtgccgatgcagtgccggtgcgacgcgttgagcgtgctggtgcgtggcgtggtcacggaggagggcgaccgcgtcgccgggatgatctcgcagcacgcggcgcccgggtgcgacgccgcgacgatcgccgggatggcgagcgcgctgacggactacggccggtgcaacctgcagcacactggtttctttggctgccccatgtttgggggtggcatggattaacttccttagtaattaattaattaggcctttgcttaattaattatttaattagttatccgggttactggataattaattatcgatatttgctagtagcatctatcatgtttggatgctgctttctccgtgaatgtgatgataataataatcagaagaaataaataagaagagttggattcatcagctttccagtatcatcctcacaagcctcgtggtcaagactatggaacctatacctgtcctgatggtgaagagagtgccactctgatgcatgcggtgcatatgcttagtgctatggatgcagtaagtgtggagcgagacaaagcagctcatgacagggaaaattggaatcgaggcaagatttgcaagttggagagcaaggtgtaccatctacagaaggaattagctgaacttaaaggagaaacgccgctgccaacacccaagcttctcctcaccgcaagaaagagaacctgtccgccacctcgtctccagttagcttcaaagattcgcgtgatgggtgaagttgtgcccgatcgtgctgaacttgtcatcgacatcatggtgaacacgcgaactggaagtggaagtggaagtggaagtggagctgctaacaatggaggagatcccacgctagctcagattctggcccaacaaacacaactgatcaatctgttagtgcagcaggcacagaatcagcaggcaaacaatcagaaccagaatccacccccacctccccaaaacaagctggcagatttcttacgtcagttggtggacaaggcgattcgtcaggaagacaagtataaccggatggagcagaagaagcgcagggctgcccaattcaaggcacaacagggcagtaaccagaggccgcgtctcgttacggaacctcaagctccatcgtaccctcaaggaggatcttcatcagttgtccgcccccaacgccagttctacaacaacaatactggtaatcgtggcaatgacaaccgcaacatggttgctcgtcctgcagcaactccagctcagaaccagcccgtcaggaaggaacagggaagcaagccaggggtgtgcttcaattgtggtgatccaggacattatgctgataagtgtcctaagcctcggcgcgtgaagaacgctccagccccgaacaactccaatgctccagcaccgaaggcacgtgttaatcatgttgcagcagcagaagctcagaatgcaccagatgtggttttgggtacgtttcctgttaactctatacccgcatctgtgctttttgattccggtgctacacattcctttttgtctaaaagttttgcgagcaatcatgagatggaagttattagtcttgggagacctttactagttaataccccaggcaatcaagtatcttcgacacagtattgtccttccgctactatagaaatagaagaagttcctttcccatcctcacttatcttgctagaatccaaagatctagatgttatcttagggatggattggttatctcgtcacagaggagttatagattgtgccaaccgaaaggtgaccttaacctgtagcgatggggaaaccgtttctttctttgtgtcctctcctaaatctcatggtgtgaccttaaaccaagtcgctctacaagaaatcccagtagtacaagactactcagatgtgtttcccgaggatttgccaggtatgccacctaagagagacatagagttccggatagacttggtccctggaaccaaccctatccataagagaccttacagaatggcagctaatgagttagctgagataaagaggcaggtggatgatttgcttcagaaaggatatatcaggcccagtacttcgccgtggggagcaccagtcatctttgtggagaagaaagatcatactcagagagtgtttatggaatatctggataagtttgtcgtggtgtttattgatgacattcttatttactccaagacaaaagaagaacatgaagagcatcttcgtctagctttagagaaactacgtgagcatcagctctatgccaagttcagtaaatgtgaattttggttgtctgaagtgaagtttcttggtcatgtcatctcatccggaggagtggcagtagatccaagcaatgtggagtcagtgttaaattggaagcaacccaagacggtttcagaaattcgtagtttccttggacttgcggggtactaccgcaggtttattgagaacttctcaaagatcgccagaccaatgactcgtctgcttcagaaggatgtgaagtataagtggacagaagattgcgagcaaagtttccaagaactgaagaaaaggctagtgactgcgcctgtgttaattctgcctgattcaaggaaaggttttcatgtgtattgtgatgcatcccgactcggtttgggttgtgttttgatgcaagaaggaatggtggttgcctatgcatctaagcaattacgtcctcatgagaataactacccgacgcatgacctagagttggcagctgtagtgcatgcattgaagatttggcgtcattatcttttcggtaaccgtacagagatgtatacggatcataaaagtttgaaatggttagagttgattaaagattatgatatggaaatccattatcacccgggtaaagcaaatgttgtagccgatgccctcagcaggaaaagctattgtaatatgtcagaaggtcgacatctaccttgggagttatgccaagaatttgaaaagctgaatttggggatagtcagcaaaggttttgtggctgctttagaagctcaacctaccttgtttgatcaagttagagaagctcaagggaatgatcctgacatccaagaaatcaaaaagaacatgagaagaggaaaagccatcggttatgtagaagatgagcaaggaactgtgtggttaggagaaagaatttgcgtacctgataacaaggagttgaaggataccatcgtgaaagaagctcatgaaactttgtattccattcaccctagaagcactaagatgtaccaagacctaaagcaacaattctggtgggctagtatgcgacgtgagatagcagaatatgtggctctatgtgatgtatgtcagcgagtcaaggctgaacatcagaagccagccggtctgttgcaaccattgaagattccagagtggaagtgggaagaaataggtatggattttataaccggtctacccagaacgtcggcaggacatgattctatttgggtagtggttgacagattgactaaagtcgctcatttcatacctgtcaaactgtcaaaacaacctacacggggaataaacttgcagagctatacatggccagagtg

SEQ ID NO: 22943 - DNA, 4631 bp, Oryza sativa
  Clone ID: TF_OsC1528_2065
atttgaagcatgtgtggtggagagaagaggggaaacacacacgcgctcgtctcgcctagcagggcgggcggcgtgcgtgcacgacgtacgtgtcgaatggtccgcaaaattggctcctcacccttgcgcagatgcagactccttttgcagttttgttttgctacgggaaattcggatttgttttgttttggaaacattccaaaaaatccggtacgtgaaaacggcatggagtccggataggttacgcgtgacttatccggttcggtcgaaatcaatctagggtttgcctcctactctgtactgcgccgtcgctcgtagactactccatcccgctcgccggcgtgcaccggcgatcgggagagcaggtctctggaacctctgccttcgacgtcctgcaccgggagaaggcggcaataagattaaatcattatatgtctataatctcaacaatccaaaaaccttattataggcactgtgattttactatggctggttttgccgatgcactgaggccggataaattcaccggtgtgcattttaagagatggcagatcagggtcactctgtggctgacagctatgaaatgcttctgggtgagtactggcaaacctgaaggagttcttactgctgaacagcagaagcaattcgaggaagccactactctctttgtgggatgcattcttagcgttcttggcgatcgtctggtcgaggtgtatatgcatatgaccgacgctaaggagttgtgggatgcactgaatactaaattcggtgctactgatgctagcaatgatctgtatatcatggagcagtttcatgactacaagatggctgacaaccgttctgtagtcgaacaggctcatgagatacaaaccatggctaaggaactcgaactccttaagtgtgtcttacccgacaaatttgtggccgggtgtattattgcaaaactacctccatcttggagaagtttcggtactgcactcaaacacaagagacaggaatactccgttgaggggttgatagcgtctcttgatgttgaggagaaagctcgggaaaaagatgccgcgtctaagggcgatggtgggcagtccagtgccaatgttgtgcacaaggcccagaacaagagcaaggggaaatacaaagctcagcagaccaccaacttcaagaagcagaagaagaacaacatcaatcctaatcaggatgagaggacttgctttgtgtgtggccaagttggtcatctggctaggaagtgtctacagtgcaaggggatgaaggcacctgcagggcagacttctaagtctgctaatgtgaccattggcaacactggagatggaagcgggtatggtaatttacctactgttttttcagttaatcaatctactaattggtgggttgatactggggccaatgtacatgtttgtgctgacatctcattgttttcttcttatcaggtcgcacggggttccaccgtcctaatggggaatgggtcacatgcttctgttcatggtgttggcacggtagatctgaagtttacttcgggaaagatcgtgcagctgaagaacgtgcagcatgtcccttctatcgataggaatcttgttagtggctcccgtctgactagagacggatttaagttggtttttgagtctaataaagtagtcgtgtctaaacatggatattttattggtaaaggttatgagtgcggaggcctgttccgcttttccctttctgatttctgcaataagtctgtgaaccatatttgtggcagtgtggatgatgaggctaatgtttggcattcacgtttatgtcatattaattttggcttgatgtctcggctttccagcatgtgtttaattcctaagttttccattgtcaaaggttctaagtgccatagttgtgtgcaatcgaagcaacctcgcaagcctcacaaggctgccgaggagagaaacttggcaccactagaactcctacattcagatctttgtgaaatgaatggggtgttgacgaagggtggaaaacgatatttcatgacattgattgatgatgctactagattttgctatgtgtacttgttgaaaacgaaagacgaggctctagactattttaaaatttataaggcagaagttgaaaatcaacttgacagaaagataaaaaggcttaggtctgatcgtggtggagagtttttctcgaacgagtttgacttattctgtgaggaacatggcatcatacatgagaggacgcctccctattctcccgagtctaatgggattgctgaaaggaagaaccgcacactgactgacttggtgaatgccatgttggacaccgcgggactgcctaagacatggtggggggaggcattgttgacctcaaatcatgtgttaaacagagttcctaacagaaataaggacaaaacaccatatgagatatggattggtagaaaaccatcactttcttatttacgcacatgggggtgcttggcgaaagtcaatgtaccaataacgaagaagcgcaaacttggacctaagactgtggactgtgtttttctgggatatgctcatcatagcattgcctatagatttttaatagttaaatccgaggtaccggacatgcatgttggtacaattatggagtctcgtgatgctaccttctttgagagctttttcccaatgaaggatacacatagtggttcgaaccaaccctctgaaataattcccaattcaatcacaccaccagaacaaactgaacatacacatgaacttgtctctgaggaggatgtcagtgaagctcctcgaaggagtaagagacaaaggacggctaagtcttttggtggtgatttcactgtgtacctcgtggatgacactcctaagtcaatttcagaagcatatgcatctcctgatgcagactactggaaggaggctgtccgtagtgaaatggattccattatcgctaacgggacttgggaggtgacagagcgaccctatgggtgtaaacctgtggggtgcaagtgggtgttcaagaagaagcttaggcctgacggtactattgaaaaatacaaggctcggcttgttgctaagggctatactcagaaagaaggcgaagatttctttgacacttactcacctgttgctagattgaccacaattcgtgtgctactttccctagcagcctcacatggtcttctcgttcatcaaatggacgttaagacagcttttcttaatggagagctggatgaggagatctatatgtatcaacctgatgggtttgtagttgaaggtcaagaaggcaaagtgtgcaaattgttgaagtctttgtatggtctgaaacaagctattaagcaatggcatgagaaatttgacaaaacattgacatctgcaggctttgcagtcaatgaggcagataaatgtgtgtactatcgctatggtgggggtgagggagttattttgtgcttgtatgttgacgacatactgatatttgggacaaaccttgaggtgataaatgaggttaaatcattcttgtctcaaaattttgatatgaaggatttgggagtagctgatgttatcttaaacattaagctaattagaggtgagaatgggattacactcttgcagtcccattatgtggagaagatcttgaatcgttttggctacattgatagtaagccttctccaacaccttatgatcctagcttgttgcttcgcaagaacaagagaattgctaggaatcaactggaatactcccaaatcattggctcgttgatgtacctggctagtgcaactaggcctgatatctcctttgctgtgagcaagttgagccgatttacctctaatccgggagatgatcactggcgtgcgcttgagcgagtaatgcgctatctgaaaggtactgtggaattggggcttcactatactgggtatcctgcggtactggagggttatagtgattctaactggatctctgatgtggatgagatcaaagccactagtggatatgttttcacactgggtggtggtgctgtttcatggaggtcttgcaaacagaccattttgacgaggtcaaccatggaagcagagctaacggtactggatactgctactgttgaggcagaatggctgcgtgatctattaatggatctgcctgttgttgaaaaaccggtgccggctattcttatgaactgtgacaatcaaacgacatgtgaaaagacgattgaagtctgtcaggaaattaagaaactccggagttataacgttggattacatccaaacagcgagaaacctggcagatcccttcacgaagggactatcacgaaatgtgatagacaatgcatcgaaggagatgggtttgagacccatattaaatcattatatgtctataatctcaacaccctctcctcatcgtcctccttctccggcaccggcggcccgccgcgcatcgacgatatcgtcgccgccgccacgatgacgacgccacgcgatcataagcttaaggtggtgaccaagcctggcggcggcgcgcagcgcgttgcggccatggagacgctgccgcgggagacgttctcgccgcgcttccgttgcggcggcggcgccgccgccgccgtggcgtcggccattgttggtagaagctaccttggtggtaaatga

SEQ ID NO: 22944 - DNA, 4797 bp, Oryza sativa; identical to SEQ ID NO: 15701
  unsure (1)..(4797): unsure at all n locations
  Clone ID: TF_OsC359_7669

SEQ ID NO: 22945 - DNA, 6338 bp, Oryza sativa
  Clone ID: TF_OsC359_7848
atggtgaacactcgcagcaacaggaatggtcccaatctcaacaaccccaataacaataacaatggagagaatccaacccttgctcaagttcttgctcaacagactcagcttatgaacatgatgatgcagcaacttcagaaccagcagaaccaaggaaataaccatgcaccccctcagaataagttagcagaatttcttcgtgtaaggccgcctgttttctctagtaccactaatcctgttgaagctggcgattggttgcatgccatagagaagaagttggatttgcttcagtgcactgatcaggagaaggtctcatttgcatcacatcagttgcatggccctgcctctgaatggtgggatcacttccgcctgaataggactactgctgaacctatcacttggcttgaattcaccgctgctttccggaagacacatataccatcgggagtggtgtctctcaagaagaaggagttcaggtcgctcactcaaggatctcgctctgttacggagtatttgcacgagttcaatcgtctagctcgttatgctccggaagatgtacgcaatgatgaagagcgtcaagagaagttcttggaaggacttaatgatgagctttcttacccactcatgactggagattatcatgatttccagaagttagtggataaggctattcgtcaggaggacaagtataaccgcatggagcagaagaaacgccggattgctcacttcaaggcacaacaggggagtagtcagaagccgcgtcttactttaggaccccagtccatgccacaaggagcttcgacacagcaacaacctgccaagagggagcaaggcagcaagcctatggtatgcttcaactgtggagacccaggacattatgctgacaagtgtccgaagccccgacgcgtgaaggttgtccctgcccagagcaactctgctgtaccagcatcaaaggcccgtgtcaatcatgttgcagctgcagaagctcaagatgctccagatgtgattttggtccgggagtatcctgatgtgttcccagatgatttacctgaaaggatacatcagaccgagttcatctccatggggagctccgtgaagttccttggtcacgtcatctcagcaggaggagttgccgttgatcctagtaatgtggaatccgtaaccaactggaaacaaccaaagacagtttcagagatccgcagtttcctaggcctcgcaggatattatcggaggtttatagagaatttttccaagattgctaagcccatgacacgactgcttcagaaagatgtgaagtacaagtggtcagaagaatccgtcgccgtcgctcgggaaggacgtcatcgtggtcgccaagtcgtcgccgtcctcgtccgccgcttcgccatcgtcggagaccgccggagcatcgtcgccgtcgtcaagccgaagaactccgccgtttcctcttcgtcgccggcgccgtccgttgcttctccgccgtcgttttggtcgtcgctcctggtttggaatggtatattcctggtttggagatagaactgtgcagccgggatggttgttcagaatggttgggcctatgcaacaggattcgtcatgatcgtcatgaagagaagtgccgagtcaaagttaccttgaacagtaacagtgaagatatcccatcagtgatgttcgaagctggaggaaggaactacatccatgcatgtcaggaagtggcaaggatcgccataggagagctccgtgatcgctacagtgatcagttggccgacactgagtatcgttaccatcctcgtcaaccgcagggaagtgaccgtggcagttaccttgagactgaaggaattgagaatgatgctaccacaagacatttggttgagatgctatgggctatggatgaaagtcgtgcggagactgtgttagcagctcaagatcgtgaagatcggaatcgtggtaagatttgcgagctagaagacaaggtggatcgtttggagaaggaactagccgcattgaagggagaagcaccgccgcagaaggccaggattcgtcttaccgcaaggaagagagctctatttgtccctcgctatcaattggcgccaaaggtccgtgtggtggagaaagaagttgccccagcagatcctccgatcatcatcataagtagtgatgaagaagaagaatccaagcgcaaccattccaagattgagtgggtagcaactcaagatgatgaagacgagccgaacgagccttcaatcgaccttcgatgctcggaagaacaagattttcccccggtttctcttcttgtgccctatccatgccagatggtgaacactcgcagcaacaggaatggtcccaatctcaacaaccccaataacaataacaatggagagaatccaacccttgctcaagttcttgctcaacagactcagcttatgaacatgatgatgcagcaacttcagaaccagcagaaccaaggaaataaccatgcaccccctcagaataagttagcagaatttcttcgtgtaaggccgcctgttttctctagtaccactaatcctgttgaagctggcgattggttgcatgccatagagaagaagttggatttgcttcagtgcactgatcaggagaaggtctcatttgcatcacatcagttgcatggccctgcctctgaatggtgggatcacttccgcctgaataggactactgctgaacctatcacttggcttgaattcaccgctgctttccggaagacacatataccatcgggagtggtgtctctcaagaagaaggagttcaggtcgctcactcaaggatctcgctctgttacggagtatttgcacgagttcaatcgtctagctcgttatgctccggaagatgtacgcaatgatgaagagcgtcaagagaagttcttggaaggacttaatgatgagctttcttacccactcatgactggagattatcatgatttccagaagttagtggataaggctattcgtcaggaggacaagtataaccgcatggagcagaagaaacgccggattgctcacttcaaggcacaacaggggagtagtcagaagccgcgtcttactttaggaccccagtccatgccacaaggagcttcgacacagcaacaacctgccaagagggagcaaggcagcaagcctatggtatgcttcaactgtggagacccaggacattatgctgacaagtgtccgaagccccgacgcgtgaaggttgtccctgcccagagcaactctgctgtaccagcatcaaaggcccgtgtcaatcatgttgcagctgcagaagctcaagatgctccagatgtgattttgggtacgttccttgttaactcagttcctgcaacagtacttttcgattctggtgctacacattcatttctatctatgagttttgcgggaaatcatgggatggaagtagaagatcttagacgtcctttgatggttagtaccccaagcaatcaagcactctctttgcaacgtagcccctatgtcagaatagaaattcaaggggtaccatttctggccaatcttatattgttagaatccaaagaccttgatgtcattctagggatggactggttagctagacataaaggtgtgatagactgtgctaacagaaaagtaactctcaccagcaatgatggtcgagttgtaactgttcatgcattgtcttctgagtttttaaggtcaagactgaaccagataactttggaagagattcctatagtccgggagtatcctgatgtgttcccagatgatttacctggtatgccgcctaaaagggatatagagttcagaatagatttggtacctggaacaactccgatccataagagaccttatagaatggtagccaatgagttggcagaagtcaagaggcaagtagatgatttgcttcagaaaggatacatcagaccgagttcatctccatggggagctccggttattttttgtggaaaagaaagatcatacccagaggatcttaaaggtgccaccgttttctccaagatagatcttcgatcagggtatcaccagttgaggatcaaagaggaagatatacctaagacagcttttaccactaggtacaggttgttcgaatgtactgttatgtcttttggacttaccaatgcccccgctttcttcatgaacttgatgaataaagtgtttatggaatacctagacaagtttgtggtggtctttattgatgacattcttatctactctaagaccaaagaagagcatgaagaacatcttcgccttgcattggaaaacaagtgtgaattttggttgtctgaagtgaagttccttggtcacgtcatctcagcaggaggagttgccgttgatcctagtaatgtggaatccgtaaccaactggaaacaaccaaagacagtttcagagatccgcagtttcctaggcctcgcaggatattatcggaggtttatagagaatttttccaagattgctaagcccatgacacgactgcttcagaaagatgtgaagtacaagtggtcagaagaatgtgagcagagttttcaagagttgaaaagtcgcttgatatcagctcctattttgattttgcctgatccaaagaagggtttccaagtgtattgcgatgcatccaaacttgggttaggttgtgttctgatgcaagatgggaaggtggttgcctatgcatctcgtcagttacgtccgcatgagaaaaactaccctactcatgatcttgaattggctgcagtagttcatgcgttgaagatttggcgtcattatcttttcggtactcgtacagaggtatatatcgatcacaagagcttaaagtatatctttactcagtcggatctgaacatgagacaaaggagatggttggaattaattaaggattatgacatgggaattcattatcacccgggaaaggctaatgtagtagcagacgctcttagcaggaaaggctattgcaatgctacggaaggacgacagttgccattggaattatgcaaggaatttgaaagattgaatttgggaattgtcagtataggtttcgttgcagccttagaagcgaagcccactctaattgatcaagttagagaagctcaaactaatgatcctgatatccaagaaattaagaagaatatgagaagaggaaaagctattggtttcttggaggatgagcacggaactcgagtcaaggcagaacatcagaaacccgccggtttgttgcagccttcaaagattcctgaatggaaatgggaagaaatcggtatggattttatcactggtttgcccagaacgtcattaggccaggactctatttgggtgatagtcgatagacttactaaagtggcacacttcattccggtaaagacaacttattccggaagtcgcttagcggaattgtatatggcaaggattgtgtgtttgcatggcgttcctaagaagatagtgtctgatcgaggtagtcaatttacttcaaatttttggaagaaacttcaggaagagatgggttctaagctgaactttagtactgcttatcatccgcagacagacggacaaactgaaagggtgaatcagattttggaagacatgttgagagcttgtgctttagatttcggtggaagttgggataagaatctaccttatgcagaattttcatacaacaacagttatcaagctagtcttcagatggctccttacgaagcactgtatggtcggaagtgccgcactccgcttttgtgggatcaaacgggagaacgtcaggttttcgggacggatatcgtaagggaagcagaagaaaaggtaaagatcattcaagaaagattgcgtgtggctcagtcgcgtcataagagttatgccgacaatcgccgcagagatttgagttttgaagaaggagattatgtgtatcttcgtgtcacgcctctacggggagttcatcgttttcataccaaaggaaaattggcactgcgttttgtgggaccttataagattgtcagtagaagaggagaggttgcttatcagttagagttacctcaatctttggcaggagtccataatgtgttccatgtgtcgcaattgaaaaagtgtttaagggtacctaccgaagaagctaatcttgaacagatagaagtccaagaggatctgacctatgtggagaaaccaatccgtatcttggaaacaaatgagagaaaaaccaggaatcgagttatccgtttttgcaaagtccagtggagtaatcactcggaagaagagtcaacttgggaacgagaagatgaattgaagtcagctcatccgtatctgttcgccagttcttccgaatctcgaggacgagattctgtttaa

SEQ ID NO: 22946 - DNA, 5205 bp, Oryza sativa
  Clone ID: TF_OsC1528_2390
cccttgcgcagatgcagcctccttttgcagttttgttttgctgcgggaaattcggatttgttttgttttgccttttgcagttttgttttggttttgttttgctgcgggaaattcggatttgttttgttttgccttttgcagttttgttttgctacgggaaattcggatttgttttattttggaaacattccgaaaaatccggtgcgtgaaaacggcatggagtccggataggttacgcgcgacttatccggttcggtttacgcgggcgccctgatcaggcgatcgtctggtcgaggtgtatatgcatatgaccgatgctaaggagttgtgggatgtactgaatactaaattcggtgctactgatgctagcaatgatctatatatcatggagcagtttcatgactacaagatgactgacaaccgttctgtagtcgaacaggctcatgagatataaaccatggctaaggaactcgaactccttaagtgtgtcttacccgacaaatttgtggccgggtacattattgcgaaactacctccatcatggagaagtttcggtactgcactcaaacacaagagacaggaatactccgttaaggggttgatagcatctcttgatgttgaggagaaagctcgggaaaaagacgtcgtgtctaagggcgatggtgggcagtccaatgccaatgttgtgcacaaggcccagaacaagagcaaggggaaatacaaagctcaacagaccaccaacttcaagaagcagaagaagaaaaacaacaatcctaaccaggatgagaggacttgctttgtgtatgggcaacctggtcatctggctagaaagtgtccacagcgtaaggggatgaaggcaccttcagggcagacttctaagtctgctaatgtgaccattggcaacactggagatggaagcgggtatggtaatttacctactgttttttttgttaatcagtctactaattggtgggttgatactggggctaatgtacatgtttgtgctggcatctcattgttttcttcttatcaggtcgcacggggttccaccatcctaatggggaatggtgttggcacggtagatctgaagtttacttcgggaaagatcgtgcagctgaagaacgtgcagcatgtcccttctatcgacaggaatcttgttagtggctcccgtctgactagagacggatttaagttggtttttgagtctaataaaatagtcgtgtctaaacatggatattttattggtaaaggttatgagtgcggagacctgttccgcttttccgtttctgatttctgcaataaatctgtgaaccatatttgtgctagtgtggatgatgaggctaatgtttgacactcacgtttatgtcatattaattttggcttgatgtcttggctttccagcatgtgtttaattcctaagttttccattgtcaaaggttctaagtgccatagttgtgtgcaatcgaagcaacctcgcaagcctcacaaggttgccgaggagataaacttggcaccagtagaactcctacattcagatctttgtgaaatgaatggggtgttgacgaagggtggaaaacgatatttcatgacattgattgatgatgctactagattttgctatgtgtacttgttgaaaatgaaagacgagactctagactattttaaaatttataaggcagaagttgaaaatcaacttgacagaaagataaaaaggcttaggtctaatcgtggtggagagtttttctcgaacgagtttgacttattttgtgaggaacatggcatcatacatgagaggacgcctccctattctcccgaatctaatgggattgttgaaaggaagaaccgcacactgactgacttggtgaatgccatgttagacaccgcgggactacctaaggcatggtggggggagggattgttgatctcgaatcatatgttaaacagagttcctaacagaaatagagaccaaacaccatatgagatatggattgggagaaaaccatcactttcttatttgcgcacatgggggtgtttggcgaaagtcaatgtaccaataacgaagaagcgcaaacttggacctaagactgtggactgtgtctttctgaaatatgctcatcacaacattgcctatagatttttaatagttaaatccgaggtacctgacatgcatgttggtacaattatggagtctcgtgatgctaccttctttgagagctttttcccaatgaaggatacacatagtggttcgagccaaccctctgaaataattcccagttcaatcacaccaccagaacaaattgaacatacacatgaacatgtctctgaggaggatgttagtgaagctcctcgaaggagtaagagacaaaggacggctaagtcctttggtgatgatttcactgtgtacctcgtggataacactcctaagtcaatttcagaagcatatgcatctcctgatgcagactactggaacgaggctgtccgtagtgaaacgggacttgggagattgaccacaattcgtgtgctactttccctagcagcctcatattgtcttcttgttcatcaaatggacgttaagacagcttttcttaatggagagctggatgaggagatctatatggatcaacctgatgggtttgtagttgaaggtcaagaaggcaaagtgtgcaaattgttgaagtctttgtatggtctgaaacaagctcctaagcaatggcatgagaaatttgacaaaccattgacatctacaggctttgcagtcaatgaggcagataaatgtgtgtactatcgccatggtgggggtgagggaattattctgtgcttgtatgttgacgacatacagatatttgggacaaatcttgaggtgataaatgaggttaaatcattcttgtctcaaaattttgatatgaaggatttgggagtagttgatcttatcttaaacattaagctaattagaggtgagaatgggattacactcttgcagtcccattatgtggagaagatcttgaatcgctttggctacattgatagtaagccttctccaacaccttatgatcctagcttgttgcttcgcaagaacaaaagaattgctaggaatcaactggaatactcccaaatcattggctcgctgatgtacctggctagtgcaactaggcctgatatctcctttgctgtgagcaagttgagccggtatcctgtggtactggagggatatagtgattctaactggatctttgatgtggatgagatcaaagccactagtggatatgtcttcacactgggtggtggtgctgtttcgtggaggtcttgcaaacagaccattttgacgaggtcaaccatgaaagcagagctgacggcactggatactgctactgctgaggcagaatggctgcgtgatctattaatggatctgcctattgttgaaaaaccagtgccggctatccttatgaactatgataatcaaacgggtttgcttgctgctctgtactgcgccgtcgctcgtagattactccatcccgcttgccggcgtgcaccggcgatcgggagagcaggtcttcagaacctctgccttcgacgtcctgcaccgggagaaggcggcagtaaggtttttgggaagcgcttcgcgcgactgctccctgttcgtccgcgacggctcgcctacctctccgctcgcgtgctgcgcgccttcgtcgacgcccacaaccacgatgctttgtattggtgggatgattggaagctccgcatccttgtccttggaagcaacacgatacagttgttcctctttatatatggaggtgtccgctggcatcgtatctcgctgtggttcaggctatgcatctggcttgcatacatcggcggtgactccctggcgatctacgcccttgccaccctcttcaaccgtcacaagcatgaggctcctgcagcgtcggagctggaggtgctgtgggcgcccatcctcctgattcacctctctggccaagatatgatagcctcctacagcatccaggacaactatctatgatggcgccaagtcgtcaccttgaagatccttctgaaagctgcggttcttctgttcattgttggcatcctcaagttttgtgccaagccctgggctctcaagagggccattataagaagcatagcaaggcaccctcctagtgtgccccgaaggaagaagctgattggatctggtggaggacagttggcagactactggaggtcatgcactactggctttatacctacagtcacaatgtttgtggtctctcgagaacttcgtgagcggccgcaacccaatgacgaaacggaagccgtcaaacaaggagaaagaaaggaaggtgggcaattccatgagaacttagaaaggtccaccgtaaaaactgccatcgaaccagtagtagaccaccaaaaaaaggaagaggaggaggaggaggaggaaaaagaagaagaagaagaagaagaagaagacctcatcaacctcaacgagtatgtggagagggctaaggagatcatgaatcgtcagggacaattgagtaaaccaactttgcgtcggctgcagtccgtgcttcagccagagttattcatggcagacgcctttgtcacctattccaaacgcctcaagatcctccaatttctgatggcaatcaacactaattacagttatagggtgattcgtgctgggctctttgatgtatatatccggctatataccagggtgagggtgaccattacgcccattgcctcttggctccggttgctttccattttactagcaacgaccgcagccggcctctacgcaagaagccacaaagacatgtacaacaaacatgatatcaccgtgacatacatcctcttcttcagtactgcgctgctggagctgatctcctccgtcaccctatgccgcttgttttttccgcttgcggtgtggccggctactgacaggaggaaccaaatggtggaccagcagagtgtgatctggtgcgctgcacggatgacgaagaagcccaactgtctcctctggctctccgcttgcatctattgcgatgcccttgtcaaccagcggtggtacatcaagcaaacaccttccatggatcggatatttgaggcagtgaagcatcatgtcattttctatggctggtccaagtacataaagagtgctgcaagctacaggaggttcaattgcatgaggggccagttggccttgaagaa

SEQ ID NO: 22947 - DNA, 5946 bp, Oryza sativa; identical to SEQ ID NO: 13706
  Clone ID: TF_OsC251248_2

SEQ ID NO: 22948 - DNA, 1389 bp, Oryza sativa
  Clone ID: TF_OsC1528_1699
ttactgtggctctgctcttgcctgtggaacctgttcttctcctgctccttcaacttgctcgagattcccaacttttccgtttgtttctacttgcacatggttcagacgaccttgtccaacgggcggtgaggtcaacgaggcagaaccactgtttggtgactttgaactttttggtccagatacgttgggaaggcttgttgttggttggactcgttttgacttgactttctgagggcagcaccatgaatagtgtcccatctcatggcagatgaaacattcgactcctgccttataaccacgtctttttgaaggtgtagggcatggtacggagttgcttccttcatggctattactgttgatcattgtggcttgctgaccaggttctgacatagtcgaacgagacgtagaaccggaactagttgaatgctgagatgctttctgatagtattgtgctggcgagtttgtttttcgacacaaatcttcttttgcttgaatctctagggacattactttgcgtctcttgtattcttgcatctctttcttttcttggatgtcttggcacatgtcgcaggatgcttttgctcttttgtcatcagggaaggttgaacgtactgcattaacatttggcgaatttgggcttccttggggatagaagggcatccttgaggtgctcatattagcttgtagtggtgcatccatatagggtttttgggggcagtgtctcatgtaatggccaattttgtggcaaatgaagcatatgaatccgggaacgtgtctgatcttctttgatttgagggtgggggacttgggtaagttttggcaagattgcattgtctgacattgtgggacatcttgcatgtcaacttctgatggcaaggtctttcttttgtgacaacttccttctttaatcatgctattttctcgcgatacggatttattgattgagttctgaaggttggggcaattattagctcgaagtggggttttcatccctgtaatcatcacatttaagaattctttgttcttctctttatgggtatcagtgccttctactgattgtgttccttgtatttctgcggcctcattcttactcttgtctggattcaccttgggctgtggtagtagcagttgttgttgtatagaagccaaattttgagctatttcttgtagcatctgagtctgattggctagaatctgataaatatccattgaggagtgttgatttctggttgcaacttccttgtttggtccaggaacagtattatcagtcttggcaacttggttggtgacttgttcagctagttgatttggattttctgacaaagctgggtcttccttagaaccaaggtagttgcggacacaagtctgacaggttggttgaggtgccat

SEQ ID NO: 22949 - DNA, 1263 bp, Oryza sativa
  Clone ID: TF_OsC1528_2064
ctgtggctctgctcttgcctgtggaacctgttcttctcctgctccttcaacttgctcgagattcacaacttttccgtttgtttctacttgcacatggttcagacgaccttgtccgacgggcggtgaggtcaacgaggcagaaccactgtttggtgactttgaactttttggtccagatacgttgggaaggcttgttgttggttggactcgttttgacttgactttctgagggcagcaccatgaatagtgtcccatctcatggcagatgaaacattcgactcctgccttataaccacgtctttttgaaggtgtagggcatggtacggagttgcttccttcatggctattactgttgatcattgtggcttgctgaccaggttctgacatagtcgaacgagacgtagaaccggaactagttgaatgctgagatgctttctgatagtattgtgctggcgagtttgtttttcgacacaaatcttcttttgcttgaatctctagggacattactttgcgtctcttgtattcttgcatctctttcttttcttggatgtcttggcacatgtcgcaggatgcttttgctcttttgtcatcagggaaggttgaacgtactgcattaacatttggcgaatttgggcttccttggggatagaagggcatccttgaggtgctcatattagcttgtagtggtgcatccatatagggtttttgggggcagtgtctcatgtaatggccaattttgtggcaaatgaagcatatgaatccgggaacgtgtctgatcttctttgatttgagggtgggggacttgggtaagttttggcaagattgcattgtctgacattgtgggacatcttgcatgtcaacttctgatggcaaggtctttcttttgtgacaacttccttctttaatcatgctattttctcgcgatacggatttattgattgagttctgaaggttggggcaattattagctcgaagtggggttttcatccctgtaatcatcacatttaagaattctttgttcttctctttatgggtatcagtgccttctactgattgtgttccttgtatttctgcggcctcattcttactcttgtctggattcaccttgggttccttgtttggtccaggaacagtattatcagtcttggcaacttggttggtgacttgttcagctagttgatttggattttctgacaaagctgggtcttccttagaaccaaggtagttgcggacacaagtctgacaggttggttgaggtgccat

SEQ ID NO: 22950 - DNA, 2760 bp, Oryza sativa; identical to SEQ ID NO: 13729
  Clone ID: TF_OsC1528_1627

SEQ ID NO: 22951 - DNA, 2700 bp, Oryza sativa; identical to SEQ ID NO: 13737
  Clone ID: TF_OsC1528_1670

SEQ ID NO: 22952 - DNA, 3750 bp, Oryza sativa
  Clone ID: TF_OsC1528_2109
atgaaatgcttctgggtgagtactggcaaacctgaaggaattcttactgctgatcagcagaagcaattcgaggaagccactactctctttgtgggatgcattcttagcgttcttggcgaacgtctggtcgaggtgtatatgcacatgactgacgctaaggagttgtgggatgcactgaatactaaattcgttgctactaatgctagcaatgatctatacatcatggagcagtttcatgactataggatagctgacaaccgttctatagtcgaacaggctcatgagatacaaaccatagctaaggaactcgaactccttaagtgtgtcttacccgacaaatttgtggccgggtgcattattgcgaaactacctccatcttcgagaagtttcggtactgcactcaaacacaagagacaggaatactccgttgaggggttggtagcatctcttaatggtgaggagaaagctcggaaaaagacgccgcgtctaagggcgatgaacaagagcaaggggaaatacaaagctcaacagaacaccaacttcaagaagcagaagaagaacaacaacaatcctaatcaggatgagaggacttgctttgtgtgtggccaacctggtcatctggctaggaagtatccacagcgcaagggtatgaaggcacctgcagggcagacttctaagtctgctaatgtgaccattggcaacactggagatggaagcgggtatagtaatttacctactgttttttcagttaatcaatctactaattggtgggttgatactgcggccaatgtcgcacggagttccaccgtcctaatggggaatgggtcacatgcttctgttcatggtgttggcacagtagatctgaagtttactttgggaaagatcgtgcagctgaagaacgtgcagcatgtcccttctatcgataggaatcttgttagtggctcccgtctaactagagacggatttaagttggtttttgagtctaataaagtagtcgtgtctaaacatggatattttattggtaaaggttatgagtgcggaggcctgttccgcttttccctttctgatttctgcaataagtctgtcaaccatatttgtggcagtgtggatgatgaggctaatgtttggcattcacgtttatgtcatattaattttggcttgatgtctcggctttccagcatgtgtttaattcctaagttttccattgtcaaaggttctaagtgccatagttgtgtgcaatcgaagcaacctcgcaagcctcacaaggctgccgaggagagaaacttggcaccactagaactcctacattcagatctttgtgaaatgaatggggtgttgacgaagggtggaaaacgatatttcatgacattgattgatgatgctactagattttgctatgtgtacttgttgaaaacgaaagacgaggctttagactattttaaaatttataaggcagaagttgaaaatcaacttgacagaaagataaaaaggcttaggtctgatcgtggtggagagtttttctcgaacgagtttgacttattctgtgaggaacatggcatcatacatgagaggacgcctccctattctcccgagtctaatgggattgctgaaaggaagaaccgcacactgactgacttggtgaatgccatgttggacaccgcgggactgcctaaggcatggtggggggaggcattgttgacctcaaatcatgtgttaaacagagttcctaacagaaataaggacaaaacaccatatgagatatggattggtagaaaaccatcactttcttatttgcgcacatgggggtgcttggcgaaagtcaatgtaccaataacgaagaagcgcaaacttggacctaagactgtggactgtgtttttctgggatatgctcatcatagcattgcctatagatttttaatagttaaatccgaggtaccggacatgcatgttggtacaattatggagtctcgtgatgctaccttctttgagagcttttttccaatgaaggatacacatagtggttcgaaccaaccctctgaaataattcccagttcaatcacaccaccagaacaaactgaacatacacatgaacttgtctctgaggaggatgtcagtgaagctcctcgaaggagtaagagacaaaggacggctaagtcttttggtgatgatttcactgtgtacctcgtggatgacactcctaagtcaatttcagaagcatatgcatctcctgatgcagactactggaaggaggctgtccgtagtgaaatggattccattatcgctaacgggacttgggaggtgacagagcgaccctatgggtgtaaacctgtggggtgcaagtgggtgttcaagaagaagcttaggcctgacggtactattgaaaagtacaaggctcggcttgttgctaagggctatactcagaaagaaggcgaagatttctttgacacttactcacctgttgctagattgaccacaattcgtgtgctactttccctagcagcctcacatggtcttctcgttcatcaaatggacgttaagacaacttttcttaatggagagctggatgaggagatctatatggatcaacctgatgggtttgtagttgaaggtcaagaaggcaaagtgtgcaaattgttgaagtctttgtatggtctgaaacaagctcctaagcaatggcatgagaaatttaacaaaacattgacatctgcaggctttgcagtcaatgaggcagataaatgtgtgtactatcgccatggtgggggtgagggagttattttgtgcttgtatgttgacgacatactgatatttgggacaaaccttgagcgtgataaatgaggttaaatcattcttgtctcaaatttttgatatgaaagatttgggagtagctgatgttatcttaaacattaagctaattagaggtgagaatgggattactctcttgcagtcccattatgtggagaagatcttgaatcgctttggctacattgatagtaagccttctccaacaccttatgatcctagcttgttgcttcgcaagaacaagagaattgctaggaatcaactggaatactcccaaatcatggctcgttgatgtacctggctagtgcaactaggcctgatatctcctttgctgtgagcaagttgagccgatttacttctaatccgggagatgatcactggcgtgcgcttgagcgagtaatgcgctatctgaaaggtactgtggaattgggacttcactatactgggtatcctgcggtactggagggttatagtgattctaactggatctctgatgtggatgagatcaaagccactagtggatatgttttcacactgggtggtggtgctgtttcatggaggtcttgcaaacagacaattttgacgaggtcaaccatggaagcagaactaacggcactggatactgctactgttgaggcagaatggctgcgtgatctattaatggatctgcctgttgttgaaaaaccgacatgtgaaaagacgattgaagtctgtcaggaaattaagaaactccggagttataacgttggattacatccaaacagcgagaaacctggcagatcccttcacgaagggactatcacgaaatgtgatagacaatgcatcgaaggagatgggtttgagacccatagcattcttgaaggaactcacctttgtgagcttgactgttggtcgcagtctatgaagattttgggtgaatcttctaggaagcttactaaagacctaggagta

SEQ ID NO: 22953 - DNA, 3438 bp, Oryza sativa
  Clone ID: TF_OsC1528_2282
tcagtagaccccgatgctttgctgtggcgtcgcccctggaacgtagattacatttgaaggaggtacctggacacgacccttggtcacagaagcagtcgccaatactgttgcagcacgattcttcaaaaagagcaggaaatctccaaacgtcaggtacaaaaccatgatcaaagatcgtatcttccaggaataaaccctacgcttctctttccccaccctcacgccgccgcccaccacgccgtcgtcgtcgtcctcctgccttccctcaccatccacagccccctcggatctcaccgccccttccgcctccccctccgctcctctcgccactcctccgttctccccccttcgacaatctcgccggcgtcccaactccggcgggaacggcggcggcagcaaggtggtggaaagatcggttgctcggcaggaactactcgcggttgcgagcgtcgacgaaaacgcgaagcacgcgagcggagaggaaggcgagccgtcgcggacaaacagggagcagtcgcgcgaagcgcttcccaaaaaccttattgccgccttctcccggtgtaggacgtcgaaggtagaggtttcggagacctgctctcccgatcgccggtgcacgccggtgagcgggatggagtagtccccgtccccagcgggcaacgggcagtcccctctcatgcctaggtgaatccggaagcgacagaggccgtcgcagggcccgccccgctccatcacgcccacccttgcctggatgcgtcggaatataggatcaacatgttcaagtgacaagcatgacttgccttgctctgctgctggaggaacctcggcaactatttcgaagtacaccggagcgtcggaggaaccggaatcgtggaccgggaccacgcgggtggtccaccgccggtccacggaaccgacggcccagatcgccctcggggtcgatcggacgggcggcggcgacccggctcggctcaaggctggccaagcggccacggcgacggcgacggcgcgcgcacgcgcgttgccgatgacggcaaccgacggcggcgacggcggcgcaaaggcggcgccgaagggcggtggtgcgagggtggccggcgcggaggaagacgacggtgaacggcgacggcaagtcacgggaggacgacggccactggcggacgggattcggggtgcccggagcgcaaggggatgcgaattccggcgacgaaactcgacggggaaggggcggccggggtggagcttagccttgcgaacccgacggcgaagacggcgcggtgcggcggcgaccctagcggcggctagcggcggccggagtagcaaaaacggcggcggcgggtggttgcacggcgcgggagtgatggggagctcgggagaggtcggcgaaatggggaaaaagcgagagggagcgacggggaaggtggtcgacgtggcccggaggaggcggaggcgtggacgcggcggcggttgcgggtgcggcggttgcgggtgcggcgtcggctggaggtgggggaaggacccgacaggtgggccccacctgtcggcgaccccgggagaggagggcggcggggcggcctggttgggccctcggccactatgtgtatccttcattgggaaaaagctctcaaagaaggtagcatcatgagactccataattgtaccaacatgcatgtcaggtacctcggatttaactattaaaaatctataggcaatgctgtgatgagcatatcccagaaagacacagtccacagtcttaggtccaagtttgcgcttcttcgttattggtacattgactttcgccaagcacccccatgtgcgcaaataagaaagtgatggttttctcccaatccatatctcatatggtgttttgtccttatttctgttaggaactctgtttaacacatgattcgaagtcaacaatgcctccccccaccatgccttaggtagtcccgccgtgtccaacatggcattcaccaagtcagtcaatgtgcggttcttcctttcagcaatcccattagactcgggagaatagggaggcgtcctctcatgtatgatgccatgttcctcatagaataagtcaaactcatttgagaaaaactctccaccacgatcagacttaagccattttatctttctgtcaagttgattttcaacttctgccttataaattttaaaatagtctagagcctcgtctttcgttttcaacaagtacacatagcaaaatctagtagcatcatcaatcaacgtcatgaaatatcgttttccacccttcgtcaacaccccattcatttcacaaagatctgaatgtaggagttctagtggtgccaagtttctctcctcggcagccttgtgaggcatgcgaggttgcttcgattgcacacaactatggcacttagaacctttgaaaatggaaaacttaggaattaaacacatgctggaaagccgagacatcaagccaaaattaatatgacataaacgtgagtgccaaacattagcctcatcatccacactgccacaaatatggttcacagacttattgcagaaatcagaaagggaaaagcggaacaggcctccgcactcataaccatacccgcttccatctccagtattgccaatggtcacattagcagacttagaagtctgccctgcaggtgccttcatccccttgcgctgtggatacttcctagccagatgaccaggttgcccacacacaaagcaagtcctctcatcctggttaggattgatgttgttcttcttctgcttcttgaagttggtggtctgttgagctttgtatttccccttgctcttgttctgggccttgtgcacaacattggcactggactgcccaccatcgccctgagacgcggcgtctttttcccgagctttctcctcaacatcaagagacgctatcaacccctcaacggagtattccggtctcttgtgtttgagtgcagtaccgaaacttctccatgatggaggtagtttcgcaataatgcacccggccacaaatttatcgggtaagacacacttaaggagttcgagttcgttagccatggtttgtatctcatgagcctgttcgactacagaacggttgtcagccatcttgtagtcatgaaactgctccatgatatacagatcattgctagcatcagtagcaccgaatttagtattcagtgcatcccacaactccttagcgtcggtcatatgcatatacacctcgaccagacgatcgccaagaacgctaagaatgcatcccacaaagagagtagtggcttcctcgaattgcttctgctgatcagcagtaagaattccttcaggtttgccattactcacccagaagcatttcatagccgtcagccacagagtgaccctgatctgccatctcttaaagtgcacaccggtgaatttatccaacctcagtgcatcggcaaaaccagccat

SEQ ID NO: 22954 - DNA, 3379 bp, Oryza sativa
  Clone ID: TF_OsC359_7024
ttaccagcggctgcggtatggtaggaagatggtgacgacgacagcgcggctcccggcggcggcacggagcaacggcggcggcggctgctcacggtggagatggcggcggctttgaaaaaggggggaaaaggggcggtggccgacggtatttatagaggaaggagtaactagggttagggcgcacggcgcaagctttggaaaggcggcagctccgaatttggcggcgcggcttgcgggatttggtggcgcggccggcgcgggctcggtcggcggcggcttgggccggcgacacagagaggaggagaaggccgggccggggcggcacgtgggcttggggcttggcttccccaggccacggcggagaaataatgatgaagagaggcttggtaagctgaaattcaccattccaaagtttgatggtggatctgatctagaggcttatcttatgtgggagttgaaggttgataaaatatttcacatccataattattccgaagagaagaaattggcaatggcttcacttgagtttgaggattatgctctaatttggagtcgagatatccaatgcttcaagtgtggaggccgtgggcatgttgttagagaatgtccaaacaatcgtgccattattgtgattgaacatggagagtttgattcagctagtgaggatgctgaaaatggacaaagaaacaatctttttcagacccgagctaaagtgggaggaaaggtgtgcaaggtcatcgttgatggaggtagctgccataatcttgcaagtaaggatatgtgtgacaagcttggtctgaagttgttgcgacacccacatccatatcatgtccaatggctaaatgatagtggagatatcaagattgggcatcgggtgaaagtttcttttaagattggtgaatatgaagatgaggttttgtgtgatgttgtgcctatgacagtgtgtcacttgctgctgggaaggccatggcaatttgatcgatcatcacggcattgtggtcgaacaaatcaattctctatcaagtggaaaggaaggaattttgtgcttaagcccatgacacctcaacaaatcatggctgagcatatgcaaaagagttctgaagttaggatagaaagtgagaaagaaagagagcaaaataaatttagtgacatccacaaatcggtgagcaagagccacaagccaaatatgagtgataaaaagaaaagagagggtgagaactttgtgatgttagccaccaaatcagaaatgagagatgagtatgaagatgtttttccaatggaaacacctgctggacttcctccattgcgtggcatagaacatcaaattgatctcattcctggggctgcactacccaaccgagcaccataccgcaccaacccacaagaaacaaacgaaatacaaaggcaagtacaagagcttttagataaaggttatgtgcgtgaaagtttaagtccttgtgttgtccctgtgattttggtgcccaagaaagatggatcttggaggatgtgtgttgattgtagagccctcaataatatcactgttcgatatcgccatcccattccaaggatagatgatatgcttgatgagttgagtggttctatgatattttctaaaattgatttgagaagtgggtatcatcaaataagaatgaaaattggagatgaatggaaagctgtttttaaaacaaaattcggtttatatgaatggttagttatgccttttggtttgactagtgaaccaagtactttcatgagattgatgaaccatgttttgagaacattcattggaaaatttgttgtggtttactttgatgatattctgatttactccaagtctttgagtgaacatgctagtcacataaaacaagttttggatgtgctaagaaaggagaaattatttgctaacattgagaagtgcacattttgtacagagaaggttgtctttcttggttttgtcatttcaggacagggagttgaagttgatgaatcgaaagtggaggcaatcaaggattggccaacccctgtgaatgtaagtcaggtgagaacttttcatggtcttgctggtttttatagaagatttgtgaaagatttcagcaccatagctgcacccttgaacgagttgacaaaaaaaggtattgagtttcattggggtgaatcacaaaaggatgctttccaaaaattaaaaagatgtttgactgaagctcctttgttggtttggcctgatttcactaaaacttttgaaattgaatgtgatgctaatggaattggtataggagctgttttaatgcaagataaaaagcatgttgcttactttagtgagaaattgggaggagctcaattgaattattctgtttctgacaaagaattatatgttttggtgagagttcttgaaacttggcaacattatttatggccaaaagaatttgtcattcactctgatcatgaagctttgaagtacttgaaaggacaagccaagctgaaccgtcgccaagccaaatgggtagaatttattgaaacatttccctatgttgttaagtataagaaagatggtcaaactgaagttgtgaaccgtacactatcaacgttgctgcgtatgatgatcaagaaaaatttaaaagagtgggaggattgcttgccacttgtggagtttgcatacaacagggcagaaagaactaacatggatgcttcgaagcgtgctgcatatgtgaagaagattcatgaaaagaccaaggaagaaattgaaaagaaggcgcgcagtaatactgcaaaggtgaacaagcatagaaagaaagtggtctacgaaacaggagatcttgtttgggttcatctacagttcaggacgactccttttcaagagggggaggatgatgtgccccaacccctgtcacatgatgatgagcacatcccagctacacctgacgtaaacaagggtgatgtaaacaatggtgatggttcacatcataagtcacatgaggaaaatgaagatgacgtaaatcatgttgatggattatgtctcaacaagaacgatcaagcatatcatggtccaattacgcgcagccgtgctaggaaaatacaacaagaggtgaactcgctctttgctcaacttaatccaaatttttgtgagaattttatactacctaaatgctctacatttttattgctcaggtttacacccgaggagatcatcactacaccaagaaggatgggttacattgaggatgataagggttacgttgaggacgataaaggttacgacgaggaagaaccagcccatcccaaaccagtagctgtctacgccaacaagaagatggtttactctgcaaaagactcaacttccaaggcttgtgtgacccaaccagtcaactttctccatgcttaa

SEQ ID NO: 22955 - DNA, 1689 bp, Oryza sativa; identical to SEQ ID NO: 13738
  Clone ID: TF_OsC91_2124

SEQ ID NO: 22956 - DNA, 6339 bp, Oryza sativa
  Clone ID: TF_OsC91_2130
atgaagatgcatttgaagtctattaacccatatatttggagaatagtcgaaaaaggctatgttttgcaaaatcccgaagatcccaccaaggaggacgacgagaacgagcacaagaacgctcaagccgctaatgcaatacttagcgccttgagtggaagtgagttcaaccgtgtggatggcattgagagtgccaaagtgatttgggacacgcttcggaacttgcatgaaggcacggatagtgttcgtgagtccaaggggcaatttgagagatttgtgatgttagatggtgagagcccaagcgacatgtatgaccggttgagcaagatcgtcaatgagatcaagggacttggctccaaggacatgaccgatgaggttgtggtcaagaagatgcgtccggactacaagactctcacacctcatgatttgcttggacgcatccttgcctatgacatgctcgtgcaagagtccaaggatgtcatccaatacatcaaccaaagctcaaccgcaagcatcaagaaggaagacttggctttgaaggcaaaggaagaagaagaagagaaccgcaagagcaagagcaaggcggagattgatgatgaagagatggctctcttcgtcaagaagttcggcaagttcaagaggcgaagcggcttcttcaagggaggatcttccaagcactactccaacaagtcaagtggaagacactccgcaagagtgtgctacgtttgcaaagagcctgggcacttcattgcggattgcccccacctcaaggatggttcccacatcaaggaagataagaagaagagtgagaagaaggatgagaagaaggagaagcacaagcatagcaagagggaacattatggccaagctcaccttgggatgatcttcggcttcaactccgagtcaagctcaagtgatgaagaaggagtcgccacgtttgccgtcaagccttcatcaccaccgagactcttcgactactcaagtgatgaggatgctcccgtttgcctcatggcaaaggagcctaaggtaccttctcctcacaagtcatttaatgttgatcttgttagtgatgaggaggatgaggttgaggatgaggttatggatgatgaattgttcaagtccataactaaggaatccctaccacacttgagtgagttgcttgggagaattgaggaccaatatgcaactcttaagaggcaagagactttgctcattcgtgagaaagagcggtctcataaactcaagagtgagcttgctaaggagagagagaaaaatgaggcattggtacggctttacaagcaaaccaaagagtctcatgctaatcttgaggtggcgaacgctcaacttcaagagagagtggatggcttggacaaagcatacctcactcttgaagagaagttcgaaaccttaaaaaatagtgtctctctccctagcgagccatcttgttccaaaattgtcccaagcaatgaaccatgtgtgagatgcaaagatattgatattgaagcttgtgctactaactctatttccttgagtactttgcaaaagcaaaatgagaagcttatgggactccttcacaatggcctacttaagtgccatatgggtagtaaggccctaaaggactacctaggctatcaaagggacaacttcaaccatgagggtcttgggtatattcctccaccaaaaggaaaggtggacaaaagtgtgatgatcaagaggccccaaggtcttagcaattttgttaaggccaaaagtatccttcctaatgattatgcttcacattgttcttttgatgcatcttatattcttaggaagaatactagtggtcgtgttgttgctaagtatgtaggcccaaggggcaagaatatttctatcaagagagtactttgggtgcctaaggcacttgttactaacatgagaggacccaagcaagaatatgtctccggtggaagaagttgggtgattgatagtggatgcacaaatcacatgaccggagaagaatcaatgttttcaactcttgatccaaatggcacttcacaagataacatagttttcggggacgatggaaagggaaaggttatgggattgggtaagattgcaatctctaatgatctttccattgccaatgttctcttggtaaaatctctaaactacaatcttttgtccgtttctcaattatgttctatgggttacaattgtctttttaccgatgttggtgtgaccgtctatagaaggaatgattcctcggtagtctttgagggtgtcctcaagggaaagctttaccttgtggatttttcctcaagtacagccaaacatgagacatgcatagtggctaagtccaacacggggtggctttggcatcggaggctagcccatgttggtatgaggaatcttcacaagattctaaagcacgatcacatccttggactaacaaatgttcaatttgagaaagatagggtgtgtagcgcatgtcaagccggcaaacaaattggagcacatcaccccgtcaagaatgtgatgaccactacaagaccattggagcttctccacatggacatcttcagaccaattgcttatctaagcattggaggtaacaaatatggtcttgttattgttgatgacttttcacgcttcacgtgggtgttctttttgcatgacaagagtgagatacaagctatcttcaagaagtttgcaagaagagcacaaaacgagttcgacctcaagatcatgaacattcgaagcgacaacggcaaggagtttaagaacacgtgcatcgagagtttccttgatgaagaaggtatcaagcacgagttctcggctccatattcacctcaacaaaatggagtagccgagaggaagaataggactctcattaagatggcgaggaccatgttggatgagtacaagacatcggaccgtttttgggccgaagccgtcaacaccgcatgccatgccatcaaccgcctttatcttcaccgccttcttaagaagattccctatgagctttttactggtaacaaaccaaatgtctcttactttcatgttttcggtagtaagtgttacattcttaataggaaggctagatcctctaagttcgctcctaaagtggatgagggattcttgcttgggtatgggtcaaatgaatgcgcataccgcgttttcaacaaatcctccggtattgttgagatcgcgcgtgatgtgacatttgacgaaactaatggttctcaagtagagcaagttgactcacatgtgttaggtgaagaggaggatccgagcgaagcaatcaaaagattggctcttggggacgtacgtcctagggagccacaacaaggagcctcttcctcaacacaagtggagccacctacatcaacccaaaccgacgatccctctatctcaagcttggatcaaggtgaagaaggcgagcaagtgccaccctcaccgatcaagttagctcgcccaagaatccaccaaagtatccaaagagatcatcccaccgacaacatcttagagacatcaacaagggtggaacaagctcttaatgatccggattgggtgatggcgatgcaagaggagttgaacaatttcacccggaatgaagtgtggactttggtggagcgacctcggcaaaatgtgattggcacaaagtggatcttccgcaacaagcaagacgaggccggggtcataataaggaacaaggtgaggttagtggcgcaagggttcacccaaatcgaaggattagatttcggtgaaacttttgcgccggtagctagacttgagtcgattcgcatattgcttgcttttgctactaacctcaattttaagctatatcaaatggatgtcaaaagcgccttcctcaacgggcctatcaacgagttggtatacgtggaggaaccaccgggcttcgaggatccgaagtatcccaaccacgtgtacaagctccacgaggcactctacgggcttaagcaagcccctagagcttggtatgagtgtcttcgcaattttcttgtgaaaaacggctttgaaatcgggaaagccgattcaaccctttttactaaaagacatgataatgatatttttgtgtgccaaatatatgtcgatgacattatatttggttctactaacaagtcttttagtgaagagtttagtaggatgatgaccaaacgttttgagatgttcatgatgggtgaattgaagttcttcctcggccttcaaatcaagcaactcaaggaaggaactttcatttgccaaacaaagtatttgaaggacatgcttaagaagtttgggatggagaacgccaagccaatccacactcccatgccatcaaatagccacctcaacctcaacgcgcaaggtaaagacgtcgatcaaaaggtataccgttctatcattggctcacttctttacctttgtgcatctaggcccgatattatgcttagtgtgtgcatgtgtgcaagatttcaagccgctccgaaggagtgtcaccttgtggccgtgaagagaattcttagatatttagtgcacacacctaaccttggtctttggtatcctaagggagcgaggtttgatctcattggctatgccgatgcggattatgccgggtgcaaagtggataggaaaagcacatcgggatttttcggactttccgaaaaattttcggacatatccgaaaaacatcagaaccgtgcgcaacccttctggatcctttcggacatatccgaaaattttcggaaatatcagaaaatctcggagtccttatatatcaccccgtggactcccttctctctcctttccactctttttccccacggattgactccctcctccctccccaccggcgaccccccggcgaccacctcttctccggcgacctcccgcggctcccctcctctccaacctcgtgggagcacgtttggggccctccttgggacctacattgtcgatcttcaccgcgttcttctagtgttcttcacgttcttgaggatgcctccccgcaagcaaacctcccacatgtccaggagcccgagggaccgctctcccactccatcctctcatgatgattcggacagtgattggaccggtggagaggatgcgattcctcagggtgcgcgggtggctcggggcggcaacctccctcctcggcgatcctctcatggtggtggtggtgatggtgagggctcctctcgtcaaccgcaaacgccgccgcaccaacccaatgtcctcattgggcctctccgccttcatacccccgagagggatccggcggtgattcgccaagtgtatgattggaggcgcaagtctgaggcgcacaatgatcccgtgatagactctgtgattgcaaattgtgatctcatgggtattcgctccttcatgaccttgcagcaaaattggtgcaacgagatcattgctcagttttatgccaccgtctactttgatcgttatcgtgccatgcactggatgactcaggggtcctggttttctgtttcttatcaacagttggctgagatttggggctttcgtcttcgttctttgctcaaccttgataaccttcataatcttcaaattcctgccaacacagaattgctccctctttacactccaaatgatcctaatgtggtgttgggcaaggtcgacggcctcaagctgtactttgcctacttgaactggatgtttcgccggtcctttgtgcttaaggatggtgatgctagcagcattaaccacatctctaggaccgtgcttcttaggtttgatccccctcctcatcgctttcatgtttatcactttgtgtgggaggagatccgcatggcttccatccagtacaagaaggggttggtctatgcccctcacattatgcggatgatcgagactgtgactcagctccagtttcgccatgatgtgactcattctcagcttcacttgcgccttattaaggccccccgctcctcagctgctcgggacatcccctcctcttccactcagccgcctcctgctcctgagcgccctgcctctgtggctcgtcgtgagccatctcccttattccgtattttgcggagtctttttggtctttgctctacggaggccaaaaagaaccgccgattgcggaattcggtgaagaaaacggctcgtgatgtcaagttcctcaaggcaaggtattatgaggaccaccacattgatatccctccttctcctccgggtttcgaggccgagcccgatgagccagaggatgaagagattgaggatccctttgctgggttgcctcctgactttgacttctttggttatggccctggctatggctatcctcctccaccacctccagaggatcctcctcaggcgcccttcgcttga

SEQ ID NO: 22957 - DNA, 807 bp, Oryza sativa
  Clone ID: TF_OsC1713_5433
ttaaagaaagctactgctgctttggaactgatggctgagctgtatcccttgagacgcaaccggcactgcatttgctcctgtgaggacaatgttgttgacttggccttgtggctgttgacgcttcggcttcggacactcttttacgaagtgacctggctcataacaattgaaacacacccgatgctcccttccattactgttatcttcttgagactgatcctgctgaaatgacactgattgagtagcttgctcatcattgtcttcattgcttgcattagtctctgagttgatctcaccactgatgcccaactgttgtgactgttgttgtgactgttcttgacctgcagaaaaagattcaccaatttggagtggcttgatacgctgcctctggctactaccttgtgcctcctgggatacagtcattttccttttacggttatccatcttgttcttcttgtcttccagtcgaattgctttatcaaccaactcctgaaaatcctcatagtcatgagagatcaacataactgacagttcatccttcggaccttccaagaatttctcttgcctttcctcgtcagtacgcacatcttctggagcatagcgagccagacgattgaactcatgaagatactctgccacggtacgatccttttgcttcaaagccctaaactcacgcttcttcaaagcaacaactcctacaggtacgtgtcttcttgaatccttcggtaaactcttcccaagtgattggttgtcgttctgctttgacttgcagaagttgacaacatcgacgtcttcgagtttctccat

SEQ ID NO: 22958 - DNA, 5092 bp, Oryza sativa
  Clone ID: TF_OsC1713_5186
accacgaagcctccgcacgcccccttcgtcaaggggtgggcaaggcgggagccggcccacggagagaactacccaagccttgatcactagggtagttcttccttcactccgaaggtggtgaactccaaaccactcacaaactggcaccgagcctcctccacaatcttctcggagaggtcaccgggcaacttctccacaagccgtctaggaggcggcaacctcattatgtagggagcataatagattccttgtccaatagtcccctttgagatggcaatctccttcatcataaggttgataacatcaaaccgacgaccatccataatggcatcaataacatgccaagcaactccgcgtatgtcatcattgttgccgcatcttgggaggatggtggcccttactctgcggttgatcacacttgggagagccctcaaacccgccacctttccatatgtgtaccctcccccttcttcataaaactgagaaaagtgatcaatggggaaggggttgtgggtgtgctcatcatgaaggtcatccccgttattgaagcgaatgtgcaagagctccttgaattcacggcggttgatagagcatcggagggtccccgacatccacttcattgcatcacaatcgccggacacccatacagtggcatagaattgccggatgagatcttcatcaaaaggttgcttcatggtgacaatcctatcaatcccaacggtccggaacatctcttgcaaattctcaaactccggtgtctcaccaatgtgcctccaagaaatccacttgtgttcggcgaaggctttgttggcatacacttgttcatacacggacttttggaaccgtgtatgaaatcttggatcattacaatcgttaggcctccggaattgatcatgatgatggaggatagtgtattgttgagcattcctcaaatttagcacaaattggatggtggaatcgagaggactcccatcatcacttgcctcatcatcttcactattgccactcccattgtcatcaccatcatcacttacatccaactcattaccctcaacattttccatattgtcctcatcactttgaacatactcatctccgctcgattcctcattcttactaacgggatcgggcgtgggctcacgacgaccatgccgagtgtggggaggcatagcaagcatttggcaactaccggatgtgctctttctatccactttgcaaccggcataatccgaatcggaatagccaacaagcttaaatttagcaccttttgggtaagccactaagtgacactccttaggagcggcttgaaaccgtgcacacatgcaaacactaaacatgatatccggcctagatgcggtaaggtaaagcaagctaccaatcatagaacgataaagttttaaatctaccggtttacctccctcatcaaggtcgagatgcccgttggttgccataggtgtcttgatgggcttcgcatcctccaagccaaacctcttgagtagatccttgatgtacttggtttggctcacgaacgtcccatccttgagttgcttgatttgaagtccaaggaagaagctcaattctccaatcatggacatctcaaattccctagacatcatatcaccaaattccttgcaaaatacctcattagtagaaccgaatatgatgtcatcaacataaatttgacacacaaagaaatcatcaccaatgatttttgtgaaaagagtggtgtcaacttttccaattttgaaatcctttgacaaaagaaaatctctcaatctttcataccaagccctaggagcttgttttaaaccataaagagcttttgagagtttgtaaacatggttaggattttcaggatcttcaaaaccgggaggttgttcaacaaagacaagttcggcaatttcaccatttagaaaagcacttttcacatccatttgaaatagttttatatcaaagtatgatgcaaatgcaagaaggatgcgaatagcctcaagtcttgccacgggggcaaaagtttcaccaaagtctaaaccttcaacttgtgtgaaaccttgcgccaccaaccttgccttgtttctcaccaccaatccgttctcatcttgtttgttcctaaagatccactttgtccctatgacattgtggtctctaggtctttcaaccaaagtccacaccttgtttcttgcaaagttgttgagctcttcatgcatagcattcatccaatccggatcacaaagagcttcatctacatgttttggctcaagacaagaaacaaacgagtaatgttcacaaatcgaagcgacacgagatcgagtttgaacacccttactaatgtcacccaacacttggtcaattgggtgatccttggaaagagcggtgtgtattcttggaggtataggtggatcttgtgccttctcctcctccacttcaacttgagcttgacttggcgaagcggaagtagatggctcatcttgagtggaggtggatggcttgtcttccacttcaataggcttgacatctccaatagacatgttcttcatagctctcatcaagccttcatcacctttgttcttgttgtagacccggtatgccttgctatttgaggcataacctagaagaaacccttcatcacaccgactttcaaatttggttagtctaacaccctttcggtaaatatagcacttgcaaccaaaaactcgaaaataggcaacatttggcttcctcccaacaattagctcataggaagtctttttcaagagacgatacaaataaagcctattggttgcatggcaagcgatgtttatggcttccgcccaaaaggaatcggaaacaccatattcatctagcatagtccttgccatctcaatcaatgtacgatttttcctttccactacaccattttgttgaggtgagtaggtagcggaaagctcgtgtttgataccaagatcatcacaatagtcctcgatattggaattcttaaattcggaaccattgtcacttctaattttcacaagagtgcaactaaattcattttgggccctttttgcaaactttttgaaaagttcggcaacaatagacttatcatgcaaaaagaatacccaagtatagtgagaataatccaaacttgtttgggtccttggaggttagagaccaaagctttgggcacccaaatggtattctttttaccaccgagtataggggaacccacatatctagcaacaatgctaccatcatgagccttcctaagcatataatgagaatcaaacatgcatgtcttaggaggcttaccaccggggcaatcattcaccaaatgcccaacctcacgacacttggagcaatacttaccattgctcttgacaaaacgagtggcacggtgagaaggtttcttacccttctttggaataaatccaagtccctccttgttaaggatgcaccgttgctcactcaaaatcttgtcaagagtgttcttacccttgaagcacctctccaagctcttgttgagcttagccacttgctccttaagctcattgttctcaacaacaagtgaggcatcacaaatagatacacaagagctagagctagagctagacatatccacaagatcatcacaagaggtagaaatgctagatgatgcaacatgagcaatatggcaagtagtactatcatcaagcaaatcacaagatatgccaacatcaatgagagctccatgttgagtagtggaaaggaggttgtcatgagcttccttaagcttctcatgagaaatggtgagtctctcatgagaagtctttagctcctcatacaagacctccaaaaaagcatgatccttctttagggccttgaacttgacaatctccttctcactataagcatggagctcctcaaacatactcacaagctcatcataggaaacatcatcacaatcatcatcactctcactatcactaagagatgttaccttagaggagccctttgccatgagacaaagtggagcgaagagtgatggagcctccttgatggcaacaacggccatcttcttcttcttggagcttgcattatcactatcttcttcctcggacccggatgaggcggagctctcctcatttgagtcccattccccgatgaaggcctcaatcttcttgccttccttcttgagcttcttcatgagcttgtagcctccactcttcttcttagatgacttgtctccatcatcatccttggaagggcacttggaagcaaagtatcccttctcaccacactcaaagcacctcaagttggagagagtcttgttgggtcttctatttcttctcctatttgagttggagccctttcctctctcctttctccttcccaagaaatcattgaaccttctagcaagaagggcaatctcttcttccaagttctcattgacttcattcaccttgcccttgcccttgtcttcaacttcggcttggagagcaatgcacttcttggaaggtgaggcttcctccatttcctttttcttcaacttatacatgtcattggtgttgatcttccccaagaggcttgccggtgtcatccttgacatgtcggagttgatgagcatggtgacaagggtctcatacttctccggtagagccctaagcatcttttgggcaacctcgagatcggtgtagtttgccccaagccccttgagatcattcacaatgacattgagcctcccatacatgtcattcacactctcatgaggcaacatggagaatgtctcatattggatcttgaggaagtgaagcttggcatccttgtactcacttgtgccctcatggatctccgccaacttgttccaaatctcatatgcggtctcaaggttgctcactctatcaaactcctcttggctcaaagagttgaacaaagcattcatggcttgggcattgagttggaggttgcggtgatcaatctccgtcaagggcgtgccggtgattgcaaagcctacatccacaatactccaaatatggaagctcatagctttgaggtgagtagacattttaattttccaagtggaatagtttgtgccattaaacatgggagccttccctacgtggttcacctcgttcgacat

SEQ ID NO: 22959 - DNA, 2719 bp, Oryza sativa
  Clone ID: TF_OsC783_9
tacctccgacaactccattttgcccctttcccccttctcttcccctttgaatcaagtcaccaccgtctccacccatgccggccggaggtgagcccttaccgtcgccgttccggccttatctctcactccttctaccagccaacggcctccccaggtgcgtggagctagggaacaccacccgccgccggcgtcgccgccatccagccaccggagcaccggcgccccacctccctccctcttctctgttgccggctagaaagagaagaagaaaggaacgggaggaagaaggagagaaggaaaaagaagaagaaaaagaaaagcctgacagagtctattatcttttggatggcaacttgtgatgttttgaggatcggataattaggttgcctatcttggatttgtttgcggtggagcatcaaatcggagttggcatgaaggcgctaggtccgtttgaagtcagtgctgtctccggaggccgagctggacttggacttggaattatcattggagcgtgtgaagttatgagcatatccgacgaagtgatgtcctcatcatcctccccttcttgaattggagtcgtcctcgactcaatcccatcttcttgattatgtgcactctctcgtccattggccatccttggaggtatctcatcgtgaaaaacatcctcatattcctgcaaaaggttagtaatagcgggtggcaaagaatataaagtactaggagcagtagccaatgtgagtataggatctttgcaaaatagagcatagcaacaagaatctggctcatctagtgcacaaatattatatttagaagccaacaaagcacccttcaacttaatttcattctttgtggtacttggttctattttactagttgaagcaggatgtttagcaataatctgattttcacttttcgctttcttttcacattcaagtcttgcaagatcatctttcaaagcagcggctggagtcatagaatgcaaaacaactcttttaccatcgaacataaatttatatgtattagtcctaccatcaaaaacaacttctctatcatattgccatggtcgccccaaaataacagaacaagcttgcatatgtacaacatcacattcaatttgatcatggtaggagcctatagaaaaaggtattttaaccaagcgggttaccttcatcttaccacatgtatgaaaccactgaatatgatacggatgtggatgtggatgggtagtcaagccaagcttcttgaccatctcttcacttgctaaattgttgcaactcccactatcaataatcattttgacggtatggcctttcacaagaactttgctttggaacaaattgtgacgttggttttgctcttcacacttctctttagcactaagtgctagcttgacaattaggctaggatactgatctagggactctggatgcaaatggacttcctcgatgtcctcatcatcttgtcctcctgcgtggtcagtggcagctaaagcatattcatcatcacaatcactagcagaagtatactcaccatcagcattcacaaatagagctcgccgatttggacagtcgcgggcaatatgtccaatgccatggcacctatgacatgtaatatcacgtgtacgtccagtggaatctactgaagttgcactcttggctggagtctgaactgaagcgtttttgcttgtttcttgagcatgggatggcgtggaggtaggtggacgaacaacagtagtagattgacgtggtgttgactgtcgtgtggaagtagcacctgcaagagaactcctatgcttgttgcgtccctgcacttctctttcagctttgcaagcaaaatggaataatctattcatggtattgtattctttatattcaagaatatcccgaatctctctattaagacctccatagaacctagaaattctagcatcctcagtttcttgcaaattacatcgtgacaaagcaatcatcatctcttgatagtatgtttctacagaattggaaccttgtcttaaaagttgcagtttatttaacatgtcacgagcatagtaagaaggaacaaatctagacctcattgtacgtttcatatcatcccaggttctaggtctaagtcctctaccacatatatcattccaccatagagatgcaaaggaggtaaattcactactggcagctttaactttcttattatcaggaaaatcatagcaagagaatttttgctcaacagctagctcccagtctagataaacagaaggttcaaacttaccatcaaaagaaggcatagtaaattttaccttagataaaggatcatctttgtccctaattcgacatcgtcttctatttccaacactctcgtcttcctcctcatcatcagcaacagattgctcttcatcttcatcatcatatctttggtgtcgatgagcagtggcacctacaccttcttcacctacagcctcaagtaaaccaatgcgtcgcacaatattttcatgtccaatatttatattctgaatgttttcagttaattgtttatgtgatcgattcatttgctcaatttgatccactactttcaccaggctttcacttaaggtttttaaatgtttatctgtgctttccttgtatgatttactattacgcatcaactcttcataccaattttccatgcccttcagtttatgcgctagattctccagtgttggttcgtcggaacttgtacctgacat

SEQ ID NO: 22960 - DNA, 2577 bp, Oryza sativa
  Clone ID: TF_OsC1528_1875
atgagaccagactactccatcccgctcgccagcgtgcaccggcgatcgggagagcaggtctccggaacctctgccttcgacgtcctgcaccgggagaaggcggcaataaggcactgtgattttactatggctggttttgccgatgcactgaggctggataaattcaccggtgtgcattttaagagatggcagatcagggtcactctgtggctgatagctatgaaatgcttctgggtgagtactggcaaacctgaaggagttcttactgctgaacagcagaagcaattcgaggaagccactactctctttgtgcgatgcattcttagcgttcttggcgatcgtctggtcgaggtgtatatgcatatgaccgacactaaggagttgtggaatgcactgaatactaaattcggtgctactgatgctagcaatgatctgtatatcatggagcagtttcatgactacaagatggctgacaaccgttctgtagtcgaacagactcatgagatacaaacaatggctaaggaactcgaactccttaagtgtgtcttacccgacaaatttgtagccgggtgcattattgcgaaactacctacatcttggagaagtttcggtactgcactcaaacacaagagacaggaatactctgttgaggggttgatagtgtctcttgatgttgaggagaaagctcgggaaaaagatgccgcgtctaagggcgatggtgggcagtccagtgctaatgttgtgcacaaggcccagaacaagagtaaggggaaatacaaagctcagcagaccaccaacttcaagaatcagaagaagaacaacaacaatcttaatcaggatgagaggacttgctttgtgtgtggccaagttagtcatctggctaggaagtgtccacagcgcaaggggatgaaggcatctgcagggcagacttctaagtctgctaatgtgaccattggcaacactagagatggaagcgggtatggtaatttacctactgtcgcacggggttccaccgtcctaatggggaatgggtcacatgcttctgttcatggtgttggcacggtagatctgaagtttacttcgagaaagatcgtgcagctgaagaacgtgcagcatgtcccttctatcgacaggaatcttgttagtggctcccgtctgactagagacggatttaagttggtttttgagtctaataaagtagtcgtgtctaaacatggatattttattggtaaaggttatgagtgcggaggcctgttccgcttttccctttctgatttctgcaataagtctgtgaaccatatttgtggcagtgtggatgatgaggctaatgtttggcactcacactactggaaggaggctgtccgtagtgaaatggattccattatcgctaacgggacttgggaggtgacagagcgaccctatgggtgtaaacctgtggggtgcaagtgggtgttcaagaagaagcttaggcctgatgcctcacatggtcttctcgttcatcaaatggacgttaagacagctttttttaatggagagctggatgaggagatctatatggatcaacctgatgggtttgtagttgaaggtcaagaaggcaaagtgtgcaaattgttgaagtttttgtatggtctgaaacaagctcctaagcaatggcatgagaaatttgacaaaacattgacatctgcaggctttgcagtcaatgaggcagataaatgtgtgtactatcaccatggtgggggtgagggagttagtctgtgcttgtatgttgatgacatactgatatttgggacaaatcttgaagtaataaatgaggttaaatcattcttgtctcaaaattttgatatgaaggatttgggagtagctgatgttatcttaaacattaagctaattagaggtgagaatgggattaccctcttgcagtcccattatgtggagatgatcttgaatcgctttggctacattgatagtaagccttctccaacaccttatgatcctagcttgttgcttcgcaagaacaagagaattgctaggaatcaactggaatattcccaaatcattggctcgcttatgtacctggctagtgcaactaggcctgacatctcctttgctggatatagtgattctaactggatctctgatgtggatgagatcaaagccactagtggatatgttttcacactaggtggtggtgctgcttcgtggagctcttacaaacagaccattttgacgaggtcaacaatgaaaactgagctgacagcattggatactgctactgttaagacagaatggttgcgtgatctattaatggatctacctattgttgaaaaaccggagccggctattcatatgaactgtgacaatcaaatggttgtcaaagtgaacagttctaaggataacatgaaatcgtctagacatgtgaaaagacgattgaagtctgtcaggaaattgagaaactccaaggttataacattgcattacatccaaacagctagaaacctagtagatcccttcacgaagggactatcacgaaatgtgatagacagtgcatcgaaggagattggtttgagacccatgtga

SEQ ID NO: 22961 - DNA, 3060 bp, Oryza sativa
  Clone ID: TF_OsC1713_5366
ttaggtcggtatcaagcccatttccctcgatgcactgtctatcacattacgtggtagccccttggtaaactgatctgccagatttttagccgtttggacatagtccaatgctatcactccggagtttttctgctttctgacagatttcagtcttctcttgatatgcctagatgacttcatgttgtcctttgaactgttcactttaataatcactgtttgattatcacagttcattaggatagctggcactggtttttcaaccaccggcaaatccatcaggagttcacgaagccactcggcctcaactgttgcaatatctagtgctgtaagttctgcttccattgttgacctcgttaagatggtctgcttgcaagacttccaggaaccagcgccacctccaagtgtgaacatatatccacttatggcttttatctcatcagcatcagatatccagtttgagtcactatacctttccagtacttttgggtacccggtatagtgaattccatagctcatagtgccctttagatagcgcattattctttccagagcctgccaatgatcatctcccggatttgagacaaaccggctcagcttgcttacagcaaatgagatgtcaggcctcgttgcacttaccaagtacatcaatgaaccaatgatttgggagtatctcagttgatcccttgctattcttcggtttttccttaatagcacgctgggatcataaggagtaggagctggcttgcagtcactatatccaaagcgactcaaaaccttgtccacatagtgggattgcacaagtgtaatcccaccctcatctcctctcaatagcttaatgttaagaataacatcagcctctcccaaatccttcatttcaaaactcttggacaaaaagtccttgacctcctcaatcacattgaggccgtctggttgatccatatagatctcctcctccaactctccgtttaggaaagctgtcttaacgtccatctgatggacgagaagaccatgagaggctgccagagcaagtagtactcgaatcgtggtcaaacgggcaactggtgagtaggtgtcgaaaaaatcctcgccttctttttgggtataacccttggccacaaggcttgccttgtacttttcaattgtaccatcaggcctaagctttttcttgaaaacccatttgcatcctacaggcttgcacccatatggacgctcaacgacttcccaagtaccattagacataattgagtccatctcactgcgtactgcttccttccagtagtcagtgtcaggaggtgaatatgcctcttctatggttcttggagtgtcatccacgaggtatacaatgtagtcatctacaaaggattttacaacccttagtttcttactcttatgagtatctacaatgttatcctcctcaggatttccctcaggcgtttgatcattgtgttctatcagtgcaaagtgcttatggggtatgacagtttcttgactagaagtgctaggtgtatttttcatgggaaattcattctcaaagaatgtagcatctctagactcaataattgtactaacacgcatgtcgagtactctagagtttactattaagaatctataacccacgctgtgaatagcagcataaccaaggaacacacaatcaacagtattcggtccaagtttacgctttttggctataggtacatttacctttgccaaacagccccatgttcgtaggtatgagagatttaatttcttcctttcccattcctcgaatggtgttacttctttatgcttcattggaattttattcaggacatgacacgcagtcaaaactgcctcaccccaccattccttggaaagtccaacaccatgaacaaccgcaagtgactcgtttcccatcaacaaggaggaacctctcccgacatgaatattagcaccagtatcaacccaccaatcaggtgaatgaaaaacagagagaactgtaggtaataatttatcgtaccccgatgttcctccgccctcgctaatgaccatgttggcaaacttcctgtctttgtgctcaagacaatccttggcccaatgcccaaacttgccacacacaaaacagtctccatttgccttttccttacctttcttcttaaaattggctgtagccttggctttgacatcaggcttgactttcttgttgttgtgggatgcatgagggttcttcttctgtaccatattggcactagaacctctctcaacctttatgcccccaatgtcctttgccctcgccttctcttcaacacccaaagagccaatgagatcagaaacactgaactcttgtctcttgtgctttagagaagtgccaaagtccgaccaagaaggtggcaatttggcaataatgccacccgccacaaacttgtccggcaactcacagttgttgttctcaagttccttagccagcatctgaatctcatgagcttgttctactacagaacggtcattgaccatcttgtagtcatagtactgttccatgacatacagctcattgccggcgtcgggaactccgaacttggcctcaagtgcatcccacatgtccttccaaacggcgccgggcttccaccacaatctcctcggagaggtcaccgggcaacacctacacaagccgtctaggaggcggcaacctccaagagtaacaagtctaggatgcttgccgaggatgatcaagtgccacactagcgtccacggctcggtcagaccgccgtcggctcggtctgaccggttgcggctctggcggctcttcatgatctccatgttctcaatataaatgtgactcttatcatttttactttcatatccaaatgagattttgtacagcggctctagtaaaccaactcgagttagttcatgtaccaaggacatgcacttcccagctgaaggagctgatgatgggggatcaccttccagtagtgtgctcgtctcacacgcccagacttctgctgtagctgtggctggaacctcgcagtatttggtgccagcagttgttgcggggccgcacattggaatgagtagttgtcccat

SEQ ID NO: 22962 - DNA, 3597 bp, Oryza sativa
  Clone ID: TF_OsC1528_2017
atggctggttttgccgatgcactgaggccggataaattcaccggtgtgcattttaagagatggcagatcagggtcactctgtggctgacagctatgaaatgcttctgggtgagtactggcaaacctgaaggagttcttactgctgaacagcagaagcaattcgaggaagccactactctctttgtgggatgcattcttagcgttcttggcgatcgtctggtcgagtttcatgactacaagatggctgacaaccgttctgtagtcgaacaggctcatgagatacaaaccatggctaaggaactcgaactccttaaatgtgtcttacccgacaaatttgtggccgggtgcattattgcaaaactacctccatcttggagaagtttcggtactgcactcaaacacaagagacaggaatactccgttgaggggttgatagcgtctcttgatgttgaggagaaagctcgggaaaaagatgccgcgtctaagggcgatggtgggcagtccagtgccaatgttgtgcacaaggcccagaacaagagcaaggggaaatacaaagctcagcagaccaccaacttcaagaagcagaagaagaacaacaacaatcctaatcaggatgagaggacttgctttgtgtgtggccaagttggtcatctggataggaagtgtccacagcgcaaggggatgaaggcacctgcagggcagacttctaagtctgctaatgtgaccattggcaacactggagatggaagcgggtatggtaatttacctactgttttttcagttaatcaatctactaattggtgggttgatactggggccaatgtagcacggggttccaccgtcctaatggggaatgggtcacatgcttctgttcatggtgttagcacggtagatctgaagtttacttcgggaaagatcgtgcagctgaagaacgtgcagcatgtcccttctatcgacaggaatcttgttagtggctcccgtctgactagagacggatttaagttggtttttgagtctaataaagtagtcgtgtctaaacatggatattttattggtaaaggttctaagtgccatagttgtgtgcaatcaaagcaacctcgcaagcctcacaaggctgtcgaggagagaaacttggcaccactagaactcctacattcagatctttgtgaaatgaatggggtgttgacgaagggtggaaaacgatatttcatgacattcattgatgatgctactagattttgctatgtgtacttgttgaaaacgaaagacgaggctctagactattttaaaatttataaggcagaagttgaaaatcaacttgacagaaagataaaaaggcttaggtctgatcgtggtggagagtttttctcgaacgagtttgacttattctgtgaggaacatggcatcatacatgagaggacgcctccctattctcccgagtctaatgggattgctgaaaggaagaatcgcacactgactgacttggtgaatgccatgttggacaccgcgggactgcctaaggcatggtggggggaggcattgttgacctcaaatcatgtgttaaacagagttcctaacagaaataaggacaaaacaccatatgagatatggattggtagaaaaccatcactttcttatttgcgcacatgggggtgcttggcgaaagtcaatgtaccaataacgaagaagcgcaaacttggacctaagactgtggactgtgtttttctgggatatgcttatcatagcattgcctatagatttttaatagttaaatccgaggtaccggacatgaatgttggtacaattatggagtctcgtgatgctatcttctttgagagctttttcccaatgaaggatacacatagtggttcgaaccaaccatctgaaataattcccagttcaatcacaccaccagaacaaactgaacatacacatgaacttgtctctgaggaggatgtcagtgaagctcctcgaaggagtaagagacaaaggacggctaagtcttttggtgatgatttcactgtgtacctcgtggatgatactcctaagtcaatttcagaagcatatgcatctcctgatgcagactactggaaggaggctgtccgtagtgaaatggattccattatcgctaacgggacttgggaggtgacagagcgaccctatgggtgtaaacctgtggggtgcaagtgggtgttcaagaagaagcttaggcctgacggtactattgaaaagtacaaggctcggcttgttgctaagggctatactcagaaagaaggcgaagatttctttgacacttactcacctgttgctagattgaccataattcgtgtgctactttccctagcagcctcacatggtcttctcgttcatcaaatggacgttaagacagcttttcttaatggagagctggatgaggagatctatatggatcaacctgatgggtttgtagttgaaggtcaagaaggcaaagtgtgcaaattgttgaagtctttgtatggtctgaaacaagctcctaagcaatggcatgagaaatttgacaaaacattgacatctgcaggctttgcagtcaatgaggcagataaatgtgtgtactatcgccatggtgggggtgagggagttattttgtgcttgtatgttgacgacatactgatatttgggacaaaccttgaggtgataaatgaggttaaatcattcttgtctcaaaattttgatatgaaggatttgggagtagctgatgttatcttaaacattaagctaattagaggtgagaatgggattacactcttgcagtcccattatgtggagaagatcttgaatcgctttggctacattgatagtaagccttctccaacaccttatgatcctagcttgttgcttcgcaagaacaagagaattgctaggaatcaactggaatactcccaaatcattggctcgttgatgtacctggctagtgcaactaggcctgatatctcctttgctgtgagcaagttgagccgatttacctctaatccgggagatgatcactggcgtgcgcttgagcgagtaatgcgctatctgaaaggtactgtggaattggggcttcactatactgggtatcctgcggtactggagggttatagtgattctaactggatctctgatgtggatgagatcaaagccactagtgcatatgttttcacactgggtggtggtgctgtttcatggaggtcttgcaaacagaccattttgacgaggtcaaccatggaagcagagttgacggcactagatactgctactgtttaggcagaatggctgcgtgatctattaatggatctgcctattgttgaaaaaccgacatgtgaaaagacaattgaagtctgtcaggaatttgagaaactccggagttataacgttggattacatccaaatagctagaaacctggcatatcccttcacgaagggactatcacgaaatgtgatagacaatgcatcgaaggagatgggtttgagacccatagcattcttgaaagaactcacctttgtgagcttgactgttggtcgcagtctgtagagattttgggtgaatcttctaggaagcttactaaagacctaggagta

SEQ ID NO: 22963 - DNA, 5950 bp, Oryza sativa
  Clone ID: TF_OsC359_7939
ctaaccccttttatcatgtccgctaggtggttccggagaccgtccaccgttcgtcgtcgcctcccactcattcctcgccgccgttcgccgtcgcccctccgtgccggccgaatcctcggtgagaaccccgtcgtccttcccctcccctcctagcgctgccgcccctcgccgctcggggtcgcgccgccgccgctcgccgtcggtcaccgccgtttgctgccgccgccccgcggtagcgccgccgtgcggcatggccaccgtgccggcttgagccgcccgtgcgcgccagccgcgcgctcccgccgccgtctgatataccctcgggtagatcggggccgtcggttcggccgcccgcgtggctgccacgtggccgccacgtgtgcgccacgtcgacgccacatcagtgccacgtggtgcgccgctccttccccggtccgtggacccggtccaccgcagaccgccacccgagtcattctttgtcttctctagatggccgaccacccacccaaccaccgtggagaaggcatggatgattttgtggcagagttggctcgcatgaccctggtggtgggctaccccaacgcgccggagtactcgaccgttccgccgctcagtggcgagcttccccaccgtgttcgtctggaggttcatggctttgtgggcacctgcctcgctaacatggtggttgaggcctctggaggcacagtagatcacacttgtcaggaggcagcatacctgatgatggccaggcttcgtgatcgccacagctaaatcttctgcaacacggcgtaccgcttccaccctcgccgagcaagtggcgacgacgtcagcaccttccgcccgacggccagtgagaatgacaccaccttcagccacatgtgtgccgtgatgaggggaatggacacgatgcactctgacctgcacaaggcatccaaggcctcgaatgatgggaagcttgtgaggatcatagctctgaaggatgagatagcacgccagaagaaggagaacgctcagctgaagggtctccccgctcccggaggagtccggatccgcaccacgcctcgcaagtcaacgactgcacccgtgcgcattcagcttgcgcccaggaacccacctcctcccgcagctcctccagcacctcccacagttcccgcagcgcccgcagttccagctccagtcccagcttccgttccagtgtcagctcccgcgtccgctctctccttcgctctagcgtcagccgccaggggtccagccattggcaacggaggttggttgcctgctactcacagtggcagccacgaccacagcagcagcagttccagtggctcagagccgggcaacggcgagacgtatctgccagactccaggagccgctcagagggacctggcctcttccttcagatggtcaacaccaggaatggcagccatgcagcaggtgaaggcagcaacggcgaagaacgcaccgacggtggatatcccaacagcgcctctggcaacagtccaccaccgctccccaagaacccgactcttgcacaagtgatggcccatcagacttagatgatggcggccatgatgcagctgatgcagcaccagccctagcagatgcaccagaggatgcagcagcaagccgagcagcagcagcagcagtttggtccccctccccctcagtccaagctgccggaatttctacgcgtcaggccacccaccttctctagcaccaccaaccccatggaggcaaatgactggttccatgccatagagaagaagctcaatcttctgcagtgcaacgatcaggagaaggtcgccttcgccacacaccagctccagggtcccacgtcagcttggtgggataaccacatggctacccgcccgccaggcacagaagttacttgtgcagagttctgtcgcagcttccagaaggcgcaagtactagacggggtcgtggcacaaaagaagagagaattccaggcactccaccagggcaacaggatagtgactgagtacctccatgagttcaattgcctagcgcgatatgcaccggaggatgtccacattgacacattgaaacaggagaagttcctagcaggtctggatgacgagctgaccaaccagttgatctccggggattacactgacttcgagaagctggtagacaaggcaatccgccaggaggatcagcgcaacaaaatggacaggaagaggaggtttcgacagttccggtccaaccaaggaagtcaccagcgaccgcgcttcactcctggacagcagggtgggcctaccaccatgattgttcgacagcatcgcccttacaacccaagcaacttccaccccggcagcagtggcagccatcatggccaaggtcagcacaaccgcagcgcagccccacgcccgccaatggcgccagttcagcaaactgcacccgttcccccaaagaaggacaccggaggcaagccaggagcctgcttcaactgtggtgagtccggtcacttcgccgacaagtgcccgaagcccaggcgtgctggacccaagtttgtccaggctcgggttaaccacgcgtccgcagaagaggcgcaagtagcaccagaggtcgtactgggtacgtttcctgttaactcaatccctgcaacagtacttttcgattctggtgcaacgcattcattcatttcaaagaagtttgttggggtacatgggttaataagagaagaacttagtacaccaatgcgggttcagacccccgggaatagctccacctcgattcaattcagcccttgtgtaacaatagaaatccaaagatcaccatttctagccaacctcatccttctcgaatccaaagacctagatgtcattcttgggatggattggctgaccaagttcaagggtgtcattgattgtgtgaatcgcacggtcaccttgaccaatgagaaaggggaaacagtggtgtacaagtcaccagtcgtactgaagcagggaatctccttaaatcagattgaggtggaaaatccgatggtcaccgaggagaagagttcgaggaaattggaagatatccctatagtcggcgagtatccagaggtgttccctgaggacctcactaccatgccacccaagagggagatcgaattccagattgatttggcaccggggactgccccaatttacaagaggccgtacagaatggcagccaacgagctagcagaggtcaagaagcaggttgatgagcagttgcagaaagggtacattcgaccaagtacttcaccttggggtgctccggtcatttttgtggagaagaaggacaagacgaagagaatgtgcgtcgattatcgcacactcaatgaggtcaccatcaagaacaaatatcctttgccgcggattgatgatctgtttgatcagctgaaaggagccaaggtgttttctaaaacagacctgcgatcaggctatcaccaattgagaattcaggaagaggatattcccaagatggccttcaccactcggtatgggttgtatgagtgcacggttatgtattttggacttacgaatgcaccggccttcttcatgaacctgatgaacaaagtgttcatggaatttctggataagtttgttgtggtattcattgatgacattctaatctattccaagtcggaagaagagcatgagcaacatcttcgtctggtactcgagaagttgcaggagcaccagctttatgccaagttcagcaaatgcgacttttggttatcagaggtcaaattcttgggtcacgtcattacagctcagggcgtggcagtctatccatcgaatgtggagtcagttaccaagtggaccccacctaagaccgtgtcacagattcggagttttcttggacttgcgggttattaccgtcggttcattgaaaatttctccagaattgccagacctatgactcagttgcttaagaaagacgagaaattcaggtggacagccgagtgtgacaagagttttgaggagctcaagaagaaattagtacctgctccagttctgattctgcccgatcagacgaaagacttccaagtctattgcgacacgtcccgtcacgggcttggatgcgttctaaagcaagagagcagagtggtcgcttatgcctcgcggcagttgcgtccgcatgaaggaaactatccaacacatggcagcggtggttcatgctttgaaaatctggaggcactatctgattggcaaccgctgtgaagtatatacggatcacaagagtttgaaatatatcttcacccaacctgatctgaatctccgacagcgaagatggttggagttaatcaaagattatgacatgagcattcactaccatccaggcaaagccaatgtggtggcaaatgcattaagcaggaagagctactgcaatgctttgtgcaccgaaggcatgtgtaaggaattgcagcaggagcttgaacatctcaacttgggaatcgtagaacacgggtttgtggctgctctaaaggcacggcctacgctcgtggatcaagtaagagcagctcaagtaaatgatcctgagatagctgaactgaaaaagaatatgagggtcggaaaagcccgggatttacttgaagatgaacatggcacaatctggctgggagaaagattgtgcatacctgatgacaaagagctgaaagatctgatactcaccaaggctcatcagactcagtactccattcatccaggcagtaccaagatgtaccaagatcttaaagaaaaattttggtaggccagcatgagaagggaaatagctgaattcgtcgcactctgcgatgtttgtcagcgggtcaaggcagaacaccagaggcccataggattgttacaacctcttcaaatcccagaatggaaatgggaagagattggaatggatttcataacaggcctgcccacgacatcatcaggccacgattcaatctgggtagtcgtggatcgacttaccaaagttgctcatttcattccagtgcatactacttatacaggcaaaaggttggcagagctctatctctcaagaatcatgtgtttgcatggagtacccaaaaagatagtatctgatcgagggagtcaattcacctcaaaattttggcagaagttgcaagaggaattgggtacccgttcgaatttcagcacagcttaccatccgcagacagatggccaaaccgagagggtcaatcagatcttggaggataagttgcgagcctgtgcgctcgattttggcggagcttgggataaaagtctgccttatgctgaattctcttacaacaacagctatcaggccagtctacaaatggcaccgttcgaagcgctgtatggccggaagtgccgcatacctctcttctgggatcaaataggcgaacgtcaactgttcggaacagaagtgctaacggaagcagaggagaaagtcagaaccgtcagagagaggctgagaattgcacagtctcgacagaaaagctacgcagacaaccgccgaagagagctcacttttgaagcaggagattatatgtacctccgtgtcactccgctccggggagtacaccgtttccagacgaaaggcaagttggcaccacgcttcgtgggaccatacaaaatcttggaacgaagaggagaagttgcctatcagctagaacttccatccaacatgatcggtatccatgacgtgttccatgtgtcccagttaaagaagtgtttgagtttacccgaagaacaagccaattcggagcacattgacatccaagaagatctgacttatgtggagaagccagttcgcatccttgataccagtgaaaggaggactagaaacaaggtcaccaggttctgtagggttcagtggagccaccactcagaggaagaagcaacctgggaaagggaagatgagttgaaggccgcccatccgcacctcttcaccagctcttccgaatctcggggtcaagattccgtt

SEQ ID NO: 22964 - DNA, 9253 bp, Oryza sativa
  Clone ID: TF_OsC359_8456
atggccgaacgggcagtggtgcacagcctctctccgaacgctagcggtgacgacggggagcagaacccgcgccgtcgggctcgcaccccaccgtccccctctcgccgaaatcttgggcggggggaggcgctcggggaggtcggaggatccgcgacttcgccgcccgcgggcgacgggggaggacggcgagacggggcgcgtcgccgcctcgtctacggcgatggcggcatgccccagggcgcgctccaggctgcgggcgcgctcctgcgtcacccgcccgtcgtccccgatccagagactccggcccgacgttggctggatgacgtggctgacttggtcatgacggcgcagcagcgcctaggcgccggcgggcggtcctccgccaccgaggcctctggcgctgccgccgccggctccatgtcgtcgaggcggagggcgcggcgagcggcggccgttacccgccgttcgtccgccgttccctcgtcaacgcctccgacccaagaagatgtgcgtggggggccggatgcccgcctcgatatcgagcgccggcgcgacgatcgtcgcgccgccgacgcaacggagggcgcttcctcgtccggagcgccacttcggtccgggcacgggggccggccccccgtgtccccggttggcggtgccggctgtcgagcctttgtggcgagccttcggaacgtccgttggcccccaaggttctggtccaccatcaccgaaaaatacgacggaagcgtcaaccccgctgagtttctccagatctacacgaccgggatcgaggccgccgggggtgacgacagggtcatggcgaatttcttccccatggccctgaagggtcaggcgcggggttggctaatgaacttgccacccgcgtcggtctactcttgggaggatttgtgccagcagttcaccacgaacttccagggcacatatccgcgcccaggcgaagaagcggacttgcatgcggtacagcgaagggacgatgagcctcttcgctcgtacattcagcggttctgtcaagtccgcaacaccataccgtgtatccccgcacacgcggtgatctacgtgttcagggggggcgtgcggcacaaccgcatgctcgagaagatcgcctccaaggagccccagaccaccgcgcagctttttgagctcgcggaccgtgtggctcgcaaggaggaggcctggacctggaactcctccggttctggtgtggcagctctggccgcccccgggtccgccgctcggtcagagcggcgggacaggaggaggaagaagaagtcggcccgttccgacgacgagggtcatgtcctcgccgtcgagggcgcttcgcgggccccacgaaaggggaggcctgcgagcgacaaaaagaaggaggccggcgctcccagcagggagcgcccgaccggcaagtggtgtaccgtgcacaacaccaccctccacgatctcgcggactgccgcgcggtcaaaagtttggctgagcggacgaggaaatgggaggaggagaagaggcaggagcgccgtgagggcaaggccccggcggctcccgccggcaaccggcgaggtgaggccaagcagaaggccaccgccgaggacatcgacgatggcgacgatgacctggggttccaggagcctgaggccaccgtcgccaccgtcgatgggggagcgtgcgctcacgtttctcgccggagcctcaaggccatgaagcgcgagcttctggccgcggcccctacccatgaggcgacacggcgggcgcggtggtcggaggttgccctcaccttcgaccagaccgaccacccgccgtgcgttgcctggggaggacagatcgcgatggtggtttcccccaccgtttgcaatgtgaagttggggcgtgtcctcatagacgggggtgcagccctcaacatcctttcccccgcagcctttgacgccatcaaggccccggggatggtgctccggccatcccagccgatcatcggtgtgacgccggggcacacctggccgctgggtcatatcgacctcccggtcaccttcggtggttccgccaacttccgcacggagcgggtggacttcgatgtggcggacctcagtctgccctacaacgcggtcctggggaggcccgtgttggtgaagttcatggcggcggtccactacgcctatcaccagatgaagatgccgggccccggtggccccatcaccgtccatggcgacctcaaagtcgcgcttgcttgtatggagcagcgcgcggaccacctcgccgcggcgtccaagcccgcgggtggcgacgagaggctcagtacctccgtcccggccgccccaaggcagcggatggtcacgtgcgacgaggtcccggtcaaggaggttgccctgagcgacggcccgtccaagaccacacgaatcggtggtcttctggacgacaaataggataacggcacccagttcactagtgtcgcgtctcaaaacgactctaaaatacatcctcgaaattatgcctagaataattaaaatccatgtgaaagcctctggaattttcagagcacaaataataattattaagaaataaacgaagttaaaatggttttataaaaagaaaagctctaaaaagtccttttttccccctccccctcttgggccagctcggcccatctctttccctctctctcctcttccccgcggcccattcggcctcctccccgcgcgcgcgccgctgacgggcgggcccgcccgccaccctcgctgacgggtggggcccacccgtcatccccttcctcccgccgctcccgccgccccgcccgcgccctagcgccgccgctgccgccgcgaatcccgccgcccccgtccgccccgcgtgcaatcaagagaggggaaatattccccgggatcccctccctctttccccccatttttccctctctctctccctcggattcatttggaaactttccccctaacctcgccggcgccattaatggcggccgggactcccgcgcccgtttccccctcctccggccaccccttccctctcttaaccctatataaaccctccccgtgcctccctccaccgtttccgccactcgccgctctctctccccgccggaatcgagctcgcgccgtcgctctctctctccgccgtcgccgccgagctccggtccgccgccgttgtcgccccggaccacctctcccctcggcgccgcctccttcggcttcgccgcatcctcgccgacctcgtccacccctccgtttcgcacgccgaccgccggagcaccgtcgaccccgtccacccgagccgcgccgccgccttcctcagctccggtcgccgttcccgtcgtcgccatcgacccggggtgagccgtggaccgccgattcgtttcccccttccctcccctctctcggccgccgctccgccgtacctatggccgccaccggcgaccataggggcgcgggcgcgccgcctcccgtcggctgtgccggcgtggccgcctttgggcacgccccgcggctgccgtgtggggcccggctgtcagccgcccgcgcccttaggtgcggctgacgcgtgggacccacggcgccggccggtgcgaccccgggtgcgcccggtccaccgtgggccgtggggctgccacgtgggccccactcccgtggacccagtccgcgcgcccctcccctcggctgacgcaataaatccattttaaattaaaatttaaatgaagaaattcgcaaatattcatttaaagagcatataaacttcaaatggccataacttggccatttgaactcggaattagaccgttcaagtctctaatttttccttaagaagtcaagaacccatttttgtgctttgtttctgcttgttatatggagtttattagagtaaaagccttttcttttccgttggtcgtgtagacgctgcagcttcggaagatccgctcttcgtggaggttgaagccgacgtttgggaaagcgagcaaggcaagtcacatcatctttgaacatattgaatcccagtttataaaattatgttgctttaaattattgcattatcgctttatttaaattcccgcgttatcactgttttatctagccatgcctattttcctttgttatgaccttattattgttattgttattatttccttgttcaccctagaataaacaaaaccccaactagtggacactctactcatggtaccactagtatgattttaggtagatgcttcgctatttaattaggtaacattaggtggtttttcaactctagactttgggatattcgtatcacctggacactatggattggtttgattattgtggaattggattcacacctccccctctattcaaaaccctcaaaatagttttaggctgggctcggggtgcatggttttgatagtagcacctcggccatataaggaccggtcttcgggcctctgttgcaaagcactaccgtacttccacatgtctagtgggtaaggcttagtttgtggctcagtctggttataaacaaaagtacacggatggagatggacgaagtcgggggtcgatggacatctctaggacaaatgaaggctacacgagctgcggcccggtagtcgagatgtcatggcacagggccggtgtcctgctgctaggggctcagtcctgcctacctgtcccgggggttgcggccgtaggtgggattgggtcggtactcttgtctatggctaggatgggttggaaactatgtcacgtcttccgtctgtataccgtggtggtatgtggcacgtggttgcacgtgaggaagatgtgtcttgtgggtaaagatgtacacctctgatcagagtataatctattcgaatagccgcgccctcggttatgggcaagccgagcaatgtacccaaattccggcaatggtccgccaccacttcccgagaatccgacccttgcccaagttatggcacatcagactcagatgatggcagccatgatacagcagatgcagcagcagcaccagcagatgcaccagaggatgatgcagcacgtcgaacagcagcaccagcagtttggtccccctccccctcagtccaagttgccagagtttctacgcgtcaggccacccaccttctccagcaccaccaaccccatggaggcgaatgactggctccatgccatagagaagaagctgaatctcctgcagtgcaatgatcaggagaaagtcgctttcgccacacaccagcttcagggtcccgcgtcagcttggtgggacaatcacatggccacccgcccaccaggtactgaagtcacatgggcagagttctgccgtagcttaaggaaggcgcaggtgccagacggggtcgtggcacaaaagaagagggaattccgggcactccatcagggcaacaggactgtgacacagtacctccacgagttcaatcgcctcgcgcgatatgcaccagaggatgtccgcaccgacgccgagaagcaggagaagttcatggcgggtctggatgatgagctgaccaaccaactgatatccggggactacgctgactttgagaggctggttgacaaggcaatccgccaggaggatcaacgcaacaagatggacaggaagaggaaggccgcacagttcagggcacctcagggaagtcaccagaggccgcgcttcgctcctgggcagcagggtggacctaccaccatgatcgttcgtcagcaccgcccgttcaaccctagcaactttccccagggcgccagtggcagtcagaaccaccatggaggtcagtccaaccgcggtgcagcttcacgcccaccaatggcaccggcacagtcaggccagcccgcgcaagccaagaaggagactggagcaaaaccagggtcctgcttcaactgtggcaagcttggccacttcgctgacaaatgcccgaagcctaggcgtgccgggccaaggtttatccaggctcgtgtcaaccacgcatctgcggaggaggcacaagcagcaccagaggtcgtactgggtacgtttcctgttaactcaatccctgcaacagtactttttgattctggtgcaacgcattctttcatttcaaagaaatttgtcgggatgcatgggttaataagagaggaacttagcacaccaatgcgggttcataccccagggaatagctccacttcggttcaattcagcccttctataacaatagaaattcaaagatcaccatttctagccaacctcattcttctcgaatccaaagacctagatgtcattcttgggatggattggctgaccaagtttaagggggtcatcgattgtgcaaatcgcacagtcaccttgaccaacgagaagggagaaaccgtggtgtacaaatctctagtctcgccaaagaaaggggtctctttgaatcagattgaagcggaaatcccagtggacaccgtagagaagaactcgagaaaattggaagatatacccatagtctgcgagtatccagaagtgttccccgaagacctcactaccatgccacccaagagagagattgaattccggattgacttggcaccgggaactgctccaatctataagagaccgtacaggatggcggccaacgaactagcagaggtcaagaagcaggttgataagcagctgcagaaagggtacattcgaccaagtacttcaccttggggtgctccggtcatttttgtggagaaaaaggataagacgaagaggatgtgcgttgattaccgcgcactcaacgagttgagaattcgggaagaggatattccgaagacggccttcaccactcggtacgggctatatgagtgcacggttatgtctttcggacttaccaacgcacccgcattcttcatgaatctgatgaacaaagtgttcatggaatttctggacaagtttgttgtggtgttcatcgacgacattcttatctattcaaagtccgaagaagaacatgaacaacatctccgtctggtactcgagaagttgagggagcaccagctatacgccaagttcagcaagtgtgacttctggttgacggaagtcaaatttctgggccatgtcattacagctcagggtgtggcagtcgacccatcgaacgtggagtcagttaccaaatggaccccaccgaagaccgtgtcgcagattcgaagttttcttggacttgcaggttattaccgtcgattcatcgaaaatttctccagaatcgcccgacccatgactcagttgcttaagaaggatgagaagtttaaatggacagccgagtgcgataagagcttcgaggagctcaagaagaaattagtatccgcaccagttttgattctgcccgacccgatgaaagacttccaagtctattgtgatgcatcccgtcacggacttggatgtgtcctaatgcaagaggacagagtggttgcgtatgcctcgcggcagttgcgtccacacgaagggaattatccaactcatgacttggaattggcagcagtggttcatgctttgaagatctggaggcactatctgattggcaaccgctgcgaagtatatacggaccataagagtctgaaatacatcttcacccaaccggacctaaatctccgacaacgaagatggttggaactaatcaaagactatgacatgagtattcactaccacccgggtaaagccaatgtggtggcagacgctttaagccggaaaagttactgcactgccctatgcatcgagggcatgtgtgaggaattgcggcaggagtttgagcatctcaacgtgggaattgttgaactcgggttcgtagccgctctggaggcacggcctacgctcgtggatcaagtcagagcagctcaagcaaatgattctgaaatagcagagctgaaaaagaacatgagagtcggaaaagcccgggatttccacgaagatgagcatggcacaatctggttgggagaaagattgtgtgtacctgacgacaaggaactgaaggatctgatactcaccgaggctcatcagacccagtactccattcacccaggcagcactaaaatgtatcaagacctcaaagaaaagttttggtgggtcagcatgaggagagaaatagctgaattcgtcgcactctgcgatgtttgccaacgagtgaaggcagagcaccaaagaccagcaggtttactccaacctcttcaaatcccggaatggaaatgggaggagattggaatggactttataacaggactgccccggacatcatcgggtcacgatttgatctgggtagtcgtggatcgactcactaaggttgctcacttcataccagtacataccacatatacgggcaaaaggttggcggagctttacctttcgagaatcatgtgcctacatggagtacccaaaaagattgtatctgaccgagggagtcagttcacctcaaaattctggcagaagctacaggaagaactggggacccgtttaaatttcagcacggcctatcacccgcaaactgatggtcagaccgagcgagtcaatcaaatcttggaagatatgttgagagcttgtgctcttgattttggtggagcttgggacaaaagcttgccatatgcggaattctcgtacaacaacagctaccaggccagtctacagatggcaccgtttgaagctttatacggccggaagtgccgcacacctctcttctgggatcagacaggcgaacgtcaactgttcggaacagaagtattagcggaagcagaagagaaagtcagaatcatcagggaaagattgaggattgctcagtctcgacagaagagctacgcggataaccgtcgaagggagctcacttttgaggcaggagattacgtgtatcttcgtgtcactccgctccggggagtacaccggtttcagacgaaaggcaagttggcaccacgcttcgtgggaccatacaaaatcttggaacgaaggggagaagttgcttatcagttagaacttccatccaatatgatcggcatccatgacgtgttccatgtgtcccaattaaagaagtgcttaagggtacctgaagaacaggctgattcgaagcacattgatatccaggaggacctaacatatgtggagaagccggttcgtatacttgataccagcgaaagaagaactagaaataaggtcaccaggttttgccgagttcagtggagtcatcattcagaagaggaagcaacctgggaaagggaagatgagttgaaagccgcccatccgcacctcttcaccagctcctccgaatctcggggccgagattccgtttaa

SEQ ID NO: 22965 - DNA, 1350 bp, Oryza sativa; identical to SEQ ID NO: 13752
  Clone ID: TF_OsC1211_18

SEQ ID NO: 22966 - DNA, 5223 bp, Oryza sativa
  Clone ID: TF_OsC359_7638
gtgacaagttggtatcagagccaccttgaccttaggacaagccaaatggtaaacccccatccgccgaaaaacttgatcgaggtgctaggattcgtcagggagctgagaatgatggcatttgaagtaggttacgaggttgcccccgagtatcgccagattccccatgaccccaacgaggagaagtgtcgtgttcgcgtgacgttgactagtgatcgtgaagaccttccgtcgataaagtttgaagctgagggaaaaaagtacagccatgtttgtcaggaaacagccttggtggccattggagagctacgtcatcgctttgatgaggagttagagtcatcagctttccagtatcacccacacaagccacatggtcaagactatagaacttacaactgtcccgaaggtgaaggtagcgccactgtgatgcacgccgtgtatatgcttagcgccatggatgcagtaggcgtggagcgagagaaagcagctcatgatagggaaaactggaaccgtggcaggatttgtaagttggagagcaaggtgtaccgtctgcagaaggaactagctgagcttaagggagaagcaccaccgccagcacccaagcttcgcctcaccgcaaggaagagaaccagtctaccacctcgtctccagttagcttcgaagactcgtgtggtgggagacgctgtgcctgatcatgctgaacctgtcatccatgtcttaagtgatgaggaagaagaggaagacccaaaagaaagagagccagctactccagaggaggaagatccatctcttcgttccgacgcaaggcgcaccactaacccagtagaggcaggtgattggctgcatgctgtgggaaagaagttagatttgtttcagtacaccgagcaggagaaggtttcctttgcttcacatcagttgcatggtcctgctgctgagcggtgtgaccactttcttctaaacagagccgagggacagcctatcacttggcgggagtttactgctgctttcaagaagacacacataccatcaagtgttgtggcccttaagaagagagagttcagagcactcaactagggatcccgttctgtcagagagtacctccatgactttaatcgcttagctcgttatgccccagaagatgttcgcactgatgaagaacgtcaggagatgtttttagagggactgaatgatgagttgtcttttgcattgatggctatggattaccgggatttccagtagttggtggacaaggcgattcgccaagaagacaagtataataggatggaacagaaaaagcgtagtagccagaggccgcgcattgctttgggacctcaagctgcaccatacccacagggaggatcctcttcagttgctcgccctcaacgccagttctacaacaacaacactagtaatcacagcaacgataatcgtaatatggtcactcgtcatgtagcagctccaactcagaatcatcctgtcaggaaggaacagggaagcaagccaggggtgtgcttcaattgtggtgatccaggacattatgctgataagtgtccaatgcctcggcgtgtgaagaatgcacctgttcagaacaactccaatgctccagcaccgaaggctcgtgttaatcatgttgcagccgcagaagcccagaatgcacctgatgtggttttgggtacgtttcctattaactctatacccgcaactgtgttttttgattccggtgctacacattcctttttgtctaaaagttttgcgggcaatcatgggatggaagttattagtcttgggagacctttactagttaataccctaggcaatcaagtatcctcaacgcagtactgtccttccgttactatagaaatagaagaaatacctttcccatcctcacttatctttctagaatccaatgatcttgatgttatcttagggatggactggctaacccatcacataggagttatagattgtgctaaccgtaatgtgactttaacaagtagcaatgggcaaacagtgtctttctttgtgtcatcccctaaatctcacggtttgacattaaatcaagttgctttgcaagagatcccaatagtacgagactatccagatgtgttccctgaggatttgccaggtatgccacctaagagagacatagagttctggatagacttagtacctggaaccaaccctatccataagagaccatacagaatggcagctaatgagttagcagaggtaaagagacaggtggatgatttgcttcaggaaggatatatcagacccagtacttcaccgtggggagcaccagttatcttcgtggagaagaaagatcatacccaaagaatgtgtgtggattatcgagcgttgaatgaggtcactatcaagaataagtatcctctacctaggattgatgacttgtttgatcaactggaaggtgctacagttttctccaagatagatcttcgttccggatatcaccaacttcgaatccgtgaggaggtatacctaagaccgcttttacaacacggtttggtttgctcgagtgtaccgttatgtcgtttggactcactaatgccccggcctttttcatgaacttgatgaaccaagtgtttatggaatatctggataagtttgtcgtggtgtttattgatgatatccttatctactccaagaataaagaagagcatgaagagcatcttcgtcttgctttagagaaactacatgagcatcagctctatgccaagtttagtaaatgcgaattttggttgcccgaagtgaagttccttggtcatgtcatctcaactggaggagttgccgtggatccaagcaatgtggagtcagtgctaaattggaagcaacccaagacggtttcagagattcgtagtttccttggtcttgcggggtactaccgcaggtttattgagaacttctcaaagattgctagaccaatgactcgactgcttcagaaggatgtgaagtataagtggacggaagagtgtgaacagagtttccaagaattgaagaaaaggctagcggctgcgccagtgttagtcttgcctgatccaaggaaaggttttcaggtgtattgtgatgcttctagacatggtttggggttgtgttttgatgcaagatgggaaggtgattgcctatgcatctagacagttacgcccccacgagaataactatccaacacatgacctagagttggcatctgtagttcatgcattgaagatttggcgtcattacctttttggtaaccgtacggagatgtatacggatcacaaaagtttgaagtacattttcactcaacctgatttgaacatgcgtcaacgacggtggttagagttgatcaaggattatcatccaggtaaagcaaatgttgtagcagatgctctcagcaagaaaagctactgtaagatgttagaaggtcgacacctaccttgggagttatgtgaggaatttgaaaagttgaacttgggaatagtcaacaaaggttttgttgccgctttagaagctcagcctactctttttgatcaagttagagaggctcaaatgaatgatcctgatatccaagaaatcaaaaagaacatgagaagaggtaaagccatcggctatatagaggatgagcaaggaactgtgtggctaggagaaagaaattgcgtgcccgataataaggagctaaaggatactatcatgaaagaagcccatgaaactttgtattccattcatcccgggagcactaagatgtatcaagacctgaagcaacaattctagtgggccagcatgcgacgagagatagcagaatatgtggctctatgcgatgtgtgtcagcgagtcaaggcggagcatcagaagccagccggtctgctgcaaccgttgaagattccagagtggaaatgggaggaaataggaatggattttatcaccggtctacccagaacatcggtaggacatgattctatttgggtagtggttgacaggcgtactaaagttgctcatttcatacccgtcaaaacaacctacatgggaaataagctcgcagagctatatatggcaagagttgtatgtttacatggcgttcccaagaaaatagtgttagacagaggtagtcagtttacttcgaagttttggcagaacttacaagaagggatgggtactcgtttgaatttcagtgctgcctatcaccctcaaactgacggtcagacaaaaagagtaaattaaattctagaagacatgttgagagcctgtgttctagatgtcggtggaagttgggataagaatctgtcgtatgctgaattctcgtataacaacagttatcaagctagtcttcaaatggctccatacaaagcattgtatggtcgtaagtgccgtacaccgctcctttgggatcaaactggtgagcgtcaagtttttgggacagatgtattgcgagaggcagaagaaaaagtgaagattatccaagaaaggttgcgagttgctcagtcgcgtcaaaagagctatgcagacaatcgtcgtagggatttgactttcgaagaaggggattatgtatacctacgggttacgccgctgcggggagttcatcgttttcagaccaaagagaaattggcaccgcgttttgtgggaccttttaagattgtgagtcggagaggtgaagtagcttatcaagtagagttgcctctgtcaatggagggaatacatgatcgtttcccatgtgtcgcagttgaagaaatgtttgagtgtacctaccgaggaagcagatcctgagcgtttagagattcaagaagatttaacttatgttgagaagccagtcagaattttggagtttccgacattccggaggagagcgtttacgctgaggaaggttcagaaccgcccctgccgcgccgctcaggtgcgggccggccgcgccgtctcctccttcggcgtcgccgcgtcgacctccaccccggcctgccctctgattcgtccggagaccaccgccgtgtcgccaccaacccctccacccgcctcgccggagtcctccggccgcccgttcctcctcgccggaatttccccggtcgaccgcgtcgccgtcttctccggcatcgcagcggcaaggtcgtcctcggcatcgcttcccctccatccaaacccctctgcggtccatcgtcgtcgcctccgttcgttctcgtcgtcgacgtcccgtcggtcacccggctcgtcgtctcgcagcgccgcctccgtcgtcggcat

SEQ ID NO: 22967 - DNA, 5790 bp, Oryza sativa
  Clone ID: TF_OsC359_5825
atgccgggggtacccagggaggtgattgagcacaaactcatggtgcgacccgatgccaagccaataaagcaaaaactgcggagatttgcaccatatcgaaaacaagccatacgagaagagctcgacaagcttctcaaagccgaccaactggtggactcaacagccggttgcgagttgttgagcttcctcgacgcttactccggttaccaccaaataagcatggcaaaagaggacgaggataagacagcattcatcacgccgttcggggtattctgctacgttaagatgccattcggactaataaccacaggaaacactttccagcgcacggtccaaggtgcacttagtgaccagctcggaaacaatgtcgaggcttacgtcgatgacattgttgtcaagaccaagacaagcgactcattgattgacgatctgcgggaaacgttcgacaacctccgacgatatcgccttatgctcaatccagagaagtgcacgttcggagtaccatcgggcaagaccccccgagctctcctctacccgtcgcccccttcgccttcgcctctcgtcgtcggagaagccctagcgccgtgcgccctagctcagccgtcgccgccgtcgctccagccgtgcgccgccgccgttccagccgtcaccgtcgctcgggaaggccaccgtcgggatcgccaagtcgccgccgtcctcgtccgttgcttcgccgccgtcggagaccgctggagcaccatcgccgtcgtcgaaccgaagagctccgccgcttcttcttcgtcgccgccgccgtccgttgggtttccgccgtcgttttggtcgccgatgccgcgctacaagcctgagtacttgtttggtgttgagggttttgtccaggagttgcgtacaatgtcctttgtcattggatttgggactgcccctttttatgcccagattcctcatgatcgtcatgaagagaagtgccgagtcaaagtcaccttgaacagtaatagtgaagatatcccctcagtgatgttcgaagctggaggaagaaactacatccatgcaagtcaggaggtggcaaggatcgccataggagagctccgcgatcgttacagtgatcagttggccgatactgagtatcgctatcatcctcgtcaaccccagggaagtgaccgtggcagctaccttgagactgaaggaattgagaatgatgctaccacaaggcatttggttgagatgctgtgggctatggatgaaagtcgtgcggagactgtgttagcggctcaagatcgtgaagatcggaatcgtggtaagatttgcaagctagaagacaaggtggatcgtttggagaaggaactagccgcattgaagggagaagcaccaccgcagaaggccaggattcgtcttaccgcaaggaagagagctctatttgtccctcgctatcaattggcgccaaaggttcgtgtggtggagaaagaagttgccccaactctagcagatcctccggtcaacatcataagtgatgatgaggaagaagaatccaagcgcaaccattccaagattgagtgggtagcaactcaagatgatgaagatgagccgaaagagccttcaatcgacctccgatgctcggaagaactagacaagatggtgaatactcgcagcaatgggaatggccccaacaatcccaataataataacaatgaagggaacccaactcttgcccaagtcctggctcaacaggtgcaacttatgaacatgatgatgcagcaacttcagaatcagcagaaccaaggaaataaccatgcacctccgcagaacaggttaactgattttcttcgtgtgaggccacctaccttttctagcactaccaacccagtggaagcaggtgattggttgcatgccatagagaagaagttggatttgcttcaatgcactgatcaggagaaggtctcatttgcatcgcatcagttgcatggccctgcctctgaatggtgggatcatttccgccttaacagaactactgctgaacctatcacttggcttgaatttaccgctgctttccggaagacgcatataccatcgggagtggtgtctctcaagaagaaggaattcaggtcgctcacccagggatcacgctctgttacggagtatctgcacgagttcaatcgtcttgctcgttatgctccggaagatgtgcgcaatgacgaagagcgtcaggagaagttcttagaaggacttaatgatgagctttcttattcactcatgattggagattatcctgatttccagaagctagtggataaggctattcgccaggagaacaagtacaattgcatggagcagaagaaacgccggattgctcaattcaagacacaacaggggaataatcagaagccgcgtcttactttaggaccccagtccataccacatggaagttcttcgtccgttgttcgtccgcagcgtcagttcttcaacaacaatgctggcaacaacatacgtaatcaagttccgcgtcctgttgcagctccaacacagcaacaacctatcaagagggagcaaggcagcaagcccgcggtgtgtttcaactgtggagatccaggacattatgctgacaagtgtccgaagccccgacgcgtgaaggttgtccctgctcagaacaactctactgtaccagtatcaaaggcccgtgtcaatcatgttgctgctgcagaagctcaagatgctccagatgtgattttggtccgggagtatcccgatgtgttcccagatgatttacctgaaaagatacatcagaccaagttcatcaccatggggagctccgacaagttcgtggtggtctttattgatgacattcttatctactcccgaactgaagaagagcatgaagaacatcttcgccttgcactagagaagctaagagaacatcggttgtatgctaagtttagcaagtgtgaattttggttgtctgaagtgaagttccttggtcacgtcatctcagcaggaggagttgccgtcgatcctagtaatgtggaatccgtaaccaattggaagcaaccaaagacagtttcagagattcgcagtttcctaggcctcgcaggatattatcgaaggtttatagagaatttttccaagattgctaagcctatgacacgactgcttcagaaagatgtgaagtacaagtggtcggaagaatccttagaagcgaagcccactctaattgatcaagttagagaagcccaaattaatgatcctgatattcaagagatcaagaagaatatgagaagaggaaaagctatcggtttcttggaggatgagcaaggaactccgtcgccgccgtcgctccagccgtgcgccgccgccgttccagccgtcaccgtcgctcgggaaggccaccgtcgggatcgccaagtcgccgccgtcctcgtccgttgcttcgccgccgtcggagaccgctggagcaccatcgccgtcgtcgaaccgaagagctccgccgcttcttcttcgtcgccgccgccgtccgttgggtttccgccgtcgttttggtcgccgagcaccaggttgagaagtggcggagataagcccacgggggtcgctggggagtccattacctctggttttgagggggagattatgatccaggaacggtgcactgtagtggattgtgttgtgcgagagaggaatagaagcaaatcccgagaagatcatggtaatcgagaacatgaggtcgcctacaagactcaaggaagtacagaagctaaccggatgcatggcagcactaagcaggaggccgaagaggcattcattgcattcaagcgctacctatcaaatccacatgtacttgttgcccctcaacctaatgaagaattatttctctatattgccgccacgccatattccgttagcactatcattgttgttgagagagagaaggtgcaactaccagtctactatgtcagcgaagctctccacgacgtaatgacaagatatccacagatccaaaaactgctctacgcagtaatcatgacatcaagaaagctatgccagtacttccaagcccacagggtcacagttgtctcctccttccctctcggtgaagtcatgagaaataaagatgttgtcagccgcattgccaaatgggtagtcgagctaagccaatttgatatccacttcgtgccacgaacagccatcaagtcccaggtactcgccgatttcgtagccgattggaccatgcccgataacaggtcagacaaccaaatcgacaatgaaacgtggaccatggcattcgacggcgcactcaacagcaagggagcaggggcaggattcatcttgacatcaccttcgggagatcaattcaagcatgcaattcacctcaacttcagggcaaccaataacacagccgaatatgaaggactactcgcggggataagagttgcagctgcgctcgtagtcaggaagctggagaaaaggttcgatgggatcgaggtccgacatgtataccgcaaagacaacatcgaaccagatgatctagcacgacgtgcgtccaggcgagagccactcgaacctggcacctttctggacgtcctaaccaggccatcagtgaaagaggcaagcggcgaagatagcccggtcgcccccgacatcagctcgggggctatagaggcagagcgcaccgttgccgatatcgagaccacggacgactggcgcaccccactcattaaattcataggcagcgaagagttgcccgaggacgacgcagaagtcgagaaaatatcccgtaaagcaaaagtctactgtatgatcggcaatgatctatacaagaaggcaccaaacggggtactcctaaaatgcatcttgtccgacgacggcagacacctcctcctcgacatacatgaagagatctgtgggtcacatgccgccggtcggacattagtcggaaaagctttccaacaagggtttttctggccaaacgccctcaaagacgcctgcgacatggttcaacagtgtgaagcctgtcaattccacagtaaacacacaaagctgccagcgcaagcactccagactatccctttcacttggccgttatcgtgctgggggctagatatactcaggccattcccacgaggacagggcggctacaggttcctattcgtggcgatcgacaaattcaccaagtggattgaagcgacacccacgggggaaatcaaggccgacaacgccatcaaattcatcaaagggatattctgcaaattcggattgccccaccagcaattgacaagtcgagagggcaacggcataatactacaaggaatcaagacccgcgtctacgacaggctcatgtcacacgacaagaattgggtcgaggaacttccatcagtactatgggccgtgcgtaccacaccgacaacgtccaacaaggagacacccttcttcctcgtgtacggctcagaggcgatgctccccaccgagctacgacatcaaagtacacgagtacagaagtattccgatgaggatcaggaagagcagcgatacgacgatgtgaatctactcgaggaacatcgcgaacgagttgccgttcgagcagccagctaccaacaagcccttcgccgttaccacgagaagcgcatccgagcacgcatgctttcgatcggcgactacgtcctccgacgggttcaaagccaagcagggcgcaacaagctctcacccaaatgggaaggaccgtacacgatcacgcaagttttgcggccaggtcaaaggtccaagagccttatcttccgagaagaattctccgatgacaaggctggaggctag

SEQ ID NO: 22968 - DNA, 2845 bp, Oryza sativa
  Clone ID: TF_OsC1528_1606
tcagagccacactttcctgtaggctaaacatctcttgttccaccccttcccaagctcgattgagctctcagccagcagcagcagcagcaccggttgctcctccttcccctttcccttccccctctccacgcagcagccccccggaggtgcgccatgtccgacgctcggtctcggcgttcggtcgcctcgagcactcggcgtcagcaggacgccgagctcgccgcagcagaagagcgcaggtgagcaacagctcataccgctgcagcagcagcgagggcggccagactggcggcagcggagttggcagcagccagggcggaggcggaggcggcggaagatgcggcacgtgcggcggaggtagaggttgagaccttgcgcagcagcatcaacggctccatcgccggcgacatcaccgccgacagggagcttgaggagctggcaagaggaagggcacgggagcgagcagagcggtgggcagcagcccacctccacggcggcgacggcggcccaagggaccgcgcgcccgccgacgggaacccagacgggcgcgggcttgctggcgggcgcgggcttgctggcggcagcccggagcccgcacgcggccctcgcaggcagcacggctctctctcccctgaccggcgtcatggtcaccacggcgtccagatggtggtcagggactttggtcccggcggtgggtggcctaccctcaccaaaaccaactacatcgagtgggccgcggtgatgagggtgaggctccaggtgcggcacatgtgggatgcagtccggtacggtgacgtcgactacgacgaggatcggcgggcactggatgccctcatcgctgcagtcccgcccgagatgcagttctcgctttcccagaagcggactgccaaggaggcctaggacgccatcgctgcggcacgcatcggcagcgaccgcgcccgcaagtccacactgcaggcactccgcaaggagtgggagaacctggctttcaagccaggtgaggatgttgatgacttgcagaaaatggtgcagtacggcgacgacacctacgatgaggagagagctgtcgagaagctcttccgctgcgtccctgagaagtacaggcagatcgctcgctcgatcgaatctctgctggacctctccacgatgtcgatcgaggaggcgttaggtcgcctcaaggtcgtcgatggtgatgagccacagcctctctcggggcccatcaccatcggcgggaagctccatctcactcaggagcagtgggaggcctctcagggtgatgggaggaagggggagtcatcttccccgacaggcggccataagccgcgcaaggcgcggggaggtgtccagctatggtgggcgcgaagacgtgccgagggtggcgcccgcagaggcgcccagggcgttgccaccggcaaccacaagccggcacgagacgacgcctgccgcaactgtgacaagcttggccattgggccaaagactgtcgacaaccacgacgtggccaggcccacgtcgcacgggtggaggaagagccggctctgctcctggctcacgcaagcatcgagctacctccagcggcaccggccgcagcagctttcctccaccttgatgagccgaaggtactcgtctccctctgcaacggctccagcaacgacaaagctgatgggtggtacctcgacaccggcgccacccatcacatgaccggccgacgggagttcttcaccgagttcgactccagcgtccgaggctccatcaagttcggggacgcctccggcgtggagatcaagggtgttggcttcgtcaccttcaccgccaagtccggtgagcacaggctgctcacccgagtctactacatccccgcgttgaggaattctatcatcagcgtgggacaactggatgagaacggctcacgcgtgttggtcgaggatggactcatgaggatttgggatcgccgtcgtcgccttcttgccaaggtaaccagaggcactaatcgactctacatcctcagcgcgcaggttgcacaaccagtttgcctcgccgctcgtcgggacgacgaggcgtggcagtggcacgagcgcttcgggcacctccacttcgaggccctgaagcagctcagtgccaaggagatggtgtgaggcatgctgtgccttgaccacgtggagcagctctgcgacgtctgcgtggtgacgaagcagcggcggctcccctttccccagcagacgagcttccgagccaacgagcggctcgagctcgtgcacggggacttgtgtggcccagtgacaccggccacaccaggaggacgacgttacttcctgctgctcgtcgacgacctctcccgctacatgtgggtgatggtcctcggcagcaagggagaggctacggacgccatcaggcatgagcaggctgctgcagaggcggagtgcggccgcaagctgtgcgtgctgcgcaccgacaacggcggcgaattcacagcggctgaattcgcgtcgtactgcgctgatgagggcattcagcgccactacaccacgccgtacagcccgcagtagaacggcgtcgtcgaacggcgcaaccagacagttatggggatggctcgggccctcctcaagcagagggggatgccggtcatcttctggggggaggcggtggtgacggccgcctacatcctcaaccgctcgcctaccaaggccctcgatggcaggacaccgtacgaggcttggcatgggcgcaagccggcggtctcccacctgcgggtcttcggctgcctcgcgttcgccaaggagcttggccacatcggcaatggtcagtatagatatagacattcgttctgttttgcatatgctatgaaag

SEQ ID NO: 22969 - DNA, 2855 bp, Oryza sativa
  Clone ID: TF_OsC359_8244
acttttccccctttgttccaatcttgatgaaatagactggtgatgacaattgtcacgtcctgataaattcatcccgaaataaaattcattttctatctctccccgccgccctcctctctctcccacgctgccggccgcctccagccgcctgtgccgcctcgaccgtgcgccggccggccgcgccgtcgcctcctccagcgtcgccgctaccccctccaccccggcctgccctccgtttcccgcggagacccccggagctacgtttccgccgtcgtccagtggcgtcgcccaccacttctccgtctccggccggctgctgttcgtcgccggtacgccgaccgacgtcgccgtctcctccgttgacgtcgcagcgtcgccctccaccccggcctgccctcggtttcaccggaacgtcgccgcgaacatctccgtccgcctcgccggagttgtttggccgcccgtccctcctcgcccgtgcaccggtcggccacccctccgcggtccatcatcgtcgtctccgatcgttctcgtcgtcgacgtcccatcggtcgcccggctcgtcgtctcgcggcgccgcctccgtcgtcggcaccgcagcggcgtggtcctcgccgtcctcgtccccgtgcagccgctgccggctgtcctcgtcgcctcctcgccggtcccggtcgtcgtcgtcgtcgtcgtcctctcgtcgttcccggtcgtcgtggcgttcgtccctccgtcgagccgttctcgtccgtcgtccgcgttcgtcaagcgagccgccgcagccccatcatcgtcttcgtcctcggctccgcgtcgtcaagtctcgtgccggccgtgtctcgcccgtgtatcggtgtcggcagtcgttcgcttgtgcgtgtggtgaccgtgttagtgtgtccgctcggtagccgcgtggtttccacgtgtgcaacccgtgtggtgtctagtggagtccgtttgtcggccactcgcctcggttgacacacggggtccgcttccgtcgacccgtggaccgtctctgtgtacccggttttctttttatgtattgttattgcttctttataggcttgtagctttgcttgtgtgcttcgcgtagctttcgtcgttccggaggttcccgaagcgtggtttgcggtcgtcgccgaaggttcggaaggccgttctctctctcttcctctttcaaaacccctaaaacctgttttcggtggggtttgggtgcatgccagttgtgggaagtagcaccccggccactataaggattaagctcgggcctctgttgcaaagcactaccgtacttccacatgtctagtgggtaaggcttagtttgtggctcagtctggttataaacaaaagtacacggattggagatggatgaagtcgggggtcgatggacattctctaggacaaatgaaggctacacgagctgcggcccggtagtcgagatgtcatggcacagggttggtgccctgctgctgggggctcagtcctgcctgcctgtcccggaggttccggccgtaggtgggattgggtcggtactcttgtctatggctaggatgggttggaaactatgtcacgtcttccgtctgtataccgtggtgatgtttaacagagaaaaaggaaagaatgtcagcgggcatgcctccagtaactcaagttttcaactcaatccaccactggcctcaagagagttaacaagggcacacccttggtccattccaagcatgctgcttagttcacagctaccattggttggaagtcaagaccaaaatcaatatgtgtttgatcgagcatttgccacccaggtcaatgagcttccaatgccagaagagcatgtccccttttgtcatgattgtagagaacaaggacactatgccttgaattgtccatgggtatatgtcaaagaagccccttcctttggtttagcagggcagacatcgctaaaccagcctcctcgcaccaagtcaagcttgcagcctagtgtgcaaagtgaagagcccaatgaagacaatccattgaatcctagaaaatgctttcctcctagcctttcgcaccacgtggggtcacgtactaagcaagccaaaggcaagaagagtaagaatcagaagagaaaagcaccgatgcgaactgaagaagaagtacgtaagatgactattaccagcaccgaatggcctccagcagggataactattcctagacgtcaaagaggaaataccttccgaggtgcacgacagttgacccagcacctcctaagccatggtggcagagtatctgatagtgaagggtcagatcaagtctcctcggatgttgaagatgagtctccccgacatctcggcgaggaagagatggaatcaaaggcatgcacccgttgtggagaaattggacacgttgctagcaggtgtctcacactctgccctcattgtgaagaagaccatccaccaggtgaatgtcccacccgcaaggtcacatgttttctgtgcgaaggtaccaaccatgtgcccaaggattgccaactcagtgtgttgttgaccaagaccgcagaaatccaacgaacaaccctacgattgtctcatcagctagtcagctccaacagcaacctcgacgatatcatccacagcaccaatgctcctcctgctgcacctgactctgcaataaatcatagcaataataccttcagcaccaaccattctctacaccgacagcctcagcaaagaattgtcatcgatagaagaagttgtgtctctccccgacctactccaggccgagcaaagggcaatcaacctcaggagggcgataccaagcagaagaccgttatccgcttcaaccagcaatcagaaggaagcttcccctgtgaatga

SEQ ID NO: 22970 - DNA, 1660 bp, Oryza sativa
  Clone ID: TF_OsC359_7480
atggatgaagtcgggggtcgatggacattctccagggcaaatgaaggctacacgagctgcggcccggtagtcgagatgtcatggcagagggttggtgccctgctgctaggggctcagtctcgcctgcctgtcccgggggttccggccgtaggcgggattgggtcgatgtacacctctgatcagagtataatctattcgaatagccgcgccctcggttatgggcaagccgagcaatgtacccaagtcagtgtttcaattcttaaaatttgctcaacaactaaaatgtggagtggttggcctgggttggcttgggacgagctgggacccagggtcgggttgccagttcggtctgaatcatcgtaggccttgggttaaggcaggccttaagtgcctttgtaataatatgtttaacagagaaaaaggaaagaatgtcagcgggtatgcctcaagtaactcaagttttcaactcaatccaccactggcctcaagagagttaaccagggcacacccttggtccattccaagcatgctgcttagttcacagctaccattggttggaagtcaagaccaaaatcaatatgtgtttgatcgagcatttgccacccaggtcaatgagcttccaatgccagaagaggatgtccccttttgtcatgattgcagagagcaaggacactatgccctgaattgtccatgggtatatgtcaaagaagccccttcccttggtttagcagggcagacatcgctaaaccagcctcctcacaccaagtcaagcttgcagcctagtgtgcaaagtagagagctcaacggagagaatccattgaatcccgggaaatgctttcctcctagcctctcgtaccacgtggggtcacatactaagcaagccaaaggcaagaagagtaagaatcagaagagaaaagcaccgatgcgaactgaagcagaagtacgtaagatgactattaccagcaccgaatggcctccagcagggataactattcctagacgtcaaagaggaaatactttccgaggtgcacaacagttgacccagcacctcctaagccatgatggcagagtatctgatagtgaagggtcagatcaagtctcctcggattatgaagatgagtctccccgacatctcggcgaggaagagatggaatcaaaggcatgcacccgttgcggggaaattggacacgttgctagcatgtgtctcacactctgcactcattgtgaagaagaccatccaccaggggagtgtctcacccgcaaggtcacatgttttctgtgcgaaggtgcaaaccatgtgcccaaggattgccaactcagtgtgttgttgaccaagaccgtagaaatccaacgaacaaccctacgattgtctcatcagctagtcagctccaacagcaacatcgacgatatcatccccagcaccaatgctcctcctgctgcacctgactttgcaataaatcatagcgataataccttcaacaccaaccattctctgcaccgacagcctcagcaaagaattgtcgtcgatgaaagaagttgtgtctctccccgacctactccaggccaagcaaagggcaatcaacctccggagggcgataccgagcagaagaccgttattcgcctcaaccagcaatcagaaggaaacttctccggtgaataa

SEQ ID NO: 22971 - DNA, 4902 bp, Oryza sativa; identical to SEQ ID NO: 13771
  Clone ID: TF_OsC359_7526

SEQ ID NO: 22972 - DNA, 8958 bp, Oryza sativa
  Clone ID: TF_OsC359_8132
atgttcgaagctggaggaggaaactacatccatgcatgtcaggaggtggcaaggattgccataggagagctccgcgatcgctacagtgatcagttggccgacactgagtatcgctaccatcctcgccaaccccagggaagtgaccgtggcagctaccttgagactgagaggattgagaatgatgctaccacaaggcatttggttgagatgctgtgggctatggatgagacccgcgcggagactgtgttagcagctcaagatcgtgaagaccggaatcgtggtaagatttgcaagctagaggacaaggtggatcgtttggagaaggaactagccgcgttgaagggagaagcaccaccgcagaaggccaggattcgtcttacggcaaggaagagagctctatttgtccctcgctaccaaatggcgccaaaggtccgtgtggcggagaaagaagttaccctagccctagcggatcctccggtcgtcaatatggtgctcactcgcagcaacgggaatagccccaacatcaacaataacaacaacaacaatggagagaatcccacacttgcccaagtcctggctcaacaggcacagcttatgaacatgatgatgcagcaactccagaaccagcagaaccagggaaataaccatgcacctccccagaacaagttagcagaatttcttcgtgtgaggccgcccactttctctagcaccactagtcctgttgaacctggtgattggctgcatgccatagagaagaagttggatttgcttcagtgcactgatcaggagaaggtctcatttgcatcacaccaactgcatggccctgcctctgagtggtgggaccacttccgccttaacaggactactgttgaacctatcacttggcttgaattcaccgctgctttccggaagatgcatataccatcgggagtgttgtctctcaagaagaaggaattcaggtcgctcactcaggggtctcgctctgttactgagtatctgcacgagttcaatcgtctggctcgttatgctccggaagatgtgcgcactgataaacagcgccaggagaggttcttggaaggacttaatgatgagctttcttacccactcatgactggggattatcatgatttccagaagttagtggataaggctattcgtcaggaggacaatcagaggccgcatcttactttaggaccccagtccctgccacagggaggttcttcgtctgttgttcgtccgcagcgtcagttcttcaacaacaatgctggcaacaacatccgcaatcaagctccacgccctgttgcagctccaacacagcaacagcctgccaagagggagcaaggcagcaagcccggggtgtgcttcaactgtggagacccaggacattactctgacaagtgtccgaagccccgacgcgtgaaggttgtccctgcccagagcaactctaccgcaccagcattaaaggcccgtgtcaatcatgttgccgctgcagaagctcaaggtgctccagatgtgattttggaatccaaagaccttgatgtcatcctagggatggactggttagccagatataaaggtgtgatagactgtgccaacagaaaagtaactctcaccagcaatgatggtcaagttgtaattgttcatgcattgtcttctgagtctttaaggtcaagtctgaaccaaatgactttggaagagattcctatagtccgggagtatcccgatgtgttcccagacgatttacctggtatgccacctaaaagggatatagagttcagaatagatttagtactaggaacaattccgatccataagagaccttatagaatggcagccaatgagttggcagaagtcaagaggcaagtagacgatttgcttcagaaaggatacatcagaccaagttcatctccatggggagctccggttatttttgtggaaaagaaagatcatacccagaggatgtgtgtggactatcgtgcactaaatgacgtgactatcaagaataagtacccgctgcccagaattgatgatttgtttgatcagcttaaaggtgccaccgttttctccaagatagatcttcgatcagggtatcaccagttgagaatcaaagaggaagatatacctaagacagcttttaccactaggtatgggttgtttgaatgtactgttatatcttttggacttaccaatgcccccgctttcttcatgaacttgatgaataaggtgtttatggaatacctagacaagtgcgtggtggtctttattgatgacattcttatctactcccgaaccaaagaagagcatgaagaacatcttcgccttgcactaaagaagctacgagaacatcaactgtatgccaagtttagcaagtgtgaattttggttgtctgaagtaaagttccttggtcacgtcatctcagcaggaggagttgctgtcgatcctagtaatgtggaatccgtaaccaactggaaacaaccaaagacagtttcagagattcgcagtttcctaggcctcgcaggatattatcggaggtttatagagaatttttccaagattgctaagcccatgacacggttacttcaaaaggacgtaaagtacaagtggtcagaagaatatgagcagagttttcaagagttgaagaatcgcttaatattagctcctattttgattttacctgatccaaagaagagtttccaagtgtattgcgatgcatccaaaattgggttaggttgtgttctgatgcaagatgggaaggtggttgcctatgcatctcgtcagttacgtccgcatgagaagaactaccctactcatgatcttgagttaactgcagtggttcatgcgttgaaaatttggcgtcactatcttttcggtactcgtacagaggtgtacaccgatcacaagagtttaaagtatatctttactcagccagatctgaacatgagacaacggagatggttggaattaattaaggattatgatatgggaattcattatcacccgggaaaggctaatgttgtagcagatgctcttagcaggaaaggctattgcaatgctacggaaggacgactgccattggagttatgcaaggaatttgaaagattaaatttgggaattgtcagtagaggtttcgttgcagccttagaagcaaagcccactctaatcgatcaggttagagaagcccaaattaatgatcctgatattcaagaaatcaagaagaatatgagaagaggaaaagctatcggtttcttggaagatgagcaaggaactgtatggttgggcgagagaatctgcgtccccgacaacaaagatttaaaagatgcaattctgagagaagctcatgatactttatactccattcaccctggtagtaccaagatgtaccaggatctcaaggaaagattttggtgggcaagtatgaagcgtgaaatcgcagaatacgtagcagtatgtgatgtttgtcagcgagtcaaggcagaacatcagaaacccgcaggtttgctgcagcctttgaagattcctgaatggaagtgggaggaaatcgacggacaaaccgaaagggtaaataagattttggaagacatgttgagagcttgtgctttagacttcggtggaagttgggataagaatctaccttatgcggaattctcgtacaacaacagttatcaagctagtcttcagatggctccttacgaagcactgtatggtcggaagtgccgcactccgcttttgtgggatcaaacgggagaacgtcaggttttcgggatggatatcctgagggaagcagaagaaaaggtgaaaatcattcaagaaagattgcgtgtggcccagtctcgtcataagagttatgccgacaatcgtcgtagagatctaagttttgaagaaggagatcatgtgtaccttcgtgtcacgcctcttcgaggagttcatcgttttcacaccaaaggaaaattggcaccgcgttttgtgggaccttataagattgtcagtagaagaggagaggttgcttatcagttggagttacctcaatctttggcaggagtccataatgtgttccatgtgtcgcaattgaaaaagtgtttaagggtacctaccgaagaagctaatcttgaatagatagaagtccaagaggatttaacctatgttgagaacccaatccgtatcttggaaatagatgagagaagacccaggaatcgagttatccatttttgcaaagtccaatggagtaatctctcggaagaagaatcaacttgggaacgagaaggggaattgaaccgtggattcgagttcgattcggatcgatctctctcctccgaaccctaaaccttcctttccgtcgccggtcaccgtgggccttcgccgccgcctccttgcccctataaaaggacccccgagcttccctctacccgtcgccacccttgccttcgtctctcgtcgtccgtagcgccctagccccgtgagacctcgtgccgctgtcgtcgcagccgctccagccgtgtgccgccgtcgctccagtcgtcgccatcgctcggggaggtcgccatcgtggtcgccgtcgcgtcgccgccctcgtccacccctccgtcgttgctgtagatcgccggagcaccgccgtcgtcatcaagccgatcttctccgccgccttttcctcgacgccgtcgccgtccgttgatcttccgccgccgttttggtcaccggtgagttcgccgcgtcgctctctacgtgctggtgccctccgttcgtgccgtcgcgccgtcgttcgccggcgagcttgcgccgtccgagccgccgccggtggtgacgtcaccgctgacgtcatcgtcgtcgtccatccgtgagccgcggtggatccgatggatcttggccgtccgttttggatggatcaatctcggccgttcgtttccgtgagccgcttttgtataatatggttcattgcggagcaccagactgagaagtggcggagataagcccacgggggtcgctggggagtccatgcctctggtttttgagggggtgattatgatccaggaatggtgcactgtgtggtacacctctggccagagtaaaactattcgaatagccatgcccgcggttatgggcgagttgagcaataccgcaacctcgacgacttcgactaagactttgaagataactacacgcctctctacttcggcatcttcatggctgaaaacgagacggaagaacagcgtaaagcccgagaagcagaagaacaacgcgtgcaacaggaagccgaacgaccctgactggaagaggagcgccaagcacaagagcgagaacggctgcagcgtgagcaacaggagtgcgaacgggctgcaaaagaggctgaggaccggcgacagcacgccttggatgtcgggcgacgagcacgagaacttatcgggcagcaagacgttgagggaacggctgtttttcgcacccctcaacagaacgcggttgcagcgatcaccctcctcgacaccctcctcaaggaagacgcgccccgtcgatcttcgcgatactatcaaccagcgctgcgcggcaagagaatacgcttcccaccattcactagatcgctacgacaacgacgtggatggagttgctgccttcacaagcaaattgcgtcgagtggattggccagccggcttcaagccgactggaatcgagaagtatgacggcaccactaacccggagtcttggctcaccatctacggtctcgctattcgcgcagcaggacgagatagcaaagtcatggcaaactatttgcctgtggccctagcggactctgcccggtcctggcttcacggcttaccccgtggcacaatcggatcttgggcagaacttcgcgaccacttcatcgccaacttccagggtacctttgaatgccctgcctcccaggacggtcaagcagaagatgtcattaccgcgtccaagcagtcgggcaccacttggaagccgaagaaagatacgccaactacaggggggagtggaagtaccaatcacaaggatcgcaagcgtaaacccaaggaacttgtggcaactactacaccatcctcccgacaacgttcacgggtcaacacttctgacaagatcatgaactcccaatgtccgcatcatccaaactccaatcacgcggccaaagattgcttcgtctataaacagtttgcagaacaatacgccaagaatgcacgcaaggcctctgacggagatcaaagcacgttaaagaaggatgatgaagttgacgccccgactggttttcaagaccatcgcaaggaactcaaccacatctttggcggacccctgtcctatgaatccaagagaaagcaaaagctaaccgaacgggagatcaacgctattcagcccgacacgccccaatatcttcggtggtcagagacaacaattatgtttgaccgcttggatcatccttaccgtgtggtccacccagggcggtaccccctggtactagacccagtggttcgcaacgtcaagcttcgcagatccctcatcgatggtggcagtgcactcaacatccttttcgtcaagactctggacgacatgcagatccctcgcatggaattaaagccgagtaatgcgccctttcacggagtcatctcagggctatctgctacaccactcagccagatcactcttcccattactttcggcacttgggagaacttccacacagagaacatttgttttgaggacagcgtatcacgccatactcggacgcccgatatgcctggtcctcaaggagtcatatccctgcggagtgacatcaagcaagccgtcacgtgtgacaaggaaagctgcgagatggcccagttccgcgagatcacgctcgaccgagaagaaatccgactggctgcgtccacagcaagcgaaggagaagtgcctgcgaccaagatgccaaagagcggggcaagcgacaccaagaccaagaagattcctctagatccttctgatcctactaagactgctgataggaaggatgcgatcaaggtagaattgaccaagctgttagcagcgggcttcatcaaggaagtccttcatcccgactggctggccaacccagtcctggttcagaagaagacggggcaatggcgcatgtgtgttgattacaccgacctcaacaagtcttgtcccaaagatccttttgggttacctcgcattgaccaggtagttgactcaacggccggctatcggccgcaacgtgaagcttatgtggatgacatagtcgtcaagacaaagcagaaggatgatttgattgtggatctagaagagacctttgagagcatccgcgctttcaggatgaaattaaaccctgaaaagtgcatcttcggagtaccgtcagggaagctgcttggatttatggtgtcccatagaggcatacaagccaacccggagaaaatcaatgccatcctcaaaatgaaactgccgagctcccagaaagacgtccaaaagttaactggctgcatggcggcgctcagccgtggggacccacgaaaagcctttgaagacttcaaaaaacttctcactactccaccagtcttagcttcaccacatccgcaagagcaactgttgttatacgtgtcggcaacttcccaggttgtaagcacagtcctggttgttgaacgtgaagaagaaggccatgttcaaaaagtccaacgaccaatctacttcgttagcgagattttggctgactccaagacaagataccctcaggttcaaaagctattatatggtgttttagttaccgtaaggaaattatctcactacttccaagtcatgaaagagtggtcctgccttgatgataacataaccgcttaccggcaagaggtacgcaagttggaagacaaattcgatagacttgagctcacccatgttcttcgacacaataatgaggcagccgatagactggctaattttggttcaaaacgagaagcagctccttccgacgtgttttgtgaacatctctacgagccaaccgtaccaaggaaagaaacaatcgaggccatggacactcaagacataagcatgattgaagccgactggagagagcccctcataagatttttgacaaaacaagaactccctcaagataaagatgaagccgagcggatctccaggcgcagcagactttatgtcatacatgagaccgagctgtacaaaaaaagtccatcaggaatcctacaacgctgtatgtctttggaggagggaagacaattggtaaaggatatacactcaggaatctgcgacaatcacgctgccacacgaaccatcgttggcaaggcttaccagcaaggttttttctggcccacagccgtgtctgacgctgacaaaattgtgcgaacatgtgagggttgtcaatttttcgcccgacaaactcatctaccggctcaggagttgcaaaccatcccgttgtcttggccgttcgcggtttgggggctcgacatggtcggcccatttaaaaaggcagtaggtggttatactcatctctttgtagctgttgacaagttttccaagtggattgaagccaaacaagttataacaatcgcggcagacaaggctagagatttcttcatcaacattgtgcaccggtttggggtacccaatcggatcatcactgataacggcactcaattcacaggcagagtatttaaagatttatgtgaggactttggcatcaaaatttgttatgcctccgtagcgcatcccatgagtaatggacaagttgaacgcgccaatggtatggtacttcaaggaataaaagcacgagtttttgatcgactgcgtccctatgctggcaaatgcgtagaacagttgccatctgtactttggtccctgcgcaccactccgagtcgggctacgggccagtcgccgtttttcctagtctatggagtggaagcgatgttgccaagtgaggtggaatttgaatcgctacggagaagaccgagtagatga

SEQ ID NO: 22973 - DNA, 2547 bp, Oryza sativa
  Clone ID: TF_OsC359_8240
atgccgcgctacaagcctgagtacttgtttggtgttgagggatttgtccaggagttgcgtacgatgtcctttgccataggatttgggactgcccctttgtatgcccagattcctcatgatcgtcacgaagagaagtgccgagtcaaagtcaccttgaacagtaatagtgaagatatcccatcagtgatgttcgaagctggaggaggaaactacatccatgcatgtcaggaggtggcaaggatcgccataggagagctccgcgatcgctacagtgatcagttggccgacactgagtatcgctaccatcctcgccaaccccagggaagtgaccgtggcggctaccttgagactgaggagattgagaatgatgctaccacaaggcatttggttgagatgctgtgggctatggatgaaacccgcgcggaggttgtgctagcagctcaagatcgtgaagaccggaatcgtggtaagatttgcaggctagaggacaaggtggatcgtttggaaaaggaactagccgcgttgaagggagaagcaccaccgcagaaggccaggattcgtcttaccgcaaggaagagagctctatttgtccctcgctaccaattggcgccaaaggtccgtgtggtggagaaagaagttaccccagccctagcggatcctccggtcgtcaatcacactaatcctggtgaagctggtgattggctgcatgccatagagaagaagttggatttgcttcagtgcattgatcaggagaaggtctcatttgcatcacaccagctgcatggccctgcctctgagtggtgggatcacttccgccttaacagaactactgctgaacctatcacttggcttgaattcaccgctgcgttccggaagacgcatataccatcgggagtggtgtctctcaagaagaaggaattcaggtcgctcacccagggatctcgcacggtcaccgagtatctgcacgagttcaatcgtctggctcgttatgctccggaagatgtgcgcactgatgaagagcgccaggagaggttcttggaaggacttaatgatgagctttcttacccactcatgactggggattatcatgatttccagaagttagtggataaggctattcgccaggaggacaagtacaaccgcatggagcagaagaaacgccggattgctcacttcaaggcacaacaggggaatagtcagaggccgcgtcttactttaggaccccagtccatgccacagggaggttcttcgtctgttgttcgtccgcagcatcagttcttcaacaacaatgctggcaacaacatccgcaatcaagctccacgccctgttgcagctccaacacagcaacagcctgccaagagggagcaaggcagcaagcccggggtgtgcttcaactgtggagacccaggacattactctgacaagtgtccgaagccccgacgcgtgaaggttgtccctgcccagaacaactctaccgcaccagcatcaaaggcccgtgtcaatcatgttgctgctgcagaagctcaaggtgctccagatgtgattttgggtacgttccttgtcaactcagttcctgcaacagtgcttttcgattctggtgctacacattcatttttatctatgagttttgcgggaaatcatgggatggaagtagaagatcttagacgtcctttgatggttagtaccccaagtaataattgtactctattatcaatttgttattgtgtgcctcggctgattcctggacgagggttcacacacatgtaagcgtttggaattttggatagaaattccgggcgtgacatgccgcccgctctcggagaccgcctctcgtcgccggacctccacggcgcctccccatcccatccgacgccacaaacgggatccctaagtcctagagatgctcccacccctttgaatcgaactcccgttgccccggtgagatttccccttctctccgccggcgatggccgccgccgcaatccaccaccgtcggctcctttcgctccgattcctctcgctgccacgctcccggggatccccttgacctccccctggctgccccaaggccgccggccttctcctttgtctccgcgtcgtgtcgccgtttccgccgccgcataacaacgccgcgcgtgcatcgccggtgaccatcgggtcccgcgtcaccgcgtgcgcatcacggtcgcgtaccgtttcggctaggcccgagtttgcgcccccttgtcccttcccttgcgcgaccacatccccgatccgacaagcttggtcaccgccgccagccactcctctagctgccggcggtagccgctcgctccggttagccaccgctcgccggaacgcctcacgcgttgtcggccgtctgatcccgggcgcctcctcctcctcctcctcccctttcacccctgcccgcgtggccgaccacgtggcagccacctcagccctgggcccgcttgaccggtgcgccgcgcccgaaccgcgcgcatccgaaaccctagcgcccgcccccgcgtgcgccctccccaccgtgaacccaaccaccgccat

SEQ ID NO: 22974 - DNA, 1323 bp, Oryza sativa
  Clone ID: TF_OsC359_6056
atggatgaagtcgggggtcgatggacattctccagggcaaatgaaggctacacgagctgcggcccgatgtttaacagagaaaaaggaaagaatgtcagcgggtatgcctcaagtaacccaagttttcaactcaatccaccactggcctcaagagagttaaccagggcatacccttggtccattccaagcatgctgcttagttcacagctaccattagttggaagtcaagaccaaaatcagtatgtgtttgatcgagcatttgccacccaggtcaatgagcttccaatgctagaagaggatgtccccttttgtcacgattgtagagagcaaggacactatgccctgaattgtccatgggtatatgccaaagaagccccttcctttggtttagcagggcagacatcgctaaaccagcctcctcgcaccaagtcaagcttgcagcctagtgtacaaaggagagagcctaatggagagaatccattgaatcccgggaattgctttcctcctagcccttcgtaccacgtggggtcacgtgctaagcaagccaaaggcaagaagagtaagaatcagaagagaaaagcaccgatgcgaactgaagaagaagtacgtaagatgactattaccagcaccgaatggcctccagcagggataactattcctagacgtcaaagaggaaataccttccgaggtgcacgacagttgacccagcacctcctaagccatggtggcagagtatctgatagtgaagggtcagatcaagtctcctcggattatgaagatgagtctctccgacatctcggcgaggaagagatggaatcaaaagcatgcccccgttgtggagaaattggacacgttgctagcctgtgtttcacactctgcccttattgtgaggaagaccatccaccaggtaaatgtcccacccgcaaggtcacatgttttctgtgcgaaggtaccaaccatgtgcccaaggattgccaactcagtgtgttgttgaccaagaccgcagaaatccaacgaacaaccctacgattgtctcatcagctagtcagctccaacatcaacatcgacgatatcatccccagcaccaatgctcctcctgctgcacctgactctgcagtaaatcatagcaataataccttcaacaccaaccattctctgcaccgacggcctcagcaaagaattgtcgtcgatggaagaagttgtgtctctccccgacctactccaggccgagcgaagggcaatcaatctcaggagtgcgataccaagcagaagaccgttattcgcctcaatcagcaatcagaaggaaacttctcttgtgaatga

SEQ ID NO: 22975 - DNA, 7581 bp, Oryza sativa
  unsure (1)..(7581): unsure at all n locations
  Clone ID: TF_OsC1517_1374
ttagagaatgtccttgtttggtccccaatcaacttcttcaatcatccatgcatttcttatgctcggtctcttttctttcgcccaagcaagtaactcttttgggtaccgcaagccaataattgaggaatactttaaatatcttagaattcttttcacggccactaagtgacactccttgggagcggcttgaaaccgtgcacacttgcaaacattaaacatgatatccgacctagatgcggtaaggtaaagcaagctaccaatcatagaacgataaagctttaaatctatcggtttacctccctcatcaaggtcgcgatgctcgttggttgccattggtgtcttgatgggcttcgcatcctccaagccaaacctcttgagttgattcttgatgtacttggtttggctcatgaacgtcccatccttgagttgcttgatatgaagttcaaggaagaagctcaactttccaatcatggacatctcaaattccctagacatcatatcaccaccaaattccttacaaaatacctcattagtagaaccgaatatgatatcatcaacataaatttgacaaacaaagaagtcatcaccaatgatatttgtgaaaagtgtggtgtcaacttttccagttttgaaatcatggttaggatttttaggatcttcaaaaccgggaggttgttcaacaaagacaagttcggcaatttcaccatttagaaaagcacttttcacatctatttgaaatagttctatatcaaagcatgatgcaaatgcaagaatgatgcgaatagcctcaacttgtgtgaaaccttgtgccaccaagcttatcttgtttctcaccaccaacccgttctcatcttgtttgctcctaaagacccactttgtccctatggcattgtgatctctaggtctttcaaccaaagtccacaccttgtttcttacaaagttgctgagctcttcatgcatagcattaatccaatctggatcataaagagcttcatctatatgttttggctcaaaacaaaaaacaaacgagtaatgctcacaaatcgaaacaacatgagatcgtgtttggacacccttactaatgtcacccaaaacttggtcaattgggtgattcttggaaagagcggtgtgtatccttgggggcataggtggatcttgtgccttctcctcttccacttccacttgagcttgacttggcgcagcggaagtagatggctcaccttgagtggaggtggatggcttgtcttccacttcaataggcttgacatctccaatagacatattcttcatagctctcatcaagccttcatcacctacatcatccaaattctcgtgcccctcttgggaaccattagtttcatcaaattgaacatcaacagtttcttccacaatacctttgttcttattgtagacccggtatgccttgctatttgaggcataacttgccatctcaaccaatgtatgatttttcctctccactacaccattttgttgaggtgagtaggtagcggaaagctcatgtttgataccaagatcatcacaatagtccttgatattggtatttttatactcggaaccattgtcacttctaattttcacaagagtgcaactaaattcattttgggccctttttgcaaactttttgaaaagctcggcaacaatagactctttgataaatcctgctgtgataagcctatctacctccgcaatgacttgatcttggaattctggtcgtaggcgacgtggcggctgctttacaggccgaaattgtgggtcgatggcaagtttgtgtgttgcaacacggggatcaagacccggcatctccttatatgtccaagcaaagcaatctcggtactccatcaggaagcttcgataactctcttgttcttcggctgaaagcgcggcactaacaaatgtagggcggggatcatccatggtgcctaaattaatttccacaagatcgtcaatggtgggttgcttctcctctttgagttcatcaagcatgaagggatcttctaattctccctcttgctctgtgatcatgctagcgtaaatatagccggtggcggcggcattcgcctgttttgttgaacgttgatcccagccttttccaataaaggaattaatttggcatctaccttcatagtggtagccacttcttcttgaattgttgcgagccctgattgtgattactgtcggcgcatcgttgctgatatctagcaacttgcggccttggaccattgcaacatttctggttagcaagatttcttttgatgagggagcctgtaaatcaaccggaactctcgccacagacgtttgtgtagttggagtccgtgatgatgtccctgctttcaacaacagaggtgtgaaagtcggtgacgtaagagcagtatcnttctccactggaaccacgacaccggacattccggctcccgtatacggcttattctcatactgtgcactcatgaatgagtggtggcgagcgttatttctgcgattacgggttgaggaccctgtcgcaccagcaagtggtcctgctgtgatgagccgtcttatctctggggtaggtgtgcgtccaggcgcgattaggagatccgctgccggagttgttcgaccaagagtttgatcagaatcgtcaactggaaaatagtactttgcatcggcatgatgcgattcttgggtagtgtatggagagaggttgccgacgatcctctgttgcgtcccactaccatctaggaactttaagcattggtgtagcgtcgaaggcaccacacgatacttgtgaatccgtggtctactgtcacgccccgaactagtcccgaccggaactagcccgtgacgctccaaattaaccttagtgagtcgatccacaactacccagatcgattcgtgacccgatgatgtccggggcagtcctgttataaagtccattccaatctcctcccatttccattccgggatttgaagaggttgaagtaaacctgctggtctttggtgctctgccttcactcgttggcaaacatcgcagagtgcgacgaattcagctatttctctcctcatgctgacccaccaaaacttttctttgaggtcttgatacattttagtgctgcctgggtgaatggagtactgggtctgatgagcctcggtgagtatcagatccttcagttccttgtcgtcaggtacacacaatctttctcccaaccagattgtgccatgctcatcttcgtggaaatcccgggcttttccgacactcatgttctttttcagctctgctatttcagaatcatttgcttgagcgtaggccgtgcctccagagcggatgccctcgatgcatagggcagtgcagtaacttttccggcttaaagcgtctgccaccacattggctttacccgggtggtagtgaatactcatgtcatagtctttgattagttccaaccatcttcgttgtcggagatttaggtccggttgggtgaagatgtatttcagactcttatggtccgtatatacttcgcagcggttgccaatcagatagtgcctccagatcttcaaagcatgaaccactgctgccaattccaagtcatgagttggataattcccttcgtgtggacgcaactgccgtgaggcatacgcaaccactctgccctcttgcattaggacacatccaagtccgtgacgggatgcatcacaatagacttggaagtctttcatcgggtcgggcagaatcaaaacgggtgcggatactaatttcttcttgagctcctcgaagctcttatcgcactcggctgtccatttaaacttctcatccttcttaagcaactgagtcatgggtcgggcgattctggagaaattttcgatgaatcgacggtaataaccctgagctgtaatgacatggcccaaaaatttgacttccgtcaaccagaagtcacacttgctgaacttggcatatagctggtgctccctcaacttctcgagtaccagacggaaatgttgttcatgtttttcttcggactttgaatagataagaatgtcgtcgatgaacaccacaacaaacttgtccagaaattccatgaacactttgttcatcagattcatgaagaatgcgggtgcgttggtgagtccgaaagacataaccgtgcactcatatagcccgtaccgagtggtgaaggccgtcttcggaatatcctcttcccgaattctcaactggtggtagcctgatcgcaggtctatcttagaaaacactttagctcctttcagttgatcaaacaaatcatcgattcgcggcaaaggatatttgttcttgattgtgacctcgttgagtgcgtggtaatcaacgcacatcctcttcgtcttatcctttttctccacaaaaatgaccggagcacccaaaggtgaagtacttggtcgaatgtaccctttctgcagctgctcatcaacctgtttcttgacctctgctagttcgttggccgccatcctgtatggtctcttatagattggagcagttcccggtgccaagtcaatccggaattcaatctctctcttgggtggcatggtagtgaggtcttcggggaacacttctggatactcgcagactatgggtatatcttccaattttctcgagttcttctctacggtgtccactgggatttccgcttcaatctgattcaaagagacccctttctttggcgagactagagatttgtacaccacgntttctcccttctcgttgatcaaggtgactgtgcgattcgcacaatcgatgacccccttaaacttggtcagccaatccatcccaagaatgacatctaggtcagaatcaaaaagtactgttgcagggattgagttaacagggaacgtacccagtacgacctctggtgctgcttgtgcctcctccgcagatgcgtggttgacacgagcctggataaaccttggcccggcacgcctaggcttcgggcatttgtcagcgaagtggccaagctcgccacagttgaagcaggaccctggttttgctccagtctccttcttggcttgcgcgggcgggcctgactgtgccggtgccattggtgggcgtgaagctgcaccgcggttggactgacctccatggtggttctgactgccactggcgccctggggaaagttgctagggttgaacgggcggtgctgacgaacgatcatggtggtaggtccaccctgctgcccaggagcgaagcgcggcctctggtgacttccctgaggtgccctgaactgtgcggccttcctcttcctgtccatcttgttgcgttgatcctcctggcggattgccttgtcaaccaacctctcaaagtcagcgtagtccccggatatcagttggttggtcagctcatcatccagacccgccatgaacttctcctgcttctcggcgtcggtgcggacatcctctggtgcatatcgcgcgaggcgattgaactcgtggaggtactctgtcacagtcctgttgccctgatggagtgcccggaattccctcttcttttgtgccacgaccccgtctggcacctgcgccttccagaagctacggcagaactctgcccatgtgacttcagtacctggtgggcgggtggccatgtgattgtcccaccaagctgacgcgggaccctgaagctggtgtgtggcgaaagcgaccttctcctgatcattgcactgcaggcgattcagcttcttctctatggcatggagccagtcattcgcctccatggggttggtggtgcttgagaaggtgggtggcctgacgcgtagaaactctggcaacttggactgagggggagggggaccaaactgctggtgctgctgttcgacgtgctgcatcatcctctggtgcatctgctggtgctgctgctgcatctgctgcatcatggctgccatcatctgagtctgatgtgccataacttgggcaagggtcggattctcgggaagtggtggcggaccattgccggaatcactgctggggtgcacaccatcagcgcgttcttcgccgttgctgccctcgcctgttgcgcggctaccattcctggtgtagaccattctgattcccactaagtctcctctattttcagctccttgcagcatactcgatagaccctcagcaacaagcaaaaaaaggtatggggataagggatccccctgccttaagcctcgagaaggcttaataacctctgtcaatacaccattgaaattcaccctgtactgaacttttcttcctttcttctttttcattgtgtgtaagcactcataagctaccaaaacattatccgtgatcaacctgcccgggacaaaagcactctgctgatcacttattatttcagggagaagacactttagccggtttgctaacatcttagaaattattttatagaccacattacataagctaatgggtctaaattgagttactctgtctggtttatcaacctttggaatcatgacaacagttgtgtcattccatccatctggaattttcattgtatttattgcatcaagaacttctttaaccagatcactctccaacatatcccagaatcttttatagaaaacagcgtgcagcccatctggtcccggagctttcagatcacctatactgaacagagcatttttcacctcttcagctgtatacggtgctagtaatccaaaattcatatctcccgttacttttctctgtacatccagcaaagaagatccatctatttgtgtaacctcagccgagaagagantttggaagtacccataaactatgntactcattctgtcttcatcggtttgaaaacatccattctcatcaataagtcccttaatnttctttcttcttcttctcngngcagcaaattgttgaaagaaactggtgttacggtcaccatgttncaaccaatttgctctcgctcttggatacaatattctttccttgatcgtgattgggacaaaccgaacgaggggttnactcaaatctaagaaaaccctagctctgaggtatttaacaggattgattctcccctcatctactataactgtgaatggttgttcaccaaccttcttagcaaccctctctgctagttctctcttcttcatcaacccatcaggcaccccatgaatgcgcgtccaaactggaattttatccaacttataatcaaacacattagtgaagccatcatattctttaaggactacaggagctcctctaaagatccatggacctccttccatnactctgttccaatcaccaaggcattgaaattgtaccataaagagatttgaatccattaccttaaacgagatatcctgtgccgaagaccaggcgtttctcatagcattcaacagcgctgagtggctaaagggttttgtagtataaaccctaaaaagagcgagccagcgtacgtccttgatcagcccttccaattcctccgagaaatctaggtcagtttcctcctccccatgcatattcaacctcttcaatctctcttccagatttggttcggatcccatctctccatcacgcccagtctcctcctccgtagggcgcttggtttcatcctcggcagatgatcgagtatctgccat

SEQ ID NO: 22976 - DNA, 5223 bp, Oryza sativa
  Clone ID: TF_OsC1713_5398
aacggaatctcggccccgagattcggaggagctggtgaagaggtgcggatgggcggctttcaactcatcctccctttcccaggttgcttcctcttctgaatgatgactccactgaactcggcaaaacctgttgaccttgtttctggttcttctttcgctggtatcaagtatacgaatcggcttctccacgtatgttaggtcctcctggatatcaatgtgtttcgaatcagcctgttcttcaggtacccttaagcacttctttaattgggacacgtggaacacgtcatggataccgatcatattggatggaagttctaactgataagcaacttctccccttcgttccaagattttgtatggtcccacgaagcgtggtgccaacttgcctttcgtctgaaaacggtgtactccccggagcggagtgacacgaagatacacgtaatctcctgcctcaaaagtgagctcccttcggcggttatccgcgtagctcttctgtcgagactgggcaatcctcaacctttccctgatgattctgactttctcttctgcttccgctaatacctctgtcccgaacagttgacgctcgcctgtctgatcccagaagagaggtgtgcggcacttccggccgtataaagcttcaaacggtgccatctgtagactggcctggtagctgttgttgtacgagaattccgcatatggcaagcttttgtcccaagctccaccaaaatcgagagcgcaagctctcaacatatcttccaagatttgattgactcgctcggtctgaccatcagtttgcgggtgataggccgtgctgaaatttaaacgggtccccaattcttcctgcagcttctgccagaattttgaggtgaactgactccctcggtcagatacaatctttttgggtactccatgtaggcacatgattctcgaaaggtaaagctccgccaaccttttgcccgtatacgtggtatgtactggtatgaagtgagcaaccttagtgagtcgatccacgactacccagatcgagtcgtgacccgacgatgtccggggcagtcccgttataaagtccatcccaatctcctcccatttccattccaggatttgaagaggttggagtaaacctgctggtctttggtgctctgccttcactcgttggcaaacatcgcagagtgcgacgaattcagctatttctctcctcatgctgacccaccaaaacttttctttgaggtcttgatacattttagtgctgcctggatgaatggagtactgggtctgatgagcctcggtgagtatcagatccttcagttccttgtcgtcaggtacacacaatctttctcccaaccagattgtgccatgctcatcttcgtggaaatcccgggcttttccgaccctcatgttctttttcagctctgctatttcagaatcatttacttgagctgctctgacttgatccacgagcgtaggccgtgcctccagagcggctacaaacccgtgttcaacaattcccacgttgagatgctcaaactcctgccacaattcctcacacatgccctcgatgcatagggcagtgcagtaacttttccggcttaatgcgtctgccaccacattggctttacccgggtggtagtgaatactcatgtcatagtctttgattagttccaaccatcttcgttgtcggagatttaggtccggttgggtgaagatgtatttcagactcttatggtccgtatatacttcgcagcggttgccaatcagatagtgcctccagatcttcaaagcatgaaccactgctgccaattccaggtcatgagttggataattcccttcgtgtggacgtaactgccgcgaggcatacgcaaccactatgccctcttgcattaggacacatccaagtccgtgacgggatgcatcgcaatagacttggaagtctttcatctggtcgggcagaatcaaaactggtgcggatactaatttctttttgagctcctcaaaactcttatcgcactcagttgtccatttaaaataacctgcaagtccaagaaaacttcgaatctgcgacacggtcttcggcggggtccatttggtaactgactccacgtttgatggatcaactgccacaccctgagctgtaatgacatggcccagaaatttgacttccgtcaaccagaagtcacacttgctgaacttggcgtatagctggtgctcctttaacttctcgagtactagacggagatgttgttcatgttcttcttcggacgttgaatagataagaatgtcgtcgatgaacaccacaacaaacttgtccagaaattccattaacactttgttcatcagattcatgaagaatgcgggtgcgttggtaagtccgaacgacataaccgtgcactcatatagcccgtaccgagtggtgaaggccgtcttcggaatatcctcctcccgaattctcaactggtggtagcctgatcgcaggtctatcttagaaaacactttagctcctttcagttgatcaaacaaatcatcgattcgcggcaaaggatatttgttcttgatggtgacctcgttgagtgcgcgataatcaacgcacatcctcttcgtcttatcctttttctctacaaaaatgaccggagcaccccaaggtgaagtacttggtcgaatgtaccctttctgcagctgctcatcaacctgcttcttgacctcggctaattcgttggccgccattctgtacggtctcttgtaaattggggcggttcccggtgccaagtcaatccggaatcaatctctctcttgggtggcatggtagtgaggtcttcgaggaacacttccggatactcgcagactatgggtatatcttccaatttcatctgattcaaagagaccccttgctttggtgagactagtgatttgtacaccacggtttctcccttctcgttggtcaaggtgactgtgcgattcgcacaatcgatgacccccttaaacttggtcagccaatccatcccaagaatgacatctaggtctttggattcgagaagaatgaggttggctagaaatggtgatctttgaatttctattgttatagaagggctgaattgaaccgaagtggagctattccctggggtatgaacccgcatcggtgtgctaagttcctctcttattaacccatgcatcccaacaaacttctttgaaatgaacgaatgcgttgcaccagaatcaaaaagtactgttgcagggattgagttaatagaaaacgtacccagtacaacctctggtgctgcttgtgcctcctccgcagatgcgtggttgacacgagcctggataaaccttggcccggcacgcctaggcttcgggcatttgtcagcgaagtggccaagctcaccacagttgaagcaggaccctggttttgctccagtctccttcttggcttgcgcgggcgggcctgactgtgccggtgccattggtgggcgtggagctgcaccgcggttggactgacctccatggtggttctgactgccactggcgccctggggaaagttgctagggttgaacgtgatacgctgcctctggctactaccttgtgcctcctggaatacaatcattttccttttacggttatccatcctgttcttcttgtcttcaagtcgaattgctttgtcaaccagctgctgaaaatcaacatagtcatgggagattaacgtaactgacagttcatcctttaagccttccaagaacttctcctgcgccctaaactcacgcttcttcaaagcaacaactcctacaggtatgtgtgtcttcttgaatccttcagtaaactcttcccaagtgattggttgtcgttctgcttcatcaatgaacttctctaatgatgggaatgcaaccatacctacacacaaagcaaacaacaaagtcttcgagtttctccatcaagattaacgactactcaagttgaaagaggaagggggaagaatgacaaaacgatttgcaaagaattctagataagaaagaaaggaaaattttcacaaattatgttttcggaaaaatagtccttaaggtttgaccatttggcttatcctacagtcgagatggctctgataccaacttgtcacgcccggaaattcactaataatttccgaactaatttgtgcatgaaatcctcgtccaggaatcagccgaggtacccaaactgacaatttaatatacaaatccatcataataataacgttacatacttacgaaaaaaaagaaaaacagcagcggaattaacggtctagcgatggcttcagctccactcccacaggcagctcaactggggtataagccaaacgtcttctccttctggatcctttttcttcaacttacaataatcggtcttcaattaatcttcttgaatacttccggcgcactcgcgaaccttcgaaacgacggaaacgacaagataatcagttcagaccaccctccaagctcaatagatctccagtataaatgccaacggatctgaaatctggcaccaccaatatatcagtgtatgtgtcatcctttagatcataactttgtagaacattagttccccgcagtaggaagacaatcttctcatcgtctaacagcagcaaaggataagcattgttattatagtattcgaaatctatgctgtacttcttaacccagagtccttgctcaagatctgacagaaaccacaggtccatgggggaaccgtatacagcatgcaccatcactaaggacccattcaagtcggctagcgagaggggctccataatttccaaggttgaggagataacaatcatatcccgtcccctggcgactggtttcggtccgtttagaatacccatccattcctccgtctcaaggtcaaatggaactatgttacctggtcgaataagcaagccatcatttgagcaatagagcctcgaataatctaacaggaaatacgcaaccccattgatgaccacacttctcatattgttacttgaacaaacaggcaactgaggtccttgtatcgccctccattgcaaagcgccagcactgttcacggtcatgatctcgcactcgtatagctcacatggattaccagaaccaaggagacggaccaccttgtactctcctgtagaggggaccttcccaaaagcacaggattccattatgagacggcctgaactcagcaaatccttattatccgcagagatactctttgccgggatcctgcagcccggg

SEQ ID NO: 22977 - DNA, 5826 bp, Oryza sativa
  Clone ID: TF_OsC1713_5434
atggcggcggagctagtgggtgaaggagacggtggacgacgccggcggtcaggggtagaggccgccggatccaacggttggcggtgcggtggaggaggctgccgctggatcgggcaagcggcggtggggtggcggaggaggaggcgactggtggtcgggggagaggcgccagatctgcgtcccccaaacgtgttgaggctggcggtcgttaggcaggagaggcggcggcggctggcgatcgggacacggaggaggaagtggccgacggtgaggggagaggccgcggtggccggatccgtgccctgtaagaatgaaaggcagcagctgcaggcgggagcagcagcagcagcagctgcaggcgggatcagcatcgagtacccgttctgcgtggagcctggctgctaccacccaggcttcaacctcacctgcaaccactcctacagcccgcccaggctattcctcggcgacggcacggtgcaggtgctcgagatcgccatcccccaagccaccgtgcgcatcaacagcggccgcatggtgttcaattctactggcaatcatgccgtcaacagatcattattggatcaggtgggaaggccgtacttcgtggcagcttcaaacaggatagctttgctaagctgcaacgcccgggttgacgtccgcgcggctgggagaaacaacaacaaaactagtactaagttgctcagttcctgcactgccatctgcccaacagacgatggaggtggtgctaccactatcctcgatattggtccagagggtccatgctcagggattggctgctgtgaaacaagcatgctactagcaggaagctcgactgctgcctacagcatccaggtccagaacttgcaggagcaggccgtcgtgctaaatcgaacggatgatctggtgtacttggtagatgagagatttaactataccttggacatgtctttcggctacagcagtcctgaagagctcccagcacggctagactggtacataaatagttcatcagcgtgtccgttgcccgcgtccgcccccgaatgtcgcagcgcgcacagctattgcgacagtacttacgacaacaaggcgtacatctgccgctgctccgaaggttacgaaggaaatccctacgttcctgatggatgccatgatacggatgaatgcagttctggatactgcagttacggcgagtgcaggaacacaccaggatcgttcatttgcaactgccctcgtggctacgagggcaatccatcgccaaaagatggatgcaaagcacgagatttaggtctacgcatcgggcttggggttggtggtggcacaattcttttgctcctcgcactaagtgctccctttatatcaagcaaaatgaagctgcgcaagatgaaaagaatgaaagagacttttttcaggcaaaaccatggcttgctattaggacgattggtatcacaaaacgcagatattggtcaaaggatgatcatgactttacaagagctagagaaggccacagacaattttgataaatctcgtgaaattggtggtggaggacatggcgtcgtgtataagggaattttagacctgcaagttgttgccattaagaaatcaaggattgtcgtaaaaagagaaatcgatgactttataaatgaagttgcaattctttctcaagtcaatcatagaaacgtggtgaagcttctaggatgttgtcttgagacagaagttccattgttggtttatgagttcatttcaaatggatctctagatcaccatcttcatgttgatggaccaatttcgctaccatgggatgatcgaataaggattgctcttgaagttgctagagccttgacttatctacattcagctactacaataccaatattccatagggatattaaggcatgcaacatacttctcgatgaaaatttaatatcaaagaattgctcactcgaaaaaggcccatgtataggactgatcacggtgaaagtcttgtgttatattttgcctcgcttcatagacaagatgagctacaaagctactagaaatcgaatgccaaagcctgaaggtgagatcaaagcaaccaacctcagagcattcaacagctcatcagtagaaatcccctctggagtagacttcgaattagggaacacaaccaccggcacggtgtcatcatcattaccttgggatgatcgattaaggatagcttttgaagttgttagagctctttcatatctacattcagctgcatcaatgccaatatttcacagagatattaaatattcgaatatacttcttgatgacagcctaacagcaaagttacttactcggaagaaaccaattggtggtacatttgataatggcgatggtcttgtttcacatttcgtctcacttgtctcaaaaggtaacctttatgacataatagattctcaagttagggaagaggaagatggagaagtccaggaagtagcaacactagccgcaacatgtactaaatttaaaggagaagagcggcctacgatgagggaagtagagatggagaacgacttgcaagaaaaccggtcggccatgaagaaatgccccgaccttaagattgagagaaggtttttggggagcgcaaggcgcgactactcactgttcgtcaacatctacttcacattcaccaatatgtcgacaaccggcgacaacaacaacactggagacaaggagaaggagcctctcgtcaacaccaacggaggcaatactgcctcaaactccagcggagggccattctcggggtataaccttcttacattattaccattcgttcttcgtttcctacaactgttcatcgcaatgtcaacattgcgttctcttatctatgttgatgcttattctatattaagcatgctcatgttgtacacatctagcactatcactggatctactcaaattacaaatgtcatgtttattatcttgttattttggattaaaatatgccgaattatgaccaaatttccaacaatccaaaaacctgataggtcattttcagtagttggctttgctgcaacactgaaaccacatgcttttgatggttctaattataagagatggaaagcacgtgcactactatggttgacagcgatgcaatgcttctatgtttcacggggcaaacgaagtgaaccgcctctctctcctgaggaggaggctaagttcgaggcttcggattgcctgttccgtggagcattgatcagtgtactcgctgacaatatagtggacgtgtacattcacatgcctttagggaaggacatgtgggatgcacttgaggccaagttcagagtttccgacgccggcagcgagctgtatgtcatggagcagttctatgactacaagatggtcgatgaccgttctgtagtggaacaggctcatgagattcagatgctggcaaaggaacttgagaacaacaactgtgagttgccggacaagtttgtggcgggtggcattattgccaaattgccaccttcttggtcggactttactatttctctaaaacacaagaggcaagagtttaatgttactgatctcattggctctttgggtgttgaggagaaggcgagagcaaaggacaactggggcaaaaatatcgagggaaattctagcgccaatttggctacaaccaattttaagaagaaagacaagggaaagggcaagggcgactgctttgtgtgcgataagcctgggcattgggcgaagaattgtcctgatcgcaaggacaagaagtctgccaacatggttattagcgagggcggaggaacatcggggtacggtaattttttacctacagttctctctgtttttcattcacctgattggtgggttgatactggtgctaatattcatgtcgggagaggttcctccttgttgatgggaaacgagtcgcttgcggctgttcatggtgttggtacggtcgatctgaagtttacttcgggaaagactgtgcagctgaagaatgtgcagcatgtcccttcaataaagaagaatctagttagcggctctctactatgtagagatggttttagacttgtgtttgaatccaataaatgtgtcgtatctaaatatggaacttttattggaaaaggttatgacagcgaaggttccaagtgccatacttgtgttcaatcgaaacaacctcgcaagcctcacaaggcatctgaggcgagaaatttggcaccactagaactagttcattccgatctgtgcgaaatgaacggcgtgttgactaaagggggaaagaaatatttcatgacactgatagatgattgcactagatattgctatgtgtacctattgaaaacaaaggatgaggcattgcattactttaagatctataaagctgaggaatggtggggtgaggcaatttttactgcttgtcatgtcctaaataaaattccagtgaagcataaggaagtaacactattcaaagaatgggaaaggaagaaattaaatctctcatacctacgcacatggggctgcttggccaagaatgaatttcccatgaaaaatacacctagcacatctagtcaagaacctgttttaccccatgagcaccttgcaccgataaaacacaatgatcaaacgcctgaggaaaatcctgaggaggttaacattgtagcaactcgaaagagtaagagacaaaggactgcaaagtcttttggagatgactacattgtatacctcgtggatgacactccaagaaccatagaagaggcatattcatctcctgacgctgactattggaaggaagcggtacgcagtgagatggactcaattatgtctaatggtacttgggaagtcgttgagcgtccatatgggtgcaaacctgtaggatgcaaatgggttttcaagaaaaaacttaggcctgatggtacaattgaaaacctcaatgtgattgaggaggttaaggactttttgtccaaaagctttgaaataaaggatttggaagtggctgatgttattcttaacattaagctactgagaggagatgagggtgggattacactcgtgcaatctcactatgtggacaaggttttgagtcgctttggttatagtgactgcaagccagctccaactccttatgactccaatgtgctattaaggaaaaatggaagaatagcaagggatcaattgagatactcccaaatcattggttcattgatgtacttggctagtgcaacgaggcctgacatctcatttgctgtgagcaagctgagccggtttgtttcaaatccgggagatgatcattgtcaagctctggaaagggtcatgcgctatctaaagggtacaataagctatggaattcactatactggttacccaaaaatattggaagggtatagtgactcaaactggatatctgatgctgatgagataaaggccacaagtggatatgtgttcacacttggaggtggcgctgtttcctggaagtcttgcaagcagaccatcttaacgaggtcaacaatggaagcagaactgacagcactagatactgccacagtaaaggccgagtggcttcgtgaactcctaatggatttgccggtggttgaaaaaccagtgccagctatactaatgaactgtgataatcaaacagtgattattaaggtgaacagttcgaaggacaacatgaagtcatctaggcatgtaaagagaagactgaaatctgtcagaaagcagaaaaactccggagtgatagcactggactatgtccagacagctaaaaatctggcagatcagtttaccaaggggctaccacgtaatgtgatagacagtgcatcgagggaaatgggcttgagacccacttag

SEQ ID NO: 22978 - DNA, 3221 bp, Oryza sativa
  Clone ID: TF_OsC359_5540
atggtctacaccaggaatggcacccgcacgacaagcgagggcagcaacggcgaagaacgcgctgatggtgtgcaccccaacagtgattccggcaatggtccgccaccatttcccgagaatctgacgctggcccaagtaatggcacatcagactcagatgatggcagccatgatgcagcagatgcagcagcagcaccagcagatgcaccagaggatgctgcagcacgccgaacagcagcaccagcagtttggtccccctcctcctcagtccaagctgcccgagtttctacgcgtcaggccacccaccttctccagcaccaccaaccccatggaggcgaatgactggctccatgccatagagaagaagctgaatctcctgcagtgcaatgatcaggagaaggtcgctttcgccacacaccagcttcaaggtcctgcgtcagcttggtgggacaatcacgtggccacccgcccgccaggcactgaagtcacttgggcggagttctgtcgtagcttcaggaaggcgcaggtgccagacggggtcgtggcacaaaagaagaggggattccgggcactccatcagggcaacaggacagtgacagagtacctccatgagttcaatcgcctcgcgcgatatgcaccggaggatgtctgcaccgacgccgagaagcaggagaaattcctagcaggcctggatgatgagctaaccaaccagctgatatctggagactatgccgactttgaaaggttggttgacaaggcaatccgtcaggaggatcagcgcaacaaaatggacaggaagagaaaggcggcacagttccggtccaaccaaggaaaccatcagcgaccgcgcttcactctcggacagcagggtggacctaccaccatgatcgtccgccagcaccgcacgttcaagtctagcaacttccaccagggcgccagtggcagtcagaaccaccatggaggtcagcctaaccacggtgcagctccacacccaccagtggcaccagcacagtcaggcccgtccgcgcaagccaaggagactggagcaaagccagggtcctgcttcaactgtggtgagcttggccacttcgccgacaaatgcccgaagcctaggcgtgccgggtcaaagtttgtccaggctcgtgtcaaccacgcgtctgcaaaggaggcgcaagcagcaccagaggtcgtactgggtacgtttcctgttaactcaatccctgcaacagtactttttgattctggtgcaacgcattcgttcatttcaaagaagtttgtcaggatgcatgggttaataagagaggaacttagcacaccaatgcgggttcataccccagggaatagctccacttcggtacaattcagcccttctataacaatagaaattcaaagatcaccatttctagccaacatcattcttcttgattccaaagacctagatgtcattcttgggatggattggctgaccaagtttaagggagtcattgattgtgcgaatcgcacagtcaccttgactaacgagaagggagaaacaatagtgtataaatcactagtctcaccaaagcaaggggtctccttgaatcagattgaggcggaaaccccagtggtcaccgaggggatgaattcgaggaaattggaagaaattcccatagtctgcgagtacccagaagtgtttcccaaagacctcaccaccatgccacccaagagagagattgaattccggattgatttggccccgggaaccgccccaatctacaagagaccgtataggatggcagccaatgaactagccgaggtcaagaaacaggttgatgagcagctgcagaaagggtacatacgaccaagtacctcaccttggggtgctccggtcatttttgtggagaaaaaggataagacgaagaggatgtgcgtcgattatcgcgcactcaacgaggtcacaatcaagaataaataccctttaccacgaatcgatgacttgtttgaccaactgaagggagctaaggtgttctctaagatagacctgcgatcaggctatcaccagttaagaattcgggaagaagatattccaaagacggctttcaccacccggtacgggctgcatgagtgcacggttatgtctttcggacttaccaacgcacccgcattcttcatgaatctgatgaacaaagtgttcatggaatttctcgacaagtttgtggtggttttcatcgacgacatacttatctattcaaagtctgaagaagaacatgagcagcatctccgtctggtactcgagaagttgaaggagcaccaattatacgccaagttcagcaagtgtgacttctggttgacggaagtcaaatttctgggccatgttagacttctgggcatggcagttgatccatcgaacgtggagtcagttaccaaatggaccccaccgaagaccgtgtcgcagattcgaagttttcttagactggcgggttattaccgccaattcatcgaaaacttctccaggatcgctcgacccatgactcagttgcttaagaaagatgaaaagtttaaatggacagctgagtgcgataagagctttgaggagctcaaaaagaaattagtatccgccccagttctgattctgcccgaccagatgaaagatttccagatctggaggcactatctgattggcaaccgctgtgaagtatatacggatcataagagtctgaaatacatcttcacccaaccggatctaaatctccgacaacgaagatggttggaactaatcaaagactatgacatgagcattcactaccacccggggaaagccaatgtggtggcagacgcattaagcaggaaaagttactgcactgctctatgcatcgagggcatgtgtgaggaattgcagcaagagtttaagcggctcaacgtgggaattgttgaacacgggttcatagctgttggcggatggcatgagtcccttcgaccgaatctgccgaaacccatggcgaagaccacgagccaaggatgatgcgaggcgaagggtcgggtgagtgcatgccgaagaaagacgacttcgccaggaccggttcgccccggcatccagcccagagaaggacgacttcgccaggaccggttcgcccccgcgagggccgaagtagccttctcggcccaccaagcttagaggccatagggccggcgatcgcccgatggccatcaagggcccatgaacccccttgacgttatgtaacc

SEQ ID NO: 22979 - DNA, 4101 bp, Oryza sativa
  Clone ID: TF_OsC359_5554
atggtctacaccaggactggcacccgcacgacaggcgagggcagcaacggcgaagaacgcgctgatggtgtgcaccccagcagtgattccggcaatggtccgccaccacttcccgagaatccgacccttgcccaagttatggcacatcagactcagatgatggcagccatgatgcagcagatgcagcaacagcaccagcagatgcaccagaggatgatgcagcacgccgaacagcagcaccagcagtttggtccccctccccctcagtccaagttgcctgagttcctacgtgtcaggccacccaccttctccagcaccaccaaccctatggaggcaaatgactggctccatgcaatagagaagaagctgaatctcctgcagtgcaatgatcaggagaaggtcgcttttgccacacaccagcttcaaggtcctgcgtcggcttggtgggataatcacatggccacccgcccaccgggtactgaagtcacatgggcagagttctgccgtagcttcaggaaggcacaggtgccagatggggtcgtggcacaaaagaagagggagtttcgtgcactccatcagggcaacaggactgtgacggagtacctccatgagtttaatcgcctcgcgcgatatgcaccagaggacgtccgcaccgacgccgagaagcaggagaagttcatggcgggtctggatgacgagctgaccaaccaactgatatctggggactacgctgactttgagaggctggttgacaaggcaatccgtcaggaggatcaacgcaacaagatggacaggaagaggaaggccgcacagttcagggcacctcagggaagtcaccagaggccgcgcttcactcccggacagcagggtggacctaccaccatgatcgttcgtcagcaccgcccgttcaatcctagcaactttcctcagggcgccagtggcagtcagaaccaccatggtggtcagtccaaccgcggtgcagctccacgcccaccaatggcaccggcacagtcaagcccgcccgcgcaagccaagaaggagactggagcaaaaccagggtcctgtttcaactgtggcgagcttggccacttcgctgacaaatgcccgaagcccaggcgtgccgggccaaggtttatccaggctcgtgtcaaccacgcatctgcggaggaggcacaagcagcaccagaggttgtactgggtacgtttcctgttaactcaatccctgcaacagtactttttgattctggtgcaacgcattctttcatttcaaagaaattcgtggggatgtatgggttaaggaaagaagagcttagcacaccaatgagagttcataccccgggaaatagttcaacctcagtcagttttagcccttcagtgctaatagaaatccaaagatcaccatttctagccaacctcattcttcttgaatccaaagacctagacgtcattcttgggatggattggctgaccaagtttaagggagtcatcgattgtgcgaatcgtactgtcaccttgaccaacgagaagggggaaacggtagtgtacaaatcaccagactcgccaaagcaaggagtctccttgaatcagattgaagcggaaatcccagtggacaccgtggagaagaatttgaagaaattggaagacatacccatagcctccgaatacccagaagtgtttcctgaagacctaactaccatgccacccaagagagagattgaattccggattgacttggcaccgggaaccgctccaatttacaagagaccgtacagaatggcggtcaacgaactagcagaggtcaagaagcaggttgatgagcagctgcagaaagggtacattcgaccaagtacttcaccttggggtgctccggtcatttttgtggagaaaagggataagacgaagaggatgtgcgttgattatcgcgcactcaacgaggtcacaatcaagaacaaatatcccttgccgcgaatcgacgatttatttgatcaactgaaaggagctaaagtgttttctaagatagacatgcgatcaggctaccaccagttgcgaattcgggaagaggatattccgaagacggccttcaccactcggtacgggctatatgagtgcacggttatgtccttcggacttaccaacgcacctgcattctttatgaatctgatgaacaaagtgttcatggaatttctggacaagtttgttgtggtattcatcgacgacatacttatctactcaaaatccgaggaagaacatgagcaacatctccgtctggtactcgagaagttgaaggagcaccagctatacgccaagttcagcaagtgtgacttctggttgacggaagtcaaatttctgggccatgtcattacagcccagggtgtggcagttgatccgtcgaacgtagagtcagtcaccaagtggaccccaccgaagaccgtgtcgcagattcgaagttttctaggactggcaggttattaccgccggttcatcgaaaacttctccagaatcgcccgacctatgactcagttgcttaagaaagatgagaagtttaaatggacagctgagtgcgataagagttttgaggagctcaagaagaaattagtatccgcaccggttttgattttgcccgaccagatgaaagacttccaagtctattgcgatgcatcccgtcacggacttggatgtgtcctaatgcaagaaggcagagtggttgccagtggttcatactttgaagatctggaggcacggccaacgctcgtggatcaagtcagagcagctcaagtaaatgattctgaaatagcagagctgaaaaagaatatgagagtcgggaaagcccgggatttccacgaagatgaacacggcacaatctggttgggagaaagattgtgtgtacctgacgacaaggaactgaaggatctgatactcactgaggctcatcagacccagtactccattcatccaggcagcactaaaatgtatcaagatctcaaagaaaagtttttgtgggtcagcatgaggagagaaatagctgaattcgtcgcactctgcgatgtttgccaacgagtgaaggcagagcaccaaagaccagcagcttgggacaaaagcttgccatatgcggaattctcgtacaacaacagctaccaggccagtctacagatggcaccgtttgaagctttatacggccggaagtgccgcacacctctcttctgggatcagacaggcgagcgtcaactgtttggaacagaggtattagcggaagcagaagagaaagtcaggatcatcagggaaaggttgagaattgcccagtctcgacagaagagctacgcggataaccgtcgaagggagctcacttttgaggcaggagattacgtgtatcttcgtgtcactccgctccggggagtacaccggtttcagacgaaaggcaagttggtaccacgcttcgtgggaccatacaaaatcctggaacgcaggggggaagttgcttatcagttagaacttccatccaacatgatcggcatccatgacgtgttccacgtgtcccaactaaagaagtgcttaagggtacctgaagaacaggctgattcggaacacattgatatccaggaggacctaacatatgtggagaagccggccgaggcccagccaggccgccccgccgcctcctctctcggggtcgccgacaggtggggcccacctgtcgggtccttcccccacctcccgccgatctcgctcgcgccgtcgcgcccgcaaccgccgccgcgccctcgtctccgcctcctccgggccacgtcgaccacacccgcgcgccgcgccgtcgccgccgtcgggttcgcgtggccgagatccaccccgtccacccctcctccgtcgagggcaccccgaagctcgtccgcccgccgacgtcgtcctcccgtggcttgccgtcgccgttcgccatcgtcctcctccgcgccggccaccctcggtgaggcatccctcccctcttttccccttcctctcctcctagtgccgcgccgccgcttcgagtcgcgcgccgtcgccttcggccgccgccgcctcccgtgccgccggtcgccgccgtcgtcggccgcatgccgtcgctgctag

SEQ ID NO: 22980 - DNA, 5409 bp, Oryza sativa; identical to SEQ ID NO: 13868
  Clone ID: TF_OsC359_5601

SEQ ID NO: 22981 - DNA, 2844 bp, Oryza sativa; identical to SEQ ID NO: 13885
  Clone ID: TF_OsC359_5641

SEQ ID NO: 22982 - DNA, 4461 bp, Oryza sativa; identical to SEQ ID NO: 13862
  Clone ID: TF_OsC359_5694

SEQ ID NO: 22983 - DNA, 4422 bp, Oryza sativa; identical to SEQ ID NO: 13783
  Clone ID: TF_OsC359_5786

SEQ ID NO: 22984 - DNA, 4716 bp, Oryza sativa; identical to SEQ ID NO: 13782
  Clone ID: TF_OsC359_5805

SEQ ID NO: 22985 - DNA, 4908 bp, Oryza sativa
  Clone ID: TF_OsC359_5936
atgggttgcaagatggccggacacccacccaaccactgtggagaaggcatgatcgactttgtggcagagttggcacgtatgacgctggtggtgggctaccccaatgcgccagagtacacgacggttccaccgctcagtggcgagcttcctcaccgtgttcgcctggaggtccacggctacgtgggtacctgcctagctaacatggtggttgaggcatctggaggcacagcagatcacgcctgtcaggaggcagcatacctgatgatggccagactacgggagcgccacaactacatcttccatgacacggcgtaccgatttcaccctcgtcgagccagtggtgatgatgtcagtaccttccgtccgacagctggcgagaacgacaccacctttggtcacatgtgtgctgtgatgaggggattggataggatgcactcggatctgcacaaggcgaccaaggccttgaatgatgggaagctcatgaggatcgtcgctttgaaggatgagatagcgcgcctgaagagggagaatgctcagttaaagggtcttcccgcgccaggaggagtccggatccgcactacaccccgcaagacgacgacgaaacccgtgcgcatccagcttgcgcccaggaacccacctccgcccgcagctccggcagttcctgcagctccagctccagctcccgttcacgtgttagctcccgcgtccgctctctccttcgctccagcatcagccgccaggggtccagccagtggcaacggaggttgcttgtttgggatggtttacaccaggaatggtagccgcgcaacgggtgagggcagcaacggcgaagagcgcactgagggtgtgcatcccaacagcaattccggcaatggtccgccaccacttcccgagaatccgacgctagcccaagtgatggcacatcagacacagatgatagcagccatgatgcagcagatgcagcagcagcaccagcagatgcaccagaggatgctgcagcacgccgaacagcagcatcagcagtttggtccccctccccctcagtccaagttgccagagtttctacgtgtcaggccacccaccttctccagcaccaccaaccctatggaggcgaatgactggctccatgccatagagaagaagctgaatctcctgcagtgcaatgatcaggagaaggttgctttcgccacacaccagcttcaaggccctgcgtcggcttggtgggacaatcacatggccacccgcccaccaggtactgaagtcacttgggaagagttctgccgtagcttcaggaaggcgcaggtgccagatggggtcgtggcacaaaagaagagggaattccgagcactccatcagggcaacaggacggtgacggagtatctccatgagttcaatggcctagcgcgatatgcaccagaggatgtccgtaccgacgccgagaagcaggaaaagttcatggcaggtctggatgacgagctaaccaaccagttgatatctggagattacgccgatttcgaaaggctgatggacaggaagaggaaggccgctctgttcagggcacctcagggaagtcaccagaggccgcgcttcacccccgggcagcagggtggacctaccaccatgatcgtccgccagtaccgcccgttcaaccctagcaactttccccagggcgccagtggcagtcagaaccatcatggaggtcagcccagccgcggtgcagctccacgcccaccagtggcaccagcacagtcaggcccgcccgcgcaagccaagaaggagactggagcaaaaccagggtcctgcttcaactgtggcgagcttggccacttcgccgacaaatgcccaaagcctaggcgtgccgggccaaggtttatccaggctcgtgtcaaccacgcatctgcggaggaggcacaagcaacaccagaggttgtactgggtacgtttcctgttaactcaatccctgcaacaatactttttgattctggtgcaacgcattcgttcatttcaaagaagtttgtcgggatgcatgggttaaggaaagaagagcttagcacaccaatgagggttcataccccgggaaatagttcaacctcagtcagttttagcccttcagtgctaatagaaattcaaagatcaccatttctagctaacctcattcttctcgaatctaaagacctagatgtcattcttgggatggattggctgaccaagtttaagggagtcatcgattgtgcgaatcgtaccgtcaccttgaccaacgagaagggagaaacggtagtgtacaaatcaccagactcaccaaagcgaggggtctctttgaatcagattgagacgaaaatcccagaggacaccgtggagaagaacttgcggaaattggaagatatccccatagtctgcgagtatccagaagtgttccccgaagaccttactaccatgccacccaagagagagattgaattccggattgacttggcaccgggaaccgctccaatttacaagagaccgtacagaatggcggccaatgaattagccgaggtcaagaagcaggtggatgagcagctgcagaaagggtacattcgaccaagtacttcaccttggggtgctccgatcatttttgtggagaaaaaggataagacgaagaggatgtgcgttgattatcgcgcactcaacgaggtcacaatcaagaacaaatatcctttgccgcgaatcgatgatttgttcgaatttgatcaactgaaaggagctaaagtgttttctaagatagacctgcgatcaggctaccaccagttgagaattcgggaagaggatattccaaagacggccttcaccactcggtacgggctatatgagtgcacggttatgtctttcggacttaccaacgcacccgcattcttcatgaatctgatgaacaaagtgttcatggaatttctggacaaatttgttgtggtgttcatcgacgacattcttatctattcaaagtccgaagaagaacatgagcaacatctccgtctagtactcaagaagttgaaggagcaccagctaacgccatgttcagcaactcagggtgtggtagttgatctgtcgaacgtagagtcagttaccaaatggaccccaccgaagaccgtgtcgcagattcgaagttttcttggacttgcgggatattaccgccgattcatcgaaaacttctccaggatcgcccgacccatgactcagttgcttaagaaagatgagaagtttaaatggacagctgagtgcgataagagttttgaggagctcaaaaagaaattagtatccgcaccagttttgattctgcccgaccagatgaaagacttccaagtctattgcgatgcatcccgccatggacttggatgtgtcctaatgcaagagggcagggtggttgcgtatgcctcgcggcagttgcgtccacacgaaggaaattatccaactcatgacctggaattggcagcagtggttcatgttttgaagatctggaggcactatctgattggcaaccgctgcgaagtatatacggaccataagagtctgaaatacatcttcacccaaccggacctaaatctccgacaacgaagatggttggaactaatcaaagactatgacatgagcattcactaccacccgggtaaagccaatgtggtggcagacgcattaagcaggaaaagttactgcactgccctatgcatcgagggcatgtgtgaggaattgcggcaggagtttgagcatctcaacgtgggaattgttgaacacggtcagagcagagtaaatgattctgaaatagcagagctgaaaaagaacatgagagtcggaaaagcccgggatttccatgaagatgagcatggcacaatctggttgggagaaagattgtgtgtacctgacgacaaggaactgaaggatctgatactcaccgaggctcatcagacccagtactccattcatccaggcagcaccaaaatgtatcaagacctcaaagaaaagttttggtgggtcagcatgaggagagaaatagctgaattcgtcgcactctgcgatgtttgccaacgagtgaaggcagagcaccaaagaccagcaggtttactccaacctcttcaaatcccggaatggaaatgggaggagattggaatggactttataacaggactgccccggacatcatcgggtcatgattccatctgggtagtcgtggatcgactcactaaggttgctcacttcataccagtacataccacgtatacgggcaaaagcacggcctatcacccgcaaactgatggtcagaccgagcgagtcaatcaaatcttggaagatatgttgagagcttgcgctctcgattttggtggagcttgggacaaaagcttgccatatgcggaattctcgtacaacaacagctaccaggctagtctacagatggcaccgtttgaagctttatacggccggaagtgccgcacacctctcttctgggatcagacaggcgagcgtcaactgttcgggacagaggtattagcggaagcagaagagaaagtcagaatcatcagggaaaggttgaggattgcacagtctcgacagaagagctacgcggataaccgccgaagggagctcacttttgaggcgggagattacgtgtatcttcgtgtcactccgctccgaggagtgcaccgttttcaaaacaaaggcaagttggcaccacgcttcgtgggaccatacaaaatcttggaacgaaggggagaagttgcttatcagttagaacttccatccaatatgatcggcatccatgacgtgttccacgtgtcccaattaaagaagtgcttaagggtacccgaagaacaggctgattcggaacacattgatatccaggaaggacctaacctacgtggagaagccggttcgtatacttga

SEQ ID NO: 22986 - DNA, 5342 bp, Oryza sativa
  Clone ID: TF_OsC359_6008
atggccggtcacccacccaaccaccgcggagaaggcatgatcgacttcgtggcagagctggcacgcatgacactggtggtgggctaccccaatgcgccggagtacacgaccatcccaccgctcagtggcgagcttcctcaccgtgtccgcttggaggtccatggctacgtggggacttgcctcgctaacatggcggttgaggcgtcaggaggcacagcagatcatgcctgtcaggaggcagcctacttgatgatggccaggttacgggagcgccacgactacatcttccacgacacggcgtaccgctaccacccccgtcgagcccatggtgatggcgtcagctccttccgtccgacagctggcgagaacgacaccaccttcggtcacatgtgtgctgtgatgaggggattggaccggatgcactcggacctgcacaaggcgaccaaggccttgaatgatgggaagctcatgaggatcgtcgctctgaaggacgagatagcgcgcctgaagaaagagaatgctcagttgaagggtcttccagcaccaggaggagtccggatccgcactacgccccgtaagaggacgactgcacccgtgcgcatccagcttgcgcccaggaacccacctccagcagcagcagctccggcagttcctccagctccagctccagctccagctccagctccagctcccgctcccgcgttcactctctccttcgctccagcatcagccgccagaggaccagccagtggtaccggaggttgtcccctccagatggtctacaccaggactggtagccgcgcaacaggcgagggcagcaacggtgaagaacgcgctgatggtgtgcaccccaacagtgagtccggcaatggtccgccaccacttcccgagaatccgacgcttgcccaagttatggcacatcaaactcagatgatggcagccatgatgcagcagatgcagcagcagcaccagcagatgcaccagaggatgatgcagcacgccgaacagcagcatcaacagtttggtccccctccccctcagtccaagttgccggagtttctacgtgtcaggctacccaccttctccagcaccaccaaccctatggaggcaaatgactggctccatgcgatagagaagaagctgaatctcctgcagtgcaatgatcaggagaaggtcgctttcgccacacaccagcttcagggtcctgcgtcagcttggtgggacaaccacatggccacccgcccaccgggtactgaagtcacatgggcagagttctgccgtagcttcaggaaggcacaggtgccagatggggtcgtggcacaaaagaagagggaattccgggcgctccatcagggtaacaggactgtgacagagtacctccatgagttcaatcgcctcgcgcgatatgcaccagaggatgtccgcaccgacgccgagaagcaggagaagttcatggcgggtttggatgatgagctgaccaaccaactgatatctggggactacgttgactttgagaggctggtcgacaaggcaatccgccaggaggatcaacgcaacaagatggacaggaagaggaaggccgctcagttcagggcaccccagggaagtcaccagaggccgcgcttcactcccgggcaacagggtggacctaccaccatgatcgtccgtcagcaccgcccgttcaaccctagcaacttccaccagggcactagtggcagtcagaaccaccatggaagtcagcccaaccgcggtacagctccacgcccaccaatggcaccggcacagtcaggccagcccgcacaagccaagaaggagacgggagcaaaaccagggtcctgcttcaactgtggcgagcttggccacttcgctgacaaatgcccgaagcccaggcgtgccgggccaaggtttatccaggctcgtgtcaaccacgcgtctgcggaggaggcacaagcagcaccagaggtcgtactgggtacgtttcctgttaactcaatccctgcaacagtactttttgattctggtgcaacgcattctttcatctcaaagaaatttgtcgggatgcatgggttaataagagaggaacttagcacaccgatgcgggttcataccccagggaatagctccacttcggttcaattcagcccttctataacaatagaaattcaaaggtcaccatttctagccaacctcattcttctcgaatccaaagacctagatgtcattcttgggatggattggctgaccaagttcaagggagtcatcgattgtgcgagtcgcacagtcaccttgaccaacgagaagggagaaaccgtggtgtacaaatctctagtctcgccaaagaaaggggtctcgttgaatcagattgagacggaaatcccagtggacaccgtagagaagaacttgagaaaattggaagatatacccatagtctgcgagtatccggaagtgtttcctgaagacctcactaccatgccacccaagagagagattgaattccggattgacttggcaccgggaaccgctccaatttacaagagaccatacaggatggcggccaacgaattagcagaggtcaagaagcaagttgatgagcagctgcagaaagggtacatacgaccaagcacttcaccttggggcgctccggtcatttttgtggagaaaaaggataagacgaagaggatgtgcgtcgattatcgcgcacttaacgaggtcacaatcaagaataaatatcctttaccgcgaatcgacgatttatttgatcaactaaaaggagctaaagtgttttctaagatagacctgcgatcaggctaccaccagttgagaatccgggaagaggatattccgaagacggccttcaccactcggtacgggctatatgagtgcacggttatgtctttcggacttaccaacgcacccgcattcttcatgaatctgatgaacaaagtgttcatggaatttctggacaagtttgttgtggtgttcatcgacgacattcttatctattcaaagtccggagaagaacatgaacaacatctccgtctagtactcgagaagttgaaggagcaccagctatacgccaagttcagcaagtgtgacttctggttgacggaagtcaaatttctgggccatgtcattacaactcagggtgtggcagttgacccatcgaacgtggagtcagttaccaaatggaccccacctaagaccgtgtcgcagattcggagttttctaggactggcaggttattaccgccgattcatcgaaaatttctccaggatcgcccgacccatgactcagttgcttaagaaagatgagaagtttaaatggacagctgagtgcgataagagttttgaggagctcaagaagaagttagtatccgcaccagtattgattctgcccgacccgacgaaagacttccaagtctattgtgatgcatcccgtcacggacttggatgtgtcctaatgcaagagggcagagtggttgcgtatgcctcgcggcagttgcgtccacacgaaggaaattatccaactcatgacttggaattggcagcagtggttcatgctttgaagatctggaggcactatctgattggaaaccgctgcgaagtatatacggaccataagagtctgaaatacatcttcacccaaccggatctaaaccttcgacaacgaagatggttggaactaatcaaagactatgacatgagtattcactaccacccgggtaaagccaatgtggtggcagacgctttaagccggaaaagttactgcactgccctatgcatcgagggcatgtgtgaggaattgcggcaggagtttgagcatctcaacgtgggaattgttgaacacgggttcgtagccgctctggaggcacggcctacgctcgtggatcaagttagagccgctcaagtaaatgatccggaaatagcagaactgaaaaagaacatgagagtcggaaaggctcgggatttccacgaagatgagcatggcaccatctggatgggagaaagattgtgtgtacctgacgacaaggaactgaaggatctgatactcaccgaggctcatcatacccagtactccattcatccaggcagcactaaaatgtaccaagaccttaaagaaaaattttggtgggtcagcatgaggagagaaatagctgaattcgtcgcactctgcgatgtttgccaacgagtgaaagcagagcaccaaagaccagcaggtttactccaacctcttcaaatcccggaatggaaatgggaggagattggaatggactttataacaggactgccccggacatcatcgggacatgattcaatctgggtagtcgtggatcgactcaccaaggtggctcactttatacccgtacataccacctatacgggaaagagactggcagaattgtacctcgcaaggatcatgtgtttgcatggggtacccaggaaaatagtatccgaccgaggtagtcagttcacctcaaagttttggcagaaactgcaggaagaattggggacccgtttgaatttcagcacggcctatcacccgcaaactgatggtcagaccgagcgagtcaatcaaatcttggaggatatgttgagagcttgcgctcttgattttggtggagcttgggacaaaagcttgccatacgcggaattctcgtacaacaacagctaccaggccagtctacagatggcaccgtttgaagctttgtacggccggaagtgccgcacacacctctcttctgggatcagacaggcgaacgtcaactgttcggaacagaagtattagcggaagcagaagagaaagtcagaatcatcagggaaaggttgagaattgctcagtctcgacagaagagctacgcggataaccgtcgaagggagctcatttttgaggcaggagattacgtgtatcttcgtgtcactccgctccggggagtacaccgttttcagacgaaaggctagttggcaccacgcttcgtgggaccatacaaaatcttggaacgaaggggagaagttgcttatcagctagaacttccatccaatatgatcggcatccatgacgtgttccacgtgtcccaattaaagaagtgtttaagggtacctgaagaacaggctgattcggagcacattgatatccaagaggacctaacatatgtggagaagccggttcgtatacttgataccagcgaaaggagaaccagaaataaggtcaccaggttttgccgagttcagtggagtcatcattcagaagaggaagcaacctgggaaagggaagatgagttgaaagccgcccatccgcacctcttcaccagctcctccgaatctcggggccgagattccgtttaa

SEQ ID NO: 22987 - DNA, 8285 bp, Oryza sativa
  Clone ID: TF_OsC359_6289
atgacgaagccgccatccaagatggaggtggagccatccaatgtgataccggtcacattggatgacttcgaaggagaagatcgtaaagctatggaggagtacatcaacgagctcacacgggaggcgttgatgagagcaaacactaggactcgtcaaggcgtgatcatcaagcccgggccacatcccaagctcgctcccgacgtagtaagcaatgatgaggtatcacaatctatccaacaacaaattgcatctacaatagattcatcaatggttgcttttaaagatcagctagatgtaatgtttaaggataaatttgatgggtttttaaggattaagttcggttctcttatggatgattacacattaaaggataaagcctctaccactgctaatcaacctcctatagatcaaacgggtaataaaaccgacagaacggcgttcacggccggtcagaccgggtattaccccggcggttagaccgggtctcaagccggtccgaccgcacatcatgacgccggtcagaccggaccctgggccggtcagaccgacgcaattgttccaatacagggaatagatccgatgactaatactagttatttgtatcactttaaaacatttgatcctcctgtatctactgctacaagtagtccccaagttcccccacatattcctaatgcttataatgatgtttctaggggatatcctcccgatattagacaaggccaatataatcatattgcgccacaaacacaacctattaggccaccgaatccaccgccaagttaacaagggcctaataacatggaggatgtaattcgtgatattattaggaatagattcgggattgaaactaggaatcgtgctagaacttacaaaaagccatatcctgattattatgataatgtgccgtttccttgaaattatagagttcccgaatttgccaagtttagtggtgaggatggtaagaccacatgggagcatgtaggtcaatttttgatgcaatgtggtgaggctaatagtgatacttttaagttgcgcttgttttctttatctttatccagtaatgctttcacatggtttacttttttaccggcaaattctattcatacttgggctcaattagaagaacaatttcatgattatttctatactggagaaactgagcttaggttatgtgatttgacatcggttaagcaaaagtataatgaatctgtcattgattatattaagagatttagagatgttagaaaccgatgttatactttgaatataactgatagagatttggctggtcttgcttttaatggtttggttgctcctcttagagaaagactagacggccaacaatttcttgatgttagtcaactcatgcaaagggctctggctcaagaaagccgggttaaggataatagaaaacttgctagaccatttgacaaaaaacctaatgttaatgtggttgattaccctgaggctagtgatagtgaggaagagggtgatcatgatatttatgttgccgaatggttatggactaataaaaataagccttttgtttgctctaacctaatgccgactcctcgcaaagatcggcaaagtgaggttaaatatagttttgatgtggccaagtgtgataagattttttattatcttttgcaagagaaacaaattagattacctaaagaccatatcataccttctcaagaagagttgaaacgtcgagcatattgtaagtggcatgattctcattctcactctactaatgattgcaatgtgtttcggcgacaggttcaatcggccatagatgacgattgaagttcaccgatggctccaagatgaagcttgatcatgatccttttccggtgaatacaattaatttcaatgataagaaggtgttgattcggccggagcaagccgaatctactatgggaaaggaagtggtcattggtgaaccaagatccaagatgatagtgcccaagaagccggagaaatatgagaagcaaggtagtgggaaaattcacaacaaagggaagagaccaagatcacctcctagggagcgatttggtcattcaccaagacggtcgcattcaccttcatatcattatccacaagacatgtcatggggttcctatccaatgctgccgtcgggttatccctatccttacttcttgccatggggggcgacgccgccaatgttcaatcatatgcctccaatgcaattcaaccaagggtggagaggaccacggaagccaattcatgagcgtttgtcttcaccaaacaatagccgattttatggtaagaatcgggctaatgaagaaaagagggaaggaaagcgcgtcaaggtggaggaaaagacttcggaagtgattactatcaaagtggggtctcatgatgtgccaatacctactggagatggagttgaagtgtccccgaacagaaaatccgaagacggccggtctgaccgccgacccgatagtggtccgaccgacacctcaggccggtctgaccgtgctccggatgtcggtctgaccggcgcgtctggccggtctgaccggtggtctacggctggtctgaccgggctccagcgccggtttgacaggaggattgcaaagggcgatgtggaggcttcatcgtcttcaaacaaaactaatagagggcattatttacctcctggaacagagccgaatcctaggtggatgcctaaggatttgacggctactcaaaagagaaggttgcaacgtcttcgggcccaagagttgagagagaaaaaggccgaagagcaaagggataaaatgttcaatgagttgcgacccacaccggaaaaggaagaataattggttgataaaagtgaatcatctccaaaagaagacatggatatcaacatggtatgtatgttgcctatggagttttgtgctatggatgaagccgaggttgctcaattctcattagatcctaaagacgcggtttttgagaagcccgatgaatcaaaccgtcatatgaagcctctctatctcaaaggccatgttgatgggaagccagtctctaggatgctagtggatggaggtgccgccgtgaacttgatgccgtactcattattcaagaagttagggcgtgaggatgatgagttgaagaagaccaacatgattctcaatggcttcaatggtgaaccaacggaggcaaagggtatcttttcggcggaactcaccgtgggaaacaaaactgtcacgatgggttggaaactatgtcacgtcttccgtccgtataccgtggtgatggccggtcacccacccaaccaccgtggagaaggcatgattgacttcgtggcagagttggcacgcatgacactggtggtgggctaccccaatgcgccagaatacacgacgattcccccgctcagtggcgaacttcctcaccgtgtccgcttggaggtccacggctacgtggggacttgcctcgctaatatggcggttgaggcgtcaggaggcacagcggatcacgcttgtcaggaggcagcctacttgatgatggccagactgcgggagcgccacaactacatcttccacgacacggcgtaccgcttccaccctcgtcgagcccacggtgacgacgtcagttccttccgtccgacagctggcgagaacgacaccacctttggtcacatgtgtactgtgatgaggggattggacaggatgcactcggacctgcacaaggcgaccaaggccttgaatgatgggaagctcatgaggatcgtcgctctgaaggatgagatagcgcgcctgaagaaggagaatgctcagttgaagggtcttccagcaccaggaggagtccggatccgcactacgcctcgtaagaggacgactgcacccgtgcgcatccagctcgcgcccaggaacccagttccgaccgcagctcctgcagcacctccagttccgcccgcagctccggcagttcctgcagctccagctccagctcccgcgttcgatctctccttcgccctagcatcagccgccaggggtccagccagtggtaccggaggttgcttgtttgggatggtctacaccaggactggcaaccgcacgacaggcgagggcagcaacggcgaagaacgcgttgatggtgtgcaccccaacagcgattccggcaatggtccgccaccacttcccgagaatccgacccttgcccaagttatggcacatcagactcagatgatggcagccatgatgcagcagatgcagcagcagcaccagcagatgcaccaaaggatgatgcagcacgccgaacagcagcaccagcagtttggtccccctccccctcagtccaagttgccagagtttctacgcgagaaggtcgcttttgccacacaccagcttcagggtcccgcgtcagcttggtgggacaaccacatggccacccgcccaccgggtactgaagtcacatgggcagagttctgccgtagcttcaggaaggcacaggtgccagatggggtcgtggcacaaaagaagagggaatttcgtgcactccaccagggcaacaggactgtgacagagtacctccacgagttcaatcgcctcgcgcgatatgcaccagaggatgtccgcaccgatgccgagaagcaggagaagttcatggcgggtctggatgatgagctgaccaaccaactgatatccggggattacgctgactttgagaggctggttgacaaggcaattcgtcaggaggaccaacgcaacaagatggacaggaagaggaaggccgcacagttcagggcacctcagggaagtcaccagaggccgcgcttcactcccggacagcagggtggacctaccaccatgatcgtccgtcagcaccgcccgttcaactccagcaactttcaccagggctctagtggcagtcagaaccaccatggaggtcagcccaaccgcggtgcagctccacgcccaccaatggcaccggcacagtcaggcccgcccgcgcaagccaagaaggagactggagcaaaaccagggtcctgcttcaactgtggcgagcttggccacttcgccgacaaatgcccgaagcccaggcgtgccgggccaaggtttatccaggctcgtgtcaaccacgcatctgcagaggaggcacaaacagcaccggaggtcgtactggtactttttgattctggtgcaacgcattctttcatttcaaagaaatttgtggggaggtatgggttaaggaaagaagagcttagcacaccaatgagagttcataccccgagaaatagttcaacctcagtcagttttagcccttcagtgctaatagaaatccaaagatcaccatttctagccaacctcattcttctcgaatccaaagacctagatgtcattcttgggatggattggctgaccaagtttaagggggtcattgattgtgcgaatcgcacagtcaccttgaccaacgagaagggagaaaccgtggtgtacaaatcaccagactcaccaaagcaaggagtctccttgaatcagattgaagcggaaatcccagtggacaccgtggagaagaacttgagaaaattggaagatatacccatagtctgcgagtatccggaagtgttccccgaagacctcactaccatgccacccaagagagagattgaattccggattgacttggcaccgggaactgctccaatctataagagaccgtacagaatggcggccaacgaattagcagaggtcaagaagcaagttgatgagcagctgcagaaagggtacattcgaccaagcacttcaccttggggcgctccggtcatttttgtggagaaaaaggataagacgaagaggatgtgcgtcgattatcgcgcacttaacgaggtcacaatcaagaataaatatcctttaccgcggatcgatgatttgtttgatcaactgaaaggagctagagtgttttctaagatagacctgcgatcaggctaccaccagttgagaatccgggaagaggatattccgaagacggccttcaccactcggtacgggctatatgagtgcacggttatgtctttcggacttaccaacgcacccgcattcttcatgaatctgatgaacaaagtgttcatggaatttctggacaagtttattgtggtgttcatcgacgacattcttatctattcaaagtctgaagaagaacatgaacaacatctccgtctagtactcgagaagttgaaggagcaccagctatacgccaagttcagcaagtgtgacttctggttgacggaagtcaaatttctgggccatgtcattacagctcagggtgtggcagttgatccatcgaacgtggagtcagttaccaaatggaccccaccgaagaccgtgtcgcagattcggagttttcttggacttgcgggttattaccgtcgattcatcgaaaatttctccagaatcgcccgacccatgactcagttgcttaagaaagatgagaagtttaaatggacagccgagtgcgataagagcttcgaggagctcaagaagaaattagtatccgcaccagttttgattctgcccgacccgacgaaagacttccaagtctattgtgatgcatcccgtcacggacttggatgcgtcctaatgcaagagggcagagtggttgcgtatgcctcgcggcagttgcgtccacacgaagggaattatccaactcatgacttggaattggcagcagtggttcatgctttgaagatctggaggcactatctgattggcaaccgctgcgaagtatatacggaccataagaactatgacatgagcattcactaccacccgggaaaggccaatgtagtggcagacgcattaagccggaaaagttactgcactgccctatgcaccgagggcatgtgtgaggaattgcggcaggagtttgagcatctcaacgtgggtattgttgaacacgggttcgtagccgctctggaagcacggcctacgctcgtggatcaagtcagagcagctcaagtaaatgattctgaaatagtagagctgaaaaagaatatgagagtcggaaaagcccgggatttccacgaggatgaacacggcacaatcaggatgggagaaagattgtgtgtacccgacgacaaggaactgaaggatctgatactcaccgaggctcatcagacccagtactccattcatccaggcagcactaaaatgtatcaagacctcaaagaaaagttttggtgggtcagcatgaggagagaaatagctgaattcgtcgcactctgcgatgtttgccagcgagtgaaggcagagcaccaaagaccagcaggtttactccaacctcttcaaatcccggaatggaaatgggaggagattggaatggactttataacgggactgccccggacatcatcgggacatgattcaatctgggtagtcgtggatcgactcaccaaggtggctcactttataccagtacataccacctatacgggaaagagattggcagaattgtacctcgcaaggatcatgtgtttgcatggggtacccaagaagatagtatccaaccgaggtagtcagttcacctcaaagttttggcagatactgcaggaagaattggggacccgtttaaatttcagcacggcctatcacccgcaaactgatggtcagaccgagcgagtcaatcaaatcttggaagatatgttgagagcttgcgctcttgattttggtggagcttgggacaaaagcttaccatatgcggaattctcgtacaacaacagctaccaggccagtctacagatggcaccgtttgaagctttatacggccggaagtgccgcacacctctcttctgggatcagacaggcgaacgtcaactgttcggaatagaagtattagcggaagcagaacagaaagtcagaatcatcagggaaagattgaggattgctcagtctcgacagaagagctacgcggataaccgtcgaagggagctcacttttgaggcaggagattacgtgtatcttcgtgtcactccgctccgaggagtacaccgttttcagacgaaaggcaagctggcaccacgcttcgtgggaccatacaaaattttggaacgaaggggagaagttgcttatcagctagaacttccatccaacatgatcggcatccatgacgtgttccatgtgtcccaattaaagaaatgcttaagggtacctgaagaacaggctgattcggaacacattgatatccaagaggacctaacatatgtggagaagccggttcgtatacttgataccagtgaaaggagaaccagaaacaaggtcaccaggttttgctga

SEQ ID NO: 22988 - DNA, 5450 bp, Oryza sativa
  Clone ID: TF_OsC359_6355
atggccggtcacccacccaaccaccgcggagaaggcatgatcgatttcgtggcagagttggcacgcatgacactggtggtgggctaccccgacgcgccggagtacacgaccattccaccgctcagtggcgagcttcctcaccgtgtccgcttggaggtccatggttacgtggggacttgcctcgccaacatggcggtcgaggcatctggaggcacagcagatcacgcctgtcaggaggcagcctacttgatgatggccagactacgggagcgccacaactacatcttccacgacacggcgtaccgctaccaccccagtcgagccaacggtgatggcgtcagctccttccgtccgacagctggcgagaacgacaccaccttcggtcacatgtgtgctgtgatgaggggattggacaggatgcactcggacctgcacaaggcgaccaaggccttgaacgatgggaagctcatgaggatcgtcgctttgaaggacgagatagcgcgcctgaagaaggagaacgctcagctaaagggtcttccagcgccaggaggagtccggatccgcaccacgccccgcaagacgacgacggcacccgtgcgcatccagcttgcgcccagaaacccacctccagcagcagctcccgcagcacctccagttctgcccgcagttcctgcagctccagctccagctccagctccagctcccgcgtccgctctctccttcgctccagcgtcagccgccagaggtccagccagtggcaccgggggttggttgtctgctactcccagtggcagcagcgatctcagcagcagcagctccagtggctcgcagtcaggcagcggcgagacgtatctgccaggctccaggagtcgctcagagggacctgatggtctacaccaggactggcaaccgcacgacaggcgagggcagcaacggcgaagaacgcgttgatggcgtgcaccccaacagtgattccggcaatggtccgccaccacttcccgagaatccgacccttgcccaagttatggcgcatcagactcagatgatggcagccatgatgcagcagatgcagcaacaacaccagcaaatgcaccagaggatgatgcagcacgtcgaacagcagcaccagcactttggtccccctccccctcaatccaaattgcctgagttcctaggagtcaggccacccaccttctccagcaccaccaaccctatggaggcaaatgactggctccatgcaatagagaagaagctgaatctcctgcagtgcaatgatcaggagaaggtcgctttcgccacacaccagcttcagggtcctgcgtcagcttggtgggacaaccacatggccacccgcccaccgggtactgaagtcacatgggcagagttctgccgtagcttcaggaaggcacaagtgccagatggggtcgtggcacaaaagaagagggaatttcgtgcactccatcagggtaacaggacggtgacagagtacctccacgagttcaatcgcctcactgcgatatgcaccataggatgttcgtaccgaccccgataagcaggagaagttcatggcgggcctggatgatgagctgaccaaccagctgatatccgggtactacgctgactttgagaggctggttgacaaggcaatccgtcaggaggaccaacgcaacaagatggacaggaagaggaaggccgctcagttcagggcacatcagggaagtcaccagaggccgcgcttcactcccggacagcagggtggacctaccaccatgatcgtccgtcagcaccgcccgttcaaccctagcaacttctaccagggcaccagtgacagtcagaaccaccatggaggtcagcccaaccgcggtgcagctccacgcccaccagtggcatcggcacagtcaggccagcccgcgcaagccaagaaggagacggaagcaaaaccagggtcctgcttcaactgtggcgagcttggccacttcgctgacaaatgcccgaagcctaggcgtgccgggccaaggtttatccaggctcgtgtcaaccacgcatctgcggaggaggcacaagcagcaccagaggttgtactgggtacgtttcctgttaactcaatccctgcaacagtactttttgattctggtgcaacgcattctttcatctcaaagaaatttgtcgggatgcatgggttaataagagaggaacttagcacaccgatgcgggttcataccccagggaatagctccacttcggttcaattcagcccttctataacaatagaaattcaaaggtcaccggttctagccaacctcatccttctcgaatccaaagacctagatgtcattcttgggatggattggctgaccaagtttaagggagtcatcgattgtgcgaatcgcacagtcaccctgaccaacgagaagggagaaaccgtggtgtacaaatctctagtctcgccaaagaaaggagtctcgttgaatcagattgagacggaaatcccagtggacaccgtagagaagaacttgagaaaattggatgatatacccatagtctgcgagtatccagaggtgttccccgaagacctcactaccatgccacccaagagagagattgaattccggattgatttggcaccgggaaccgctccaatctataagagaccgtacagaatggcggccaacgaattaacggaggtcaagaagcaagttgatgaacagctgcagaaagggtacatacgaccaagcacttcaccttggggcgctccggtcatttttgtggagaaaaaggataagacgaagaggatgtgcgtcgattatcgcgcacttaacgaggtcacaatcaagaataaatatcctttgccgcgaatcgacgatttatttgatcaactgaaaggggctaaagtgttttctaagatagacctgcgctcaggctaccaccagttgagaatccgggaagaggatatcccgaagacggccttcaccactcggtacgggttatatgagtgcacggttatgtccttcggacttactaacgcgcctgcattcttcatgaatctgatgaacaaagtgttcatagaatttctggacaagtttgttgtggtattcatcgacgacatacttatctactcaaaatccgaagaagaacatgaacaacatctccgtctggtactcgagaagttgaaggagcaccagctatacgccaagttcagcaagtgtgatttctggttgacggaagtcaaatttctgggtcatgtcattacagctcagggtgtggcagtcgacccatcgaacgtggagtcagttaccaagtggaccccaccgaagactgtgtcgcagattcgaagttttctaggactggcaggttattaccgtcgattcatcggaaacttctccagaatcgcccgacccatgactcagttgcttaagaaagatgagaaatttaaatggacagcggagtgcgataagagctttgaggagctcaagaagaaattagtatccgcaccagttttgattctgcccgaccagatgaaagacttccaagtttattgcgatgcatcccgtcacggacttggatgtgtcctaatgcaagagggcagagtggttgcatatgcctcgcggcagttgcgtccacacgaaggaaattatccaactcatgacttggagttggcagcggtggttcatgctttgaagatctggaggcactatctgatcggcaaccgctgcgaagtatatacggaccataaaagtctgaaatacatcttcacccaaccggacctaaactttcgacaacgaagatggttggagctaatcaaagactatgacatgagtattcactaccacccgggtaaggccaatgtggtggcagacgctttaagccggaaaagttactgcactgctctatgcatcgagagcatgtgtgaggaattgcggcaggagtttgaacatctcaacataggaattgttgaacacgggttcgtagccgctctggaggcacggcctacgctcgtggatcaagtcagagccgctcaagtaaatgatccggaaatagcagaactgaaaaagaacatgagagtcggaaaggctcgggatttccttaaggatgagcatggcacaatctggatgggagaaagattgtgtgtacctgacgacaaggaattgaaggatctgatactcaccgaggctcatcagacccagtactccattcacccaggcagcaccaaaatgtatcaagacctcaaagaaaagttttggtgggtcagcatgaggagagaaatagctgaattcgtcgcactctgcgatgtttgccaacgagtgaaggcagagcaccaaagacccacaggtttactccaacctcttcaaatcccggaatggaaatgggaagaaattggaatggactttataacgggactgccccggacatcgtcgggtcacgattcgatctgagtagtcgtggatcgactcactaaggttgctcacttcataccagtacataccacatatacgggcaaaaggttggcggagctttacctttcgagaatcatgtgcctacatggagtactcaaaaagattgtatctgaccgagggagtcagttcacctcaaaattctggcagaagctgcaggaagaattggggacccgtttaaatttcagcacggcctatcacccgcaaactgatggccagaccgagcgggtcaatcaaatcttggaagatatgttgagagcttgcgctcttgattttggtggagcttgggacaaaagcttgccatatgcggaattctcgtacaacaacagctaccaggccagtctacagatggcaccgtttgaagctttatacggccggaagtgccgcacacctctcttctgggatcagacaggcgaacgtcaactattcggaacagaagtattagcggaagcagaagagaaagtcagaatcatcagggaaaggttgaggattgctcagtctcgacagaagagctacgcggataaccgtcgaagggagctcacttttgaggcaggagatcacgtgtaccttcgcgtcactccgctccggggagtacaccgttttcagacgaaaggcaagttggcaccacgcttcgtgggaccatacaaaatcttggaacgaaggggagaagtggcttatcagctagaacttccatccaacatgatcggcatccatgacgtgttccacgtgtcccaactaaagaagtgcttaagggtacctgaagaacaggctgattcggaacacattgatatccaggaagacctaacttatgttgagaagccggttcgtatactggataccagcgaaaggagaaccagaaacaaggtcacccggttttgccgagttcagtggagtcatcattcggaagaggaagcaacctgggaaagggaagatgagttgaaagccgcccatccgcacctcttcaccagctcctccgaatctcggggccgagattccgtt

SEQ ID NO: 22989 - DNA, 4083 bp, Oryza sativa; identical to SEQ ID NO: 13821
  Clone ID: TF_OsC359_6498

SEQ ID NO: 22990 - DNA, 639 bp, Oryza sativa; identical to SEQ ID NO: 13778
  Clone ID: TF_OsC359_6508

SEQ ID NO: 22991 - DNA, 3387 bp, Oryza sativa; identical to SEQ ID NO: 13808
  Clone ID: TF_OsC359_6569

SEQ ID NO: 22992 - DNA, 5468 bp, Oryza sativa; identical to SEQ ID NO: 13823
  Clone ID: TF_OsC359_6570

SEQ ID NO: 22993 - DNA, 2670 bp, Oryza sativa; identical to SEQ ID NO: 13878
  Clone ID: TF_OsC359_6576

SEQ ID NO: 22994 - DNA, 3477 bp, Oryza sativa; identical to SEQ ID NO: 13804
  Clone ID: TF_OsC359_6650

SEQ ID NO: 22995 - DNA, 5460 bp, Oryza sativa; identical to SEQ ID NO: 13834
  Clone ID: TF_OsC359_6654

SEQ ID NO: 22996 - DNA, 5567 bp, Oryza sativa
  Clone ID: TF_OsC359_6693
atggccggccacccacccaaccaccgcggagaaggcatgattgactttgtggcagagttggcacgtatgacgctggtggtgggctaccccaacgcgccagagtacacgactgttccaccgctcagtggcgagcttcctcaccgtgttcgcctggaggttcacggctacgtgggtacctgcctagctaatatggtggttgaggcatccggaggcacagcagatcacgcctgtcaggaggcagcatacctgatgatggccagactacgggagcgccacaactacatcttccacgacacggcgtaccgatttcaccctcgtcgagccagcggtgatgatgtcagtactttccgtccgacagccggcgagaacgacactacctttggtcacatgtgtgctgtgatgaggggattggataggatgcactcagacttgcacaaggcgtccaaggccttgaatgatgggaagctcatgaggatcgtcgctctgaaggacgagatagcgcgcctgaagagggataatgctcagttaaagggtcttcccgcgccaggaggagtccggatccgcactacgccccacaagaccacgactgcacccgtgcgcatccagcttgcgcccaagaacccacctccatcagcagctcccgcagcacctccagttccgctcgcagctccggtagttcctgcagctccagtaccagctctagctcccgttcacgtgtcagctcccgcgtctgctctctccttcgctccagcatcagccgctaggggtccagccagtggcaacggaggttggttgtctgctactcccagtggcagctgcgatctcagcagcagtagatccagtggctcagagctgggcagcggcgagacttatctgccaggctccaggagtcgctcagagggacctggtcttttcctccagatggtctacaccaggaatggtagccgcgcaacaggtgagggcagcaacggcgaagagcgcactgagggtgtgcatcccaacagcaattccggcaatggtccgccaccacttcccgagaatccgacgctagcccaagtgatggcacatcagacttagatgatggcagccatgatgcagcagatgcagcagcaacaccagcagatgcaccagcggatgctgcagcacgccgaacagcagcatcagtagtttggtccccctccccctcagtccaagttgctagagtttctacgtgtcaggccacccaccttctccagcaccaccaaccctatggaggcgaatgactggctccatgccatagagaagaagctgaatctcctgcagtgcaatgatcaggagaaggttgctttcgccacacaccagcttcaaggtcctgcgtcagcttggtgggacaatcacatggccacccgcccgccaggcactgaagtcacttgggaagagttctgtcgtagcttcaggaaggcgcaggtggcagatggggtcgtggcacaaaagaagagggaattccgggcactccattagggcaacagaactgtgacggagtatctccatgagttcaatcacctcgcgcgatatgcaccggaggatgtccgcactgacgccgagaagcaggaaaaattcctagcaggtctggatgatgagctaaccaaccagttgatatctggagattacgccgatttcgaaaggctggtggacaaggcaatccgtcaggatgatcaacgcaacaagatggacaggaagaggaaggccgctcagttcagggcacctcagggaagtcaccagaggccgcgcttcgctcccgggcagcagggtggacctaccaccatgatcgtccgccagtaccgcccgttcaaccctagcaactttccccagggcgccagtggcagtcagaaccaccatggaggtcagcccaaccgcggtgcagctccacgcccaccaacggcaccggcacagtcaggcccgtccgcgcaagccaagagggagactggagcaaaaccagggtcctgcttcaactgtggcgagcttggccacttcgctgacaaatgcccgaagcctaggcgtgccgggccaaggtttatccaggctcgtgtcaaccacgcatctgcggaggaggcacaagcagcaccagaggtcgtactgggtacgtttcctgttaactcaatccctgcaacaatactttttgattctggtgcaacacattcgttcatttcaaagaagtttgtcgggatgcatgggttaaggaaagaagagcttagcacaccaatgagggttcatacctcgggaaatagctcaacctcagtcagttttagcccttcagtgctaatagaaatccaaagatcaccatttctagccaacctcattcttctcgaatccaaagacctagatgtcattcttgggatggattggctgaccaagtttaagggagtcatcgattgtgcgaatcgcacagtcaccttgaccaacgagaagggagaaacagcagtgtacaaatcaccagactcaccaaagcaaggggtctctttgaatcagattgaggcggaaatcccagtggacaccgtgaagaagaatttgaggaaattggaagatatacccatagtctgcgagtatccagaagtgttccccgaagaccttactaccatgccacccaagagagagattgaattccggattgacttggcaccgggaaccgctccaatttacaagagaccgtacagaatggcggccaacgaactagcagaggtcaagaagcaggttgatgagcagctgcagaaagggtacattcgaccaagtacttcaccttggggtgctccggtcatttttgtggagaaaaaggataagacgaagaggatgtgcgttgattatcgcgcactcaacgaggtcacaatcaagaacaaatatcctttgccgcgaatcgatgatttgtttgatcaactgaaaggagctaaagtgttttctaagatagacctgcgatcaggctaccaccagttgagaattcgggaagaggatattccaaagacggccttcaccactcggtacgggctatatgagtgcacggttatgtctttcggacttaccaacgcacccgcattcttcatgaatctgatgaacaaagtgttcatggaatttctggacaagtttgttgtggtattcatcgacgacatacttatctattcaaagtccgaagaagaacatgagcaacatctccgtctggtactcgagaagttgaaggagcaccagctatacgccaagttcagcaagtgtgacttctggttgacggaagtcaaatttctgggccatgtcattacagctcagggtgtggcagttgatccatcgaacgtagagtcagttaccaaatggatcccaccgaagaccgtgtcgcagattcgaagttttctaggactggcaggttattaccgccgattcatcgaaaacttctccaggatcgcccgacccatgactcagttgcttaagaaagatgagaagtttaaatggacagctgagtgcgataagagttttgaggagctcaagaagaaattagtatccgcaccagttttgattctgcccgaccagatgaaagacttccaagtctattgcgatgcatcccgtcacggacttggatgtgtcctaatgcaagagggcagagtggttgcgtatgcctcgcggcagttgcgtccacacgaagggaattatccaactcatgacctggaattggcagcagtggttcatgctttgaaaatctggaggcactatctgattggcaaccgctgcgaagtatatacagaccataagagtctgaaatacatcttcacccaaccggacctaaatctccgacaacgaagatggttggaactaatcaaagactatgacatgagcattcactaccacccgggtaaagccaatgtggtggcagacgcattaagcaggaaaagttactgcactgccctatgcatcgagggcatgtgtgaggaattgcggcaggagtttgagcatctcaacgtgggaattgttgaacacgggttcgtagccgctctggaggcacggcctacgctcgtggatcaagtcagagcagttcaagtaaatgattctgaaatagcagagctgaaaaagaacatgagagtcggaaaaacccgggatttccacgaagatgaacacggcacaatctggttgggagaaagattgtgtgtacctgacgacaaggaactgaaggatctgatactcaccgaggctcatcagacccagtactccattcatccaggcagcaccaaaatgtatcaagacctcaaagaaaagttttggtgggtcagcatgaggagagaaaagctgaattcgtcgcactctgcgatgtttgtcaacgagtgaaggcagagcaccaaagaccagcaggtttactccaacctcttcaaatcccagaatggaaatgggaggagattggaatggactttataatagcactgccccggacatcatcgggtcacgattcaatctgggtagtcgtggatcgactcactaaggttgctcacttcataccagtacataccacgtatacgggcaaaaggttggcggagctctacctctcgagaatcatgtgtctacatggagtacccaaaaagattgtatctgatcgagggagtcagttcacctcaaaattctggcagaagctgcaggaagaattggggacccgtttaaatttcagcacggcctatcacccacaaactgatggtcagaccgagcgagtcaatcaaatcttggaagatatgttgagagcttgcgctcttgattttggtggagcttgggacaaaaacttgccatatgcggaattctcgtacaacaacagctaccaggccagtctacagatggcaccgtttgaagctttatacggccggaagtgccgcacacctctcttctgggatcagacaggcaagcgtcaactgttcgggacagaggtattagcggaagcagaagagaaagtcagaatcatcagggaaaggttgaggattgcccaatcttgacagaagagctacgcggataaccgccgaagggagctcacttttgaggcaggggattacgtgtatcttcgtgtcactccgctccggggagtacaccgttttcagacgaaaggcaagttggcaccacgcttcgtgggaccctacaaaatcttggaacgaaggggagaagttgcttatcagttagaacttccatccaatatgatcggcatccatgacgtgttccacgtgtcccaactaaagaagtgcttaagagtacctgaagaacaggctgactcggagcatattgatatccaggaggacctgacatatgtggagaagccggttcgtatacttgataccagcgaaagaagaaccagaaacaaggtcaccaggccgaggcccagccaggccgccccgactccctcctctcccggggtcgccgacaggtggggcccacctgtcgggtcctcccccaacctcccgccgcccgcgccggtcaccacccctccgtatccaccgtcgccgcacccatcctcgccgatttacccgagcccacgtcacgccccccgcgcccacgccatcgttgcgccctctctcccctga

SEQ ID NO: 22997 - DNA, 3916 bp, Oryza sativa
  Clone ID: TF_OsC359_6695
atgggttgcaagatggccggtcacccacccaaccaccgcggagaaggcatgatcgactttgtggcagagttggcacgcatgacactggtggtaggctaccccaacgcgccagagtacacgacgattccaccgctcagtggcgagcttcctcaccgtgttcgcttggaggtccacggctacgtgggtacttgcctagctaacatggtggtcgaggcagctggaggcacagcagatcacgcctgtcaggaggcagcatacctgatgatggccagactacgagagcgccacaactacatcttccacgacacggcataccggtttcaccctcgtcgagccagcaatgatgatgtcagttccttccgtccgacagctggcgagaacgacaccacctttggtcacatgtgtgctgtgatgaggggattggacaggatgcactcggacctgcacaaggcgaccaaggccttgaacgatgggaagctcatgaggatcgtcgctctgaaggacgagataacgcgcctgaagagggagaacgcccagttaaagggtcttcccgcgccaggaggagtctggatccgcactacgccccgcaagactacgacggcacccgtgcgcatccagcttgcgcccaggaacccacctccatcagcagctcccgcagcacctccagttccacccacagttcctgcagctccagctccagctcccgcgtccgctctctccttcgctccagcatcagccgccagaggtccagccagtggcaccggaggttgtttgtttgggatggtctacaccaggaatggtagccgcgcaacaggcgagggcagcaacggcgaagagcgcactgatggggcgcacccccacagcgattctggcaatggtccgccaccacttcccgagaatccgacccttgcccaagttatggcacatcagactcagatgatggcagccatgatgcagcagatgcagcagcagcaccagcagatgcaccagaggatgatgcagcacgtcgaacagcagcaccagcactttggtccccctccccctcagtccaagttgcctgagttcttacgtgtcaggccacccaccttctccagcaccaccaaccctatggaggcgaatgactggctccatgcaatagagaagaagctgaatctcctgcagtgcaatgatcaggagaaggtcgcttttgccacacaccagcttcaaggtcctgcgtcggcttggtgggacaaccacatggccacccgcccaccgggtactgaagtcacatgggcagagttctgccgtagcttcaggaaggcacaggtgccagatggggtcgtggcacaaaagaagagggaatttcgcgcactccatcagggcaacaggactgtgacagagtacctccacgagttcaatcgcctcacgcgatatgcaccagaggatgtccgtaccgacgccgagaagcaggagaagttcatggcgggtctggatgacgagctgaccaaccaactgatatctggggactacgccgactttgagaggctagtcgacaaggcaattcgtcaggaggatcaacgcaacaagatggataggaagaggaaggccacacagttcagggcacctcagggaagtcaccagaggccgcgcttcactcccggacagcagggtggacctaccaccatgatcgtccgccagtaccgcccgttcaatcctagcaactttccccagggctctagtggcagtcagaaccaccatggaggtcaatccaaccgcggtgcagctccacgcccaccaatggcaccggcacagtcaggcccgtccgcgcaagctaagaaggagactggggcaaaaccagggtcctgcttcaactgtggcgagcttggccacttcgctgacaaatgcccgaagcctaggcgtgccgggccaaggtttatccaggctcgtgtcaaccacgcatctgcggaggaggcacaagcagcaccagaggtcgtactgggtacgttccctgttaactcgatccctgcaatagtactttttgattctggtgcgacgcattctttcatttcaaagaaatttgtcgggatgcatgggttaataagagagaaacttagcacaccgatgcgggttcataccccagggaatagctccacttcggttcaattcagcccttctataacaatagaaattcaaagatcaccatttctagccaacctcattcttctcgaatccaaagatctagatgtcattcttgggatggattggctgaccaagttcaagggagtcatcgattgtgcgaatcgcacagtcaccttgaccaacgagaaggggaaaacggtagtgtacaaatcaccagactcaccaaagcaaggagtctccttgaatcagattgaagcggaaatcccagtggacaccgtggagaagaatttgaggaaattggaagacatacccatagtctccgagtacccagaagtgttccccgaagacctcactaccatgccacccaagagagagattgaattccggattgacttggcaccgggaaccgctccaatttacaagagaccgtacagaatggcggccaacgaattagccgaggtcaagaagcaggttgatgagcagctgcagaaagggtacattcgaccaagtacttcaccgtggggtgctccggtcatttttgtggagaaaaaggataagacgaagaggatgtgcgttgattatcgtgcactcaacgaggtcacaatcaagaacaaatatcccttgccgcgaatcgacgatttatttgatcaactgaaaggagctaaagtgttttctaagatagacctgcgatcaggctaccaccagttgagaattcgggaagaggatattccgaagacggccttcaccactcggtacgggctatatgagtgcacggttatgtccttcggacttaccaacgcacccgcattcttcatgaatctgatgaacaaagtgttcatggaatttctggacaagtttgttgtggtgttcatcgacgacattcttatctattcaaagtccgaagaagagcatgaacaacatctccgtctggtactcgagaagttgaaggagcaccagctatacgccaagttcagcaagtgtgacttctggatgacggaagtcaaatttctgggtcatgtcattacagctcagggtgtggcagtcgacccatcgaacgtagagtcagtcaccaagtggaccccaccgaagaccgtgtcacagattcgaagttttctaggactggcaggttattaccgccgattcatcgaaaacttctccagaatcgcccgacccatgactcagttgcttaagaaagatgagaagtttaaatggacagctgagtgcgataagagtttcgaggagctcaagaagaaattagtatccgcactagttttgattctgcctgaccagatgaaagacttccaagtctattgcgatgcatcccgtcacggacttggatgtgtcctaatgcaagagggcagagtggttgcgtatgcctcgcggcagttgcgtccacacgaaggaaattatccaactcatgacttggaattggcagcagtggttcatgctttgaagatctggaggcactatgtggaattttcagagctctagaaataattttaaccaattaaaattgagcaagcaatattttattccagggaaaatcctttttcctttttctttttctttttcctctctttttcctcctttttgtcaaatgggccgtcggcccatttctccttttcttcccccccctctctgttgggccggccgcaggccgaggcccagcccggcagccggccgcccgcctccctccctcccggggtcgccgacaggtgggacccacctgtcagacccgtttcccacctcccgccgatcccggcgcgccgccgcgcccgcaaccgtcgccgcgcccacg

SEQ ID NO: 22998 - DNA, 4818 bp, Oryza sativa; identical to SEQ ID NO: 13888
  Clone ID: TF_OsC359_6707

SEQ ID NO: 22999 - DNA, 5334 bp, Oryza sativa
  Clone ID: TF_OsC359_6721
atggccggtcacccacccaaccaccgcggagaaggcatgatcgatttcgtggcagagttagcacgtatgacactggtggtgggctaccccaacgcgccggagtacacgacgattccgccgctcagtggcgagcttcctcaccgtgtccacttggaggtccatggctacgtggggacttgcctcgctaacatggcggtcgaggcatctggaggcacagcagatcacgcctgtcaggaggcagcctacttgatgatggccagaatacgggagcgccacgactacatcttccacgacacggcgtaccgctaccacccccgtcgagcccatggtgatggcgtcagctccttccgtccgacagctggcgagaacgacaccacctttggtcacatgtgtgctgtgatgagtggattggacaggatgcactcggacctgcacaaggcgaccaaagccttgaacgatgggaagctcatgaggatcgtcgccctgaaggacgagatagcgcgcctgaagaaggagaacgctcagctaaagggtcttccagcgccaggaggagtccggatccgcaccacgccccgcaagacgacgactgcacctgtgcgtatccagcttgcgcccaggaacccacctccagcagcagctcccgcagcaccttcagttccgcccgcagttcctgcagctccagttccagctcccgcattcactctctccttcgctccagcatcagccgccagaggtccagccagtggtaccggaggctgcttgtttgggatggtctacaccaggactggcaaccgcacgacaggcgagggcagcaacggcgaagaacgcgtggatggtgtgcaccccaacagtgattctggcaatggtccgccaccacttcccgagaatccgacgcttgcccaagttatggcacatcagactcagatgatggcagccatgatgcagcagatgcagcagcagcaccagcagatgcaccaaaggatgatgcagcacgccgagcagcagcaccagcagtttggtccccctccccctcagtccaagttgccagagtttctacgcgtcaggccacccaccttctccagcaccaccaaccccatggaggcgaacgactggctccatgccatagagaagaagctgaatctcctgcagtgcaatgatcaggagaaggtcgctttcgccacacaccagcttcagggtcccgcgtcagcttggtgggacaaccacatggccacccgcccaccgggtactgaagtcacatgggcagagttctgccgtagcttcaggaaggcacaggtgccagatggggtcgtggcacaaaagaagagggaattccgggcgctccatcagggcaacaggactgtgacagagtacctccacgagttcaatcgcctcgcgcgatatgcaccagaggatgtccgcaccgacgccgagaagcaggagaagttcatggcgggtttggatgatgagctgaccaaccaactgatatctggggactacgctgactttgagaggctggtcgacaaggcaatccgccaggaggatcaacgcaacaagatcgacaggaagaggaaggccgctcagttcagggcacctcagggaagtcaccagaggccgcgcttcactcccgggcagcagggtggacctaccaccatgatcgtccgtcagcaccgcccgttcaaccctagcaacttccaccagggcactagtggcagtcagaaccaccatggaggtcagcccaaccgcggtgcagctccacgcccatcagtggcaccggcacagtcaggccagcccgcgcaagccaagaaggagactggagcaaaaccagggtcctgcttcaactgtggcgagcttggtcacttcgctgacaaatgcccaaagcccaggcgtgccgggccaaggtttatccaggctcgtgtcaaccacgcgtctgcagaggaggcacaaacagcaccggaggtcgtactgggtacgtttcctgttaactcaatccctgcaacagtacttttcgattctggtgcaacgcattctttcatttcaaagaaatttgtggggaggtatgggttaaggaaagaagagcttagcacaccaatgagggttcataccccgggaaatagttcaacctcagtcagttttagcccctcagtgctaatagaaatccaaagatcaccatttctagccaacctcattcttcttgaatccaaagacctagatgtcattcttgggatggattggctgaccaagtttaagggagtcatcgattgtgcgaatcgcacagtcaccttgaccaacgagaagggagaaacagtggtgtacaaatctctagtctcaccaaagaaaggggtctcgttgaatcagattgagacggaaatcccagtggataccgtagagaagaacttgagaaaattggaagatatacccatagtctgcgagtatccagaagtgttccccgaagacctcactaccatgccacccaagagagagattgaattccggattgacttggcaccgggaaccgctccaatctataagagaccatacagaatggcggccaacgaattagcagaggtcaagaagcaagttgatgagcagctgcagaaagggtacatacgaccaagcacttcaccttggggcgctccggtcatttttgtggagaaaaaggataagacgaagaggatgtgcgttgattatcgcgcactcaacgaggtcacaatcaagaataaatatcctttgccgcgaatcgacgatttatttgatcaactgaaaggagctaaagtattttctaagatagacctgcgatcaggctaccaccagctgagaatccgggaagaggatattccgaagacggccttcaccactcggtacgggctatatgagtgcacggttatgtctttcggacttaccaacgcacccgcattcttcatgaatctgatgaacaaagtgttcatggaatttctggacaagtttgttgtggtattcatcgacgacatacttatctactcaaaatccgaggaagaacatgagcaacatctccgtctggtactcgaaaagttgaaggagcaccagctatacgccaagttcagcaagtgtgacttctggttgacagaagtcaaatttctgggtcatgtcattacagctcagggtgtggcagtcgacccatcgaacgtggagtcagttaccaaatggaccccacctaagaccgtgtcgcagattcggagttttcttggacttgcgggttattaccgccgattcatcgaaaacttctccaggatcgcccgacccatgactcagttgcttaagaaggatgagaagtttaaatggacagctgagtgcgataagagctttgaggagctcaagaagaaattagtatccacaccggttttgattctgcccgaccagatgaaagacttccaagtctattgtgatgcatcccgtcacggactgggatgtgtcctaatgcaagagggcagagtggttgcatatgcctcgcggcagttgcgtccacacgaaggaaattatccaactcatgacttggaattggcagcagtggttcatgctttgaagatctggaggcactatctgattggcaaccgctgcgaagtatatacggaccataagagtctgaaatacatcttcacccaaccggacctaaatctccgacaacgaagatggttggaactaatcaaagactatgacatgagtattcactaccacccgggtaaagccaatgtggtggcagacgctttaagccggaaaagttactgcactgccctatgcatcgagggcatgtgtgaggaattgcggcaggagtttgaacatctcaacatgggaattgttgaacacgggtttgtagccgctctggaggcacggcccactctcgtggatcaagtcagagcagctcaagtaaatgattctgagatagcagagctgaaaaagaatatgagagtcggaaaagcccgggaattccacgaagatgagcatggcacaatctggatgggagaaagattgtgtgtacctgacgacaaggaactgaaggatctgatactcaccgaggctcatcagacccagtattcaattcatcccggcagtactaaaatgtaccaggacctcaaagagaaattctggtgggtcagcatgaggagagaaatagctgaattcgtcgcactctgcgatgtttgccaacgggtgaaggcagagcaccaaagaccagcaggtttactccaacctcttcaaatcccggaatggaaatgggaggagattggaatggactttataacaggactgccccggacatcatcgggtcacgattcaatctgggtagtcgtggatcgactcactaaggttgctcacttcataccagtacataccacgtatacgggcaaaaggttggcggagctctacctctcgagaatcatgtgtctacatggggtacccaaaaagattgtatctgatcgagggagtcagttcacttcaaagttctggcagaaactacaagaagaattggggacccgtttaaatttcagcacggcctatcacccgcaaactgatggtcagaccgagcgagtcaatcaaatcttggaagatatgttgagagcttgcgctcttgattttggtggagcttgggacaaaagcttgccatatgcggaattctcgtacaacaacagctaccaggccagtctacagatggcaccgtttgaagctttatacggccggaagtgccgcacacctctcttctgggatcagacaggcgaacgtcaactgttcggaacagaagtattagcggaagcagaagagaaagtcagaatcatcagggaaaggttgaggattgctcagtctcgacagaagagctacgtggataaccgtcgaagggagctcacttttgaggcaggagattacgtgtatcttcgtgtcactccgctccggggagtacaccgttttcagacgaaaggcaagttggcaccacgcttcgtgggaccatacaaaatcttggaacgaaggggagaagttgcttatcagctagaacttccatccaatatgatcggcatccatgacgtgttccacgtgtcccaattaaagaagtgtttaagggtacctgaagaacaggctgattcggaacacattgatatccaggaggacctaacttatgtggagaagccggttcgcatacttgataccagcgaaaggagaaccagaaacaaggttacccggttttgccgagttcagtggagtcatcattcggaagaggaagcaacctgggaaagggaagatgagttgaaagccgcccatccgcacctcttcaccagctcctccgaatctcggggccgagattccgtttaa

SEQ ID NO: 23000 - DNA, 5334 bp, Oryza sativa; identical to SEQ ID NO: 13870
  Clone ID: TF_OsC359_6727

SEQ ID NO: 23001 - DNA, 5358 bp, Oryza sativa; identical to SEQ ID NO: 13838
  Clone ID: TF_OsC359_6746

SEQ ID NO: 23002 - DNA, 3120 bp, Oryza sativa
  Clone ID: TF_OsC359_6774
ggcaacaggactatgacggagtacctccatgagttcaatcgcctcgcgcgatatgcaccagaggatgtccgcaccgacgccgagaagcaggaaaagttcatggcgggtctggatgacgagctgaccaaccaactgatatctggggactacgctgactttgagaggctagttgacaaggcaatccgtcaggaggatcaacgcaacaagatggataggaagaggaaggccgctcagttcagggcacctcagggaagtcaccagaggccgcgcttcgcttccgggcagcagggtggacctaccaccatgatcgtccgccagtaccgcccgttcaaccctagcaactttccccagggcgccagaggcagtcagaaccaccatggaggtcagcccagcagcggtgcagctccacgcccaccaacggcatcggcacagtcaggcccgtccgcgcaagccaagaaggagactggaacaaaaccagggtcttgcttcaactgtggcgagcttggccacttcgctgacaaatgcccgaagcctaggcgtgccgggccaaggtttatccaggctcgtgtcaaccacgcgtccgcggaggaggctcaagcagcaccagaggttgtactggcggaaatcccagtggacaccgtggagaagaacttgagggaattggaagatatacccatagtctgcgagtatccagaagtgttccccgaagacctcactaccatgccacccaagagagagattgaattccggattgacttggcaccgggaaccgctccaatttacaagagaccatatagaatggcggctaatgaattagccgaggtcaagaagcaggttgatgagcagctgcagaaagggtacattcgaccaagtacttcaccttggggtgctccggtcatttttgtggagaaaaaggataagacgaagaggatgtgcgttgattatcgcgcactcaacgaggtcacaatcaagaacaaatatcctttgccgcgaatcgatgatttgtttgatcaactgaaaggagctaaagtgttttctaagatagacctgcgatcaggctaccaccagttgagaattcgggaggaggatattccaaagacggccttcaccactcggtacggattatatgagtgcacggttatgtcgttcggacttaccaacgcacccgcattcttcatgaatctgatgaacaaagtgttcatggaatttctggacaagtttgttgtggtattcatcgacgacatacttatctattcaaagtccaaagaagaacatgagcaacatctccgcctggtactcgagaagttgaaggagcaccagctatacgccaagttcagcaagtgtgacttctggttgacggaagtcaaatttttgggccatgtcattacagctcagggtgtggcagttgacccatcaaacgtagagtcagttaccaaatggaccccaccgaagaccgtgtcgcagattcgaagttttctaggactggcaggttattaccgccgattcatcgaaaacttctccagaatcgcccgacccatgactcagttgcttaagaaagatgagaagtttaaatggacagttgagtgcgataagagttttgaggagctcaagaagaaattagtatccgcaccagttttaattctgcccgaccagatgaaagacttccaagtctattgcgatgcatcccgtcacggacttggatgtgtcctaatgcaagagggcagagtggttgcgtatgcctcgcggctgttgcgtccacacgaagggaattatccaactcatgacctggaattggcagcagtggttcatgctttgaagatctggaggcactatctgattggcaaccgctgcaaagtatatacggaccataagagtctgaaatacatcttcacccaaccggacctaaatctccgacaacgaagatggttggaactaatcaaagactatgacatgagcattcactaccacccgggtaaagccaatgtggtggcagacgcgttaagcaggaaaagttactgcactgccctatgcatcgagggcatgtgtgaagaattgcggcaggagtttgagcatctcaacgtgggaattgttgaacacggttttgtagccgctctggaggcatggcctacgctcgtggatcaagtcagagcagctcaagtaaatgattctgaaatagcagagctgaaaaagaacatgagagtcggaaaagcccgggatttccacgaagatgagcatggcacaatctggttgggagaaagattgtgtgtacctgacgacaaggaactgaaggatctgatactcaccgaggctcatcagacccagtactccattcatccaggcagcactaaaatgtatcaagacctcaaagaaaagttttggtgggtcagcatgaggagagaaatagctgaattcgtcgcactctgcgatgtttgccaacgagtgaaggcagagcaccaaagaccagcaggtttactccaacctcttcaaatcccggaatggaaatgggaggagattggaatggactttataacaggactgccccggacatcatcgggtcatgattcaatctgggtagtcgtggatcgactcactaaggttgctcacttcataccagtacataccacgtatacgggcaaaaggttggcagagctctacctctcgagaatcatgtgtctacatggagtacccaaaaagattgtatctgatcgagggagtcagttcacctcaaaattctggcagaagctgcaggaagaattggggacccgtttaaatttcagtacggcctatcacccgcaaactgatggtcaaaccgagcgagtcaatcaaatcttggaagatatgttgagagcttgcgctcttgattttggtggagcttgggacaaaaacttgccatatgcggaattctcgtacaacaacagctaccaggccagtctacagatggcaccgtttgaagctttatacggccggaagtgccgcacacctctcttctgggatcagacaggtgagcgtcaactgttcgggacagaggtattagcggaagcagaagagaaagtcagaatcatcagggaagggttgaggattgcccagtctcgacagaagagctacgcggataactgctga

SEQ ID NO: 23003 - DNA, 5358 bp, Oryza sativa; identical to SEQ ID NO: 13857
  Clone ID: TF_OsC359_6786

SEQ ID NO: 23004 - DNA, 4875 bp, Oryza sativa
  Clone ID: TF_OsC359_6814
ttaagtctgactgctcttgtcaagagaacagacaccgatctttgaacgaagctcctgaaacctggttctgcccagagatttggtgaatatatcaccgagctgctccgcagttcccacgaacatcatttcgatcagtttcttttctgcacactcccggatataatgatatttgacatcgatatgcttactccggtcatgatgcactggattttttatcaatgatattgtggactggttgtccaccttcagcagcggtgcggtgatctcgtcgcccagcacctccgctaacagccgcgcgagccatactccttgacatgttgcggcggctgcggcgatgtactcggcctcacaggaagacaatgccaccaccttctgcttggaggactgccaagtgacaggcccgccattgatgaagaaaatctggccggacgtgctctttcgctcatctggatcgccagccagatcactgtcagagtaaccaaccagcattggcaaagcgcaccgtgcacctgggccaaatcgaattccccagcagcgagtgcctgccacatagcgcagtatgcgccgaacggcagcgagatgatcttccctgggtgactccatgaagcgactgacatacccaacagagaatgccaggtcgggtcgcgtgttgacgagatagcgcagactcccaaccaagctgcgatacagtgtagcatccacaagcggaaaatctgaaccctttctcaatttcaaacgtacctccataggagtctgacagggattgcagtccttgagtcctgccttctcaagaatcttgccggcatatgcggcttgccccagcgtgatcccatcactgtcctgggtaacctcgatgccgaggtagtatctgagtgcccccaaatcactcatcttgaagagcttcatcatctctcccttgaagctgcggatctcgtcgtcgtgatcgccggtgatgatgaggtcatcgacgtagacgcccaccatcagtcgtcttcctcccctggtgcgtgtgtacacaccatgctcggagctgctgcggtgaaagccgagtgacagcaaggagctatcaagtttggcattccacgcgcgaggcgcctggcgcaagccgtaaagagctttgtgtaggcgatacaccttgttcttgtggttgtcgtcgacaaaacccggcggctgcgagacataaacttcctcgagcagctcgccgttgaggaatgccgacttgacgtccatgtggtggacttgccacccttggtgcgcggcgacggcgagaaggaggcgcaccgattccagccgggcgacaagtgcgaagacctcgtcgaagtccaccccctgtcgctggacgtaccccttagcgacgaggcgcgccttgtagcgcacgatcgccccctgttcgtcacgtttcagcttgtagacccattttagcccaattgcacggtggccatggggtaggtcagtgagcgaccaagtgtcgttgtcgacgatcgcgttaagctcgtcttgcatggcgccacgccagcttggatccgcctcagcctcagccagtgaagcaggttcgtcggcgctcacaacatggagctcgagctgttccagcacccgcggagcgtgtccgggcggtgaggcattccccagcaggttatccaccaggcggtagcgaggcacgacgtcgtcatctgcgtcggcgtccaggatggaatcttgggtaggcggcgtgacaaactcaaccgcctccggcgacggaggcgacggaggtgccggtgtcgtgggggccgacggagccggcgatggtggcgagggtggagtcggcgacgaagcaggtgccgtcccgatggtggtcgtcaccacctgttcgacggtgaacggctcgagctggggagcaccatcaggcgtcactggtccccagtcccaggcgatgtcttcatcaaacaccacgtccctagacacatggacgcgctcgctgactggatcatagagccggtaggccttcgagccttgctcgtagccgaggagcaccattggcgcactccggtcatcgagtttcttcagcccgggcttggtgatcttgacgtgccccacgcacccgaaagtgcgcaggaaatgcacagcgggccattggccataccatgcttcatagggcgtctggttgtccaagcttttcgtcggcgaacgattcaagagaaagaccgctgtggacatggcctctccccagaaccgcccaggaacacccttcgccttcatcatgctgcgggcagtggcgacgatggtttggtttcgacgctccactactccgttctgctgcggggagtagggcgccgtcaactgccgaccaactccgagattggcgcagtattccccaaattcgattgaggtgaattcgcttccacgatccatgcgcagtgcacggagtttgcgcccggactccacctctgcacgggcctgaaagtgcttgatggcgttcgcggcctcatccttgctcctaatcatggttagccacatatagcggctcatgtcatcgacaagcaacaaaaaataccgattaccagccggcgttgcaggttcgatcggcccacagagatcgccgtggacgagctccagatgttcgtcagcgcggtacttggactgcgtcgggaacgccgctcgccgctgcttcccgagcaaacagccatcgcagacttgagtgacttgttgtagcagcggcagcccacgaaccatttcctgttgcgcgagcttgcggagagcaggaaagttgaggtggccgtacctggcgtgccaccgccacgccggctcggcgctccttgccgcgaggcagaccggacggtcgatgtccagcttgatggtgtagaggcagtcgtcggagcgtcggacacggacgagtaggtgccctcgaggatcccacacgtgcaggatgccgtgatgaatcagtaccttgctgccggaacgatccagctgtccaaggctgacgatgttcgccgtgagccgcgggatgtagtagaccccggcgatgccgcggtgttccccgaacctgcaggagaacaggacggtgacgcggccctcgatgcgaaccaccgagccgtcgccaaacctgacagtgccggtgaccgccgtgtcgagctcggcgaaagcggagcgggacccggtcatatggttggttgcgccagtatccaggatccacatcgccggatcatgttcgccaccgtcgtctagctgcgcgaagaccttggcctcgaccacggcaagttcgccaatcggcgacggcgccctcggcgcgctcggtggcgagacgacgtttgtcggtgcagcgacgcgaggacgcggcggatccagctgcaccttggccaggagcagagcaggctcttcgtcctcctcctgggctacgtaagcttgctgggccttgggcttgctgcgacagtctttggcccaatgtcccctcttgccgcaattcttgcaatttcccgggttacggcctcccgggttggctggcttgggctgggcctccttcggggctccatcgtccttcttcccacgccctcgaccccggcggtcgccgttgccgctggaggagtgagcggcgtcttgcagagaggccgccttgcggaatttcgccagccattcttcctcggtgaagaggagacggccattggcgtcgacccgactcgatgccgccgcagtcttgcactgcttgcgttgctcgacggagcgcagacgcccagtaacctcctcgagagacagctcattgacgtcgagcaaggtctcaatcgagatggctatttgctggagatgttctgggacaacctgcaacaatttctgaacgacctcagcttcagtgatattatcacctaaggtgcgaaggttgttggcgaggccgccgatccgcatcgagaagtcgtcgacggtttcatcgtccttgaagaggatatcaccgaattctcggcgcagctgctgtgcattcgcctcacgcacgcgctgcacaccgatacggcgagtcttgatcgcttcccacgcctcctgcgccgtctccttgacagcgagcgtggcgagcatctcggcgggcacggcgcgaagtatcgcggcgagcgcctgctggtcctgccggtagtcgacgagatcatcgccctccggctccaccgcgccccacagacattgggcttgcatgttcacccgcattaccagcgcccaatcttggtaatttgtgcgggtgagtgtcgggtagacgacgctgctcgtggtcgcctcgcggacgacgcgttccaccacgacttggccgcggccgccatgacggccacggcgcggagacggcgagcgccagcgacgacgcggtggtgagtgggagacgtggagcagaagcaccagactaacaccaccgatgctgacgtaggccacaacagcgcagtcatcgccgccagagacagcaacagcgcagccgtgggcagcatcagagcagccaccaccgccgcgggccgcattcgagccgccgccgccaccttgggccgcatccgagcagccgccgccgccacgggccgcatccgagcagccgccgccgtcgtgggccgcatccgagccgccgccgccgccacggaccgcatccgagcagccgccgccgccgtgggccgcaaccgagccgccgccaccgccgccatggaccgcatccgaacagccgccgccgccgtgggccgtatccgagccgccgccgccgccacggaccgcatccgagcagccgccgccgccgtggaccgcttccgagccgccgccgccgccgtcatcttcggtcgtaatcgcgtcgccatcaccgagtcgggatcaggtcgggatcaatcaggattgtccatcagatcagacggccccaacttctcccgcgtcgcgctgggcgccgttctgtaa

SEQ ID NO: 23005 - DNA, 5484 bp, Oryza sativa; identical to SEQ ID NO: 13797
  Clone ID: TF_OsC359_6925

SEQ ID NO: 23006 - DNA, 4995 bp, Oryza sativa
  Clone ID: TF_OsC359_6933
tcaccactcccgaaaccgctgccgccgcgccccacctcccccgctttccccgcgcccacgccgcgtcgcctgcgcccactccacatcgccgccccctctccccgcgtctcccggccgcgccccagagtacgagtatgtgtccgatggtgggttcttcgaggagtaggcttcatccgtgcagtcgaggatgcctatggagtgatgttcccggtggatctgtatgtcaacattgtcgtttgtgtaccccggccggtcctggacgggggttttaatgcatattccctttgtcttctctagatggccgagcacccacccaaccaccgcggagaaggcatggatgacttcgtggcagagttggcacgcatgacactggtggtgggctaccccaacgcgccggagtacacgactgttccaccgctcagtggcgagcttcctcaccgtgtccgcttggaggtccatggttacgtggggacttgcctcgctaacatggtggtcgaggcgtctggagccacagcagatcacgcatgtcaggaggcagcatatctgatgatggccagactgcgggagcgccacaactacatcttccacaacacggtgtaccgtttccaccctcgtcgagccaacgacagtgatgtcagttccttccgtccgacagccggcgagaacgacaccaccttcagtcacgcgtccaaggccttgaatgatgggaagctcatgaggatcgtcgctctgaaggacgagatagcgcgcctgaagagggagaatgctcagttgaagggtcttcccgcgccaggaggagtccagatccgcaccacgcctcgcaagtcgacaacggcacccgtgcgcatccagcttgcgcccaggaacccacctccgtcagcagctcccgcagcacctccagttccgcccgcagctccagcagttcctacagctccagcgccagccccagctcctgttcccgtgtcagctccagcatccgctctctccttcgcacctgcatcagccgtcaggggccccgccagtggcaatgggggttggttgcctgctactcccagtggcagtcgcgaccgcagcagcagcagctccagtggcatagagccgggcagcggcgagacttatctgccaggctccaggagtcgctcagaggacctgatggtctacaccaggactggcacccgcacgacaggcgagggcagcaacggcgaagaacgcgctgatggtgtgcaccccaacagtgattccggcaatggtccgccaccacttcccgagaatccgacgctagcccaagttatggcacatcagactcagatgatggcagccatgatgcagcagatgcagcagcagcaccagcagatgcaccagaggatgctgcagcacgctgaacagcagcaccggcagtttggtccccctccccctcagtccaagttgccagagtttctacgtgtcaggccacccaccttctccagcaccaccaaccccatggaggcgaatgactggctccatgccatagagaagaagctgaatctcctgcagtgcaatgatcaggagaaggtcgctttcgccacacaccagcttcaaggtcctgcgtcagcttggtgggacaatcacatggccacccgcccgccaggcactgaagtcacttgggcggagttctgtcgtagcttcaggaaggcacaggtgccagacggggtcgtggcacaaaagaagagggaattccgggcgctccatcagggcaataggacagtgacagagtacctccatgagttcaatcgcctcgcgcgatatgcaccggaggatgtccgcactgacgccgagaagcaggaaaagttcatggcaggtctggatgacgagctgaccaaccaactgatatctggggactacgctgattttgaaagactggttgacaaggcaatccgtcaggaggatcagcgcaacaaaatggacaggaagagaaaggcggcacagttccggtccaaccaaggaaaccatcagcgaccgcgtttcactcccggacagcagggtggacctaccaccatgatcgtccgccagcaccgcccgttcaactccagcaacttccaccagggcgctagtggcagtcagaaccaccatggaggtcagcctaaccgcggtgcagctccacgcccaccagtggcaccagcacaatcaggcccgtccgcacaagctaaggagaccgaagccaaacctgggtcctgtttcaactgtggtgagcttggccacttcgccgacaaatgcccgaagcccaggcgtgccgggccaaggaaagaagagcttagtacaccaatgagggttcataccccaggaaatagttcaacctcagtcaattttagcccttcagtgctaatagaaatccaaagatcaccatttctagccaacctcattcttctcgaatccaaagacctagatgtcattcttgggatggattggctgaccaagtttaagggagtcatcgattgtgcgaatcgcacagtcaccttgaccaacgagaagggagaaaccgtggtgtacaaatcactagtctcaccaaagcaaggggtctccttgaatcagatcgagatggaaatcccagtggtcaccgaggagaagaattcgaggaagttggaagagattcctatagtctgcgagtacccagaagtgtttcccgaagatctcactaccatgccacccaagcgaaagattgaattccggattgatttggcaccgggaaccgcgccaatttacaagagaccgtacaggatggcggccaacgaattagcagaggtcaagaagcaggttgatgagcaactgcagaaagggtacattcgaccgagtacttcaccttggggtgctccggtcatttttgtggagaaaaaggataagacgaaaaggatgtgcgttgattatcgcgcactcaacgaggtcacaatcaagaataaatatcatttaccgcggatcgatgatttgtttgatcaactgaagggagctaagttaaggatccgggaagaggatattccaaagacggctttcaccactcgatacgggctgtatgagtgcacggttatgtctttcggacttaccaacgcacccgcattcttcatgaatctgatgaacaaagtgttcatggaatttctcgacaagtttgttgtggttttcatcgacgacattcttatctattcaaagtctgaagaggaacatgagcagcatcttcgtctggtactcgagaagttgaaggagcaccaattatacgccaagttcagcaagtgtgacttctggttgacagaagtcaaatttctgggtcatgttattacagctcagggtgtggcagttgatccatcgaacgtggagtcagttaccaaatggaccccaccgaagaccgtgtcgcagattcgaagttttcttggacttgctggttattaccgccgattcatcgaaaacttctccaggatcgcccgacccatgactcagttgcttaagaaagatgagaagtttaaatggacagctgagtgcgataagagctttgaggagctcaagaagaaattagtatccgcaccagaaggcagagtggttgcgtatgcctcgcgacagttgcgtccacacgaagggaattatccaacccatgatttggaattggcagcagtggttcatgctttgaagatctgggggcactatctgattggcaaccgctgtgaagtatatacggatcacaagagtctgaaatacatcttcacccaaccggatctaaatctccgacaacgaagatggttggaattaatcaaagactatgatatgagcattcactaccacccggggaaagccaatgtggtggcagacgcattaagcaggaaaagttactgcactgctctatgcatcgagggcatgtgtgaggaattgcggcaggagtttgagcatctcaacgtgggaattgttgaacatgggttcgtagccgctctagaagcacggcctacgctcgtcgatcaagttagagccgctcaaataaatgatccggaaatagcagagctgaaaaagaacatgagagtcggaaaggctcgggatttccttgaggatgagcatggcacaatctggatgggagaaagattgtgtgtacctgacgacaaggaactgaaggatctgatactcaccgaggctcatcagacacagtattccattcacccaggcagcactaaaatgtaccaagacctcaaagaaaagttttggtgggtcagtatgagaagagaaatagctgaattcgtcgcactctgcgatgtttgccagcgagtgaaggcagagcatcaaaggccagcaggtttactccaacctcttcaaattccagaatggaaattgcataccacctatacgggaaagagattggcagagttgtacctggcaaggatcatgtgtttgcatggggtacctaagaagatagtatctgaccgagggagtcagttcacctcaaaattttggcagaaactgcagaaagaattggggacccgtttaaatttcagtaccgcctaccatccgcagacagatggtcagaccgagcgagtcaatcaaatcttggaagatatgttgagagcttgcgctcttgacttcggtggagcttgggacaacagcttgccatatgcggaattctcatacaacaacagttaccaagccagtctacagatggcaccgtttgaagctttatacggccggaagtgccgcacacctctcttctgggatcagacaggcgagcgtcaattgttcgggacagaggtattaacggaagcagaagagaaagtcagaaccatcagggaaaggttgagaattgcccagtctcgacagaagagctacgcggataaccgccgaaggaagctcacttttgaagcaggggattatgtgtatcttcgggttaccccgctccggggagtgcaccgttttcaaaccaaaggcaagttagcaccacgtttcgtgggaccctacaaaatcttggaacgaagggggaagttgcttattagctag

SEQ ID NO: 23007 - DNA, 3663 bp, Oryza sativa; identical to SEQ ID NO: 13850
  Clone ID: TF_OsC359_6996

SEQ ID NO: 23008 - DNA, 4713 bp, Oryza sativa; identical to SEQ ID NO: 13880
  Clone ID: TF_OsC359_7059

SEQ ID NO: 23009 - DNA, 3617 bp, Oryza sativa
  Clone ID: TF_OsC359_7142
atggaggcgaatgactggctccatgacatagagaagaaactgaatctcctgcagtgcaatgatcaggagaaggttgctttcgccacacaccagcttcaaggtcctgcgtcagcttggtgggacaatcacatggccacccgcccgccaggcactgaagtcacttgggcggagttctgtcgtagcttcaggaaggcgcaggtgccagacggggtcgtggcacaaaagaagagggaatttcgggcactccatcagggcaacaggactgtgacagagtatctccatgagttcaatcgcctcgcgcgatatgcaccagaggatgtccgcaccgacgccgagaagcagaaaaagttcatggcaggtctggatgacgagctgaccaaccaactgatatctggggactacgcggattttgaaaggctggtggacaaggcaatccgtcaggaggatcagcgaaacaaaatggataggaagagaaaggcggcacagttccggtccaaccaaggaaaccatcagcgaccgcgcttcgctcccgggcagcagggtggacctaccaccatgatcgtccgccagtaccgcccgttcaaccctagcaacttccaccagggcgccagtggcagtcagaaccaccatggaggtcagcccaaccgcggtgcagctccacgcctaccagtggcaccggcacagtcaggcccgtccgcgcaagccaagaaggagactggaacaaaaccagggtcctgcttcaactgtggcgagcttggccacttcgctgacaaatgcccaaagcccaggtgtgccgggccaaggtttgtccaggctcgtgtcagccacgcgtctgcagaggaggcgcaagcagcaccagaggtcgtactgggtacatttcctgttaactcaatccctgcaacagtactttttgattctggtgcaacgcattctttcatttcaaagaaatttgtggggatgcatgggttaaggaaagaagagcttaatacaccaatgagggttcataccccgggaaatagttcaacctcggtcagttttagcccttcagtgctaatagaaatccaaagatcaccatttctagccaacctcattcttcttgaatccaaagacctagatgtcattcttgggatggattggctgaccaagttcaagggagtcattaattgtgcgaatcgcatagtcaccttgaccaacgagaagggagaaaccgcagtgtacaaatcactagtctcaccaaagcaaggggtcgccttgaatcagatggaggcggaaatcccagtggtcaccgaggagaagaatccgaggaaattggaagagattcccatagtttgcgagtacccagaagtctttcccgaagacctcactaccatgccacccaagcgagagattgaattccgaattgatttggcaccgggaaccgcgccaatttacaagagaccgtacaggatggcggccaacgagctagcagaggtcaagaagcaagttgatgagcagctgcagaaagggtacattcgaccaagtacttcaccttggggtgctccggtcatttttgtggagaaaaaggataagacaaagaggatgtgcgttgattatcgcgcactcaatgaggtcacaatcaagaataaatatcctttaccgcggatcgatgatttgtttgatcaactgaagggagctaaggtgttctctaagatagacatgagatcaggctatcaccagttgagaattcgggaagaggatatttcaaagacggccttcaccactcggtacgggctatatgagtgcacggttatgtctttcggacttaccaacgcacccgcattcttcatgaatttaatgaacaaagtgttcatggaatttctggacaagtttgttgtggtattcatcgacgacatacttatctatccaaagtctgaagaagaacatgagcagcatctccatttggtactcgagaagttgaaggagcaccagttatacgccaagttcagcaagtgtgatttttggttgacggaagtcaaatttctgggccatgttattacagctcaagttcagcaaactgagccacaaactaagccttacccactagacatgtggaagtacggtagtgctttgcaacagaggcccgagcttaatccttatagtacccgagctcagggtgtggcagttgatccatcgaacgtggagtcagttaccaaatggaccccaccgaagaccgtgtcacagattcgaagttttcttggacttgtaggttattaccgccgattcatcgaaaacttctccaggatcgcccgacccatgactcaattgcttaagaaagatgagaagtttaaatggacagctgagtgcgacaagagttttgaggagctcaaaaagaaattagtatccgcaccagttttgattctgcccgaccagatgaaagacttccaagtctattgcgatgcatcccgccacggacttggatgtgtcctaatgcaagagggcagagtggttgcgtatgcctcgcgacagttgcgtccacacgaagggaattatccaactcatgacctggaattggcagcagtggttcatgctttgaagatccggaggcactatctgattggcaaccgctgcgaagtatatatggaccataagagtctgaaatacatcttcacccaaccggacctaaatctccgacaacgaagatggttggaattaatcaaagactatgatatgagcattcactaccacccggagaaagccaatgtggtagcagacgcattaagcaggaagagttactgcactgccctaggcatcgagggcatgtgtgaggaattgcggcaggagcttgagcgtctcaacgtgggaattgttgaacacggattcgtagccgctctggaagcacggcctacgctcgcggatcaagtcagagcggctcaagtaaatgatcctgaaatagcagagctgaaaaagaatatgagagtcagaaaagcccgggattttcatgaagatgaacacggcacaatttggttgggagaaagattgtgtgtacctgacgacaaggaactgaaagatctgatactcaccgaggctcatcagactcagtactccattcatccaggcagcaccaaaatgtatcaagacctcaaagaaaagttttggtgggtcagcatgaggagagaaatagctgaattcgtcgcactctgcgatgtttgccaacgagtgaaggcagagcaccaaagaccagtaggtttactccaacctcttcaaatcccggaatggaaatgggaggagattggaatggactttataacaggactgccccggacatcatcgggtcacgattcaatctctgtcgtgaatgttaccctacttccttttgcaccatttgttgaagtacgaaggtctacatttggcattggcacttcgacatcagtgtcctcgaacatcatgtgcacaaagggatcacctctacttgtcattgcaatctagtcactgcaataaatatataaattgacaacctttccaatcgatctcagaaacatcaacaaatgattgtaattgctcaaacaaatatgaaaacaaggtacatcgatttgcactattgaattcctattaactatgctatagcttatattcagaat

SEQ ID NO: 23010 - DNA, 4056 bp, Oryza sativa; identical to SEQ ID NO: 13877
  Clone ID: TF_OsC359_7158

SEQ ID NO: 23011 - DNA, 5352 bp, Oryza sativa; identical to SEQ ID NO: 13874
  Clone ID: TF_OsC359_7225

SEQ ID NO: 23012 - DNA, 5157 bp, Oryza sativa
  Clone ID: TF_OsC359_7450
atggccggccacccacccaaccaccgcggagaaggcatgattgactttgtggcagagttggcacgcatgacactggtggtgggctaccccaacgcgccagagtacacgacgattccaccgctcagtggcgagcttcctcaccgtgttcgcttggaggtccacggctacgtgggtacctgcctagctaacatggtggtcgaggcatctggaggcacagcagatcacgcctgtcaggaggcagcctacttgatgatggccagactacgggagcgccacaactacatcttccacgacacggcgtaccgcttccacccccgtcgagccaacggtgatgacgtcagctccttccgtccgacagctagcgagaacgacaccacctttggtcacatgtgtgctgtgatgaggggattggacaggatgcactcggacctgcacaaggcgaccaaggccttgaacgatgggaagctcatgaggatcgtcgctctgaaggacgagatagcgcgcctgaagagggagaacgctcagctaaagggtcttccagcgccaggaggagtccggatccgcactacgccccgcaagacgacgacggcacccgtgcgcatccagcttgcgcccaggaacccacctccatcagcagctcccgcagcacctccagttccgcccgcagctccggcagttcctgcagctccagctcccgcgtccgctctctccttcgctcccgcatcagccgccaggggtccagccagtggcaatggaggttgcttgtttgggatggtctacaccaggaatggtagccgcgcaacaggcgagggcagcaacggcgaagaacgcgctgatggtgtgcaccccagcagtgattccggcaatggtccgccaccacttcccgagaatccgacccttgcccaagttatggcacatcagactcagatgatggcagccatgatgcagcagatgcagcagcagcaccagcagatgcaccagaggatgatgcagcacgtcgaacagcagcaccagcagtttggtccccctccccctcagtccaagttgccagagtttctacgcgtcaggccacccaccttctcaagcaccaccaaccccatggaggcgaatgactggctccatgccatagagaagaagctgaatcgcctgcagtgcaatgatcaggagaaggtcgctttcgccacacaccagcttcagggtcccgcgtcagcttggtgggacaatcacatggccacccgcccaccaggtactgaagtcacatgggcagagttctgccgtagcttctggaaggcgcaggtgccagacggggtcgtggcacaaaagaagagggaattccgggcactccatcagggcaacaggactgtgacagagtacctccacgagttcaatcgcctcgcgcgatatgcaccagaggatgtccgcaccgacgccgagaagcaggagaagttcatggcgggtctggatgatgagctgaccaaccaactgatatccggggactacgctgactttgagaggttggttgacaaggcaatccgccaggaggatcaacgcaacaagatggacaggaagaggaaggccgcacagttcagggcacctcagggaagtcaccagaggccgcgcttcgctcctgggcagcagggtggacctaccaccatgatcgttcgtcagcaccgcccgttcaaccctagcaactttccccagggcgccagtggcagtcagaaccaccatggaggtcagtccaaccgcggtgcagcttcacgcccaccaatggcaccggcacagtcaggcccgcccgcgcaagccaagaaggagactggagcaaaaccagggtcctgcttcaactgtggcgagcttggccacttcgctgacaaatgcccgaagcctaggcgtgccgggccaaggtttatccaggctcgtgtcaaccacgcatctgcggaggaggcacaagcagcaccagaggtcgtactgggtacgttccctgttaactcaatccctgcaacagtactttttgattctggtgcgacgcattctttcatttcaaagaaatttgtcgggatgcatctgttaataagagaggaacttagcacaccaatgcgggttcataccccagggaatagctccacttcggttcaattcagcccttctataacaatagaaattcaaagatcaccatttctagccaacctcattcttctcgaatccaaagacctagatgtcattcttgggatggattggctgaccaagtttaagggggtcatcgattgtgcgaatcgcacagtcaccttgatcaacgagaagggagaaaccgtggtgtacaaatctctagtctcgccaaagaaaggggtctctttgaatcagattgaagcggaaatcccagtggacaccgtagagaagaactcgagaaaattggaagatatacccatagtctgcgagtatccagaagtgttccccgaagacctcactaccatgccacccaagagagagattgaattccggattgacttggcaccgggaactgctccaatctataagagaccatacaggatggcggccaacgaactagcagaggtcaagaaacaggttgatgagcagctgcagaaagggtacattcgaccaagtacttcacctttgggtgctccggtcatttttgtggagaaaaaggataagacgaagaggatgtgcgttgattaccacgcactcaacgaggtcacaatcaagaacaaatatcctttgccgcgaatcgatgatttgtttgatcaactgaaaggagctaaagtgttttctaagatagacctgcgatcaggctaccaccagttgagaattcgggaagaggatattccgaagacggccttcaccactcggtacgggctatatgagtgcacggttatgtctttcggactcaccaacgcacccgcattcttcatgaatctgatgaacaaagtgttcatggaatttctggacaagtttgttgtggtgttcatcgacgacattcttatctattcaaagtccgaagaaaaacatgaacaacatttccgtctggtactcgagaagttgagggagcaccagctatatgccaagttcagcaagtgtgacttctggttgacggaagtcaaatttttgggccatgtcattacagctcagggttattaccgtcgattcatcgaaaatttctccagaatcgcccgacccatgactcagttgcttaagaaggatgagaagtttaaatggacagccgagtgcgataagagcttcgaggagctcaagaagaaattagtatccgcacccgttttgattctgcccgacccgatgaaagacttccaagtctattgtgatgcatcccgtcacggacttggatgtgtcctaatgcaagagggcagagtggttgcgtatgcctcacggcagttgcgtccacacgaagggaattatccaactcatgacttggaattggcagcagtggttcatgctttgaagatctggaggcactatctgattggcaaccgctgcgaagtatatacggaccataagagtctgaaatacatcttcacccaaccggacctaaatctccgacaacgaagatggttggaactaatcaaagactatgacatgagtattcactaccacccgggtaaagccaatgtggtggcagacgctttaagccggaaaagttactgcactgccctatgcatcgagggcatccgctctggaggcacggcctacgctcaagcaaatgattctgaaatagcagagctgaaaaagaacatgagtgtcggaaaagcccgggatttccacgaagatgagcatggcacaatctggttgggagaaagattgtgtgtacctgacgacaaggaactgaaggatctgatactcaccgaggctcatcagacccagtactccattcacccaggcagcactaaaatgtatcaagacctcaaagaaaagttttggtgggtcagcatgaggagagaaatagctgaattcgtcgcactctgcgatgtttgccaacgagtgaaggcagagcaccaaagaccagcaggtttacttcaacctcttcaaatcccggaatggaaatgggaggagattggaatggactttataacaggactgccccggacatcatcgggtcacgaatcgatctgggtagttgtggatcgactcactaaggttgctcacttcataccagtacataccacatatacgggcaaaaggttggcggagctttacctttcgagaatcatgtgcctacatggagtacccaaaaagattgtatctgaccgagggagtcagttcacctcaaaattctggcagaagctacaggaagaactggggacccgtttaaatttcagcacggcctatcacccgcaaactgatggtcagaccgagcgagtcaatcaaatcttggaagatatgttgagagcttgtgctcttgattttggtggagcttgggacaaaagcttgccatatgcggaattctcgtacaacaacagctaccaggccagtctacagatggcaccgtttgaagctttatacggccggaagtgtcgcacacctctcttctgggatcagacaggcgaacgtcaactgttcggaacagaagtattagcggaagcagaagagaaagtcagaatcatcagggaaagattgaggattgctcagtctcgacagaagagctacgcggataaccgtcgaagggagctcacttttgaggcaggagattacgtgtatcttcgtgtcactccgctccggggagtacactggtttcagacgaaaggcaagttggcaccacgcttcgtgggactatacaaaatcttggaacgaaggggagaagttgcttatcagttagaacttccatccaatatgatcggcacccatgacgtgttccatgtgtcccaattaaagaagtgcttaagggtacctgaagaacaggctgattcggagcacattgatatccaggaggacctaacatatgtggagaagccggttcgtatacttgataccagcgaaagaagaaccagaaataaggtcaccaggttttgccgagttcagtggagtcatcattcagaagaggaagcaacctgggaaagggaagatgagttgaaagccgcccatccgcacctcttcagcagctcctccgaatctcggggccgagattccgtttaa

SEQ ID NO: 23013 - DNA, 5478 bp, Oryza sativa; identical to SEQ ID NO: 13873
  Clone ID: TF_OsC359_7454

SEQ ID NO: 23014 - DNA, 6055 bp, Oryza sativa
  Clone ID: TF_OsC359_7650
cactcctcggtttcgccggaacgccatcgccgcgaacctctacatccgcctcgccggagttgttcggccgcctgtccctcctcgccgtgcaccggtcgaccacacctccaccacctccggcatcgcagcggcaaggtcgtcctcggcatcgtttcccctccatccaaacccctccgcggtccatcatcgtcgtctccgatcgttctcgtcgtcgacgtcccgtcggtcgcccggctcgtcgtctcgcggcgccgcctccgtcgtcggcatcgtagcggcgtggtcctcgtcgtcctcgtccccgtgcagccgctgccggctgtcctcgtcgcctcctcgccggtcccggtcgtcgtcgtcgtcgtcgtcgtcatcctctcgtcgttcccggtcgtcgtggcgttcgtccctccgtcaagccgttctcgttcgtcgtcctcgcttcgtcaagatcgctgcagccccgtcctcgtgttcgtcctcggttccgcgtcgtcaagcctcgtgccggccgcgtctcgcccgtgtaccggtgtcggtagtcgttcacgcgcgcgggtggtgaccgtgtagtgtccgtgttagtgtgcccgctcggtagccgcgtggtttccacgtgtgcaacccgtgtggtgtctagtggagtccgtttgtcggccactcgcctcggttgacacacgggatccgcttccgtcgacccgtggaccgtctctgtgtactcggttttctttttatgtattgttattgcttctttataggcttgtagctttgcttgtgtgcttcgcgtagcttctgtcgttccggaggttcccgaagcgtggttcgcggtcgtcgccgaaggttcggaaggccgttctctctctcttcccctttcaaaacccctaaaacctgttttcggtggggtttgggtgcatgccagttgtgggaagtagcaccccggccactataaggattaagctcgggcctctgttgcaaagcactaccgtacttccacatgtctaatgggtaaggcttagtttgtggctcagtctagtcataaacaaaagtacacggattggagatggatgaagtcgggcgtcgatggacattctccagggcaaatgaaggctacacgggctgcggcccggcaattttcccggtcgcgacagacctgcacaaggcgaccaaggccttgaacgatgggaagctcatgaggatcgtcgctctgaaggacgaggtagcgcgcctgaagaaggagaatgctcagttgaagggccttccagcgccaggaggagtccggatccgcactacgccccgtaagaggacgactgcacctgtgcgcatccagcttgcgcccaggaacccacctccaccagcagctcccgcagcagctccagttccgcccgcagttcctgcagctccagctccagctcccgcgttcactctctccttcgctccagcatcagccgccagaggttcagccagtggtaccggaggttgcttgtttgggatggtctacaccaggactggtagccgcgcaacaggcgagggcagcaacggcgaagaacgcgctgatggtgtgcaccccaacggtgattctggcaatggtccgccaccacttcccgagaatccgacgcttgcccaagttatggcacatcagactcagatgatggcagccatgatgcagcagatgcagcagcagcaccagcagatgcatcagaggatgatgcagcacgccgaacagcagcaccagcagtttggtccccctcccccccagtccaagttgcctgagtttctacgtgtcaggccacccaccttctccagcaccaccaaccctatggaggtaaatgactggctccatgcgatagagaagaagctgaatctcctgcagtgcaatgatcaggagaaggtcgctttcgccacacaccaacttcagggtcctgcgtcagcttggtgggacaaccacatggccacccgcccaccgggtactgaagtcacatgggcagagttctgccgtagcttcaggaaggcacaggtgccagacggggtcgtggcacaaaagaagagggaattccgggcgctccatcagggcaacaggactgtgacagagtacctccatgagttcaatcgcctcgcgcgatatgcaccagaggatgtccgcaccgacgccgagaagcaggagaagttcatggcgggtctggatgatgagctgaccaaccaactgatatctggggactacgccgactttgagaggctggttgacaaggcaatccgccaggaggatcagcgcaacaaaatggacaggaaaagaaaggcggcgcagttccggtccaaccaaggtagtcagcaccgaccgcgcttcactcccggacagcagggtggacctaccaccatgatcgtccgccagcaccgcccgttcaactccagcaacttccaccagggcactagtggcagtcagaaccaccagggaggccagcccaaccgcggtgcagctccacgcccaccaatggcaccggcacagtcagcccagcccgcgcaagccaagaaggagacgggagcaaaaccagggtcctgcttcaactgtggcgagcttggccacttcgctgacaaatgcccgaagcccaggcgtgccgggccaaggtttatccaggctcgtgtcaaccacgcgtctgcggaggaggcacaagcagcaccagaggtcgtactgggtacgttccctgttaactcaatccctgcaacagtactttttgattctggtgcaacgcattctttcatttcaaagaaattcgtgggaatgtatgggctaaggaaagaagagcttagcacaccaatgagggttcgtaccccgggaaatagttcaacctcagtcagttttagcccttcagtgctaatagaaatccaaagatcaccatttctagccaacctcattcttctcgaatccaaagacctagatgtcattcttgggatggattggctgaccaagtttaagggggtcatcgattgtgcgagtcgcacagtcaccttgaccaacgagaagggagaaaccgtagtgtacaaatcaccaggctcaccaaagcaaggagtctccttgaatcaaattgaaacggaaatcccagtggacaccgtggggaagaacttgagaaaattggaagatatacccatagtctgcgagtatccggaagtgttccccgaagacctcactaccatgccacccaagagggagattgaattccggattgacttggcaccgggaaccgctccaatttacaagagaccatacaggatggcggccaacgaattagcagaggtcaagaagcaagttgatgaacagctgcagaaagggtacatacgaccaagcacttcaccttggggcgctccggtcatttttgtggagaaaaaggataagacgaagaggatgtgcgtcgactatcgcgcacttaacgaggtcacaatcaagaataaatatcccttaccgcgaatcgacgatttatttgatcaactgaaaggagctaaagtgttctctaagatagacctgcgatcaggctaccaccagctgagaatccgggaagaggatattccgaagacggccttcaccactcggtacgggctatatgagtgcacggttatgtctttcggacttaccaatgcacccgcattcttcatgaatctgatgaacaaagtgttcatggaatttttggacaagtttgttgtggtgttcatcgacgacattcttatctattcaaagtccgaagaggaacatgaacaacacctccgtctggtactcgagaagttgaaggagcaccagctatacgccaagttcagcaagtgtgacttctggttgacggaagtcaaatttctgggccatgtcattacagcccagggtgtggcagttgatccatcgaacgtggagtcagttacaaaatggaccccaccaaagaccgtgtcgcagattcggagttttctaggactggcaggttattaccgccgattcatcgaaaatttctccagaatcgcccgacccatgactcagttgcttaagaaagatgagaagtttaaatggacagctgagtgcgataagagctttgaggagctcaaaaagaaattagtatccgcaccagtattgattctgcccgacccgacgaaagacttccaagtctattgtgatgcatcccgtcacggacttggatgtgtcctaatgcaagagggcagagtggttgcgtatgcctcgcggcagttgcgtccacacgaaggaaattatccaactcatgacttggaattggcagcagtggttcatgctttgaagatctggaggcattatctgattggaaaccgctgcgaagtatatacggaccataagagtctgaaatacatcttcacccaaccggatctaaaccttcgacaacgaagatggttggaactaatcaaagactatgacttgagtgttcactaccacccgggtaaagccaatgtggtggcagacgctttaagccggaaaagttactgcactgccctatgcatcgagggcatgtgtgaggaattgcggcaggaatttgaacatctcaacatgggaattgttgaacacgggtttgtagccgctttggaggcacggcctacgctcgtggatcaagtcagagccgctcaagtaaatgatccggaaatagcagaactgaaaaagaacatgagagtcggaaaggctcgggatttccatgaagatgagcatggcacaatctggatgggagaaagattgtgtgtacctgacgacaaagaactgaaggatctgatactcaccgaggctcatcagacccagtactccattcacccaggcagcaccaaaatgtatcaagacctcaaggaaaaattttggtgggtcagcatgaggagagaaatagctgaattcgtcgcactctgcgatgtttgccaacgagtgaaagcagagcaccaaagaccagcaggtttactccaacctcttcaaatcccggaatggaaatgggaggagattggaatggactttataacaggactgccccggacatcatcgggacatgattcaatctgggtagtcgtggatcgacttaccaaggtggctcactttataccagtacataccacctatacgggaaagagattggcagaattgtacctcgcaaggatcatgtgtttgcatggggtacccaagaagatagtatccgaccgaggtagtcagttcacctcaaagttctggcagaagctgcaggaagaaatggggacccgtttaaatttcagcacggcctatcacccgcaaactgatggtcagacagagcgagtcaatcaaatcttggaagatatgttgagagcttgcgctcttgattttggtggagcttgggacaaaagcttaccatatgcggaattctcgtataacaacagctaccaggccagtctacagatggcaccgtttgaagctctatacggccggaagtgccgcacacctctcttctgggatcagacaggcgaacgtcagctgttcggaacagaagtattagcggaagcagaagagaaagtcagaatcatcagggagagattgaggattgctcagtctcgacagaagagctacgcggataaccgtcgaagggagctaacttttgaggccggagattacgtgtatcttcgtgtcaccccgctccggggagtacaccgctttcagacaaaaggcaagttggcaccacgcttcgtgggaccgtacaaaattttggaacgaaggggagaagttgcctatcagctagaacttccatccactatgatcggcatccatgacgtgttccatgtgtcccaattaaagaagtgtttaagggtacctgaagaacaggctaattcggaacacattgatatccaagaggacctaacatatgtggagaagccggttcgcatacttgacactagcgaaaggagaaccagaaacaaggtcaccaggttttgccgtgttcagtggagtcatcattcagaagaggaagcaacctgggaaagggaagatgagttgaaggccgcccatccgtacctcttcaccagctccaccgaatctcggggccgagattccgtttaa

SEQ ID NO: 23015 - DNA, 5118 bp, Oryza sativa
  Clone ID: TF_OsC359_7660
atgggttgcaagatggctggccacccacccaaccaccgcggagaaggcatgatcgactttgtggcagagctggcacgcatgacactggtggtgggctaccccaacgcgccggagtacacgactattccgccgcttagtggcgagcttcctcaccgtgtccgcttggaggtccatggctacgtggggacttgcctcgctaacatggcagttgaggcgtcaggaggcacagcagatcacgcctgtcaggaggcagcctacttgatgatggccagactacgggagcgcgacaactacatcttccacgacacggcgtaccgctaccacccccgtcgagccaacggtgatggcgtcagctccttctgtccgacagctggcgagaacgacaccacctttggtcacatgtgtgctgtgatgaggggattggacaggatgcactcggacctgcacaaggcgaccaaggccttgaacgatgggaagctcatgaggatcgttgctctgaaggacgagatagcgcgcctgaagaaggagaacgctcagctaaagggtcttccagcgccaggaggagtccggatccgcactacgccccgcaagactacgacggcacccgtgcgcatccagcttgcgcccaggaacccacctccagcagcaactcccgcagcacctccagttccgcccgcagttcctgcagctccagctccagctcccgagtccgctctctccttcgctccagcatcagccgccagaggtccagccagtggcaccggaggttgcttgtttgggatggtctacaccaggactggtagccgcgcaacaggcgagggcagcaacggcgaagaacgcgctaatggtgtgcaccccagcagtgattccggcaatggtccgccaccacttcctgagaatccgacgctagcccaagttatggcacatcagactcagatgatggcagccatgatgcagcagatgcagcagcagcaccagcagatgcaccagaggatgatgcagcacgccgaacagcagcaccagcagtttggtccccctccccctcagtccaagttgcctgagttcctacgtgtcaggccacccaccttctccagcaccaccaaccctatggaggcaaatgactggctccatgcgatagagaagaagctgaacctcctgcagtgcaatgatcaggagaaggtcgctttcgccacacaccagcttcagggtcctgcgtcagcctggtgggacaatcacatggccacccgcccaccgggtactgaagtcacttgggtagagttctgccgtagcttcaggaaggcacaggtgccagatggggtcatggcacaaaagaagagggaatttcgtgcactccatcagggcaacaggactgtgacagagtacctccacgagttcaatcgcctcgcgcgatatgcaccagaggatgtccgcaccgacgccgagaagcaggagaagttcatggcgggtttggatgatgagctgaccaaccaactgatatccggggactacgctgactttgagtggctggttgacaaggcaatccgccaggaggatcaacgcaacaagatggacaggaagaggaaggccgctcagttcagggcacctcagggaagtcaccagaggccgcgcttcactcccggacagcagggtggacctaccaccatgatcgtccgtcagcaccgcccgttcaactccagcaacttccaccagggctctagtggcagtcagaaccaccatggaggtcagcccaaccgcggtgcagctccacgcccacccatggcaccggcacagtcaggcccgcccgcgcaagccaagaaggagacgggagcaaaaccagggtcctgcttcaactgtggtgagcttggccacttcgctgacaaatgcccgaagcccaggcgtgccgggccaaggtttatccaggctcgtgtcaaccacgcgtctgcagaggaggcacaaacagcaccggaggtcgtactaggtacgttccctgttaactcaatccctgcaacagtactttttgattctggtgcaacgcattctttcatttcaaagaaatttgtggggatgtatgggttaaggaaagaagagcttagcacaccaatgagggttcataccccggggaatagttcaacctcagtcagttttagcccttcagtgctaatagaaattcaaagattaccatttctagccaacctcattcttcttgaatccaaatacctagatgtcattcttgggatggattggctgactaagttcaagggagtcatcgattgtgcgaatcgcacagtcaccttgaccaacgagaagggagaaacggtagtgtacaaatcactagccccgccaaagcaaggggtctccttgaaccagatcgagatggaagtcccagtggtcaccgaggagaagaatttgaagaaattggaagacatacccatagtctccgagtatccagaagtgttccctgaagacctcactaccataccacccaagagggagattgaattccggattgacttggcaccgggaaccgctcccatttacaagagaccgtacagaatggcggccaacgaattagccgaggtcaagaagcaggttgatgagcagctgcagaaagggtacatccgaccaagtacttcaccttggggtgctccggtcatttttgtggagaaaaaggataagacgaagagaatgtgcgttgattatcgcgcactcaacgagttgagaatccgggaagaggatattccgaagacggccttcaccactcggtacgggctatatgagtgcacggttatgtctttcggacttaccaacgcacccgcattcttcatgaatctgatgaacaaagtgttcatggaatttctggacaagtttgttgtggtgttcatcgacgacattcttatctattcaaagtccgaggaggaacatgaacaacatctccgtctagtactcgagaagttgaaggagcaccagctatacgccaagttcaacaagtgtgacttctggttgacggaagtaaaatttctgggtcatgtcattacagctcagggtgtggcagtcgacccatcgaacgtggagtcagttaccaaatggaccccacctaagaccgtgtcgcagattcggagttttcttggacttgcgggttattaccgccgattcatcgaaaatttctccagaatcgcccgacccatgactcagttgcttaagaaagatgagaagtttaaatggacagctgagtgcgataagagtttcgaggagctcaagaagaaattagtatccgcaccagttttgattctgcccgacccgacgaaagacttccaagtctattgtgatgcatcccgtcacggacttggatgtgtcctaatgcaagagggcagagtggttgcgtatgcctcgcggcagttgcgtccacacgaaggaaattatccaacgcatgacttggaattggcagcagtggttcatgctttgaagatctggaggcactatctgattggcaaccgctgcgaaatatatacggaccataagagtctgaaatacatcttcacccaaccggacctaaatctccggcaacgaagatggttggaactaatcaaagactatgacatgagtattcactaccacccgggtaaagccaatgtggtggcagacgctttaagccggaaaagttactgcactgccctatgcatcgagggcatgtgtgaggaattgcggcaggagtttgggcatctcaacgtgggaattgttgaacacaggttcgtagccgctctggaggcacggcctacgctcgtggatcaagttagagccgctcaagtaaatgatccggaaatagcagagctgaaaaagaacatgagagtcggaaaggctcgggatttccttgaggatgagcatggcacgatctggatggtagaaagattgtgtgtacctgacgacaaggaattgaaggatctgatactcaccgaggctcatcagacccagtactccattcacccaggcagcactaaaatgtatcaagacctcaaagaaaagttttggtgggtcagcatgaggagagaaatagctgaattcgtcgcactctgcgatgtttgccaacgagtgaaggcagagcaccaaagaccagcaggtggctcactttataccagtgcataccacctatacggaaagagattggcagaattgtacctcgcaaggatcatgtgtttgcatggggtacccaagaagatagtatccgaccgaggtagtcagttcacctcaaaattttggcagaagctacaggaagaattggggacccgtttaaatttcagcacggcctatcacccgcaaactgatggtcagaccgagcgagtcaatttaatcttggaagatatgttgagagcttgcgctcttgattttggtggagcttgggacaaaagcttgccatatgcggaattctcgtacaacaacagctaccaggccagtctacagatggcaccgtttgaagctttatacggtcggaagctttatacagccatatgcgctttattctgggatcagacaggcgaacgtcaactgttcggaacagaggtattagcggaagtagaagagaaagtcagaatcatcagggaaaggttgagaattgctcagtctcgacagaagagctacgcggataaccgtcgaagggagctcacttttgaggaaggagattacgtgtatcttcgtgtcactccgctccggggagtacaccatttccagacaaaaggcaagttggcaccacgcttcgtgggaccatacaaaattttggaacgaaggggagaagttgcttatcagctagaacttccatcaaacatgatcggcatccatgacgtgttccatgtgtcccaattaaagaagtgcttaagggtacctgaagaacaggttgattcggagcacattgatatccaagaggacctaacctatgtggagaagccggttcgtatacttgataccagcgaaagaagaaccagaaataaggtcaccaggttttgccgagttcagtggaatcatcattcagaagaggaagcaacctgggaaagggaagatgagttgaaagccgcccatccgcacctcttcaccagctcctccgaatctcggggccgagattccgtttaa

SEQ ID NO: 23016 - DNA, 5019 bp, Oryza sativa; identical to SEQ ID NO: 13866
  Clone ID: TF_OsC359_7908

SEQ ID NO: 23017 - DNA, 5347 bp, Oryza sativa
  Clone ID: TF_OsC359_7970
ttgtcttctctagatggccggtcacccacccaaccaccgcggagaaggcatgatcgactttgtggcagagttggcacgcatgacactggtggtgggctaccccaacgcgccggagtacacgactattccaccgctcagtggcgagcttcctcaccgtgtcagcttggaggtccatggctacgtggggacttgcctcgctaacatggcagttgaggcgtcaggaggcacagcagatcacgcctgtcaggaggcagcctacttgatgatggccagactgcgggagcgccacaactacatcttccatgacacggcgtaccgcttccacccccgtcgagccaacggtgatgatgtcagttccttccgtccgacagccggcgagaacgacaccacctttggtcacatgtgtgctgtgatgaggggactggataggatgcactcggacctgcacaaggcgaccaaggccttgaacgatgggaagctcatgaggatcgtcgctctgaaggacgagatagcgcgcctgaagagggagaacgctcagctaaagggtcttccagcgccaggaggagtccggatccgcactacgccccgcaagactatgacggcacccgtgcgcatccagcttgcgcccaggaacccgcctccagcagcagctcccgcagcacctccagttccgcccgcagttcctgcagctccagctccagctcccgcgtccgctctctccttcgctccagcatcagccgccagaggtccagccagtggcaccggaggttgcttgtttgggatggtctacaccaggactggcacccgcacgataggcgagggcagcaacggcgaagaacgtgctgatggtgtgcaccccagcagtgattccggcaatggtctgccaccacttcccgagaatccgacccttgcccaagttatggcacatcagactcagatgatggcagccatgatgcagcagatgcagcagcagcaccagcagatgcaccagaggatgatgcagcacgccgaacagcagcaccagcagtttggtccccctccccctcagtccaagttgcctgagttcctacgtgtcaggccacccaccttctccagcaccaccaaccctatggaggcaaatgactggctccatgcaatagagaagaagctgaatctcctgcagtgcaatgatcaggagaaggtcgcttttgccacacaccagcttcaagggcctgcgtcggcttggtgggacaatcacatggccacccgcccaccgggtactgaagtcacatgggcagagttctgccgtagcttcaggaaggcacaggtgccagatggggtcgtggcacaaaagaagagggaatttcgtgcactccatcagggcaacaggactgtgacggagtacctccatgagtttaatcgcctcgcacgatatgcaccagaggatgtccgcaccgacgccgagaagcaggaaaagttcatggcaggtctggatgacgagctgaccaaccaactgatatctggggactacgccgactttgagaggctagttgacaaggcaattcgtcaggaggaccaacgcaacaagatggacaggaagaggaaggccgcacagttcagggcacctcagggaagtcgccagaggccgcgcttcactcccgggcagcagggtggacctaccaccatgatcgtccgccagtaccgcccgttcaatcctagcaactttcctcagggcgccagtggcagtcagaaccaccatggaggtcagtccaaccgcggtgcagctccacgtccaccaatggcaccggcacagtcaggcccgcccgcgcaagccaagaaggagactggagcaaaaacagggtcctgcttcaactgtggcgagcttggccacttcgctgacaaatgcccgaagcccaggcgtgccgggccaaggtttatccaggctcgtgtcaaccacgcatctgcggaggaggcacaagcagcaccagaggttgtactgggtacgtttcctgttaactcaatccctgcaacagtactttttgattctggtgcaacgcattctttcatttcaaagaaattcgtggggaggtatgggttaaggaaagaagagcttagcacaccaatgagagttcataccccgggaaatagttcaacctcagtcagttttagcccttcagtgctaatagaaatccaaagatcaccatttctagccaacctcattcttcttgaatccaaagacctagacgtcattcttgggatggattggctgaccaagttcaagggagtcatcgattgtgcgaatcgcacagtcaccctgaccaacgagaagggagaaaccgtggcgtacaaatcactagtctcaccaaagcaaggggtctctttgaatcagattgaagcagaaatcccagtggacaccgtggagaagaacttgaggaaaatggaatatatacccatagtctgcgagtatccggaagtgttccccgaagacctcactaccatgccacccaagagagagattgaattccggattgacttggcaccgggaaccgccccaatttacaagagaccgtacaggatggcagccaacgaactagcagaggtcaagaagcaagttgatgagcagctgcagaaagggtacattcgaccaagtacttcaccttggggtgctccggtcatttttgtggagaaaaaggataagacgaagaggatgtgcgttgattatcgcgcactcaatgaggtcacaatcaagaacaaatatcccttgccgcggatcgacgatttatttgatcaactgaaaggagctaaagtgttttctaagatagacctgcgatcaggctaccaccagttgagaattcgggaagaggatattccgaagacggccttcaccactcggtacgggctatatgagtgcacggttatgtccttcggacctactaacgcacctgcattcttcatgaatctgatgaacaaagtgttcatggaatttctggacaagtttgttgtggtattcatcgacgacatacttatctactcaaaatccgaggaagaacatgagcaacatctccgtctggtactcgagaagttgaaggagcaccagctatacgccaagttcagcaagtgtgacttctggttgacggaagtcaaatttctgggccatgtcattacagcccagggtgtggcagttgatccgtcaaacgtagagtcagtcaccaagtggatcccaccgaagaccgtgtcgcagattcgaagttttctaggactggcaggttattaccgccgattcatcgaaaacttctccagaatcgcccgacccatgactcagttgcttaagaaagatgagaagtttaagtggacagctgagtgcgataagagttttgaggagctcaagaagaaattagtatccgcaccggttttgattttgcccgaccagatgaaagacttccaagtctattgcgatgcatcccgtcacggacttggatgtgtcctaatgcaagagggcagagtggttgcgtatgcctcacggcagttgcgtccacacgaagggaattatccaactcatgacctagaattggcagcagtggttcatgctttgaagatctggaggcactatctaattggcaaccgctgcgaagtatatacggaccataagagtctgaaatacatcttcacccaaccggacctaaatctccgacaacgaagatggttggaactaatcaaagactatgacatgagtattcactaccacccgggtaaagccaatgtggtggcagacgcattaagccggaaaagttactgcactgccctatgcatcgagggcatgtgtgaggaattgcggcaggagtttgagcatctcaacgtgggaattgttgaacacgggttcgtagccgctctggaggcacggcctacgctcgtggatcaagtcagagtagctcaagtaaatgattctgaaatagcagagctgaaaaagaatatgagagtcgggaaagcccgggatttccacgaagatgaacacggcacaatctggttgggagaaagattatgtgtacctgacgacaaggaactgaaggatctgatactcactgaggctcatcagacccagtactccattcatccaggcagcactaaaatgtatcaagacctcaaagaaaagttttggtgggtcagcatgaggagagaaatagctgaattcgtcgcactctgtgatgtttgccaacgagtgaaggcagagcaccaaagaccagcaggtttactccaacctcttcaaatcccggaatggaaatgggaggagattggaatttactttataacgggactgccccggacatcgtcgggtcacgattcgatctgggtagtcgtggatcgactcactaaggttgctcacttcataccagtacataccacatatacgggcaaaaggttggcggagctttacctttcgagaatcatgtgcctacatggagtacccaaaaagattgtatctgaccgagggagtcagttcacctcaaaattctggcagaagctgcaggaagaaatggggacccgtttaaatttcagcacggcctatcacccgcaaactgatggtcagaccgagcgagtcaatcaaatcttggaagatatgttgagagcttgcgctcttgattttggtggagcttgggacaaaagcttgccatatgcggaattctcgtacaacaacaactaccaggccagtctacagatggcaccgtttgaagctttatacggccggaagtgccgcacacctctcttctgggatcagacaggcgagcgtcaactgttcggaacagaggtattagcggaagcagaagagaaagtcaggatcatcagggaaaggttgagaattgcccagtctcgacagaagagctacgcggataaccgtcgaagggagctcacttttgaggtaggagattacgtgtatcttcgtgtcactccgctccggggagtacaccggtttcagacgaaaggcaagttggcaccacgcttcgtgggaccatacaaaatcttggaacgaaggggagaagttgcttatcagctagaacttccatccaacatgatcggcatccatgacgtgttccacgtgtcccaactaaagaagtgcttaagggtacctgaagaacaggctgattcggaacacattgatatccaggaggacctaacatatgtggagaagccggttcgtatacttgataccagcgaaaggagaaccagaaacaaggtcacccggttttgccgagttcagtggagtcatcattcggaagaggaagcaacctgggaaagggaagatgagttgaaagccgcccatccgcacctcttcaccagctcctccgaatctcggggccgagattccgtttaa

SEQ ID NO: 23018 - DNA, 5508 bp, Oryza sativa
  Clone ID: TF_OsC359_8137
tcagccgctgacaggtgggtcccacttgtcagggtcgtcgtcctcctcgcgccgccgccgccgccgctggagcaccgtcgccgccgtcgacccgatcttctccgccgctttgacctcgtcgccgtcgccgtccgttggtcttccgccgctcctttggtcaccggtgagttcgtcgtgccgtccgcttcgtcccggtgccttccgttcacgccgtcgcgccgtcgttcgccggcgagcgtgcgccgtccgagctgccgagccgcccgagccgccgccgccggtggtgacgtcatcgctgacgtcatcgtcgtcctttgtcttctctagatggccggacacccacccaaccaccgcggagaaggcatgattgattttgtggcagagttggcacgcatgacgctggtggtgggctaccccaacgcgccagagtacacgacggttccaccgctcagtggcgagcttcctcaccgtgttcgcctggaggtccacggctacgtgggtacctgcctagctaatatggtggttgaggcatccggaggcacagtagatcacgcctgtcaggaggcagcatacctgatgatggccagactacgggagcgccacaactacatcttccacgacacggcgtaccgatttcacccttgtcgagccagcggtgatgatgtcagtactttccgtccgacagctgacgagaactacactacctttggtcacatgtgtactgtgatgaggggattggataggatgcactcggacctgcacaaggcgtccaaggccttgaatgatgggaagctcatgaggatcgtcgctctgaaggacgagatagcgcgcctgaagagggagaatgctcagttaaagggacttcccgcgccaggaggagtccggatccgcactacaccccgcaagacgacgactgcacccgtgcgcatccaacttgcgcccaggaacccacctccgcccgcagctcccgcagcacctccagttccgcccgcagttcctgcagctccagcaccagctccagctcccgttcacatgtccgctcccgcgtccgctctctccttcgctccagcatcagccgccaggggtccagccagtggcaacggaggttgcttgtttgggatggtctacaccaggaatggtagccgcgcaacaggcgagggcagcaacggcgaagagcgcactgagggtgtgcatcccaacagcaattccggcaatgttccgccaccacttcccgagaatccgacgctagcccaagtgatggcacatcagactcagatgatggcagccatgatgcaacagatgcagcagcagcaccagcagatgtaccagaggatgttgcagcacgccgaacagcagcaccagcagtttggtccccctccccctcagtccaagttgccagagtttctacgtgtcaggccacccaccttctccagcaccaccaaccctatggaggcgaatgactggctccatgccatagagaagaagctgaatctcctgcagtgcaatgatcaggagaaggttgctttcaccacacaccagcttcaaggtcctgcgtcagcttggtgggataatcacatggccacccgcccaccaggtactgaagtcacttgggcagagttctgccgtagcttcaggaaggcgcaggtgccagacggggtcgtggcacaaaagaagagggaatttcgggcactccatcaaggcaacaggactgtgacggagtatctccatgagttcaatcgcctcgcgcgatatgcacccgaggatgtccgtaccgacgccgagaagcaggaaaggttcatggcaggtctggatgatgagctgaccaaccaactgatatctggggactacgccgactttgagaggctagttgacaaggcaatccgtcaggaggatcaacgcaacaagatggacaggaagaggaaggccgctcagttcagggcacctcagggaagtcaccagaggccgcgcttcgctcccgggcagcagggtggacctaccaccatgatcgttcgccagtaccgcccgttccaccctagcaactttccccagggcgccagtggcagtcagaaccaccatggaggtcagcccaaccgcggtgcagctccacgcccaccaatggcaccggcacagtccggcccgtccgcgcaagccaggaaggagactggagcaaaaccagggtcttgcttcaactgtggcgagcttggccacttcgccgacaaatgcccgaagcctaggcgtgccgggccaaggtttatccaggctcgtgtcaaccacgcatctgcggaggaggcacaagcagcaccagaggttgtactgggtacgtttcctgttaactcaatccctacaacagtactttttgattctggtgcaacgcattcgttcatttcaaagaagtttgtcgggatgcatgggttaataagagaggaacttagcacaccaatgcggctgaccaagtttaagggagtcatcgattgtgtgaatcgcacagtcaccctgaccaacgagaagggagaaacggtagtgtacaaatcaccaaactcaccaaagcaaggggtctccttgaatcagattgaagcggaaatcccagtggtcaccatggagaagaatttgaggaaattggaagatatccccatagtctacgagtatccagaagtgttccccgaagacctcactaccatgccacccaagagagagattgaattccggattaacttggcaccgggaaccgctccaatttacaagagaccgtacagaatggcggccaacgaactagcagaggtcaagaagcaggttgatgagcagctgcagaaagggtacattcgaccaagtacttcaccttggggtgctccagtcatttttgtggagaaaaaggataagacgaagaggatgtgcgttgattatcgcgcactcaacgaggtcacaatcaagaacaaatatcctttgccacgaatcgatgatttgtttgatcaactgaaaggagctaaagtgttttctaagatagacctgcgatcagcctaccaccagttgataatccgggaagaggatattccaaagacggccttcaccactcggtacgggctatatgagtgcacggttatgtctttcggacttactaacgcacctgcattcttcatgaatctgatgaacaaagtgttcatggaatttctggacaagcttgttgtggtattcatcgacgacatacttatctattcaaagtccgaagaagaacatgagcaacatctccgtctgttcagcaagtgtgacttctggttaacggaagtcaaatttctgggccatgtcattacagctcaaggtgtggcagttgatccatcgaacgtggagtcagttaccaaatggaccccaccgaagaccgtgtcgcagattcaaagttttcttggacttgcgggatattaccgccgattcatcgaaaacttctccaggatcgcccgacccatgactcagttgcttaagaaagatgagaagtttaaatggacagctgagtgcgataagagttttgaggagctcaaaaagaaattagtatccgcaccagttttgattctgcccgatcagatgaaagacttccaagtctattgcgatgcatcccgccacggacttggatgtgtcctaatgcaagagggcagggtggttgcgtatgcctcgcggcagttgcgtccacacgaagggaattatccaactcatgacctggaattggcagcagtggttcatgctttgaagatctggaggcactatctgattggcaaccgctgcgaagtatatacggaccataagaatctgaaatacatcttcacccaaccggacctaaatctccgacaacgaagatggttggaactaatcaaagattataacatgagcattcactaccacccgggtaaagccaatgtggtggcagacgcattaagcaggaaaagtcactgcactgccctgtgcatcgagggcatgtgtgaggaattgcggcaggactttgagcatctcaacatgggaattgttgaatacgggttcgtagccgctctggaggcacggcctacgctcgtggataaagtcagagtagctcaagtaaatgattctgaaatagcagagctgaaaaagaacatgagagtcggaaaagcccgggatttccacgaagatgagcatggcacaatctggttgggagaaagattgtgtgtacctgacgacaaggaactgaaggatctgatactcaccgaggctcatcagacccagtactccatccatccaggcagcaccaaaatgtatcaagacctcaaagaaaagttttggtgggtcagcatgaggagagaaatagctgaattcgtcgcactctgcgatgtttgccaacgagtgaaggcagagcaccaaagaccagcaggtttactccaacctcttcaaatcccggaatggaaatgggaggagattggaatggactttataataggactgccctggacatcatcgggtcacgattcaatctggatagtcatggatcgactcactaaggttgctcacttcataccagtacataccacgtatacgggcaaaaggttggcggagctctacctctcgagaatcatgtgtctacatagagtacccaaaaagattgtatctaaccgagggagtcagttcacctcaaaattctggcagaagctgcaggaagaattggggacccgtttaaatttcagcacggcctatcacccgcaaactgatggtcaaaccgagcgagtcaatcaaatcttggaagatatattgagagcttgcgctcttgattttggtggagcttgggacaaaagcttgccatatgcggaattctcgtacaacaacagctaccaggccagtctacagatggcaccgtttgaagctttatacggccggaagtgccgcacacccctcttctgggatcagacaggcgagcgtcaactgttcgggacagaggtattagcggaagcagaagagaaagtcagaatcatcaaggaaaggttgaggattgcccagtctcgacagaagagctacgcggataaccgtcgaagggagctcacttttgaggcaggggattacgtgtatcttcgtgtcactccgctccggggagtacaccgctttcagacgaaaggcaagttggtaccacgcttcgtgggaccatacaaaatcctggaacgaaggggggaagttgcttatcagttagaacttccatccaatatgatcggcatccatgacgtgttccacgtgtcccaattaaagaagtgcttaagggtacctgaagaacaggctgattcggaacacattgatttccaggaggacctaacatacgtggagaagccggttcatatacttgataccagcgaaagaagaaccagaaacaaggtcaccaggttttgccgagttcagtggagtcatcattcagaagaggaagcaacctgggaaagggaggatgagttgaaagccgcccatccgcacctcttcgccagctcctccgaatctcggggccaagattccgtttaa

SEQ ID NO: 23019 - DNA, 9731 bp, Oryza sativa
  Clone ID: TF_OsC359_8398
tcagatggtggtttctccgaggagtaggctcgtccgtgccgtcgaggatgcctgtggagtggtgttcccgccctttgtcttctctagatggccgatcacccacccaatcaccgcggagaagccatggatgactttgtggcagagttggctcgcatgacactggtggtgggctaccccaatgtgcccgagtattcgactgttctgccgctcagtggtgagttccctcaccgtgttcgcccggaggttcatggctatgtgggtacctgtctcgctaacatggtggttgaggcatccggaggcacagcagatcacacctgtcaggaggcagcatagctgatgatggccagactacggaagcgccacaactacatcttctgcaacacggcgtaccgttttcaccctcgtcgagcaagtggcgatgacgtcagcaccttccgtccgacagccggcgagaacgacaccacctttggtcacatgtgtgccgtgatgaggggtatggacaggatgcactcggatctacgcaaggcgtccaaggccttgaatgacgggaagctcgtgaggatcatagctctgaaggatgaaatcgcgcgcctgaagaaggagaatgcgcagttgaagggtctccccattcccggaggagtccggatccgcaacacgccccgcaagtcgacgacggcacccgtgcgcattcagcttgcgcctaggaacccacctccgcctgcacctccagcagctcctccagttccgcccgcagtttcagaagttcccacagctcctgcagctccagctccagtcccagctcctgtcccagtgtcagctcccacgtccgctctctccttcgctcctgcatcagccgtcaggggtccagccagtggtaacgggggttggttgcctgctactcccagtggcagccacgaccacagcagtagcagttccagtggctcggagccgggcagcggcgagacgtatttgccagagtccaggagccactcagagggacctggcctcttcctccagatggtctacaccaggaatggtagccgtacaacaggcgagggcagcaacggcgaagagcgcaccgacggtgtgcatcccaacagcaactccggcaatggtccgccaccgctccccaaaaatctgacccttgcccaagtaatggctcatcagactcagatgatggcagccatgatgcagcagatgcaccagaggatgcagcagcaagccgagcagcagcagcagcagtttggtccccctcgccctcagtccaagttgccggagttcttacgtgtcaggccacccaccttctccagtaccaccaaccctatggaggcaaacgactggctccacgctatagagaagaagctcaatctcctacagtacaatgatcaggagaaggttgctttcgctacacaccagctccagggtcccgcgtcagcttggtgggacaatcacatggccacccgcccgctaggcacggaagtcacttgggcggagttctgtcgcagcttcaggaaggcgcaggtgcctgacggggttgtggcacagaagaagagggagttccgggcactccaccagggcaacaggacagtgataaagtatctccatgagttcaatcgcctagcgcgatatgcaccggaggatgtccgtactgacgccgagaagcaggagaaattcctagcaggcctggatgacgagctgaccaaccagctgatctctggagactacgccgattttgagaagctggttgacaaagcgatccgtcaggaggatcagcgcaacaaaatggacaggaagagaaaggcagcgcaattccggtccaaccaaggaagccacccgtgaccgcgcgtcacttccggacagcagagtggacctaccaccatgatcgtccgccagcaccgccctttcaactcgagcaacttccaccatggcaccagtggcagccagaaccaccatggaggtcagcccaatcgcagtgcagctccgcgcccaccaatggcaccagcacagtcagctccatctgcgcaagtcaagaaggagactggaacaaagccagggtcctgcttcaactgtggcgagcttggccacttcgctgacaaatgcccgaagccaaggcgtgctgggccaaggtttgtctaggctcgtgtcaaccacgcgtccgcagaggaggcgcaagcagcaccagaggtcgtactgggtacgttttctgtcaactcagtccctgctacagtactttttgattctggtgcaacacattctttcatttcaaagaagtttgtggggatgcatgggttaagaaaagaagagcttagtacaccaatgagggttcataccccaggaaatagttcaacctcggtcagttatagcccttcagtgctaatagaaattcaaagatcaccatttctagccaaccttatccttctcgaatccaaagacttagatgtcattcttgggatggattggctgaccaagttcaagagagtcattgattgtgcgaatcgcacagtcaccttgaccaatgagaagggagaaaccgtggtgtacaagtcaccggcctcaccaaagcagagaatctccttaaaccagattgaagtggaggaacctgtgaccaccgagcagaagagttcgccgaaattggaggatatccccatagtctgcgagtatcccgaagtgttccctgaagatctcactactatgccacccaagagagaatttgaattccggattgatttggcaccaggaactgccccaatttacaagaggccgtagagaatggcagccaacgagctagcagaggtcaagaagcaggttgatgagcagctgcagaaagggtacactcgaccaagtacttcaccttggggtgctccggtcatttttgtggagaagaaggataaagcaaagaggatgtgcgtcgattatcgcgcactcaatgaggtcacaatcaagaacaaatatcctttgccacggattgatgatttgttcaaccaactaaagggggctaaagtgttctctaaaatcgacctgcgatcaggttatcactagttgagaattcgggaagaggatattcccaagacggccttcaccactcgatatgggttgtacgagtgcatggttatgtctttcggacttaccaacgcacctgcattcttcatgaatctgatgaacaaagtgttcatggaatttctggacaagtttgttgtggtattcatcgacgacattcttatctattcaaagtccgaagaagaacatgagcaacatctccgtctggtactcgagaagttgaaggagcaccaattatatgccaagttcagcaagtttgacttttggctgttggaggtcaaattcttgggtcacgtcattacagctcagggcgtggcagtcgatccatcgaatgtggagtcagttaccaagtggaccccacctaagaccgtgtcatagattagaagttttcttggactcgcgggttattatcgtcggttcattgaaaatttctcaagcattgccagacctatgacccagttgcttaagaaagatgagaaatttaaatggacagctgagtttgacaagagttttgaggagctcaagaagaaattagtatccgctccagttctgattctgcccgaccaaagaaaagacttccaagtctattgcgacgcgtcccgccacggactcggatgtgttttagtgcaagaggcccgcgtttcgtcaagtgtgcagcagccccgtcgtcgtcttcgtcctcgcctccgcgtcgtcaagcctcgtgccggctgtgtctcgcccgtgtaccggtgtcggtagtcgttcacgtgtgcgggtggtgaccgtgtagtgtccgtgttagtgtgttcgctcggtagccgcgtggtttccacgtgtgcagcccgcgtggtgtctagtggagtccgtttgtcggctactcgcctcggttgacacacggggtccgcttccgtcgacctgtggaccgtctctgtgtacctggttttctttttatgtgttgttattgcttctttataggcttgtagctttgcttgtgtgcttcgcgtagctttcgtcgttccggaggttcccgaagtgtggttcgcggtcgtcgccaaaggttcggaaggccgttctctctctcttcctctttcaaaacccctaaaacctgttttccggtggggtttgggtgcatgccagttgtgggaagtagcaccctggccactataaggattaagctcgggcctctgttgcaaagcactaccgtacttccacatgtctagtgggtaaggcttagtttgtggctcagtctggttataaacaaaagtacacggatggagatggacgaagtcgggggtcgatggacatctccaggacaaatgaaggctacacgagctgcggcccgatggccggcagcgttacccgtcgtggtttgcacatgactggcttcgtcttggagctgcggggcctgtgcgtggtcttggggtatccacatggagtggattaccaggccaggccgctcccggagcaggagggtgaggatgcagagcctcacgctggttgggaggtcactgcagtgatcctctccggctctcctgagcggacttcgctggcagtcaccgcgggcggagattccttccccgccgcttgccagaacgccgctctcctcgccatcggcacccttcaccagcgctacccggacgagttgcagcactcgccctaccgctaccacccccgtcgcggggcgcccgcaccacgccaccttccgagacgccagctcggaggatgacgctaccgtcgtgcatctggcacgcatggtggaggcgtacgacgtggctcgtatcgacttccaccagatggtgcgtcgtggcatggtggagaacaacatgaagatcctggagctgcgtcaggagaacctgcagctcaagaaggacctcgacgcgttggaggcgcagctgcaccagctcaaggtcgcccagggtgagatctgccgtcccaagcgtcgccgcgtctgccgcagccagaagatcaccgcccgcaagagcacctccaggcccgagcttgttcgtcagtccctggcatggacttgcttcgtcgagacccctcgtgccgagcctgcgcccgtggttccccaggagggggaagcctccggcgttggtagctcggagggtgcgctgttgctcaccttccgccctggcccgtcgcagcgctctccttctctgtttgctggttctgtgtggagtttacagatggtgtcgaccaggagaaatgttaacaccggtgaaggcaaccaacccgaaggcagcaaccccaacccccaaggcaatccacctccaccaccaccaccagacaccaacgccattctcactcaaatcctcgcccagcaagccaacatgatgaatgctttcctccaccacctccaaaatccaccacaacagaatgctccaccaccacctccccaacactccaaactcgccgaatttctccgcatccgcccacccaccttctctagctccaacaatcctgtagatgcgttggattggttgcatgccgtggggaagaagctggacacggtgcagtgcagcgacgaagagaaagtcatcttcgccgcccatcagctgcagggacccgcatctctatggtgggaccatttccaggccacgcagccagagggacaaccgattacttgggctcgcttcaccgccgccttccggagaacccatgtgcctgccggagtcgtggctctcaagaagaaggaattccgagagttgaagcaaggcaaccgctccgtaatggagtatttgcatgagttcaacaatctagcccgttacgctccggaggatgtgcgggaagatgaggagaagcaagagaagttcttggcaggaatggaccccgagctgtctgttcgtctagtctctggagactatcctgattttcaacgactggtggacaagagcatccgcttggaagccaagcacaaggagctggaatcgcacaagcgccgcttggcgaatttccgcaatcaacagggtgctaaccagagggtccgctacaccaatccctacccagggggatcctcctcgcagcagcagcagcagcagcagcagcaatctcgctccgcgcctcgaccccaattcgtggtgcgcgtcccacagccgcagcagcagcagaatcagcaagggactcgtgcgccccgtcctcctactccagctgggcagcccgttcaaggccgcagggacgcttcaggtccgcagcgtctgtgcttcaactgcttcgagcccgggcactttgcggataaatgcccgaagccaaggcgtcagcaaggccaagcgcctccccgctccaacaacagtggcaaggacgtcctccgtggtcgtgtgaaccacgtgacggccgaggacgtgctgacaactccagacgtcatcgttggtacgttcctcgtccattccatccctgctacaattttgttcgactctggagcttcccactcgtttatatctgtgccattcgtggggaaaaatcagttgggggtagaaaggcttagaaaccctctgctcatcaccacccctggcggggttatgacagcaaagtattatagccctgccgttcctatagaaattcaggggattccttttccttcggatctgatcctgctagacacaaagaacttggacgtgatccttgggatgaattggttggctcaattccaaggagtagtggattgcacgagacgcactgtcactctgtatcgagggccagaacaaccggttgttttctttgcacctccaacctctgtcagaagttcagaactgcatcagataggtccgtcagaaatccccatagtcagagagttcgaagatgtgtttccagaagaactacctggtatgccgcccaagcgagagattgagttccggatagatcttgttccaggaaccactcctctgcacaagcgaccctaccgtatggcagcaaatgaactggccgaagtcaagaaacagttggaagagttgaaagaaaaggggtatatacgtccgagtacttccccatggggtgctcctgtgatttttgtagagaagaaagacaaaacgaagaggatgtgcgttgactacagagctctcaatgaagtcaccatcaaaaacaagtaccctcttccccggatcgatgatctgttcgatcagcttaaaggtgccactgtattctccaagattgatcttcgttccggatatcatcaattacgtattcgtgaagaagatattccgaagaccgcattcactacgcgatatgggctgtatgaattcacggtgatgtcgttcggtttgaccaatgcacctgccttcttcatgaacttaatgaacaaagtgttcatggaatacttggataagtttgttgtggttttcatcgatgacattctaatatactcacaatcagaagaagaccatcagcaccatctccgtctggtattgggaaaactgcgggaacatcaattgtatgccaagcttagcaagtgtgagttctggttgtccgaagtcaaattcttagggcacgtgatatctgctaagggagttgctgtggaccccgaaacagtgaccgccgtcaccgattggaagcaacccaagacagtcactcagattcgcagtttcttaggtttggcaggatattaccggagattcatcgagaacttctccaaaatcgctcgacccatgacacagttgttgaagaaagaagagaaatttgtgtggagcccgcaatgcgagaaggcgttccaaactctcaaggaaaagctggtttcctcgccagtgttaatcttgccggatactcgtaaggatttcatggtgtattgtgatgcttcgcgccaaggattggggtgtgtgctcatgcaggacggtcatgtggtagcctatgcttcacgtcagctacgtcctcatgaaggcaactaccctacgcatgatttggagttagcagcggtggttcatgctctaaaaatctggcggcactatctcattgggaaccgctgcgaaatatatactgatcacaagagcttgaagtacatcttcacccagtcggatctgaatcttcggcaaaggagatggttagaactcatcaaggattatgatgtgggaatacactatcatcctggtaaggccaacgtggttgccgacgctctaagtcgaaagagccactgcaacactctcaacgtccgaggcattccgcccgagcttaatcaacagatggaagccctgaacctaagcatagttggtcgcggattcttggccgcgttggaagccaagcctaccttgctcgatcaaatccgcgaggctcagaagaatgatccggacatgcatggactcctcaagaatatgaaacagggtaaagccgcaggtttcacagaggatgaacacggaactctatggaacgggaagcgggtatgcgttcccgataacagagaacctaaacagctgatacttcaggaagctcacgaaagtccttattccattcacccgggcagtaccaagatgtacttagacttgaaggagaaatactggtgggtcagcatgaagcgggaaattgcagagtttgtggctctatgtgatgtgtgccagcgtgtcaaggcagaacaccaacgaccggctggacttctccaacctctccaagtgccggaatggaaatgggatgaaattgggatggatttcatcaccggccttccaaaaacccaaggtggatatgattctatatgggtaatagtggatcgattaaccaaggtagctcgatttattcctgtgaagaccacctatggagggaacaagctagcggagctctacttcgctaggatcgtgagtctccatggcgttcccaagaaaatcgtatctgataggggaagccaattcatctctcacttttggaagaagctccaagaagagctgggtactcggttgaatttcagcaccgcctatcacccgcagacagatggacagaccgagcgtctaaatcagatcctagaagatatgctccgcgcatgtgtcctagatttcgggaagacttgggataagagtctcccctatgccgagttctcctacaataacagctaccaagccagcatacaaatggcaccttatgaagcgttgtacgggcgcaaatgccgaacaccgctattgtgggaccaagtcggagaaagtcaagtgttcgggaccgatatcctgagagaagctgaagctaaagtcagaatcattcgggataatctaaaggtggcacagtcccggcagaaaagttatgcagataaccgacgccgtgatctggaattcgcagtggatgattttgtgtatcttcgggtcacgccattgcgaggtgtgcacaggtttcagacgaaagggaagctagcacctcggtatgtgggtcccttccgtatcatcgctagacgcggagaagttgcttaccagctggagttgcccgcctccttgggtaacgtgcatgatgtgttccacgtgtcgcagctcaagaaatgtctccgagtgccatccgagcaggccgactcagagcaaattgaagttcgcgaagacttgacctatgtggagaggccagtgaaaatcctggacaccatggagcgcaggaccaggaaccgagtaatccgtttttgcaaggtccagtggagcaaccacgccgaagaagaagctacttgggagcgcgaagacgagctgaaggcagcccatcccgatctcttcgccagttcttccgaatctcggggtcgagattccgtttaa

SEQ ID NO: 23020 - DNA, 4152 bp, Oryza sativa
  Clone ID: TF_OsC1713_4687
gtatattaaattgtcagtttgtgtacctcggtgcttgttatccaaataaccactcaagcatatagaagaatatgtagaataccatattccaaattcaagagtctattgcaaatacctcatgatgcgtttgacagcttgacgatgtgaagcacgtggagaagcttgaaaacaagcacacaaacatacaacaaattgtatgtccggtcttgaagcagtgagatagagtaatgatccaatcatactcctatactccttttgatccacaacttcaccatcttcatccggatccaacacaggagtagatccaatgggtgtagacataggcttgcaatcctccatcttgaaacgccgtagaagatccttggtgtacttcgtttgatgcacaaatgtgccttgctttgtttgcttgatttgaagccccaaaaagtaagtcaattcgcccatcatgctcttctcaaattccatgcgcatagtctcagcaaactccacaaccaaagggtgagatgaacaaccaaagatgatatcatccacataaatctgaacaaaaagttgatcatcaccatgcttaagaacaaagagtgttttatccacttttcccattataaaacctttggcaagcaaaaagttttccaatctatcatgccatgcccttggagattgttttaaaccatacaaagctttagacaagcgaaaaacatgattgggaaattcagagttttcaaaaccgggtggttgttttacataaacttcctcctgtatataaccattaagaaaagcacttttcacatccattagatacaatttaaaaccttttgaagctgtaaaagtcaacaaaagtctaattgcctcaattctagcaacaggagcaaaagtttcatcataatccaacccctacatttgtgtaaaaccctgagcaacaagcctagccttgtttctcacaattaaaccatcctcattttaaaatccatttagttccaatgatattatgaccaacaggaggttcaactaaagaccaaactttatttctttcaaaattctcaagttcttcatgcatggcgttgatccatgattcatcagttagtgcatgagtaacatctttgggttcaaaattagcaacaaaagcagaattcacatgatgatcacgagttgttaccttggaccttgtagtatgttcaccaatattacctatcatttgttgtggaggatgtcgtcattgaatatgaagcggagtagtagcatatgatgaaatttcgtgttctgcaccctgtcctattgaagtagaagtctctggaggtcctctaccatcatcacccgacgcacccgaggaagatcccccaggccggtctgaccgatcctctgccagcggtctgaccggccgtggccccggtctgaacggccgccatttcgtcctcttcctcgtcattgctttcgtccacaaaaatatcctccccctgaacctatgatagtgtaccggaaacatcgggtctagtaccaggactagcctcatcaaaagtgacttcgcaagtctcaacaattttgttagtttccaaaacaagtacacgataaccacgagaatgtgtagaatatccaagcataagtccattagttgaatgtgactcaaatttgtctaaatttctagattttaagacaaagcatttacatccaaaaacacgcaaatgtgaaataccattatcacttcgaatagtcctcaaagatccagcaaattcaagagacaaacgaagatataaacttttaaagtgttcaaaaggctcatccttagtagccataaagaaaacccaagaatatcgagaaaaatcgtcaacaacaaccaacacataccactttcctccaacaaattgcactctagttggaccaacagtgtccatatgtaagagatgtcccggtgcatccgtcatcacagagataataggagcatgtgaagaagcaaccatcttagcataacgatatggtgaacaaaccaaatcaagatttttcttaagtttaggcaaaccacgaacaagatccgaaccactaattctagtgagatgatcaaaaccaacatgtcctagcctacgatgctaaaacatcacatctttcgagaattttgcaacaagacatgtaacctcagaagaaacactattctcaaaatcagccttaaaaactcttccataacgcgaaacattaagcacaacatctccagaagaattaaagaccttgcttctagttttcttgaacaacacatcaaaatcctcatccacgatttgagagacggagagcaaattatatttcaaattctcaaccaaagtgacatcattcaatgtaaacttgtcacttaccttgacagaaccagtagttgttatcgaactagtagaagcatcaccgaagatgatcgagtccctccttgacgccttcttgaggaaggagaatcactggtcatgtgctgcatacaaccggagtccacaatccacacgttctccatcctcaccactaaatcacgattgtttgtgttaaccttagattgatcaagaatcatgttgaggttcttttttcctttagaaaatctttgcaaagaacttttcaagtaaaaaacctcttgagaaagagtagcacaatttttgcaagcatccaaaacactcttttattttctacacgttgagcaagacatcacttcatcttgtttaacaatttcctccatgtgcttaacacgacccaaagcatattttagtttcatctcattagcaacacatgttgtcgaaaaaagtttggtactagattgcttaatcctcttagagctaatcaagttaaatatcgagctagcaaacaaagcaacttgacatttattcaaagctctcttagttaaaaacaattcatcaaccaatctagtgttcatggcaaagctaagagcaacacaagattcaaatttcttagttttcctagattcaacatcaagctttttgatacaaacatctctattagacttaatttcagcacataaaacctcacaagattgacattcatcattatcaggaacaagagattttatactactattttcagccttaagagattcaatggtagcttcatatggactaatcttttctcaaacttagaaattttaaaaccaagtctagcaataatatcttgataatattcaacactagaaggaggaattacctcattgtcatctcctgaatcctcatcaatgcttctagccatgagacaaactccaacgatgttcttccccttgtcatcatctccatcactatcaaaatcaacatcacttgattcttgaattgccgcatatgcttcatctatcgccttttgatagaacttcttcatcttcatgttcttgaattgcttcttgctttgtttgtcgtccttggtgttcttggcattcttgacttcatcttgatctaccgcctttgttcctcttctgagcttgggacattgagaacgaatatggccaagttgtccacattcaaagcaacgttgtggtcctcctcttctcctggatctagtattactcaaagctttagaagctctattagcaatcaaaaccaagtcctcctcactaactccctctagttgatcctcggacaaggcattaaaagcggaaaaaatagacatgggagtggaatcaatagaagaactagatgaagacaccaaagcagtagatttagaatcagttcttttagaaagaatattcatctcatatgttttcaatttggtgtagagaatatccaaagtcagggtgttcatgccaacagattcctgaatagaagtcactttaacatcccagattttcatgtcaagaccattcataaagtaacaagcaaccttagattgagaatagttgacattgtaagaagcatcaacagatccaagatcactcaagattttattgaaacgccccaaataatcatccaatgattcaccagaattcatctcaaacttgatgtattcctttttgaaaacatctttttgcaactccttaatgtttgaagatccagtgtgaaaatcgttgaaagctttccaaatctcattagcagttgcaagatgtgaaacacgatcaaaatcggagcgagaaatggcattaagaataatgttgcgtgctttgcaattattttcaaaatcagctttttgagcaatagt

SEQ ID NO: 23021 - DNA, 4896 bp, Oryza sativa
  Clone ID: TF_OsC359_7895
atgtcggatttagggggaaagaacggggaaaatggaaatgaagatggaacgagcagcaaggaaactccatcacccaagggagctactataccttttgattacagcaaacttaccattccccctcacaactttgtctccgtgccttctaggcgtgctcctcaatttgatgggacacattacgccgcttggaagcacaagatgaagttgcatctaatctttttgcatccaagtatttggaaagttgtttgtatagcttccaatccaattctctccgccttgagtccggaggagttcaacaaggttgatgggcttgaggaggccaaggagatatgggatactttgcaattggctcatgagggatcacccgccgttcgtgaggccaagattgaattattggaagaaaggcttggaagatttgtgatggatgacaaggagacaccacaagagatgtatgataggatgatgatccttgtcaacaagattaaaggacttgggagtgaggacatgacaaatcactttgtggtcaaaagacttctccatgcttttggtccaagaaatcccactcttgtatcaatgatatgggaaaggaaagatttcaagaggctcaccccaagtgacattcttggaagaattgtgtctcatgagatgcaagaagaggaagctcgtgaagtgaggcaaatggtgaagaatgccaccatgatcaaaaatcaagaagtagctttgaaggcaaaacaagaagaagagtcaagttgtgaagaaagtgaagatgaagaaatgacttttattgtcaagagattcaagcactttcttcgcaagagtggctatggcaaagggaggaaggatgatgacaagggaaagaggcaatcaaagagagcttgcttcaattgtggcgaatatggccacttcattgccgattgtctcaagtcaaatgaagcgaaggctaagggaggcaagaagaagccggagcgtgctcatgtggcggaggcacacatggcagaggtgtggtactccggagatgaagaagatctcgaggtcaagcccaagcccaagccaaaagacaaggttgaaggagaaggtggtgttgctactgtcgccttcaagtcatcctcttcaagcaaggagcgtctcttcaacaacttgagtgatgacgacgacgactcctaccactactcttgtttcatggcccaaggccacaaggtgatgactcaaaagccctctcatacctctcttgatgttgattctagtgatgaggaaagtgataatgaattagatgatgtgcttaagagttttagcaaacccgctatgcaacatttggctaagttaatgagagctttggatagtaaagaacaatctctcgaaaggcaagaagaattacttattcttgagaaggaaagaaaccttgccttagtggagagcctagctaaagaatgtgctaaaaatgaacaactagctaatgagcttaatttggctaatggttctctagctagccttagggatgtcaatgaaactcttcaagagaagtttgctagtttagacaaaagtcataaagatcttgaagttcaatttgacactctttggaatagcacttctcaaccaaatgtggtttctaattcttccaacccatctactagcaatggttgtgctaggtattacaatattgatttgaactctcatgctactaatgttgatgctatgcaagctcttaagaaagaaaatgaaaggttgggcacattggtgaaatatggatgtatgaagacataccattcaaaagatgccctttacaagaccatcaccgctcatcctaacaaggatggacacgggctcaggaagtttcgggcttctgataggccgaaggggctggccggaagttccggttataatgccaggaagttctggccagagggtctttactatgattcatatgcatactcctccgatggctcaagttgggttgtggacagtggctgcaccaatcatatgacgggagagaggagtatgtttacaagtcttgatgaggagggtggaagtcgtgaaaatattgtctttggagatgatggtaaaggaaagagggtgcgaagcaacaatggaggagaattcaagaacactcaagtggaggaatttcttgatgaagaaggaatcaagcacgagttctccgccccctatgatcctccccaaaacggcattgttgagaggaagaaccgaaccctcattgaagtcgcaagggcaatgcttgatgagtacaagacttcggatgtattttgggcggaggccgtgagtaccgcatgtcttgccatcaatcgcttgtacctccacaagatcctaaagaaaacctcatatgagctcttgagtggtaagaagcctaatgtttcatattttcatgtctttgggagcaaatgttttattttaagtaagaggtctcgctcatctaagttctcacctaaggtggatgagggattcttacttggctatgaatcaaatgcacatgcctatcgtgtcttctacaaaacctccggtattgttgaagtcactagggatgtgacatttgatgaatctaatggctcccaaggagagcaagttgttgtacatgttgtaggggatgtggatccaaatcaagctataggtactaacgctattggagacatacgaccagtcgagacgcaggatgaccaagaagatagggatcaacctccgtcatcgacatccaatagccctacaagtgctgtgtctgctgagccggaagttccgggtcccattgaccggaacctccggacatctccagacccggaagttccgggttctacagttcggaacctccggatcagtggcagtgaagacgtgccaacggcacaagtggatgggatcgatgctgagggcactttagagcattctgatcaggctcaggtccccccagtgcaccatccaaggatacatcacactgtccaaagagatcatcccgttgacaacatacttgggttcgaggatccaaagttgccaaaccatgtgtacaagctccacaaggcgctctacgggctcaaacaagcccctagagcttggttcgagatgtctatgatgggcgagttgaccttcttcctcgggctacaagtgaagcaagcactagagggcaccttcatctctcaaaccaagtacgtaaaagacatactcaagaagtttgggatggaggatgccaaacctatcaagacgcccatgcctactaatggatacctagacctcgacgataatggccggaagttccggtgttcttggcctggaacttccgtggtcattatgcctcgtgagaagagacagaagctttctcaagatgttcctgctgactcgagccccccggttcgtggtcctagggggagattgggcaaagaaaaagttggagttttttacagtgggagtcagattccgatccattccaggagggctggtagcattgtcattcgtgatgcaccccgctctccctctccagctgcatctgagtcagatgatggtggcaatgaggatgagcctggttctaaaagcaatcctttgaggctgtacaagacaagggctgttgatccagatcctaaacgcacaagagtgaactatctgaagaatctactccagtgtggaaaggacagaatggttagtcctgatactctgccagctgactctcaggatgacagattcaggaccttggtgcaggttgattggtataactctatgatcatgggaagatctcatctagtggtagagatgaagtggctagactggcagtacatgtcctcaaagaacaatatagtcttcaatgaggtacgcaaggtgtgtgagcgcaagcacgtggtagatttgttggccttgcagtattcctggaatgaggaagtgattggacagttctactttactgctttctttggcatcaccaagaaggggcttgattttgtgaagtggaccattcaggggcagcagtatagggtttctatggcacagtttgctgcagctttggggttagatgatgatgacctgagtcgtccacatatctttgtagaggatgctctgtcaccaaccagcactacctttatgtatgagaaggatgctcctaaggattgtttggggactattcgagggttgcgtccatattatagagtgctgtactctatcttcaggtggtctttgctccccaaagtgggagatgctacagctcttccaggtaggcatgcgctcctcctcagtcgcatgcgctacaacaagccagatttcagcatcatgaagcttatttggagtgagatctataagacaatgtgtgagccaaagaggggctgcatctatgctccttatatcatgaagatgattgaggccaagactgggatttgttatttcaaggacaatcaacacaagcttttccgtcctcatgctcccactacttcagctactcctaccaccagagtgactcgtgcttccacctcagctgctccttcttcctctgctgcacctcagcgttctgagtcttcttctcccataaagaaggctcttagggctatcttttgcatgtgtgccaagacagctaagaaggtaaagaagatagagaggcgtcaaaaggaagattggattgcagcaggcaaggatgtctctgacatttctgatgatgaggagtttgttgatccttttgctgcttatgagactgctcgagacattgctagtggtgagggtccctctggcacttctcgtttcttcaatgaggagtcctctcactccgaggagagcagtgatgatgaggagtcaaatgcccctaccgagaatgttcttacagatcccgatgaggcagtggacgccgccgggcaagacatcgactctcctcactccggcgacaccgagatcattccttctgatggcgatgatgatgaggcttga

SEQ ID NO: 23022 - DNA, 779 bp, Oryza sativa
  Clone ID: TF_LIB4506-006-R1-K1-A9
ggtccggattcccgggtcgacccacgcgtccggaaacattgctcgacatctccactttgtccctggaggaggtcactggacgcctcaaggcggctgaggactctggccagtcgtcgtcctcgtccttaccaggtggcagcggcaagctctatctcaccgaagaagagtggcttgaacgtcacaagaaaaaggaacaggaggcgaagaagggcaatggcggaggcaacacccgtggcaagcgccgcggcgggcaagggtgcaatggtagtggtggtggcgacaacgctagcccggtgcgcaagaaggacaagtgccgtaattgtggcaaacttggccactgggccaaatattgcaggagcaaaccaaagcaggagcaagcgcacgtggcccaggaggaggattagcccacgctcatgctcatgacgggcggctgcattgatgtggtggaggagacgggcgcgccgtgcgcgacaccgtcgccgcccgcattgcggcctcgcccagacgtcatcgagtttgtggagcagaaggtgatcgccgcgctggacgacgccaccgaccacgacaacaagcgctagatcctcgacaccgacgcgtcgaaccacatgaccggctcaacaccaacgtcaccggcaatgtccgactcggggatggctcgctcgtccacatcggagggcgcggcaccatcctattcgcctgcaagaatgttatattgacggtcgaaactgatcgataacgaccgtcaacaaaaccccccaagctttgacctttgctcgtcc

SEQ ID NO: 23023 - DNA, 5115 bp, Oryza sativa
  Clone ID: TF_OsC359_8211
atggaccaataccgaccactggtcgaagatctcaaactgctgtggaagaaagaaggcgtcctccccgtgtgggatgaggacaaacaggggatgctggtagcggcgagcgtcagcctcgtggacatcgagcaacctctgagtttcgatggcgtggggacgacgcgcatcgagggcttggtggaggcggcgggctcggcgagggaggttgatggtggcgaaagaggagttggcggtggaagcgggctcggtggagagtgtcgccggtcggtggagacgccggtcgggcaggtggcgtcgggcgtcggagaggaggaagcgacgacaacgaggaaggacgttaccgggctcgcggcgccgggctcggtggaggcggcggcctcgggctcagcgaggaaggcggcggcgccgggctcggtggagggcgtcgccggggacccccggtgtctcctctacccgccgccaccctcgctttcgcctctcgtcgtcggaaacgccctagcgccgtgtgccctagcgccgccgtcgccgccgtcgctccagccgtccttcgccgccgttccggtcgtcgccgtcgctcgggaagaccgtcgtcgtggtcgccaagtcgtcgccgtcctcgtccgccccttcgccgtcgctgtagaccgccggagcaccgtcgccgtcgtcaagccgaagagcgccgccgcttcttcttcgttgccgtcgccgtccgttcctcttccgccgctcttttggtcaccgcgctgccgttcgccggcgagcgtgcgccgtccgagccgccgagccgccgccgccggtggtgacgtcaccgctgacgtcatcgtcgccctctcccggggtgattatgatccaggaaaggtgcgctgcagtggattgtgttatgcaaggggtattgtcacaactcctttccgaggtaccgtggtgatgccgcgctacaagcctgagtacttgtttggtgttgagggttttgtccaggagttgagtacgatgtcctttgtcattggatttgggactgcccctttttatgctcagattcctcatgatcgtcatgaagagaagtgccgagtcaaagtcactttgaacagtaatagtgaagatatcccctcagtgatgttcgaagctggaggaagaaactacatccatgcatgtcaggaggtggcaaggatcgccataggagagctccgtgatcgctacagtgatcagttggccgacactgagtatcgctaccatcctcgccaaccacagggaagtgaccgtggcagctaccttgagactgaaggaattgagaatgatgctaccacaaggcatttggtcgagatgctgtgggctatggatgaaagtcgtgcggagactgtgttagcggctcaagatcgtgaagaccggaatcgtggtaagatttgcaagttagaagacaaggtggatcgtttggagagggaactagctgcattgaagggagaagcaccgccgcagaaggctaggattcgtctcaccgcaaggaagagagctctatttgtccctcgctatcaattggcgccaaaggttcgtgtggtggagaaagaagttgccccaaccctagcagatcctccggtcatcatcataagtgatgatgaagaagaagaatccaagcgcaaccattccaagattgagtgggaagctactcaagatgatgaagacgagccgaacgagccttcaatcgacctccgatgctcggaagaactagacaacgggaatggccccaacaacaacaataacaataacaatgaagggaacccaacccttgctcaagttcttgctcaacagactcagttaatgaacatgatgatgcagcaacttcagaatcagcagaaccaaggaaataaccatgcacctccccagaacaagttagcagaatttcttcgtgtgaggccgcctattttctctagtacctctaatcctgttgaagctggtgattggttgcatgccatagagaagaagttggatttgcttcagtgcactgatcaggagaaggtctcatttgcatcacatcagctgcatggccctgcttctgaatggtgggatcacttccgcctgaaccggactactgctgaacctatcacttggcttgaattcaccgctgctttccggaagacgcatataccatcgggagtggtgtctctcaagaagaaggagttcaggtcgctcacccagggatctcgctctgttacggagtatttgcacgagttcaatcgtctggctcgttatgctccggaagatgtgcgcaatgatgaagagcgtcaagagaagttcttggaaggacttaatgatgagctttcttacccactcatgactggagattattctgatttccagaagttggtggataaggctattcgtcaggaggacaaaaacaaccgcatggagcagaagaaacgccggattgctcaattcaagacacaacaggggaataatcagaagccgcgtcttactttaggaccccagaccatgccacatggaggttcttcatctgttgtacgtccgcagcgtcagttcttcaacaacaatgctggcaacaacatctgcaatcaagctccacgtcctgttgcagctccaacacagcaacaaccttccaagagggagcaaggcagcaaacccgtggtgtgtttcaactgtggagacctaggacattacgctgacaagtgtccgaagccccgacgtgtgaaggttgtccctacccagagcaactctaccgtaccagcgtcaaaggctcgtgtcaatcatgtcgctgctgcagaagctcaagatgctccagatgtgattttggtccgggagtatcccgatgtgttcccagatgatttacctgccaatgaattggcagaagtcaagaggcaagtagatgatttgcttcagaaaggatacatcagaccaagtttgtcaccatggggagctccggttatttttgtggaaaagaaagaccatacccagagaatgtgtgtggactatcgtgcactaaatgatgtgactatcaagaataagtatccactacccagaattgatgatttgtttgatcagcttaaaggtgccactgttttctccaagatagatcttcgatcaggatatcaccaattgagaatcaaagaggaagatatacctaagacagcttttaccactaggtatgggttgttcgaatgtactgttatgtcttttggacttaccaatgcccctgctttcttcatgaacttgatgaataaggtgtttatggaatacctagacaagttcgtggtggtctttattgatgatattcttatctactctcgaaccaaagaagagcatgaagaacatcttcgccttgcattggagaagttacgagaacatcaactatatgctaagtttagcaagtgtgaattctggttgtctgaagtgaagttccttggtcacgtcatctcagccggtggagttgccgttgatcctagtaatgtggaatccgtaaccaactggaaacaaccaaagacagtttcagagattcgcagtttcctaggcctcgcaggatattaccggaggtttatagagaatttttccaagattgctaagcccatgacacggctgcttcagaaagatgtgaagtacaagtggtcggaagaatgtgagcagagttttcaagagttgaagaatcgcttgatatcagctcctattttgattttgcctgatccaaagaagggtttccaggtgtattgtgatgcatccaaacttgggttaagttgtgttctgatgcaagatgggaagccgtccttcgccgccgttccggtcgtcgccgtcgctcgggaagaccgtcgtcgtggtcgccaagtcgtcgccgtcctcgtccgccccttcgccgtcactgtagaccgccggagcaccgtcgccgtcgtcaagccgaagagcgccgccgcttcttcttcgttgccgtcgccgtccgttcctcttccgccgctcttttggtcaccgcgctgccgttcgccggcgagcgtgcaccgtccgagccgccgagccgccgccgccggtggtgacgtcaccgctgacgtcatcgtcgccctctcccgtgagccggcgggcccgcccgccgccctcgctgacgggtgggtcccacctgtcatctccctcctcgcgccgcgccgccgcccgcccgtgccccccgcgattccctctcccgtttcccccgttttcccctctctctctccctcggattcgtccggattcatcccgcaatcgtcgccggcgtcttcaatggcggccgagatctccgcgccggtttccttcctctccggccgcgctctccccctctcggcgctatatatttgctccccgtgcttcgctcttccgtttccgccgctcgccgctcgctctccccgtcggattcgtgctcgcgccgtcttcctctctctccgccgtcgccgacgagctccggttcgccgccgacgtcgctccgcgcttcctcccgactcggcgccacctccgtcggcttcgccgcgtcgccgccgaccccgtccacccctccgcttcgctcgccgaccgccggagcaccgtcgccctcgccgtcccgaaccgcgccgccgcgttcctccgctccgttcgtcgtctccgccgtcctcgtgtctcggggtgagccgtggaccgtccctttcgcttccctctcctctccgctctctcgggcgccgctccgccgcgccggtggtcgccggcggtgaccatcggggcgcggtcgtgccgcctcccgtcggccgtgccggcgaggccgccttcgggcgcgccctcgcggctgccaagtgggcccggccgtcagccgcccgcgcccgcgggtgcggctgacgcgtgggacccacggcgccgaccgccgccagccgcgtgctcccggtccaccgtggaccgagaggctgacgcgtgggccccactcccgtggacccggtccgcgcgccctctccctcggctccacttctgccggaggcaggcgcgtcgtgggaacgtggctgtcgcctcggccctcggggccggggcaggagtcacccgaccccccctcggggaaatcaggaggagggcggacacctcaccctcgggcccgacgtccccgaaggtgccaggccacgtgggcgattgtgt

SEQ ID NO: 23024 - DNA, 5446 bp, Oryza sativa
  Clone ID: TF_OsC1713_5373
ttagacatagtccaatgctatcactccggagtttttctgctttctgacagatttcagtcttattttgatatgtctagatgacttcacgttgtcctttgaactgttcactttaataatcactgtttgattatcacagttcgttaggatagctggcactggtttttcaaccaccggcaaatccatcaggagttcacgaagccactcggcctcaactgtcgcagtatctagtcctgtaagttctgcttccattgttgacctcgttaagatggtctgcttacaagacttccaggaaacagtgccacctccaagtgtgaacacatatccacttgtggcttttatctcatcagcatcagatatccagtttgagtcactatacccttccagtacttttaggtacccggtatagtgaattccatagctcatagtgccctttagatagcgcattactctttccaaagcctgccaatgatcatccaccagatttgagacaaaccggctcagcttgcttacagcaaatgagatgtcaggcctcgttgcactagccaagtacatcaatgaacctatgatttgtgagtatctcagttgatcccttgctattcttcggtttttccttaatagcacactgggatcataaggagtaggagctggcttgcagtcgttgtgtccaaagcgactcagaaccttgtccacatagtgggattgcacaagtgtaatcccaccctcatctcctcttagtagcttaatgttaagaataacatcagcctctcccaaatccttcatttcaaaactcttggacagaaagtccttgacctcctcgatcacattgaggctggtcctaaagatcaatatgtcatcgacatataaacacaagatcactccttctcccccaccatagcgatagtacacgcatttgtcagtttcgttcacaacaaagccagcagatgtaagtgtggtgtcaaacttctcatgccattgcttaggtgcttgcttaaggccatacaaggatttcaacagtttacacaccattccctcccgaccttctagtgcatacccgtttggttgatccatatagatctcctcctccagctctccatttaggaaagctgtcttaacgtccatctgatggacgagaagagcatgagaggctgccagagcaagtagtactcgaatcgtggtcaaatgggcaactgatgagtaggtgtcgaaaaaatcctcgccttccttttgggtataacccttggccacaagccttgccttgtacttttcaattgtaacctctggcctaagctttttcttgaaaacccatttgcatcctacaggcttggacccatatagacgctcaacgacttcccaagtaccattagacataattgagtctatctcactacgtactgcttccttgttcatacgccacactttgctcctagtcctcttctcggcttcatccaatatccggatcgggtgttctggatacgtaagatcattgctaatgtgaatctcttccagcggagcttgttcttccggcactcgtaagcatttctttaattgagacacatggaagactgggtgcacatcagcgatattctctggtagctgtaactgatatgcgacttctcctcttctagccgtgatttgaaagggtcccacgtatcttggtgctagttttcccttaaccctaaacctttttgttcccctcatcggagaaacctttaaataaacgtaatctccttccttaaattctaggtttcttcttcgggtgtcggcataactcttttgtcgtgattgtgctacctttaaacggtcacggatcaagcgaaccttttcttcggcctcattgataatgtcaggtccaaataccgcccgttcacctgtctcagaccacatcagcggcgtccggcatcgtcgaccaaacaatgcttcattgggggacatcttcaggcttgcttgaaagctgttgttgtaggagaactcggcgtagggcaaacacctctcccagtctttgctaaaatccaacgcacaagctctcagcatgtcctccagtacctggttggttctctccgtctggccatctgtctgtggatgataagctgtgctaaaagcaagataacttcctagggcttcatgtactttttcccagaaatgcgaggtaaactgtgtgcctcgatcggatataatcctcttaggtataccatgaagacacactatcctggtcatatacaactcggcaagtttagcactgctatagtttgtcttgacggggatgaatcttgccgtcttggtgagtcgatccacgatcacccaaatggaatcatatcctgttgcggtcttgggcaatccaacaataaaatccatacctatctcatcccatttccattcaggaatcctaaggggttgcagcaagcctgccggtcgctgatgctcagccttcactttttggcatacgtcacagagtgctacgtattctgccacatctctcttcatgttgggccaccagtatccttccttcagatcttggtacatcttcgtacttccggggtgcaatgagtatgccgattcgtgagcttcctttaaaattaatcccctcagtccaccctgttcgggtacgtaaattctctttttataccatagaacatctttttcgtcgattgaaaattcctttgcacgtcctgcagctaagcgttccttcaactctcggatttcctcgttgtccttctgggcttcttctatttgggttctcaaaagaggttgaatgtccagggtgtttattttgttcataagattcatgaagtaggctggggcattggttagaccaaatgacatcactgtgaactcatacaatccatagtgtgttgaaaacgcggtcttgggaatatccttggtcctaatcttcagttggtggtatcctgatcgaatgtcgatctttgaaaacaccttagctcctttgagttgatcgaagagatcatcaaaccttggtagtaggtacttgttcttaatagttacttcgttcagtgatcggtagtccacacacattctcatgctaccatctttcttcttgacgaatagcactggggctccccaaggtgacgaactggggcgtacaaatcccttttcttgcaactccctaatttgctttttaagttcttctaactcattaaccggcatccgatatggtctcttggatatgggggcggttccaggtatcaggtcaataatgaactttatgtcacgatctggtggcattccaggtaaatcttctgggaacacatcaggaaatcgctgcactacaggcattccctttaggggtagcatggtaaatatacctccggcacgttcggttagcctaggatcttgatccatggttgctctcatatccgatccccagggtgtggttaaggtcacctctctacgcccacagtcaattacacctctattctttgttaaccaatccatgcccagtatgacatctagggtctgaggtattaagatcataagattggagggaaacaccacgtccctaagacgaattggtacgtctatgcaagcatgactcacagttatctcgcccccaggtgagtgtactatcataggctttctaagtcccactagggttaagttgtgcttttgactagccttcagagatataaatgaatgcgatgcaccagaatcgaagagaactttaaccggggtagaattgatagagaacatacccatgagtatgccctgatcttcctgggcctcttcagctcggacatggttcacttgtccgcgcccaagtccagtggcggtcctgttagattgcggagtcttgaatagacctcgcccggtaacaggggtagtagtgccacgaacagtcattgcattcgtgccggtccggacaggagtcttgcgtggatgagggcagttgttggcgtagtgcccataccccccgcaattgaagcagttcacattcatcttggctccaggggcagccaaagttggtgtaggggtgcggttctgaattgcaactggcctgttgaagttgctaggtgcagcgggacggttggttgccacgatagggggcttccatccggatgaagtggctcccttgagtcgctgaggcactatctgaggtaggcgactcatagcaagcctcctcttgcggttgtgttccaccgtcctttgatcgttctctagcctgacgactttgttgatcaggctctggaaactctcgtgatcctgcccgatcataggtccacgcaattcatcattcagcccttctatgaacttgtcgatcttttcttcttcatccgctaggtctccaattgcatagcgggccaactgagtaaacttgttcagatattcttgcaccgttgtattcccttgccgcagccatctaaactcgttcttcttcatgcgcatcactgcagcaggtacgaagttctcgcgaaatgctgcagtgaactcctcccaagtgggttctccagcatcgttttcccgagcttccttgtaggtgtcccaccaatcactagcgggtccttccagttggtttactgcgaagattactttgtcggtttcgcgtaccctgacaagagtcagtttcttctctatgatgcgtagccagtcttctgcctccataggctcatctgccgtagcgaaagtgggtggcttagtcctcataaactctccaaagctcgatcctccgcagttgtcttgattgtttgcaatggcttgcagaagttgggtttgagtggccataactctggccagggtggttaggtcgggtacttgagtttcttcattgctggttgacgccctacgtcggcttgccatctgtgtaggccgatgaggtatgtatcctattttcctaactagcccttttggttttatcccgttaagggagttgttttgattgtgaactgagtccccacggctcggaagtagtggcctctggatctggcttgggcttcttgcccggaggtcgtgtgctcttgcgagcagtgctgagggtacgagggcctccgacaaaggtgatgcggtgggcaggagtctcatcctctgaaagatcagtgatgtccggctctatctctggcttagtgtcggtcccctctgtctcggagtcgacctggattggagtctccaaactggaacccagtgccccaagccaggtgctcctcctctagctgaagctgctgcactgtgaggtcagtcacctcagtctctctaactctcccacacgcctctactggtcgtcgatctctaacagagcctcctcgtagaagtcgtctactgcctcagcccatcgggacagtcgagtcactgtcgggttgtagcagcaaggtgtgtcctggactgtgcagacggagttgctctcctctcgaaatgggtggtgagcaaactcggtactcgctaactcagctcggtgaatagagctaattcggagaaaggcctctccggtaagtcgcgacgg

SEQ ID NO: 23025 - DNA, 4216 bp, Oryza sativa
  Clone ID: TF_OsC1713_4627
gaagcatcagactggaactaatcccagcttgcctctcaactccaaaaatcgaatcttaccaagaggctttgttaaaatatctgcatgttgctcctctaaccttatgtattccacctccacccgtttctgatcaacacaatcccagatgaaataaaactttgtatcaatatgtttactgcgatcatgaagcacaggattcttcaagagacttatagcagacttgttatcaaccttgatcagtgcacaaccaggttcttggccttccaactcacctattggtcgagccagccacactccttgtacagcagcagttgcagcagctatatattcagcctcacacgaagatattgctaccaccttttgtttttgtgactgccaactgatcaaactgtctcccaatttaaatagaactccggttgtactctttctatcatcaatatccccagccatatcactgtcactatagccattcagctgaggaacctgttgttgcttctttctgaattccaccccgagattcagagtacctgccacatacctcaaaatatgtttcatggcagcccaatgttcagaggtcggtttctccataaacctgctaacataaccaaccgaataacttagatgaggtcttgtgttcaccaagtacctcaagctcccaattatgcttctgaattgagtttcctccatacattctcctccctcctttctcaacttcaaccgagcatccatgggagtctgacatggattacaatccctcatcccagctttgtcaagtatctttgctgcatatgcaccttgagacactgtgatcccttcctttgcatgtttcacctccatcccgagataataagagagcagaccgagatcactcattttaaaaagagcctgcatctgctccttaaacttgtttatttccatcagacttgctcctgtagtaatgagatcatccacatatacaccaaccacaagtcatgagttcttctctcctcgagtatacacagcacttttgacaccactcttgacaaaattcaggctcacaagactagaatccaacttcgcataacatgcacgtggtgcttgtttcagtccatatagggccttcttcaatttcaacaccttgtcttcttttccatcaacaacaaaaccaggtggttgaaccacctaagcatcttcttccaattccctattcaagaaagctaatttcacatccatctgatgaacttcccatccctgatgagcagccgttgcaatcagcaatcgcacagtctccatcctcgtcactggggcaaatacttcatcaaaatcaactccttgttgatggacatatccctttgccaccaatcgagctttgtacttcacaatgacatctttggcatcacgtttgattttgtaaacccatttcagtcctgttgctctgtggctagagggcaaatcatagagagtccaggtgttgttaccttcaattgattccatctcttcaagcatggccttcctccagcagctctcctgctcagcctccaagaaacttgctggttcctctgctgccataaggcattgatcactgtaattaaaatctaggattggggtcaaggtggcaagcgtgttcaccactgttctgtagctcctgggcccttcatcagtcccttcactagcatcagttggaggggaacagaattcaacaccagatggcagagttgttgcagttccggtgcttgatgttggtgatgttgctagcatggttggagtggctgctgcatcctgggcatgtgtctcactcccttggactgggattgtgaaattctccaccgtaaactccacatacgcgtcctgatctccttcttcatcagtgttgctgccccagtcccagaacgtcgtctcataaaaaaacgacgtcgcgtgacacacacacgcgtcgcaccacaaaatcatacatcttgtaggcttttgatccttgctcgtagccgatgaagaccatcctcgtgctacgatcatcaagctttctcaagtttggcttggctgtcttaacatagcccacacactcaaacacacgcaggtgttcgacagtgggtcggcgaccataccacgcttcatacggcgtcaccccatcaagactcttcattggtgatttgctcaagacatagacggctgcaaccaccgcctctccccagaaatatgccagcatgtttgccgccttcagcatggacctagctgctgccaccacagtctgattgcgccgctccacgacactgttctgctgccgtgagtagggtgcagtgatttaacgtttcacccctgtgtccgcgtagtactccatgaactctatagaggtgaattcacccccgcgatcagtgcgcagcgccatgagcttccgattgctatccttctccacgccggcttaatcgctgccgatgcttcgtgtttggcagagaggagtcgtatccacatgtgatgactcatgtcatcgactaggagcaagaaatacttcttgccccctgtcgtcgccggcgtgattggtccgcagaggtcaccgtgcaccagctcgagcgccgtctgcgccctgtactgcgcctcctctgggaacggtgtgcgatgttgtttgcccgcgaggtacccgtcacacaactgatcaatgtgatcaatttgcgggatcctgcggaccacgcctccttttgccaacctccgaagtgccaggaaattcagatggccaaatcgtgcatgccatcgccatgctagctcggagccgctcgctgccatacagattagtgtcgcaaggttcaacttgagaacatacaggtaacttgaatcacgatttaccttagctagctgcatcccttccgggtcacgcaacgtgaaaacaccatgccaaatgtgtgcgtcgtagccgcgcgcatcgaggcgaccaacactaacaatgttttttctcagcttggggatgtagtacactgcctctagtgagcggtgatcaccattcttgctctgaaacaccacagttccgcgcccctagatgtcaaccactgagccatcgctgaatttaaccgtgcccacaacaccagtgtcaagctccgcgaacgctgagcgtgcgcccgtcaagtgattcgtggccccggtgtccaggaaccactctccagtcttctcctccttacgcccatcctcatggtccagcacaaccttcttctctgtgagatgcacttcctgcacacaaggtgttcgaccaacggccgcttcgccggcgagcgacacccccatcacgtgtgccatgagcagagtcggctcttcctcagcctggaccagatttgcatttgcctctccccgacattggcgacgcggcatacggcactgcttcgagtaatgaccgtattcatcacaattgaaacacttcaccttagagatgtcacgacagccatggccgctggtggccatctcctttcccttcggtgaatcgccggccttgcctcgacggttctggttgccagagcccgcccggcccttgttgctgctgccagatccctcctactcccgctgcttgacaccggcctgccactgctccttagtgaggtacaatttgccaccgtcacttgcctcctcatcatcactgtaggagtcgaccgtcgacagccactcgatgagctcctccagggccatggtcttcacgtcgaggagctgctcgagggaaattgccaccggcttgtacttcttggggacaacacgcagcagcttcttgttgatgtgttcgtcttccatgactccgcccatgttgcgcatgtccgcaacgatggcagtgagccgcatcgcaaattcctccggtgtctcaccgtccttgaagcgcatcgcctcgaactgacggcggaatccctgctccctcgcctcgctcacgcggtcgacaccgacccgcatggttttaatggcatcccacgccgccttcgccgtgtcgtgctttgccaagccgcgcaacatctcgcggggcacagcttggagaatcgccgagagcgctgcacgatcctcgcggtactccgcatagcagggatcgatggccgtccagagcccctgcgcctgcaggttgacgcgcatcaacagcgctcagtctatataatttgtcctcgacaggatcaagagacgggcagtgtgccctgcatcgactagcgggagtgatgccgcagccgttgtcgcttcccccgccgccaccgccaccacgacggccaggcggtgtgtatgacat

SEQ ID NO: 23026 - DNA, 906 bp, Oryza sativa; identical to SEQ ID NO: 13924
  Clone ID: TF_OsC333009_5

SEQ ID NO: 23027 - DNA, 4275 bp, Oryza sativa; identical to SEQ ID NO: 13926
  Clone ID: TF_OsC359_5853

SEQ ID NO: 23028 - DNA, 4917 bp, Oryza sativa
  Clone ID: TF_OsC359_5908
agacgattatcctggtttaggcccttagcatggggtaataccctacgtctggtgatgtagattggatctatgtcaactaaaaagacaagagtgttaccgcttagggttagtgccagcgcccttatagagctagggcaaccgacgacatgcttcgtacagtatccctcataatccggctccagccgacggcaccgccgccgccgaaaccgccaccgacgccgccggtttccccgtttcccgcggcccactccgcccgtaaccccaagcccacgtcgccgcccaccttccccgcacctcccgccagttcgggggcccgcaaacggcgggggggatttgaaatttcccccactctctctctcctcctccatatggtgaagacaaggaatgatccccgtgactccaacgacgccagtggcagcgaagagcagaccgatggagctcatgtcagtggtgcatctggcagcagatcatctccaccgcccgaaaacccaacagtcactcaaatgatgacaatgatgatgcaacagatgcagcaacattaccatcagatgttgcagcaggcgcaacagaaccagcagtttggtcctccaccatcacacgtgtccaaactgttagactttcttcgtatccagccacccactttctcaagcaccaccaacccaatggaggccaatgactggctccgtgctattgagaagaagctgaacctactgcaatgcaacgaccaagagaaagttgcttttgctacacaccagttgcaaggtcccgcttctgcctggtgggataactacgtggcgacccgtctagatgcaacggaggttacttgggcagagttttgtcaaagcttcaggaaggcacagattcctgaagggattatggcacaatagaagagagagttccgtgcgctccagcaaggaaccatgtcagttacagagtacttgcatgagttcaaccgccttgcgcgctacgctcctgaggacgtgcgcaccgatgctgagaagcaggagaagtttttgtttgggctcgacgatgaattgaccaaccagctaatctccggagtctatgaggactttgagaagcttgtggacaaggctatccgccaggaagagcaacgcaacaaaatggaccgaaaaagaaaggcagctcagatcagctttcctcaggggaacaatcagaagcctcgcttcatgacgggacagctaggtgggccttccaccctgatcgtctgtcagcaccgtccctatcacccgagtaacttcgacaacgactacaacggtggcagtcacaacaacagtaagcagcacaaccacaactcgactccacccccactaatggcaccagctcagtcagatccgccagctgtgtcagctcagtcagaacaacccaagaagagggctgtaggaaagccaggaccctgcttcaactgtggcaagcacggccactttgctagcaagtgtccgaagctgaatcgcactggacccaggttcatccaggcccacgccaatcatgtgtctgcagtggaagcacaggcagcaccagaggtcgtgttgggcacgtttccagtgaactcatatccagcaacagttctctttgattcaggtgcctcgcattctttcatttccaaaagatttgctgggacacatggattatcggtagtggaacttaaaataccgatgcaggttcatacccctggaaatgatatgaggacagcacactactgcccctcggtgactatagagatcagaagatcaccgtttctatccaacctcatccttctcgaatctaaagacctggatgtcattcttggaatggattggttgaccagaaacaagggagtgattgactgcgcaagccgcaccatcaccctaaccaacgacaaaggggagaagatcaccttccgttccccagcgtcgcagaagtccgtagcgagtctgaatcaggctgctattgagggtcagacagaaacagtggagaaaagtcccaggaagttggaggatattcctatagtacaagagtatcctgaggtgttcccagaagacctcactacaatgccaccgaagagagaaatcgagttccggatcgatttggcacccgggactactccaatttacaagaggccgtacagaatggcagctaatgagctagcagaggtcaagaagcaggttgacgaacagctgcagaaagggtacatccgaccgagtacttcaccttggggtgctccggttatctttgtggagaagaaagacaagaccaagaggatgtgcgtggattatcgcgcccttaatgaggtcacaatcaagaacaaatatccgttgccaagaattgatgacctgtttgatcagctaaaaggagctaaggtgttttccaagatagacctacgatcaggctatcatcagttgagaattcgggaagaggatattcccaagacagccttcaccactcggtatgggttgtttgagtgcacggttatgtcctttggactcaccaatgcaccggctttcttcatgaacttgatgaacaaagtgtttatggagtttcttgacaagtttgtcgtggtattcattgacgacatacttatttattcaaaatcagaagaggaacatgagcaacatcttcgtctggtacttgagaaattgaaggagcaccagttatatgccaagtttagcaagtgtgacttctggttatcggaggtcaaatttctgggtcacgtcatttctgctcaaggcgtggcagtggatccatcaaatgtggaatcagttacaaagtggaccccaccaaagacagtttctcagatccggagttttcttggacttgcgggctattaccgtcggttcatcgaaaatttctctaagattgccaggcccatgacacagttgctaaagaaagataaaaaattcaaatggtcagctgagtgcaaccaaagttttgaagaactcaagaagaagttagtctccgcaccagttctaattctgccagatcagacgaaagacttccaggtctactgtgatgcatctcgccaaggattgggatgtgtgttgatgcaagaaggcagagtggtcgcatatgcttcgcgacagttgcgcccacacgagaccaattatcccactcatgaccttgagttggcagcagtggttcatgctctgaaaatctggcggcactatcttattggcaaccgctgtgaagtttacactgatcataagagcctgaagtacatcttcacccagcccgacttaaatctccggcaacgaagatggctggagttgattaaagattatgacatggggatacactatcatccaggcaaagcaaatgtggtagcagatgctctgagcagaaagagctattgcaatgcagtatgtaccgaaggcatgtgtgacaaattgcagcaagatcttgagcacctaaatttgggcatcgtagaacacgggtacgtagctgccctagaggcccggcctacgctcgtggatcaagtcagagcagctcaagtaaatgatcctgaaatagctgagctgaaaaagaatatgagggttggaaaagctcgagatttccatgaggatgagaatggcacaatctggttgggagaaagattgtgtgtgcctgacgacaaagaactgaaggatctcatactcacagaagctcatcaaactcagtattcaattcatcccggcagtactaaaatgtaccaggacctcaaagagaaattctggtgggtcagcatgagaagagagatagccgaattcgtcgcactctgcgatgtttgtcagcgagtcaaagcagaacatcagaggcccgcaggactgctacaaccccttcagatcccggaatggaaatgggaagaaatcggaatggatttcataacaggtttgcccagaacatcgtcggggcacgattcaatctgggtggtcgtggatcgactcaccaaagttgctcattttattccagtacacactacctatactgggaaaaggttggcagagctttatctttcaagaatcatgtgtttgcatggggtacctaagaagattgtatctgatcgaggaagtcaattcacttcaaagttttggcagaaactgcaagaagaattggggactcgtttgaatttcagcacggcttatcatccacaaacagatggtcagaccgagcgagtaaatcaaatcttgtaagatatgttgagagcttgtgcacttgactttggtggagcctgggataaaagtctaccgtatgcggaattctcttacaacaacagctatcagtccagtttgcaaatggtaccgtttgaagcattgtacggacgaaagtgccgcacaccacttttctgggatcaaacaggtgagcgccaactgtttgggacagaagtgttaaccgaagcagaggagaaagtcaggaccgtcagggaaagactgcgaatcgcccagtctcggcaaaagagttatgctgataaccgccgaagagagcttactttcgaagcaggggattatgtgtacccttcgtgtcactccgcttcggggagtacaccgcttccaaaccaaaggcaagttggcaccacgctttgtgagaccatacaggatcttggaacgcagaggtgaagtcgcttaccagctagagcttccacctaatatggttggtatccacgatgtgtttcatgtgtctcaactgaagaagtgtttgagggtacctgaggaacaagctagctcagagcacattgacatccaagaagatttgacctacgtggagaagccagttcgtatccttgagaccagtgagagaaggaccagaagcaaggtgatcaggttttgcaaagttcaatggagccaccactcagaggaagaggccacctgggaaagagaagatgaattgaaggccgcccatccgcacctcttcgccagctcttccgaatctcggggccgagattccgtt

SEQ ID NO: 23029 - DNA, 3930 bp, Oryza sativa; identical to SEQ ID NO: 13925
  Clone ID: TF_OsC359_6656

SEQ ID NO: 23030 - DNA, 4674 bp, Oryza sativa
  Clone ID: TF_OsC359_7205
atggtgaagacaaggaatgatccccgtgactccaacgacgccagtggcagcgaagagcagaccgatggagctcatgtcagtggtgcatctggcagcagatcatctccaccgcccgaaaacccaacagtcactcaaatgatgacaatgatgatgcaacagatgcagcaacattaccatcagatgttgcagcaggcgcaacagaaccagcagtttggtcctccaccatcacacgtgtccaaactgttagactttcttcgtatccagccacccactttctcaagcaccaccaacccaatggaggccaatgactggctccgtgctattgagaagaagctgaacctactgcaatgcaacgaccaagagaaagttgcttttgctacacaccagttgcaaggtcccgcttctgcctggtgggataactacgtggcgacccgtctagatgcaacggagaagagagagttccgtgcgctccagcaaggaaccatgtcagttacagagtacttgcatgagttcaaccgccttgcgcgctacgctcctgaggacgtgcgcaccgatgctgagaagcaggagaagtttttgtttgggctcgacgatgaattgaccaaccagctaatctccggagtctatgaggactttgagaagcttgtggacaaggctatccgccaggaagagcaacgcaacaaaatggaccgaaaaagaaaggcagctcagatcagctttcctcaggggaacaatcagaagcctcgcttcatgacgggacagctaggtgggccttccaccctgatcgtctgtcagcaccgtccctatcacccgagtaacttcgacaacgactacaacggtggcagtcacaacaacagtaagcagcacaaccacaactcgactccacccccactaatggcaccagctcagtcagatccgccagctgtgtcagctcagtcagaacaacccaagaagagggctgtaggaaagccaggaccctgcttcaactgtggcaagcacggccactttgctagcaagtgtccgaagctgaatcgcactggacccaggttcatccaggcccacgccaatcatgtgtctgcagtggaagcacaggcagcaccagaggtcgtgttgggcacgtttccagtgaactcatatccagcaacagttctctttgattcaggtgcctcgcattctttcatttccaaaagatttgctgggacacatggattatcggtagtggaacttaaaataccgatgcaggttcatacccctggaaatgatatgaggacagcacactactgcccctcggtgactatagagatcagaagatcaccgtttctatccaacctcatccttctcgaatctaaagacctggatgtcattcttggaatggattggttgaccagaaacaagggagtgattgactgcgcaagccgcaccatcaccctaaccaacgacaaaggggagaagatcaccttccgttccccagcgtcgcagaagtccgtagcgagtctgaatcaggctgctattgagggtcagacagaaacagtggagaaaagtcccaggaagttggaggatattcctatagtacaagagtatcctgaggtgttcccagaagacctcactacaatgccaccgaagagagaaatcgagttccggatcgatttggcacccgggactactccaatttacaagaggccgtacagaatggcagctaatgagctagcagaggtcaagaagcaggttgacgaacagctgcagaaagggtacatccgaccgagtacttcaccttggggtgctccggttatctttgtggagaagaaagacaagaccaagaggatgtgcgtggattatcgcgcccttaatgaggtcacaatcaagaacaaatatccgttgccaagaattgatgacctgtttgatcagctaaaaggagctaaggtgttttccaagatagacctacgatcaggctatcatcagttgagaattcgggaagaggatattcccaagacagccttcaccactcggtatgggttgtttgagtgcacggttatgtcctttggactcaccaatgcaccggctttcttcatgaacttgatgaacaaagtgtttatggagtttcttgacaagtttgtcgtggtattcattgacgacatacttatttattcaaaatcagaagaggaacatgagcaacatcttcgtctggtacttgagaaattgaaggagcaccagttatatgccaagtttagcaagtgtgacttctggttatcggaggtcaaatttctgggtcacgtcatttctgctcaaggcgtggcagtggatccatcaaatgtggaatcagttacaaagtggaccccaccaaagacagtttctcagatccggagttttcttggacttgcgggctattaccgtcggttcatcgaaaatttctctaagattgccaggcccatgacacagttgctaaagaaagataaaaaattcaaatggtcagctgagtgcaaccaaagttttgaagaactcaagaagaagttagtctccgcaccagttctaattctgccagatcagacgaaagacttccaggtctactgtgatgcatctcgccaaggattgggatgtgtgttgatgcaagaaggcagagtggtcgcatatgcttcgcgacagttgcgcccacacgagaccaattatcccactcatgaccttgagttggcagcagtggttcatgctctgaaaatctggcggcactatcttattggcaaccgctgtgaagtttacactgatcataagagcctgaagtacatcttcacccagcccgacttaaatctccggcaacgaagatggctggagttgattaaagattatgacatggggatacactatcatccaggcaaagcaaatgtggtagcagatgctctgagcagaaagagctattgcaatgcagtatgtaccgaaggcatgtgtgacaaattgcagcaagatcttgagcacctaaatttgggcatcgtagaacacgggtacgtagctgccctagaggcccggcctacgctcgtggatcaagtcagagcagctcaagtaaatgatcctgaaatagctgagctgaaaaagaatatgagggttggaaaagctcgagatttccatgaggatgagaatggcacaatctggttgggagaaagattgtgtgtgcctgacgacaaagaactgaaggatctcatactcacagaagctcatcaaactcagtattcaattcatcccggcagtactaaaatgtaccaggacctcaaagagaaattctggtgggtcagcatgagaagagagatagccgaattcgtcgcactctgcgatgtttgtcagcgagtcaaagcagaacatcagaggcccgcaggactgctacaaccccttcagatcccggaatggaaatgggaagaaatcggaatggatttcataacaggtttgcccagaacatcgtcggggcacgattcaatctgggtggtcgtggatcgactcaccaaagttgctcattttattccagtacacactacctatactgggaaaaggttggcagagctttatctttcaagaatcatgtgtttgcatggggtacctaagaagattgtatctgatcgaggaagtcaattcacttcaaagttttggcagaaactgcaagaagaattggggactcgtttgaatttcagcacggcttatcatccacaaacagatgctatcagtccagtttgcaaatggtaccgtttgaagcattgtacggacgaaagtgccgcacaccacttttctgggatcaaacaggggattatgtgtacccttcgtgtcactccgcttcggggagtacaccgcttccaaaccaaaggcaagttggcaccacgctttgtgagaccatacaggatcttggaacgcagaggtgaagtcgcttaccagctagagcttccacctaatatggttggtatccacgatgtgtttcatgtgtctcaactgaagaagtgtttgagggtacctgaggaacaagctagctcagagcacattgacatccaagaagatttgacctacgtggagaagccagttcgtatccttgagaccagtgagagaaggaccagaagcaaggtgatcaggttttgcaaagttcaatggagccaccactcagaggaagaggccacctgggaaagagaagatgaattgaaggccgcccatccgcacctcttcgccagctcttccgaatctcggggccgagattccgtttaagggggtaggtttgtcacgccctgtcggccccttcttcctcctccagccgacggcaccgccgccgccgaaaccgccaccgacgccgccggtttccccgtttcccgcgcccactccgcccgtaccccacgcccacgtcgccgcccaccttccccgcacctcccgccagctcgcgcgcccgcaaacggcgggggatttgaaatttcccccactctctctctcctcctccatttcccccacgtcgccggccaaatcggccacctttccggcctcgtccgcccctcccgagcccatataaaccatccccgcactcccctccacctttttcctctttccgccgctctctcccgtgccctccatcactcccgcaccgctacacccgccgccgccgccttttccactcctccggtcgccgctcgccgccgcaccatagccgccgccgtcggccat

SEQ ID NO: 23031 - DNA, 1396 bp, Oryza sativa
  Clone ID: TF_OsC55897_1
attccatttcatcccctcctctctctctcaaaaccctaattccccgacccgagcaagccctaggtcgccgccgcgccgcgaggttggaggagttggatttgggtctgatttgattcggattgggcgtggtggagatggcggagaaggaggtcgggaggatcttcgtgggcgggctgtcgtgggacaccacggagcgcacgctcgagcgcgccttcagcgagtacggcaaggtcatcgagacgcagatggtcgtattggaaagagacacaggccgctcccgtggatttgggtttgttacattctcagaacctcgggctgtggatgctgcaattcggggaatgcataatggagaactagatggcagaaccatttctgtgaacaaggctcaacctaggatgaacactgatgatggctatggctatggtggtggtggtggtggtggtggtacttactcatctggtgctagaggtggatatcgtggtggaggtgatgcagttccctctgcaaatgatgactgcttcaaatgtggccgtgcgggacattgggctcgtgaatgtccttattccagtggaggtgggggtggtagaactggaaggtactcacccccttccagatatggcagtggaactggtggtggacgtggtgaccgctttggaggatcagaccgttttgctaaccgctatgttgatgaccgatatgatggtgggcgctatgttgatgatcgctatggtggtggtggacgtgatcgatatgccactgatcgctatccaccaactgccgatcgttttacaggtgacagatatggtggttctgatcgttatgcatcaagtggatttaccagggaaagaagctatgaaagagatggaggacggtccggtggaagttactatcgtgatgaacctagaggctctggtggttatgacagaggtggcatgcgcatggggagtggtgacagatacgggaccggtggacctgctcgctttgctgggagttacagagataggcctgccccatatgatcgtcccagccgggcagcagcacgcacttatgatgaccgctactgatggaggttacttcggagcattgcagaagaccagaattacaaatatatgttccagttcgcagttcctactttatttgccttcctgtattagtacatcgactctttgagtgttgttcttccatgcagtttgtttaattactagtgagacaataaggcagttcttgaattgttagtatgttggcacattaagctccaggcagtgggtgattctgattccctgttatcgtggtactgtgtaattaccctccagtgtaataatcgtgttccgagtgtgctgtcttatataattttattctggatagcattgaaaattaaaaaaaaaaaaaaaaaaaa

SEQ ID NO: 23032 - DNA, 5483 bp, Oryza sativa; identical to SEQ ID NO: 13933
  Clone ID: TF_OsC359_6573

SEQ ID NO: 23033 - DNA, 3127 bp, Oryza sativa
  Clone ID: TF_OsC1528_1598
ttaggtggcaacaggcggcctgtcacacgcctcgccccatcccgtcagaatgatgagagcttcctggctctcgtctctagccgaagctggcgtgctgactcctggagttggtatgtcagtcccggtcaaatccattccaggcttcagcgcaagcgtggcaagaaaatcgctggccattgaatgaaggatgaaacgggcgtccaccgggagagctgacgagcggagcaggaggcatgtgtactgcttgtcagaggtcatttccggcgccagctccaggccggtcagaccgagcctatatggccggtcagaccgcctgccccagccgactccctcatcaaggtcgagatacctgttggttgccataggtgtcttgatgggctttgcatcctccaagccaaacctcttgagtagatccttgatgtacttggtttggctcacgaacgtcccatccttgagttgcaccaactcgttctcatcctgtttgttcctaaagacccactttgtccctatgacgttgtggtctctaggtctttcaaccaaagtccacaccttgtttcttgtaaagttgttgagctcttcatgcatagcattcatccaatccggatcacaaagagcttcatccttactaatgtcacccaacacttggttaattgggtgatccttggaaagagcggtgtgtatccttggtggcataggtggatcttgtgccttctcctcctccatttcaacttgagcttgacttggcgaagcagaagtagatggctcaccttgagtggaggtggatggcttgtgttccacttcaataggcttgacatctctaacagacatgttcttcatagctatcatcaagccttcatcacctacatcatccaaattctcgtgcccctcttgggagccattagtctcatcaaattgaacatcggcggtttcttctacaatacctttgttcttgttgtagacccagtatgccttgctatttgaggcataacttagaagaaacccggtcatgtgttgagtgcatccactatcaagcacccaatggctcccaccggtgcggtagttcaccaccaagtataggggaacccacaaatctagcaacaatgctaccatcatgagccttccattgctcttgacaaaatgagtggcacggtgagaaggtttcttacccttctttggaatgaatccaagtccctccttgttaaggatgcaccattgctcactcaaaatcttgtcaagagtgttcttacccttgaagcacttctccaaactattgttgagcttggccacttgctccttaagctcattgttctcaacaacaagtgaggcatcacaaatagaaacacaagagctagagctaggcatatccacaagatcatcacaagaggtagaaatgctagatgatgcaacatgagcaatatggcaagtagcactataatcaagcaaatcacaagatatgccaacatcaatgtgagctccatgttgagtagtggaaaggaggttgtcatgagcttccttaagcttctcatgagaaatggtgagtctctcataagaggtctttagctcctcatacaagacctccaaagaagcatgatccttctttagagccttgaacttgacaatatccttctcactataagcatggagctcctcaaacatactcacaagctcatcataggaaatatcatcacaatcatcatcactctcactatcactaagagatgttaccttagaggagccctttgccatgagacaaagtggagcgaagagtgatggagcctccttgatggcaacaacggccatcttcttcttcttggagcttgcatcatcaccaccttcttcctcggacccggatgagacggagctctcctcatttgagtcccattccccgatgaaggcctcaatcttcttgccttccttcttgagcttcttcatgagcttgtagcctccactcttcttcttggaagacttgtctccgtcatcatccttggaagggcacttggaagcaaagtgccccttctcaccacactcaaagcacctcaagttggagagagtcttgttgggtcttctatttcttcgcctattggagttagacccccttcctctctcctttctccttcccaagagatcattgaacctcctagcaagaagggcaatctcttcctctaagtccttattggcttcattcaccttgaccttgcccttgtcttcaacttcggcttggaaagcaatgcacttcttggaaggtgaggcttcctccatctccttcttcttcaacttgtacatgtcattggtgttgatcttccccaagaggcttgcgggtgtcatccttgacatgtcagagttgatgagcatggtgacaagggtctcatacttctccggtagagctctaagcatcttttgggcaacctcaagatcggtgtagtttgccccaagccccttgagatcatttacaatgacattgagcctcccatacatgtcattcacactctcatgaggcaacatggagaatgtctcatattggatcttgaggaaatgaagcttggcatccttgtactcacttgtaccctcatggatctccaccaacttgttccaaatctcatatgcggtctcaaggctgctcactctatcgaactcctcttggcacaaagagttgaacaaggcattcatggcgtgggcattgagttggaggttgcggtgatcaatctccgtcaagggtgtgccggtgatagcaaagccggccttgacatggcggtcagaccggcgatgccagccggtcagaccggccaggtggagagggtgcggccaccgccgccgctgctgcctccgccggtcagctgctggccgcgggagcccgccgaatcccctcttgccggatctggcggaggggagggcgcaacagccaccaccactgccgttgccgcctcccccaggcagccgccggtcgtgggagcccgccggatttgccgtcttcacgcaaccggtctttccgtcacctcggtacgtgttcaatcgaatgatggtcaccaaggtagagttccttggagtgattgcccgaaccatcttcttgaccacaacctcatcggtcatgtccttggagccaagtcccttgatctcgttgacgatcttg

SEQ ID NO: 23034 - DNA, 3004 bp, Oryza sativa
  Clone ID: TF_OsC1528_2224
atgtccgacgctcggtctcggcgttcggtcgcctcgagcactcggcgtcagcaggacgccgagctcgccgcagcagaagagcgcaggcgagcaacggctcagaccgctgcagcagcagcgagggcggccagactggcggcagcggagttggcagcagccagggcggaggcggaggcggaggcggcggaagatgcggcacgtgcggcggaggtagaggttgagaccttgcgcagcagcatcaacggctccattgccggcgacatcaccgccgacagggagcttgaggagctggcaagaggaagggcacgggagagagcagagcggtgggcagcagcccacctccacggcggcggcggcggcccaagggaccgcgcgtccgcagacgggaacccagacgggcgcaggcgtgccggcggcagcccggagctcgcacgcggccctcgcaggcagcacggctctctctcccctgatcggcgccatggtcaccacggtgtccagacggtggtcagggactttggtcccggcggtgggtggcctactctcaccaaaaccaactacatcgagtgggccgcggtgatgagggtgaggctccaggtgtggcacatgtgggaggcagtccggtacagtgacgtcgactacgacgaggatcggcgggcactggatgccctcatcgctgcagtcccgcccgagatgcagttctcgctttcccagaagcggactgccaaggaggcctgggacgccatcgctgcggcacgcatcggcagtgaccgcgcccgcaagtccacactgcaggcactccgcaaggagtgggagaacctggccttcaagccaggtgaggatgttgatgactttgctctccgtctcaacactctcttgcagaaaatggtgcagtacggcgacgacacctacgacgaggagagagctgtcgagaagctcttccgctgcgtccctgagaagtacagacagatcgctcgctcgatcgaatctctgctggacctctccacgatgtcgatcgaggaggcgttaggtcgcctcaaggtcgtcgatggtgatgagccacagcctctctcggggcccatcaccatcggcgggaagctccatctcactagggagcagtgggaggcctctcagggtgacgggaggaagggggagtcatcttccccgacaggcggccgtaagccgcgcaaggcgcggggaggtgtccagctacggtgggcgcgaagacgtgccgagggtggcgcccgcagaggcgcccagggcattgccaccggcaaccacaagccggcacgagacgacgcctgccgcaactatggcaagcttggccattgggccaaagactgtcgacagccacgacgcggccaggcccacgtcgcacgggtggaggaggaagagccggctctgctcctggctcacgcaagcatcgagctacctccagcggcaccggccgcagcggctttcctccaccttgatgagccgaaggtactcgtctccctctgcaacggctccagcaacgacaaggctgatgggtggtaccttgacaccggcgccacccatcacatgaccggccgacgggagttcttcaccgagttcgactccagcgtccgaggctccgtcaagttcggggacgcctccggcgtggagatcaagggtgttggctccgtcaccttcaccgccaagtccggtgagcacaggctgctcaccggagtctactacatccccgcgttgaggaattctatcatcagcgtgggacagctggatgagaacggctcacgcgtgttggtcgaggacggactcatgaggatttgggatcgccgtcgtcaccttcttgccaaggtaaccagaggcactaatcgactctacatcctcagcgcgcaggtcgcacaaccagtttgcctcgccgctcgtcgggacgacgaggcgtggcagtggcacgagcgcttcgggcacctccacttcgaggccctgaagcagctcagtgccaaggagatggtgcgaggcatgccgtgccttgatgtcacgcccagaaattcccgaatagaattccaagcagaatgtgcattaaaatccccgtccaggaccagccggggtacacaaacgacaatgttgacattcagatccacgtcggaaagaggccgtgacaggaccattcgcataaccccctctaaccaagcacaccacacctcaggtttcacccccactcctcgcaaggcagcaggcagtcccctctcgtgcctaggtgaatccggaagccgcataggccgtcgcagggcccatccaaactccatcatgcccacccttgcctggatgcgtcggctagaggaaagctacactacaagcccagccgttgcccgcgctggcttgtggtaagtacgataagttcttccagggcatcccgcgaaccggtccttacgtcggaggaatcggaatctagcgacatacaaagcaaacattgcaaacaggctataagactactgaaacagggaacaaaactattggctgacgtcatcaaggcggggcgcggcgccgacatgcgggccccaccggtcagcggctcgggagagggaggaaggggcgccggcaagcgggccccaccggtcagcggctcggggagggcggtccacggcggatcgggtccacggaccggggaggagcggcgcgccacgtggcggccgaaccgatggccccgatctacccaagggtagatcggacggcggcgggagctcgcggccggtgcacgcgggcacggcgcaaaccggcccggcgaccatggcgcgcgacggcgcggcgcacatgcggcagcggcgcaagacggcggccgacggcgaccgaccggcggcggagagcggcggctagaggtgaagcggcagctacgcggctaagcggcggcgcgacggctaaacggtgcgggagagggagaaagaggaggagaggcctcaccgataacggtcgacgacggcgggcgacggaggacgatggtgacggcgggacgagctccggaacctcc

SEQ ID NO: 23035 - DNA, 5370 bp, Oryza sativa
  Clone ID: TF_OsC1713_3706
tcaagaatccaatacacccaccctagtatgcaatcttcccaccgaagtattcaagttgccaacatcggtgcgcaagccacgaacatcttcatgcaatgcttcatgcccggtggataagcgttgaatgctttcacttagggtattaatagccccaaggaccgggttgaagaattcattgggttgcattccaaagtaggcatattgtggatggaaaaaagcacttggatcagacccatgaggaggagggggggctgcacttgagcttgcaccttgatcaaatgttggttggcgcacacgaggagctttaggggaggagagttggagacgaggcttgtactccttatgttcttttaaattgtgaccaatttgtcccaacttgctttgaatcaacctcattatgtagggagcataatagattccttgtccaatagtcccctttgagatggcaatctccttcatcataaggttgataacatcaaaccgacgaccatccaaaatggcatcaatgacatgccaagcaactccgcgtatgtcatcattgttgccgcatcttgggaggatggtggcccttaccgccacctttccatatgtgtgccttcccccgtcttcataaatctgagaaaagtgatcaatggggaaggggttgtgggtgtgctcatcatgaaggtcatccccattgttgaagcgaatgtgcaagagctccttgaattcacggcggttgatagagcattgaagggtccccgacatccacttcattgcatcacaatcgccggacacccatacggtggcatagaattgccggatgagatcttcatcaaaagattgcttcatggtgacaattctatcaatcccaacggtccagaacatctcttgcaaatcttcaaactccggtgtctcaccaatgtgcctccaagaaatccacttgtgttcggcgaaggctttgttggcatacacttgttcatacacggacttttggaactgggtatgaaatcttggatcattacaatcgttaggcctccggaattgatcatgatgacggaggatagtgtattgttgagcattcctcaaattaaacacaaattggatggtggaatcgagaggactcccatcatcacttgcctcatcatcttcaccattgccactcccattgtcatcaccatcatcacttacttccatctcatcaccctcaacattttccatattgtcatcatcactttgaacatactcatctccgcttgattcctcattctcattgacgggattgggcatgggctcacgacgaccatggcgagtgcggggaggcatagctgccgaaacatattccgcctcggcggtggagagggctacggagttttgtttcttggatgaccatgacacaagggatctaccaagcatttggcaactaccggatgtgctctttctatccactttgcaaccggcataatccgaatcggaatagccagcaagcttaaatttagcaccttttgggtaccacaagccaatagtagaggaatactttaaatatcttagaatccttttcacggccactaagtgacactccttaggagcggcttgaaaccgtgcacacgtgcaaacactaaacatgatatccggcctagatgcggtaaggtaaagcaagctaccaatcatagaacgataaagctttaaatctaccggtttacctccctcatcaaggtcgagatgcccgttggttgccataggtgtcttgatgggcttcgcatcctccaagccaaacctcttgagtagatccttgatgtacttggtttggctcacgaacgtcccatccttgagttgcttgatttgaagtccaaggaagaagctcaactctccaatcatggacatctcaaattccctcgacatcatatcaccaaatttcttgcaaaatacctcattagtagaaccgaatatgatgtcatcaacataaatttggcacacaaagaaatcatcatcaatgatttttgtaaaaagggtggtgtcaacttttccaattttgaaatcctttgacaaaagaaaatatctcaatctttcataccaagccctaggagcttgttttaaaccataaagagcttttgagagtttgtaaacatggttaggatatttagaatcttcaaaaccgggaggttgttcaacaaagacaagttcagcaatttcaccatttagaaaagcacttttcacatccatttgaaatagttttatatcaaagcatgatgcaaatgcaagaaggatgcgaatagcctcaagtcttgccacgggggcaaaagtttcaccaaagtccaaaccttcaacttttgtgaaaccttgtgccaccaaccttgccttgtttctcaccaccaacccgttctcatcttgtttgttcctaaatacccactttgtccctatgacattgtggtctctaggtctttcaaccaaagtccacaccttgtttcttgcaaagttgttgagctcttcatgcatagcattcatccaatccggatcacaaagagcttcatctacatgttttggctcaagacaagaaacaaacgagtaatgttcacaaatcgaagcgacacgagatcgagtttgaacacccttactaatgtcacccaacacttggtcaattgggtgatccttggaaagagcggtgtgtatccttggtggcataggtggatcttgtaccttctcctcctccacttcaacttgagcttgacttggcatagcggaagtagatggctcatcttgagtggaggtggatggcttgtcttccacttcaataggcttgacatctccaattgacatattcttcatggttctcatcaagccttcatcacctacatcatccaaattctcgtgcccctcttgggagccattagtctcatcaaattgaacatcggcggtttcttccacaatacctttgttcttgttgtagacccggtatgccttgctatttgaggcataacctagaagaaacccttcatcacaccgactttcaaatttggttagtctaacaccctttcggtaaatataacacttgcaaccaaaaacttgaaaataggcaacatttggcttccttccaacaattagctcatagaaagtctttttcaagagaatatgcaaataaagcctattggttgcatggcaagcggtgtttatggcttccgccccaaaagaatcggaaacaccatattcatcaagcatagtccttgccatctcaatcaatgtacgatttttcctctccactacaccattttgttgaggtgagtaggtagcggaaagttcgtgtttaatgccaagatcatcacaatagtcctcgatattggtattcttaaactcggaaccattgtcacttctaattttcacaagagtgcaactaaattcattttgggccctttttgcaaactttttgaaaagctcggcaacaatagactttcctttgctattgtctccaaatgtcactttctcttgttcattccctcctacttcaaatgtggtgaacatagccctatcaccagtcatgtgttgagtgcatccactatcaagcacccaatggctcccaccggtgtggtagttcaccaccgagtataggggaacccacatatctagcaacaatgctaccatcatgagccttccattgctcttgacaaaacgagtggcacggttagaaggtttcttacccttctttggaatgaatccaagtccctccttgttaaggatgcaccgttgctcactcaaaatcttgtcaagagtgttcttacccttgaagcacctctccaagctcttgttgagcttagccacttgctccttaagctcattgttctcaacaacaagtgaggcatcacagatagaaatacaagagctagagctagacatatccacaagatcatcacaagagatagaaatgctagatgatgcaacatgagcaatatggcaagtagcactatcatcaagcaaatcacaagatatgccaacatcaatgagagctccatgttgagtagtggaaaggaggttgtcatgagcttccttaagcttctcatgagaaatggtgagtctctcatgagaagtctttagctcctcatacaagacctccaaagaagcatgatccttctttagggccttgaacttgacaatctccttctcactataagcatggagctcctcaaacatactcacaagctcatcataggaaacatcatcacaatcatcatcactctcattatcactaagagatgttaccttagaggagccctttgccatgagacaaagtggagcgaagagtgatagagcctccttgatggcaacaacggccatcttcttctttttggagcttgcatcatcaccaccttcttcctcggacccggatgaggcggagctctcctcatttgagtcccattccccgatgaaggcctcaatcttcttgccttccttcttgagcttcttcatgagcttgtagcctccactcttcttcttgcatgacttgtctccatcatcatccttggaagggcacttggaagcaaagtgtcccttctcaccacactcaaagcacctcaagttggagagagtcttgttgggtcttctatttcttctcctattggagttggagccccttcctctctcctttctccttcccaagagatcattgaaccttctagcaagaagggcaatctcttcctccaagtcctcattggcttcattcaccttgcccttgcccttatcttcaacttcggcttggagagcaatgcacttcttggaaggtgaggcttcctccatctccttcttcttcaacttgtacatgtcattggtgttgatcttccccaagaggcttgcgggtgtcatcattgacatgtcggagttgatgagcatggtgacaagggtctcatacttctccggtagagccctaagcatcttttgggcaacctcaagatcggtgtagtttgtcccaagccccttgagatcattcacaatgacattgagccttccatacatgtcattcacactctcatgaggcaacatggagaatgtctcatattggatcttgaggaaatgaagcttggcatccttatactcactcgtgccctcatggatctccgccaacttgttccaaatctcatatgcggtctcaaggttgctcactctatcaaactcctcttggctcaaagagttgaacaaagcattcatggcttgggcattgagttggaggttgcggtgatcaatctccgtcaagggcttgccggtgatagcaaaacctacatcaacaatactccaaatatggaagctcatagctttgaggtgagtagacattttaattttccaagtggaatagtttgtgccattaaacatgggagccttccctacatggttcacctcgttcgacat

SEQ ID NO: 23036 - DNA, 4620 bp, Oryza sativa
  Clone ID: TF_OsC1713_3872
tcaagccacattagagaagtctatgacatttaactcattcctcaacttgcaaaagcgggtttcatcaagaggcttggtaaagatgtcggctagttgatcctcggttcttatgtggctaatgactatgtcacacttggcaacatggtctcttaggaagtgatggcgtatgtcaatatgcttggttctagaatgttggaccgggttattggctatctttatggcactatcattgtcacataggagtggggttttggtgaaggatatgccatagtccaacaatgtttgtttcatccaaagcaattgggcacaacaactacccgccgaaacatattccgcctcggcggtagagagggctacggagttttgtttcttcgatgaccatgacacaagggatctaccaagcatttggcaactaccggatgtactatttctatccactttgcaaccggcataatccgaatcggaatagccaacaagcttaaatttagcaccttttgggtaccacaagccaatagtagaggaatactttaaatatcttagaatccttttcacggccactaagtgacactccttaggagcggcttgaaaccatgcacacatacaaacactaaacatgatatccggcctagatgcggtaaggtaaagcaagctaccaatcatagaacgataaagctttaaatctaccggtttacctccctcatcaaggtcgagatgcccgttggttgccataggtgtcttgatgggcttcgcatcctccaagccaaacctcttgagtagatctttgatgtacttggtttgactcacgaacgtcccatccttgagttgcttgatttgaagtccaaggaaaaagctcaactctccaatcatggacatctcaaattccctagacatcatatcaccaaattccttgcaaaatacctcattagtagaaccgaatatgatgtcatcaacataaatttggcatacaaagaaatcatcaccaatgatttttgtgaaaagagtggtgtcaacttttccaattttgaaatcatggttaggatatttaggatcttcaaaaccgggaggttgttcaacaaagacaagttcggcaatttcaccatttagaaaagcacttttcacatccatttgaaatagttttatatcaaaccatgatgcaaatgcaagaaggatgcaaatagcctcaagtcttgccacgggggcaaaagtttcaccaaaatccaaaccttcaacttgtgtgaaaccttgtgccaccaaccttgccttgtttctcaccaccaacccgttctcatcttgtttgtttctaaagacccactttgtccctatgacattgtggtctctaggtctttcaaccaaagtccacaccttgtttcttgcaaagttgttgagctcttcatgcatagcattcatccaatccggatcacaaagagcttcatctacatgttttggctcaagacaagaaacaaacgagtaatgttcacaaatcgaagcgacacgagatagagtttgaacacccttactaatgtcacccaacacttggtcaattgggtgatccttggaaagagtggtgtgtatccttggtggtataggtggatcttgtgccttctcctcctccacttcaacttgagcttgacttggcgtagcgaaagtagatggctcatcttgagtggaggtggatggcttgtcttccacttcaataggcttgacatctccaaatgacatgttcttcatagctcttatcaagccttcatcacctacatcatccaaattctcgtgcccctcttgggagccattagtctcatcaaattgaacatcggcggtttcttccacagtacctttgttcttgttgtagacccggtatgccttgctatttgaggcataaccaagaagaaacccttcatcacaccgactttcaaatttggttagtctaacaccctttcggtaaatataacacttgcaaccaaaaactcgaaaataggcaacattaggcttcctcccaacaattagctcataggaagtatttttcaagagacgatgcaaataaaacctattggttgcatggcaagcggtgtttatggcttccgcccaaaaggaatcggaaacaccatattcatcaagcatagtccttgccatctcaatcaatgtacgatttttcctctccactacaccattttgttgaggtgagtaggtagcggaaagttcatgtttaataccaagatcatcacaatagtcctcgatattggtattcttaaactcggaaccattgtcacttctaattttcacaagagtgcaactaaattcattttgggccctttttgcaatttttttgaaaagctcggcaacaatagacttatcatgcaaaaagaacacccaagtatagcgagaataatcatcaacaatcacaagacaatgactattaccaccaatgctcttataggttgttgggccaaacaaatccatatgcaagagctctaatggtctagatgtggacatgatactcttagtaggatgagaacatgcaacttgcttgccggcttgacaagcactacaaagcttatctttctcaaacttcacatctttcaagcccacaactagatcacgttttgaaagtttgctcaattgattcatgccaacatgggctagccttctatgccaaagccaacccaaagaagtttttgcaactaaacaagttttcaaatttgcttcactagaattgaaatcaacaaagtaaagatttccatatctaaaacctttgaacacacaagacttgtcaagaaggctagaaacaataacttcttgcgggaagaaagcacatgacaagccaagatcacaaatttgagcaaccgaaagcaaattgaaatttagagatttaacaaaagagacattatcaattgacaaatcattggagatagcaattttacctaacccaattacctttcttttgctattgtctacaaatgtcactttctcttgttcattccctcctacttcaaatgtagtgaacatagccctatcaccggtcatgtgttgagtgcatccactatcaagcacccaatggctcccaccggtgtggtagttcacccttgaagcacctctccaagctcttgttgagcttagccacttgctacttaagctcattgttctcaacaacaagtgaggcatcacaaatagatacacaagagctagagctagagtatcatcaagcaaatcacaagatatgccaacatcaatgagagctccatgttgagtagtggaaaggaggttgtcatgagcttccttaagcttctcatgagaaatggtgagtctctcatgagaagtctttagctcctcatacaaaacctccaaagaagcatgatccttctttagggccttgaacttgacaatctccttctcactataagcatggagctcctcaaacatactcacaagctcatcataggaaatatcatcacaatcatcatcactctcactatcactaagagatgttaccttagaggagccctttgccatgagacaaagtggagcgaagagtgatggggcctccttgatggcaacaacggccatcttcttcttcttggagcttgcatcatcaccatcttcttccttggacccggaagaggcggagctctcctcatttgagtcccattccccgatgaaggcctcaatcttcttgccttccttcttgagcttcttcataagcttgtagcctccactctttttttttgatgacttgtctccatcatcatccttggaagggcacttggaagcaaagtgtcccttctcaccacactcaaagcacctcaagttggagagagtcttattgggtcttttatttcttctcctatttgagttggagccctttcctctctcctttctccttcccaagaaatcattgaaccttctagcaagaagtgcaatctcttcttccaagttcttattgacgtcattcaccttgcccttgtcttcaacttcagcttggagagcaatgcacttcttggaaggtgaggcttcctccatttccttcttcttcaacttatacatgtcattggtgttgatcttccccaagaggcttgccggtgtcatccttgacatgtcagagttgatgagcatggtgacaagggtctcatacttctccggtagagccctaagcatctttttggcaacctcaagatcggtgtagtttgccccaagccccttgagatcattcacaatgacattgagcctcccatacatgtcattcacactctcatgaggcaacatggagaatgtctcatattggatcttgaggaagtgaagcttggcatccttgtactcacttgtgccctcatggatcttcgccaacttgttccaaatctcatatgcggtctcaaggttgctcactctatcaaactcttcttggctcaaagagttgaacaaagcattcatggcttgggcattgagttggaggttgcggtgatcaatctccgtcaagggcgtgccggtgattgcaaagcctacatccacaatactccaaatatggaagctcatagctttgaggtgagtagacattttaattttccaagtggaatagtttgtgccattaaacatgggagccttccctacgtggttcacctcgttcgacat

SEQ ID NO: 23037 - DNA, 4125 bp, Oryza sativa
  Clone ID: TF_OsC1713_3951
agccacattagagaagtctatgacatttaactcattcctcaacttgcaaaagtgggtttcatcaagaggcttggtaaagatgtcggctagttgatcctcggttcttatgtggctaatgactatgtcacacttggcaacatggtgtcttaggaagtgatggcgtatgtcaatatgcttggttctagaatgttggaccgggttattggctatctttatggcactatcattgtcacataggagtgtggttttggtgaaggatatgccatagtccaacaatgtttgtttcatccaaagcaattgggcacaataactacccgccgaaacatattctgcctcggcggtagagaggtctacggagttttgtttcttggatgaccatgacacaagggatctaccaagcatttggcaactaccggatgtgctctttctatccactttgcaaccggcataatccgaatcggaatagccaacaagcttaaacttagcaccttttgggtaccacaagccaatagtacaggaatgctttaaatatcttagaatccttttcacggccactaagtgacactccttaggagcggcttgaaaccgtgcacacatgcaaacactaaacatgatatccggcctagatgcggtaaggtaaagcaagctaccaatcatagaacgataaagctttaaatctaccggtttacctccctcatcaaggtcgaaatgcccgttggttgccataggtgtcttgatgggcttcgcatcctccaagctaaacctcttgagtagatccttgatgtacttggtttggctcacgaacgtcccatccttgagttgcttgatttgaagtccaaggaagaagctcaactctctaatcatggacatctcaaattccctagacatcatatcaccaaattccttgcaaaatacctcattagtagaaccgaatatgatgtcatcaacataaatttgacacacaaagaaatcatcaccaatgatttttgtgaaaatggtggtgtcaacttttccaattttgaaatcatttagaaaagcacttttcacatctatttgaaatagttttatatcaaagcatgatgcaaatgtaagaaggatgcgaatatcctcaagtcttgccacgggggcaaaagtttcaccgaagtccaaaccttcaacttgtgtgaaaccttgtgccactaaccttaccttgtttctcaccaccaacccgttctcgtcttgtttgttcctaaagacccactttgtccctatgacattgtggtctctaggtctttcaaccaaagtccacaccttgtttcttgcaaagttgttgagttcttcatgcatagcattcatccaatccggatcacaaggagcttcatctacatgttttggctcaagacaagaaacaaatgagtaaagttcacaaatcgaagcgacacgagatcgagtttgaacacccttactaatgtcacccaacacttggtcaattgggtgatccttggaaagagcggtgtgtatccttagaggcataggtggatcttgtgccttctcctcctccacttcaacttaagcttgacttggcatagcggaagtagacggctcatcttgagtggaggtggatggcttgtcttccacttcaataggcttgacatctccaatggacatgttcttcatagctctcatcaagccttcatcacctacatcatccaaattctcatgtccctcttgggagccattagtctcatcaaattgaacatcggcggtttcttccacaatacctttgttcttgttgtagacccggtataccttgctatttgaggcataaccaagatcatcacaatagtcctcgatattggtattcttaaactcggaaccattgtcacttcttattttcacaagagtgcaattaaatttattttgggcccttttgcaaactttttgaaaagctcggcaacgatagacttgacatgcaaaaagaacacccaagtatagcgagaataatcatcaacaatcacaagacaatgactattaccaccaatgctcttataggttgttgggccaaacaaatccatatgcaagagctccaatagtctcgatgtagacatgatactcttagtaggatgagaacatgcaatttgcttgccggcttgacaagcactacaaagcttatatttctcaaacttcacatctttcaagcccacaactagatcacgttttgaaagtttgctcaattgattcatgccaacatgggctagcctcctatgctaaagccaacccaatgaagtttttgcaactaaacaagttttcaaatttgcttcactagaattgaaatcaaccaaataaagatttccatatctaaaacctttgaatacacaagacttgtcaagaaggctagaaacaataacttcttgcgggaagaaagcacatgacaagccaagatcacaaatttgagcaaccgaaagcaaattaaaatttagagatttaacaagagagacattatcaattgacaaatcattggagatagcaattttacctaacccaattacctttcctttgctattgtctccaaatgtcactttctcttgttcatttcctcctacctcaaatgtggtgaacatagccctatcatgtgttgagtgcatccactgtcaagcacccaatggctcccaccggtgcggtagttcaccaccgagtataggggaacccacatatctagcaacaatgctaccatcatgagccttccattgctcttgacaaaacgagtggcacagtgagaaggtttcttacccttctttggaatgaatccaagtccctccttgttaaggatgcaccattgctcactcaaaatcttgtcaagagtgttcttacccttgaagcacctctccaagctcttgttgagcttagccacttgctccttaagctcattgttctcaacaacaagtgagacatcacaaatagaaacacaagagctagatctagagctagacatatccacaagatcatcacaagaggtagaaatgctagatgatgcaacatgagcaatatggcaagtagcactatcatcaagcaaatcacaagatatgccaacatcaatgagagcttcatgttgagtagtggaaaggaggttgtcatgagcttccttaagcttctcaggagaaatggtgagtctctcatgagaagtctttagctcctcatacaagacctccaaagaagcatgatccttctttagggccatgaacttgacaatctttttctcactataagcatggagctcctcaaacatactcacaagctcatcataggaaacatcattacaattatcattactctcactatcactaagagatgttaccttagaggaaccctttgccatgagacaaagtggagcgaagagtgatagagcctccttgatggcaacaacggccatcttcttcttcttggagcttgcatcatcaccaccttcttcctcggacccggatgaggcggagttcttgagcttcttcatgagcttgtatcctccactcttcttcttggatgacttgtctccatcatcatctttggaagggcacttggaagcaaagtgtcccttctcaccacactcaaagcacctcaagttggagagagtcttgttgggtcttctatttcttctcctatttgagtttgagccccttcctctctcctttctccttcccaagagatcattgaaccttctagcaagaagggcaatctcttcctccaagtcctcattggcttcattcaccttgcccttgcccttgtcctcaacttcagcttggagagcaatgcacttcttggaaggtgaggcttcctccatctccttcttcttcaacttgtacatgtcattggtgttgatcttccccaagaggcttgccggtgtcatccttgacttgtcggagttgatgagcatggtgacaagggtctcatacttctctggtagagccctaagcatcttttgggcaacctcaagatcggtgtagtttgccccaagccccttgagatcattcacaataacattgagcctcccatacatgtcattcacactctcatgaggcaacatggagaatgtctcatattggatcttgacgaaatgaagcttggcatccttgtactcacttgtgccctcat

SEQ ID NO: 23038 - DNA, 5371 bp, Oryza sativa
  Clone ID: TF_OsC1713_4363
ttgtggaggagaaggaggaagcgccaaagaggaaggattaggagtatcacgacgacgatgatatacaaaagcttgggtgctctccaacatttggactcgagaatccaatgcacccactctagtgtgcaatctccccatggaagcattcaagtctccaacatcggtgcgcaagccacgaacatcctcatgcaatgcttcatgcctggtagacaagcgttgaatgctttcacttaaggtattaatagccccaagtaccgggttgaagtattcattgggttgcattccaaagtaagcatagtgaggatgaaagaagcatttggatcatacccatgaggaggaggaggtgctgggcttgagctagctccagggtgagaagagggcaccgtcctaggagcacggggagctctaggctgaaggcggggcttgtactgcttgtgcttcttcaaattttgcccagcagccccaagcttgttcttgaatcaacctcatgatgtaaggggcataatagattccctgagtgaatgtcctcttgaagatagcaatctctggcatcatgagagacacaatgtcgaactgacggccctgaatgattgcatcgatgacgtgccaagccacccccctaatgtcatcattgttgccaaggcgagggaggatagtggctctcataatccttttaaccacactggggatagtcctcaagccggcaaccttcccatgtgtgtaccgcactccatcttcatagaactgagagagatagtctatggagagcggattgtgagtgtgctcctcatgcaaatcatctccaaagtccaagcgaatgttgaggagctgccggaattgccttcgagagatagaacactggagggtgtcggacatccacttcatctcactctagtctccagccacccacatcttctggaaagcggtgtgaaaatggggatccggggtgtcccgaggcctcaagaactgatcatgatgccttaagatggtatactgcgatggattcctcatgttcaccacaaactggatggagggatcaatgttcatctcatcactttgttcatcctcatcctctccacttccactgacatcatctccacttgcctcctcactagccccctcaacattggcctcaacctcttcatcactttgagcgtaatcctctccgctcgattcctcaggctcactcatgggatccagagtgggcgcacgacaaccatggcgagtgcggggaggcatcatgggcccacctcggccggtcagaccggccctatgtggccggtcagaccgccgcacctggccggtcagaccgcgcatatagcgccggtcagactgccaggcccccaactttgttttgaaaattttctcaaattccttctcaatctcattttggggataaatctcattttggccaaaactaagaatctagtttccgccgaaacatattccgcctcggcggtagagagggcaacggagttttgtttcttggatgaccatgacacaagggatataccaagcatttggcaactaacggatgtgctctttctatccactttgcaaccggcataatccgagtcggaatagccaacaagcttaaatttagcaccttttgggtaccacaagccaatagtagagaaatgctttaaatatcttagaatccttttcacggccactaagtgacactccttaggagcggcttgaaaccgtgcacacatgcaaacactaaacatgatatccggcctagatgcggtaaggtaaagcaagctaccaatcatggaacgataaagctttaaatctaccggtttacctccctcatcaaggtcgagatgcccgttggttgccataggtgtcttgatgggtttcgcatcctccaagccaaacctcttgagtagatccttgatgtacttggtttggctcacgaacgtcccatccttgagttgcttgatttgaagtccaaggaagaagctcaactctccaatcatggacatctcaaatcccctagacatcaaatcaccaaattacttgcaaaatacctcattagtaaaaccaaatatgatgtcatcaacataaatttgacacacaaagaaatcatcaccaatgatttttgtgaaaagggtggtgtcaacttttccaattttgaaatcctttgacaaaagaaaatctttcaatctttcataccaagccctaggagcttgttttaaaccataaagagcttttgagagtttataaacatggttaggatttttaggatcttcaaaaccgggaggttgttcaacaaagacaagttcggcaatttcaccatttagaaaagcacttttcacatccatttgaaatagttttatatcaaagcatgatgcaaatgcaagaaggatgcgaatagcctcaagtcttgccacgggggcaaaagtttcaccgaagtccaaaccttcaacttgtgtgaaaccttgtgccaccaaccttgcattgtttcacaccaccaacccgttctcatcttgtttgttcctaaagacccactttctccctatgacattgtgatctctaggtcttttaaccaatgtccacaccttgtttcttgcaaagttgttgagctcttcatgcatagcatttatccaatccgaatcacaaagagcttcatctacatgttttggctcaaggcaagaaacaaacgagtaatattcacaaatcgaagcgacacgagatcgagtttgaacacccttactaatgtcacccaacacttggtcaattgggtgatccttggaaagagcggtgtgtatcctttgtggcataggtggatcttgtgccttctcctcctccacttcaacttgagcttgacttggcgtagcggaagtagatggctcatcttgagtgaaggtggatggtttgtcttccactttaataggcttgacatctctaatagacatgttcttcatagctctcatcaagccttcatcacctacatcatccaaattctcgtgcccctcttgggagccattagtctcatcaaaatgaacattggcggtttcttccacaatacctttgttcttgttgtagacccggtatgccttactatttgaggcataacctagaagaaacccttcatcacaccgacttgcaaatttggttagtctaacaccctttcgataaatataacacttgcaaccaaaaactcgaaaataggcaacatttggcttcctcccaacaattagctcataggaagtctttttcaagagatgatgcaaataaagcctattggttgcatagcaagcggtgtttatggcttccgcccaaaaggaatcggaaacaccatattcatcaagcatagtccttgccatctcaatcaatgtacgatttttcctctccacaccaatgctcttataggttgttgggccaaacaaatccatatgcaaaagctccaatggtctagatgtggacatgatactcttagtaggatgagaacatgcaacttgcttgccggcttgacaagcactacaaagcttatctttctcaaacttcacatctttcaagcccacaactagatcacgttttgaaagtttactcaattgattcatgctaacatgagctagcctcctatgccaaagccaacccaatgaagtttttacaactaacccaattacctttcctttgctattgtctccaaaagtcactttctcttgttcattccctcctacttcaaatgtggtgaacatagccctatcaccggtcatgtgttgagtgcatccactatcaagcacccaatggctcccaccggtgcggtagttcaccactgagtataggggaacccacatatctagcaacaatgctaccatcatgagccttcccttgaagcacctctccaaactcttgtctcattagccacttgctccttaagctcattattctcaacaacaagtgaggcatcgcaaatagaaacacaagagctagagctagagctaggcatatccacaagatcatcacaagaggtaggaatgctagatgatgcaacatgagcaatatggcaagtagcactatcatcaagcaaatcacaagatatgccaacatcaatgtgagctccatgttgagtagtggaaaggaggttgtcatgagcttccttaagcttctcatgagaaatggtgagtctctcatgagaggtctttagctcctcatacaagacatccaaagaagcatgatccttctttagagccttgaacttgacaatctccttctcattataagcttggagctcctcaaacatactcacaaactcatcataggaaacatcatcacaatcatcatcaccctcactatcactaagagatgttaccttagaggagcccttgagcaaagagtgtggagcctccttgatggcaacaacggccatcttcttcttcttggagctttacatcatcaccaccttcttcctcggacccggatgaggcggagctctcctcatttgagtcccattccccgatgaaggcctcaatcttcttgccttccttcttgagcttcttcatgagcttgtagcctccactcttcttcttggatgacttgtctccatcatcatccttggaagggcacttggaagcaaagtgtcccttctcaccacactcaaagcacctcaagttggagaaagtcttgttgggtcttctatttcttctcctatttgagttggagccccttcctctctccttgcccttgcccttgtcttcaacttcggcttggagagcaatgcacttcttggaaggtgaggcttcctccatctccttcttcttcaacttgtacatgtcattggtgttgatcttccccaagaggcttgcgggtgtcatccttgacatgtcggagttgatgagcatggtgaaaagggtctcataattctccggtagagccctaagcatcttttgggcaacctcaaaatcggtgtagtttgccccaagccccttgagatcattcacaataacattgagcctcccatacatgtcattcacgctctcatgaggcaacatggagaatgtctcatattagatcttgagaaaatgaagcttggcattcttgtactcgcttgtgccctcatggatctccgccaacttgttccaaatctcatatgcggtctcaaggttgctcactctatcaaactcctcttggctcaaagagttgaacaaggcattcatgcttgggcattgagttggaggttgcggtgatcaatctccgtcaagggtgtgccggtgatagcaaagccggcgccgggcctcctccacaatcttctcggagagatcaccaggcaactcctccacaagccgtctaggaggcggcaacctccaagagtaacaagcaatgacccggcgtggagatgatcaatcaagtgccacactagctc

SEQ ID NO: 23039 - DNA, 4840 bp, Oryza sativa
  Clone ID: TF_OsC1713_4366
actcccggtaaaaagatgaagtggaaggatgaaagcatttggataatacccaggaggaggaggaggtgctgagcttgagctagctccaggatgagaggagggcgccgccctaggagcacggggagctccaagctaaaggcggggcttgtactgcttgtgcttcttcaaattttgcccagcagccccaagcttgtcttgaatcaacctcatgatgtaaggggcataatagattccctaagtgaaggtccccttggagatggcaatctcttgcatcataagagacacaatgtcgaactgacggccctgaatgatggcatcgatgacgtgccaatccgcccccataatgtcatcattgttgccaaggcgagggaggatggtagctctcacaatcctgttaaccacactggggatggtcctcaagccggcaaccttcccatgtgtgtaccgcactccatcttcataaaatgtagcataaaactgccggatcaaatcttcattgtagtcttgcttgagagtaacaatccgatcaatgctaacagtcttgaagagatcctgcaacccctcaaactctggacattgatgtctctccaagaaatccccttatgctctgcaaaagctttccctgcataaacttgctcatacacactcttctggaaagcggtgtgaaaacggggatccggggtgtcccgaggcctcaaaaactgatcatggtgcctcaagatggtatattgtgatggattcctcatgttcacaacaaactggatggagggatcaatgtgcatatatcatcacttccttcatcctcatcctctccacttctactgacatcatctccactttcctcctcactatcccctttgagcgtactcatctccgctcgattcctcaggctcactcacgggattcggagtgggtgcacgacgatcatggcgagtgcggggaggcatcacaagaaactaccctctattggtgcaaatcgaagaacacctcgtgcttcaccttttgggtaccacaagccaatagtagaggaatgctttaaatatcttagaatccttttcacggccactaagtgacactccttaggagcggcttgaaaccatgcacacatgcaaacactaaacatgatatccggcctagatgcggtaaggtaaagcaagctaccaatcatggaacgataaagctttaaatctaccggtttacctccctcatcaaggtcaagatgcccgttggttgccataggtgtcttgatgggcttcgcatcctccaagccaaacctcttgagtagatccttgatgtacttggtttggctcacgaacgtcccattcttgagttgcttgatttgaagtccaaggaagaagctcaactctccaatcatggacatctcaaattccctaaacatcatatcaccaaattccttgcaaaatacctcattagtagaaccgaatatgatgtcatcaacataaatttgacacaaaaagaaatcatcaccaatgatttttgtgaaaagggtggtgtcaacttttccaattttgaaatcctttgacaaaagaaaatctctcaatctttcataccaagccctaggagcttgttttaaaccataaagaacttttgagagtttataaacatggttaggatttttaggatcttcaaaaccgggaggttgttaaacaaagacaagttcggcaatttcaccatttagaaaagcacttttcacatccatttgaaatagttttatatcaaagcatgatgcaaatgtaagaaggatgcgaatagcctcaagtcttgccacaggggcaaaagtttcaccaaagtccaaaccttcaattgtgtgaaaccttgtgccaccaaccttgctttgtttctcaccaccaacccgttctcatcttgtttgatcctaaagacccactttgtcccaatgacattgtggtctctaggtctatcaaccaaagtccacaccttgtttcttgcaaagttgttgagctcttcatgcatggcattcatccaatccggatcacaaagagcttcatctacatgttttggctcaagacaagaaacaaacaagtaatgttcacaaatcgaagcgacacgagatcgagtttgaacacccttactaatgtcacccaacacttggtcaattgggtgatccttggaaagagcggtgtgtatccttggtggcataggtggatcttgtgccttctcctcctccacttcaacttgagcttgacttggcgtagcggaagtagatggctcatcttgagtggaggtggatggtttgtcttccacttcaataggcttgacatctcctattgacatgttcttcatagctctcatcaagccttcatcacctacatcatccaaattctcgtgcccttcttaggagccattagtctcatcaaattgaacatcggcggtttcttacacaatacctttgttcttgttgtagacccggtatgccttgctatttgaggcataaccatattcattaagcatagtccttgccatctcaatcaatgtacgattttttctctccactacaccattttgttgaggtgagtaggtagcggaaagttcgtgtttaataccaagatcatcacaatagtcctcgatattggtattcttaaactcggaaccattgtcacttctaattttcacaagagtgcaactaaattcattttgggccctttttgcaaactttttgaaaagctcggcaacaatagacttatcatgcaaaaagaactcccaagtatagcgagaataatcatcaacaatcacaagccaatgactattaccaccaatgctcttataggttggtgggccaaacaaaatcatatgcaagagctccaatggtctagatgtagatatgatacttttagtaggatgagaacatgcaacttgcttgccggcttgacaagcactacaaagcttatctttctcaaacttcacatctttcaagaccacaactagatcacgttttgaaagtttgctcaattgattcatgccaacatgggctagcctcctatgccaaagccaacccaatgaagtttttgcaactaacccaattacctttcctttgctattgtctccaaaagtcactttctcttgttctttccctcctacttcaaatgtggtgaacatagccctatcaccagtcatatgttgagtgcatccactatcaagcacccaatggcttccatcggtgcggtagttcaccaaatgcccaacctcacggcacttggagcaatacttaccattgctcttgacaaaacgagtggcacggtgagaaggtttcttacccttatttggaatgaatccaagtccctccttgttaaggatgcaccgttgctcactcaaaattttgtcaagagtgttcttacccttgaagcacctctccaaactcttgttgagcttggccacttgctccttaagctcattgttctcaacaacaagtgaggcatcacaaatagaaatacaagagctagagctagagttaagcttctcatgagaaatggtgagtctctcatgagaggtctttagctcctcatacaagacctctaaagaagcatgatccttctttagggccttgaacttgacaatctccttttcactataagcatgaagctcctcaaatatactcacaagttcatcataggaaacatcatcacaatcatcatcactctcactatcactaagagatgttaccttagaggagctctttggccatgagacaaagtggagcgaagagtgatggagcctccttgatggcaacaacggccatcttcttcttcttggagcttgcatcatcaccaccttcttcctcggacccggatgaggtggagctctcctcatttgagtcccattccccgatgaaagcctcgatcttcttcccttccttcttaagcttcttcatgagcttgtagcctccactcttcttcttggatgacttgtctccatcatcatccttggaagggcacttggaagcaaagtgtcccttctcaccacactcaaaacacctcaagttggagagagtcttgttgggtcttctatttcttctcctatttgagttggagtcccttcctctctccattctccttcccaagagatcattgaactttctagcaagaaggaccatctcttcctccaagtcctcattgacttcattcaccttgctcttgctcttgtcttcaacttcggcttggagagcaatgcacttcttggagggtgaggcttcctccatctccttcttcttcaacttgtacatgtcattggtgttgatcttccccaagaggcttgcgggtgtcattcttgacatgtcgcagttgatgagcatggtgacaagggtctcatacttctccggtagggctctaagcatcttttgggcaacctcaagatcggtgtagtttgccccaagccccttgagatcattcacaatgacattaagcctcccatacatgtcattcacactctcatgaggcaacatggagaatgtctcatattggatcttgaggaaatgaagcttggtatccttgtactcacttgtaccctcatggatctccgccaacttgttccaaatctcatatgcggtctcaaggttgctcactctattgaactcctcttggctcaaagagttgaacaaggcattcatggcttgggcattgagttgaaggttgcggtgatcaatctccgtcaagggtgtgtcggtgatagcaaagcctacatccacaatactccaaatatggaagctcatagcttttaggtgagtagacattttaattttccaagtggagtagtttgtgccattaaacatgggagccttccctacatggttcacctcgttcgacat

SEQ ID NO: 23040 - DNA, 3423 bp, Oryza sativa
  Clone ID: TF_OsC1713_4557
tcaccctcgggcccgacgtccccgaaggtgccaggccacgtgggcgattgcgtctgcctcaagcctctggtcatgatactcccggtcccatatcaccgacacataccaatccctaggagcttgttttaaaccataaagagcttttgagagtttgtaaacatggttaggatttttaggatcttcaaaatcgggaggttgttcaacaaagacaagttcggcaatttcaccatttaaaaaagtacttttcacatccatttgaaatagttttatgtcaaagcatgatgcaaatgcaagaaggatgagaacagcctcaagtcttgccacgggggcaaaagtttcaccaaagtccaaaccttcaacttgtgtgaaaccttgtgccaccaaccttgccttgtttctcaccaccaacccgttctcatcttgtttgttcctaaagacccactttgtccctatgacattgtggtctctaggtctttcaaccaaagtccacaccttgtttcttgcaaagttgttgagctcttcgtgcatagccttcatccattccggatcacaaagtgcttcatctacatgttttggctcaagacaagaaacaaacgagtaatgttcacaaatcgaaacgacacgagatcgagtttgaacacccttactaatgtcacccaacacttgatcaattgggtgatccttggaaagagcggtgtgtatccttggtggcataggtggatcttgtgccttctcctcctccacttcaacttgagcttgacttggcgtagcggaagtagatggctcatcttgagtggaggtggatggcttgtcttccacttcaataggcttgacatctccaatagacatgttcttcatagctctcatcaagccttcatcacctacatcatccaaattctcgtgcccctcttgggagccattagtttcatcaaattgaacaacggcggtttcttccacaatacctttgttcttgttgtagacccggtatgtcttgctatttgaggcataacctagaagaaacccttcatcacactgacttttaaatttggttagtctaacacccttttggtaaatataacacttgcaaccaaaaactcgaaaataggcaacattaggcttcctcccaacaattagctcataggaagtctttttcaagagaggatgcaaataaagtatattggttgcatggcaagcggtgtttatggcttccgcccaaaaggaatcagaaacaccatattcatcaagcatagtccttgccatctcaatcaatgtacgatttttcctctccactacaccattttgttgagatgagtaggtagcggaaagttcgtgtttaataccaagatcatcacaatagtcctcgatattggtattcttaaactcggaaccattgtcacttctaattttcacaagagtgcaactaaattcatttttggccctttttgcaaactttttgaaaagctcggcaacaatagactttcctttgctattgtctccaaatgtcactttctcttgttcattccctcctacttcaaatgtggtgaacatagccctatcaccggtcatgtgttgagtgcatccactatcaagcacccaatggctcccaccggtgtggtagttcaccaccgagtataagggaacccacatatctagcaacaatgctaccatcatgagccttccattgctcttgacaaaacgagtggcacggtgagaaggtttcttacccttctttggaatgaatccaagtccctccttattaaggatgcaccgttgctcactcaaaatcttgtcaagagtgttcttacccttgaagcacctctccaagctcttgttgagcttagccacttgctccttaagctcattgttctcaacaacaagtgaggcatcacaaatagaaacacaggagctagagctagagctagacatatccacaagatcatcacaagaggtagaaatgctagatgatgcaacatgagcaatatagcaagtagcactatcatcaagcaaatcacaagatatgccaacatcaatgagagctccatgttgagtagtggaaaggaggttgtcatgagcttccttaagcttctcatgagaaatggtgagtctcgcatgataagtctttagctcctcatacaagacctccaaagaagcatgatccttctttagggccttgaacttgacaatctccttctcactataagcatgaagctcctcaaacatactcacaagctcatcataggaaacatcatcacaatcatcatcactctcactatcactaagagatgttaccttagaggagccctttgccatgagacaaagtggagcgaagagtgatggagcctccttgatggcaacaacggtcatcttcttggagcttgcatcatcaccatcttcttcctcggacccggatgaggcggagctctcctcatttgagtcccattccccgatgaaggcctcaatcttcttgccttccttcttaagcttcttcatgagcttgtagcctccactctttttcttggatgacttgtctccatcatcatccttggaagggcacttggaagcaaagtgtcccttctcaccacactcaaagcacctcaagttggagagagtcttgttgggtcttctatttcttctcctattagagttacagccccttcctctctcctttctccttcccaagagatcattgaaccttctagcaagaagggcaatctcttcctccaagttctcattggcttcattcaccttacccttgcccttgtcttcaacttcggcttggagagcaatgcacttcttggaaggtgaggcttcctccatctccttcttcttcaacttgtacatgtcattggtgttgatcttccccaagaggcttgccggtgtcatccttgacatgtcggagttgatgagcatggtgacaagggtctcatacttctccggtagagccctaagcatcttttgggcaacctcaagatcggtgtagtttgccccaagccccttgagatcattcacaatgacattgagcctcccatacatgtcattcacactctcatgaggcaacatggagaatgtctcatattggatctttaggaagtgaagcttggcatccttgtactcacttgtgccctcatggatctccgccaacttgttccaaatctcatatgcggtctcaaggttgctcactctatcaaactcctcttggctcaaagagttgaacaaatcatttatggcttggacattgagttggaggttgcggtgatcaatctctgtcaagggcgtgccggtgatagcaaaacctacatccacaatactccaaatatggaacctcatagctttgaggtgagtagacattttaattttccaagtggaatagtttgtgccattaaacatgggagccttccctacatggttcacctcgttcgacat

SEQ ID NO: 23041 - DNA, 5592 bp, Oryza sativa
  Clone ID: TF_OsC1713_4827
ttgtggaggagaaggaggacgtgccaaagatgaaggatgaggagcatcacggcggcgatgatatacaaaagcttgggtgctctccaacatttggactcaagaatccaatacacccaccctagtgtgcaatcttcccacggaagcattcaaatctccaacatcggtgcgtaagccatgaacatcctcatgcaatgcttaatgcccggtggataagcgttgaatgctttcacttagggtattaatagccccaagcaccggattgaagtattcgttgggttgcattccaaagtatgcatattgtggatggaagaaggcacttggatcatacccatgaggaggaggggggctgcacttgagcttgcaccttgatcaaatgttggttggcgcacacgaggagctctaggagtggagagttggagatgaggcttgtagtctttgtgttcttttaagttgttaccaatttgtctcaacttgctttgaatcaatctcattatgtagggggcatagtaaactccttgtccaatagtccccttggaaatggctatctccttcatcataaggttgatgacaccaaaccgacgaccatccatgatggcttcaatgacatgccatgcaacgccgcaaatgtcatcattgttgccacatcttgggagaatggtggccctcactatgcggttgatcagacttgggatagccctcaaactcaccacctttccataggtgtgcctcctcccttcttcataaaactgagaaaagtgatcaatggggaaggggttgtggttttgctcatcatggaggtcatccctgttgttgaagtgaatgtgcaagagctccttgaatgcacggcagttgatagagcatcgaagggtccccgacatccacttcatggcatcacaatcgccggacaccacggacttttgataccgtgtatggaatctcagatcattgcaatcattaggcctccggaattgatcgtgatgacggaggatagtgtattgctaggcattcctcaaattgagcacaaattggatggtgggatcgagaggactcccatcatcacttgcctcatcatcctcaccatcgccactgccattatcaccacttacttccacctcatccccctcaatattttccataacttcatcatcactttgaacatactcatctccgtttgattcctcattctcactgacgggatcaagcgtgggctcacgacgaccacggcgagtgcggggaggcatagccgagggccaacaaccggtcagaccgccgtccatatgtcggtcagaccgacggccgagcgcggtcaaaccggcggctggtacccggtcagaccacctcaactttgttttgaaacttttctcaaattccttctcaatcttattttggggataaatctcattttggccaaaactaagaatctagtttccgctgaaacatattccgcttcggcagtagagagggctacggagttttgtttcttggatgaccatgatacaagggatctaccaagcatttggcaactaccggatgtgctctttctatccactttgcaaccggcataatccgaatcggaatagccaactagcttaaacttagcaccttttgggtaccacaagccaataattgaggaatgctttaaatatcttagaatccttttcacggccactaagtgacactccttaggagcgacttgaaaccgtgcacacatgcaaacactaaacatgatatccggcctagatgcggtaaggtaaagcaagctaccaatcatagaatgataaagctttaaatctaccggtttacctccctcatcaaggtcgagatgcccattggttaccataggtgtcttgatgggctttgcatcctccaagccaaacctcttgagtagatccttgatgtactttgtttggctcaagaacgtcccatccttgagttgcttgatttgaagtctaaggaagaagctcaactctccaatcatggacatctcaaattccctagacatcatatcaccaaattccttgcaaaatacctcattagtagaaccgaatatgatatcatcaacataaatttgacacacaaagaaatcatcaccaatgatctttgtaaaaagggtggtgtcaacttttccaattttgaaatcctttgacaaaagaaaatctctcaatctttcataccaagccctaggagcttgttttaaaccataaagaccttttgagagtttacaaacatggttagaatttttaggatcttcaaaaccgggaggttgttcaacaaagacaagttcggcaatttcaccatttagaaaagcacttttcacatccatttgaaatagttttatatcaaagcatgatgcaaatccaagaaggatgcgaatagcctctagtcttgccacgggggcaaaagtttcaccaaagtccaaaccttcaacttgtgtgaaaccttgcgtcaccaatcttgccttgtttctcaccaccaatctgttctcatcttgattgttcctaaagacccactttgtccctatggcattgtggtctctaggtctttcaatcaaagtccacaccttgtttcttgcaaagttgttgagctattcatgcatagcattcatccaatccggatcacaaagagcttcatctacatgttttggctcaagacaagaaacaaacgagtagtgttcacaaatcgaagcgacacgagatcgagtttgaacacccttactaatatcacccaacacttggtcaattgggtgatccttggaaagagcggtgtgtatccttggtggcataggtggatcttgtgccttctcctcctccacttcaatttaagcttgacttggcgaagcggaagtagatggctcatcttgagtagaggtggatggcttgtcttccacttcaataggcttgacatccccaatagacatgttcttcatatctctcatcaagccttcatcatctacatcatccaaattctcgtgcccctcttgggagccattagtctcatcaaattgaacatcggcggtttcttccacaatacctttgttcttgttgtagacctggtatgccttgctatttgaggcataacctagaagaaacccttcatcacaacaccgactttcaaatttggttagtctaacaccctttcggtaaatataacacttgcaaccaaaaactcgaaaataggcaacatttggcttcctcccaacaattagcacataggaagtctttttcaagagacgatgcaaataaagcctattagttgcatagcaagcggtgtttatggcttccgcccaaaaggaatcggaaacaccatattcatcaagcatagtcattgccatctcaatcaatgtacgatttttcctctccacaccaatgctcttataggttgttgggccaaacaaatccatatatgcaagagctccaatggtctagatgtggacatgatactcttagtaggatgagaacatgcaacttgcttgccggcttgacaagcactacaaagcttatctttctcaaacttcacatctttcaagcccacaactagatcacgttttgaaagtttgctcaattgattcatgccaacatgggctagcctcatatgccaaagccaacccaatgaagtttttgcaactaacccaattacctttcctttgctattgcctccaaatgtcactttctcttgttctttccctcctacttcaaatgtggtgaacatagccctattaccggtcatgtgttgagtgcatccactatcaagcacccaatggctcccatcggtgtggtagttcaccactaagtatagtggaacccacatatctagcaacaatactacaatcatgagccttcccttgaaacacctctccaaactcttgttgagcttggccacttgctccttaagctcattgttctcaacaacaagtgagacatcacaaatagaaacacaagagctagagctagagctaggcatatccacaagatcatcacaagaggtagaaatgctagatgatgcaacatgagcaatatggcaagtagcactatcattaagcaaatcacaagatatgccaatatcaatgtgagctccatgttgagtagtggaaaggaggttgtcatgagtttccttaagcttctcatgagaaatggtgagtctctcatgagaggtctttagctcctcatacaagaccttcaaagaagcatgattcttctttagggccttgaacttgacaatctccttctcactataagcatggagctcctcaaacatactcacaaactcatcataggaaacatcatcacaatcatcatcactctcactatcactaagagatgtaaccttagaggagccttttgccatgagacaaagtggagcgaagagtgatggagcctccttgatggcaacaacggccatcttcttcttcttggagcttgcatcatcaccaccttcttcctcggacccagatgaggcggagctctccttatttgagtcccattccccgatgaaggcctcaatcttcttcccttccttcttgagcttcttcatgagcttgtagcctccactcttcttcttggatgacttgtctccatcatcatccttggaagggcacttggaagcaaagtgtcccttctcaccacactcaaagcacctcaagttggagagagtcttgttgggtcttctatttcttctcctattggagttggagccccttcctctctccttgcccttacccttgtcttcaacttcggtttggagagcaatgcacttcttggaaggtgaggcttcctccatctccttcttcttcaacttgtacatgtcattggtgttgatcttccccaagaggcttgcgggtgtcatccttgacatgtcggagttgatgagcatggtgacaagggtctcatacttctccggtagagccctaagcatcttttgggcaatctcaagatcggtgtagtttgccccaagccccttgagatcattcacaatgacattgagcctcccatacatgtcattcacactctcatgaggcaacatggagaatgtctcatattggatcttgaggaaatgaagcttggcatccttgtactcgcttgtgccctcatggatctccgccaacttgttccaaatctcatatgcggtctcaaggttactcactctatcgaactcctcttggctcaaagagttgaacaaagcattcatggcttgggcattgagttggaggttgcggtgatcaatctccgtcaagggcttgccagtgatagcaaagccggcaccgggcctcctccacaatcttctcggagaggtcaccgggcaactcctccacaagccgtctaggaggcggcaacctccaagagtaacaagcgatgacccggcgtggagatgatcaagtgccacactagctgtcgcgccgtccactcccaccaccccctccgctcccaccgtcgggaaaggcggatccgtccgccgccgcccaccgcagtgctcccgactccgcatcgaccaccatccgccgccgtggccaccacatccgcctcggacgctaaggagttgagcggcgggtgtaagttcaagtgccttaatttggtttcggtgattaatgacaaatct

SEQ ID NO: 23042 - DNA, 4420 bp, Oryza sativa
  Clone ID: TF_OsC1713_4833
tcatccaaagcaattgggcacaacaactacccgccgaaacatattctgtctcggcagtaagagggctacggagttttgtttcttggatgaccatgacacaagggatctaccaagcatttggcaactactggatgtgctctttctatccactttgcaaccggcataatccggatcggaatagccaacaagcttaaatttagcaccttttgggtaccacaagccaatagtagaggaatgctttaaatatcttagaatccttttcacggccactaagtgacactccttaggagcggcttgaaaccgtgcacacatgcaaacactaaacatgatatccggcctagatacggtaaggtaaagcaagctaccaatcatagaacgataaagctttaaatctaccggtttacctccctcatcaaggtcgagatgcccgttggttgccataggtgtcttaatgggcttcgcatcctccaagccaaacctcttgagtagatccttgatgtacttggtttggctcacgaacgtcccattcttgagttgcttgatttgaagtccaaggaagaagctcaactctccaatcatggacatttcaaattccctagacatcatatcaccaaattccttgcaaaatacctcattagtagaaccgaatatgatgtcatcaacataaatttgatacacaaagaaatcatcaccaatgatttttgtgaaaagagtgatgtcaacttttccaattttgaaatcctttgacaaaagaaaatctctcaatctttcataccaagccctaggagcttgtcttaaaccataaagagcttttgagagtttgtaaacatggttaggatatttagtatcatttagaaaagcacttttcacatccatttgaaatagttttatatcaaagcatgatgcaaatgcaagaaggatgcaaatagcctcaagtcttgccacgggggcaaaagtttcaccaaagtccaaaccttcaacttgtgtgaaaccttgtgccaccaatcttgccttgtttctcaccaccaacccgttctcatcttgtttgttcctaaagacccactttgtccctatgacattgtggtctctaggtctttcaaccaaagtccacaccttgtttcttgcaaagtttttgagctcttcatgcatagcattcatccaatccggatcacaaagagcttcatctacatgttttcgctcaagacaagaaacaaacgagtaatgttcacaaatcgaagtgacacgagatcgagtttgaacacccttactaatgtcacccaacacttggtcaattgggtgatccttggaaagagcggtgtgtatccttggtggcataggtggttcttgtgccttctcctcctccacttcaacttgagcttgacttggcatagcggaagtagatggctcatcttgagtggaggtggatggcttgtcttccacttcaataggcttgacatctccaattgacatgttcttcataactctcatcaagccttcatcacctacatcatccaaattctcgtgcccctcttgggagccattagtctcatcaaattgaacatcggcggtttcttccacaatacctttgttcttgttgtagacccggtatgccttgctttttgaggcataacctagaagaaacccttcatcacaccgactttcaaatttggttagtctaacaccctttcgatgaatataacatttacaaccaaaaactcgaaaataggcaatattaggcttcctcccaacaattacctcataggaagtctttttcaagacacgatgcaaataaagcctattggttgcatggcaagcggtgtttatggcttccgcccaaaaggaatcggaaacaccatattcatcaagcatagtccttgccatctcaatcaatgtacgatttttcctctccactacaccattttgttgaggtgagtaggtagcgaaaagttcatgtttaataccaagatcatcacaatagtcctcgatattggtattcttaaactcggaaccaatgttacttctaattttcacaagagtgcaactaaattcattttgggccctttttgcaaactttttgaaaaggtcggcgacaatagacttatcatgcaaaaagaacacccaagtatagcgagaataatcatcaacaatcacaagacaatgactattaccaccaatgctcttataggttgttgggtcaaacaaatccatatgcaagagctccaatggtttagatgtggacatgatactcttagtaggatgagaacatgcaacttgcttgccggcttgacaagcactacaaagcttatctttctcaaacttcacatctttcaagcccataactagatcacgttttgaaaatttgctcaattgattcatgccaacatgggctagccttctatgccaaagccaacccaaagaagtttttgcaactaaacaagttttcaaatttgcttcactagaattgaaatcaaccaaataaagatttccatatctaaaacctttgaacacacaagacttgtcaagaaggctagaaacaataacttcttgcgggaagaaagcacatgacaagctaagatcacaaatttgagcaaccgaaagcaaattgaaatttagagatttaacaagagagacattatcaattgacaaatcattggagatagcaattttacctaacccaattacctttcctttgctattgtctccaaatgtcactttctcttgttcattccttcctacctcaaatgtggtgaacatagccctatcaccggtcatgtgttgagtgcatccactatcaagcacccaatggctcccaccggtgtggtagttcaccaccgagtataggggaacccacatatctaggaacaatgctaccatcatgagccttccattgctcttgacaaaacgagtggcacggtgagaaggtttcttacccttctttggaatgaatccaagtccctccttgttaaggatgcaccgttgctcactcaaaatcttgtcaagagtgttcttacccttgaagcacctctccaacctcttgttgagcttagccacttgctccttaagctcattgttctcaacaacaagtgaggcatcacaaatagatacacaagagctagagctagagctagacatatccacaagatcatcacaagaggtagaaatgctagatgatgcaacataagcaatatggaaagtagcactatcatcaagcaaatcacaagatatgccaacatcaattagagctccatgttgagtagtggaaaggaggttgtcatgagcttccttaagcttctcatgagaaatggtgagtctctcatgagaagtctttagctcctcatacaagacctccaaagaagcatgatccttctttagggccttgaacttgacaatctccttctcactataagcatggagctcctcaaacatactcacaagctcatcataggaaacatcatcacaatcatcatcactctcactatcactaagagatgttaccttagaggagcccggatgaggcgagctctcctcatttgagtcccattcctcgatgaaggcctcaatcttcttgccttccttcttgagcttcttcatgagcttgtagcctccactcttcttcttggatgacttgtctccatcatcatccttggaagggcacttggaagcaaagtgtcccttctcaccacactcaaagcacctcaagttggagagagtcttgttgggtcttctatttcttctcctatttgagttggagccctttcctctctcctttctccttcccaagaaatcattgaacttcttggaaggtgaggcttcctccatttcctttttcttcaacttatacatgtcattggtgttgatcttccccaagaggcttgccggtgtcatccttgacatgtcggagttgatgagcatggtgacaagggtctcatacttctctggtagagccctaagcatcttttgggcaacctcaagatcggtgtagtttgccccaagccccttgagatcattcacaatgacattgagcctcccatacatgtcattcacactctcatgaggcaacatagagaatgtctcatattggatcttgaggaagtgaagcttggcatccttgtactcacttgtgccctcatggatctccgccaacttgttccaaatctcatatgcggtctcaaggttgctcactctatcaaactcctcttggctcaaagagttgaacaaagcattcatggcttgggcattgagttggaggttgcggtgatcaatctccatcaagggcgtgccggtgattgcaaagccggcaccgggcctcctccacaatcttctcggagaggtcaccgggcagggcacgccggtgagaccgccactatgtggccggtctgaccgcccctggtcaggccgaacccagtgaatgtgtttgtgt

SEQ ID NO: 23043 - DNA, 2657 bp, Oryza sativa
  Clone ID: TF_OsC1713_5136
tgctcactcaaaatcttgtcaagagtgtccttacccttgaagcacatctccaaactctgttgagcttaaccacttgctccttaagctcattgttctcaacaacaagtgaggcatcacaaatagaaacacaagtgctagagctagagctaggcatatccacaagatcatcacaagaggtagaaatgctagatgatacaacatgagcaatatggcaaatagcactatcatcaagcaaatcacaagatatgccaacatcaatgagaactccatgttgagtagtggaaaggaggttgtcatgagcttccttaagcttctcatgagaaatggtgagtctctcatgagaggtctttagctcctcatacaagacctccaaagaagcatgatccttctttcgggccttgaacttgacaatctccttctcactataagcatagagctccttaaacatactcacaagctcatcataggaaacatcatcacaatcatcatcactctcactatcactaagaaatgctaccttagaggagtcctttgccatgagacaaagtggagcgaagagtgatggagcctccttgatggcaacaacggccatcttcttcttcttggagcttgcatcatcaccaccttcttcttcggacccggatgaggcggagctctcctcatttgagtcccattccccgataaaggcctcaatattcttgccttccttcttgagcttcttcatgagcttgtagcctccactcttcttcttggatgacttgtctccatcatcatccttggaagggcacttggaagcaaagtgtcccttctcaccacactcaaagcacctcaagttgggaagagtcttgttgggtcttctatttcttctcctattggagttggagtcccttcctctctccttgcccttgcccttgtctttaacttcggcttgtagaacaatgcacttcttggaatgtgagacttcctccatctccttcttcttcaacttgtacatgtcattggtgttgatcttccccaagaggcttgcgggtgtcatccttgacatgtcagagttgatgagcatggtgacaagggtctcatacttctctggtagagccctaagcatcttttgggcaacctcaagatcggtatagtttgccccaagtcccttgagatcatttacaatgacattgagcctcccatacatgtcattcacactctcatgaggcaacatggagaatgtctcatattggatcttgaggaaatgaagcttggcatccttgtactcgcttatgccctcatggatctccgccaacttgttccaaatctcatatgcagtctcaaggttgctcactctatcgaactcctcttggctcaaagagttgaacaaagcattcatagcttgggcattgagttggaggttgcggtgatcaatctccatcaagagcgtgccggtgatagcaaagccagcgccgggcctcctccacaatcttctcggagaggtcaccgggcaactccgaataccactccgtcggctttgtatcggccaccccgagcaacaccatcccggcctccagggggccggtcgccactatgtggccggtctgaccgccccgccactcgcctcccagctccgccctccgcctccgcgttcggcggaggagcgggaggctagcggtggagatggcgaggcggccggagagcgtggggttattgacgagcacgagacgaagaggctgcataggcgcgggaaggaggcggcgaggaggccggacgtgaggagtgtggcggtgacggaggcggagggcgcccgcgcagctcgggttggcagagaagtcagagacgtagccgagcgagatgctgacaacatgggacgcgttgccatcatcgtcgtcgtcgtcacaaaacacgccatgcgggccggcgaggcagaggtcgtcggggaagccggcaatttttccccttcccttctctgcttctcttgttcacgaggtggaggcggcgaacggtccgtcgtcctggtcgttggcatcgtggccgtccaaccacatccgccggcgaacacagagcaagctcgggcaaccggcgatggaggcggcgagttcgggcggtcggtggtggaggcggaggcagagcgcgtcacgttcgccgtagcccgctggcgacaccctagactccagcaaaggaccctacgggttagggtcctaggacgtggtggaggtgggaggggtgggagggggagggagaagagggggagctcactggctttagagggagggccgtgggaggcggcagcctggcggtgggtggcggatcgggcgggcggcgaggcgccggcggcagtgccagagccgcggggatggaggatgacggtgggctggcattggtggcaggggaaaagcaagcgtgcggttaggaggcggtggacgatggttgcggatctagtggcggggagccaccagatacggggaagacagcgaggcgggggcacctcacatcctcgccgtcgcggtgttgagaagaaagagaggggagaagggggagaggggagaggggagaggggaaggggagagggctcaccaggggtcctcgccggcgccgttgactctttccggccagtcggcgaggcgggcaaaggtgcggtggggtggtggcggggaatcgcgcgagggacggga

SEQ ID NO: 23044 - DNA, 2658 bp, Oryza sativa
  Clone ID: TF_OsC1713_5267
ttaccaccacgcgacgaggcgtgggaacgacaacgacgaacgggcgcggcggagacagacgggcacaacggagacgaacggcgaggggacggcttcggcggcgatccttggacgaaggcgagacgcggccggcacgaggcttgacgacgcggagccgaggacgaagacgacgacggggctgcagcggcccacttgacgaacgcggacgacggacgagaacggctcgacggagggacgaacgccacgacgatgaggacgacgagaggacgacgacgacgacgacgactggggccggcgaggagacgacgagggcagccggcggcagctgcacggagacggggacgacgtggaacgcgccgctgcgaatccgacgacggaggcggcaccgcgagacgacgagccggcgaggatgaacggggcggccgaggggacgtcggcgacgacgaggatggaggccggcacgggcgacggcgttccggcgaaacagaggagcagcgggaggtactggacgccgacgaggaggccactccggcgagcttcgggcgaggaggaggacgacgaccgggcggtgggacccacgcgcggcgcggtcagcgcgcggcaaacagcgcacgcgcgcgcacgtgcgcggcacgggcgggagggcgccgctcgggttgggccgagaggcggcccaggaggagaggagggcgaggaggcctttcctttgctattgtctccaaatgtcactttctcttgttctttccctccttcttcaaatgtggtgaacatagccctatcaccggtcatgtgttgagtgcatccactatcaagcacccaatggctcccaccggtgcggtaattcaccaagatggcgacctcgccggagattggatggtcggctgcgactttggaggacatgaacacgtagaggacgacgagacgaacccaacggtactcaccctcgaaccaaacgacgaacgacgacggccggcgacgaggtctattggcggcgcggcttcggtcggcggtggcgacggggctccggtgaccggcgacagcggggagagagcggccgggcttctccacacctcggcgcaccttacggcgatgacggcgaccggcggcgacgacggaggcggcggcgcgacgcggatggagctcggccggcgacgacggcggggtggagcacgtggcggcggcgcgttgctcactcaaaatcttgtcaagagtgttcttacccttgaagcatatctccaaactcttgttgagcttggccacttgctccttaagctcattgttatggcaaatagcactatcatcaagcaagtcacaagatatgccagcatcaatgtgagctccatgttgggtagtggaaaggaggttgtcatgagcttccttaagcttctcatgagaaatggtgagtctctcatgtgaagtctttagctcctcatacaagacctccaaagaagcatgatccttctttagagccttgaacttgacaatctccttctcactataagcatgaagctcctcaaacatactcacaagctcaccataagaaacatcatcacaatcatcatcactctcactatcactaagagatgttaccttagaagagccctttgccatgagacaaagtggagcgaagagtgatggagcctccttgatggcaacaacggccatattcttcttcttggagcttgcatcatcatcaccttcttcttcggacccggatgaggtggagctctcctcatttgagtcccattgcccgatgaaggcctcaatcttcttcccttccttcttgagcttcttcatgagcttgtagcctccactcttcttcttggatgacttgtctccatcattagccttggaagggcacttggaagcaaagtgtcccttctcaccacactcaaagcacctcaagttggagagagtcttgttaggtattatatttcttctcctattggagttggagccccttcctctctcctttcttcttcccaagagatcattgaaccttttagcaagaagggcaatctcttcctccaagtcatcattggcttcattcaccttgctcttccacttgtcttcaacttcggcttggagagcaatgcacttcttagatggtgaggcttcctccatctccttcttcttcaacttgtacatgtcattggtgttgatcttccccaagaggcttgcgggtgtcatccttgacatgtcggagttgatgagcatggcgattagggtctcatacttctccggtagagcactaagcatcttttgggcaacctcaagatcggtgtaggttgccccaagccccttgagatcattcacaatgacattgagcctcccatacatgtcattcacactctcatgaggcaacattgagaatgtctcatattggatcttgaggaaatgaagcttggcatccttgtactcacttgtgccctcatggatctccgccaacttgttccaaatctcatatgcgatcttaaggttgctcactctatcgaactcctcttggctcaaagagttgaacaaagcattcatgacttgagcattgagtaggaggttgctgtgatcaatctccgtcaagggcgtgccggtgagatagcaaagccgaggttcggaaactcgctggtttcctactccctgttgaggcgagcccaactccat

SEQ ID NO: 23045 - DNA, 5194 bp, Oryza sativa; identical to SEQ ID NO: 13971
  Clone ID: TF_OsC359_7758

SEQ ID NO: 23046 - DNA, 4266 bp, Oryza sativa
  Clone ID: TF_OsC1713_4406
ttaccagtcttcgaataggtgcgggtattccgtcctcaaaaattcttcactttcccaggtggcttcatcctcagtgtgattgctccattgtaccttgtacatatgccacactttgctcctagtcctcttttcggcttcatccaatatccggatcgggtgttctggatatgtgagatcattgctaatgtgaatttcttccagcggagcttgctcttctggcactcgtaaacatttctttagctgagatacatggaagactgggtgtacatccgcgatattctctggtaactgtatctgatatgcaacttctcctcgcctggcaatgatctggaatggtcccacatatcttggtgccagttttcctttgaccttaaacctttttgttcccctcatcggagaaacctttagataaacgtaatctccctccttaaattccaggtttcttcttcgggtgtcggcgtaactcttttgtcgtgattgtgctatttttagacggtcgcggatcaagcgaaccttttcttcggcctcttgaataatgtcaggtccaaataccgcccgttctccagtctcggaccacattagcggggtacgacatcgtcgaccaaacaatgcctcgttgggtgacatctttaggcttgcttgaaagctgttgttgtaggagaattcggcgtagggcaaacatctctcccaatccttgttaaaatccagagcacaagccctcagcatgtcttccaggacctggttggttctctccgtctggccatctgtctgtggatgataagctgtgctaaatgcgagataacttcctagggcttcatggactttctcccagaaatggtaggtaaattgtgtgccccgatcagatataattttctttggtacacaatgaagacatactatcctggtcatgtataactcggctagcttagcactgctataatttgtcttaacgggaatgaatctcgccgtcttggtgagtcgatccacgatcacccaaatggaatcatgtcctgttgcggttttgggcaatccaacaataaaatccatacctatctcatcccatttccattcgggaatcctgagaggttgcaacaaacctgccggcctctggtgttcagccttcaccttctggcatacgtcgcagagtgctacgtattcggccacatctctcttcatgttgggccaccagtatccttccttcagatcttggtacatcttcgtacttccggggtgcaatgaatatgccgattcgtgagcttcctttaaaattaatcccctcagtccaccctgttcgggtacgtaaattctctttttataccatagaacatctttttcgttggttgaaaattcctttgcacgtcctgcagctaagcgttccttcacctctcggacttcctcgttgtccttctgggcttcttctatttgggttctcaaaagaggttgaatgtccagggtgtttatctctaaatcatagtccttgattaattctaaccatcgcctttgcctcaagttgagatctgactgggtgaagatatactttagactcttgtggtcagtgtagatatcgcaatggtttccaatcagataatgtctccaaatctttagcgcatgaaccacagctgcgagttctaggtcatgggtagggtagttttcctcatgtggtcgcaattgtcgcgacgcataggccaccacttttccgtcctgcatcagtactcctcctagtccttgccttgacgcatcacaatatataacaaagtctttcctgatgtcgggaagaactaaaataggcgctgaggtcagcttttccttgagctgctcaaagctttcctgacactgttctgaccacacaaacttcttttccttcttgagtagttgtgtcattggtcgggctatcttagagaacccttcaatgaaccgtcggtagtatccagccaagcctagaaaactccaaatttcagtcacagatttgggtgctttccattccgtgacagcctccactttagcaggatccactgctactccaccggccgagattacgtggcctagaaaagcgacttcttttaaccagaactcgcacttgctgaattttgcatataacttatgcttccgaagtttctggagaaccaatcgtaagtgttccgcatgttcttcctcatctttggagtagatcagaatgtcatcaatgaataccaccacaaacttatccaagtaatccatgaatactttgttcataagattcatgaagtatgctggggcattggttagaccaaacgacattactgtgaattcatacaacccatagcgtgttgaaaacgcggttttggggatatcctcggtcctaatcttcagttggtggtatcctgatcgaaggtctatctttgaaaacaccttagctccctcaagttggtcgaagaggtcatcaatccgtggtagtggatacttatttttgatagttacttcgttcagtgatcggtagtctacacacattctcatgctaccgtctttctttttaacaaacaacactggggctccccaaggtgacgaactggggcgtacaaatcccttctcttgcaactccctgatttgctttttaagttcttctaactcattgaccggcatccgatatggtctcttggatatgggggcagttccgggtatcaggtcaataatgaactctatgtcacgatctggtggcattccaggtaaatcttctgggaacacatcaggaaatcgttgcactactggcattccctttaggggtagcatggtaaatatacctccggcacgttcggttagcctaggatcttgatccatggttgctctcatatccgatccccagggtgtggtcagggtaacttctctacgtctacagtcaattactcctctatgctttgctaaccaatccatacccaaaatgacatcaagagtttggggtattagcaccataagattggagggaaataccacatccctaaggcggatgggtacgttaatgcaagctgtatccactgctatctcacccccaggtgagtgtactaacattggttgtcttagtttaactctggttaaattgtgttgttgacttgctttcaaagatataaatgaatgcgatgctcctgaatcgaagagaactttaactggagtggagttgagtgaaaacatacccatcagtacgccttggtcttcctgggcctcttcggctcgaacgtggttcacttgcccgcgtccaaatcctgtagcggtcctgttagtctgcggggtcctgaatagacctcgtccagcagcaggggtagcagtcccgtgaatagccgttgcattagttccggtgcgaatgggtgtcttgtttggatgtggacatttattggcgaaatgcccatactctccacagttgaaacagcttcctggccttactgatccagtggcggcctgatttggtgcaggagcgcggttctgaatggtaaccggcctgtggaaattgctagaggcggcaggtcgactggttgtcaccactgttggtctccatgccgaggaggttgtccctttaggacgctggggtgcggtctgaggcgtgcggttcatggcaagcctccttttacgattgtgctccacgaccttccggtcgttctccaacctaacgaccttattgattaaactctggaaactatcgtggtcttgtccaatcatgggcccgcgtaactcatcattcaagccttcaatgaatttgtcgatcttttcctcctcgtcggcaagatctctagttgcgtagcgcgccagctgagtgaaacggttcaggtactcttgtactgtggtattcccttgccgtagtctcctgaactcattcttcttcatccgcatcaccgcggcaggcacaaagttgtcacggaaggctgtggtaaattcctcccagtttggttctccagcatcttcttctcgggcttctttgtacgtgtcccaccaatctccggctggtccttccaattggtttgccgcaaagatcactttatcggcctcacgtactcgaacaagagttagcttcttctcaatgatccttaaccaatcttcagcatccataggttcttcagctgtggcgaatgtgggtggcttggtcctcataaactctccaaagcttgaccctccgcggttgccttggttgttcgcgatagcttgcagaagttgagtttgggtggccataattccggccagagtgtttaagtcgggtgtctgagtttcgtcattgctggttgttgcccgacgtcggcttgccat

SEQ ID NO: 23047 - DNA, 4845 bp, Oryza sativa
  unsure (1)..(4845): unsure at all n locations
  Clone ID: TF_OsC1713_4477
atggacgcgagggggggaaaggttgggcggcggcttaccgacgacggcgacggcaacggcggcgacagcgacggtggcggggaagggaaagagataaggggaggggaagacgtgacggcggcgcggggctcggggtgggggcgcgcggcacggggctcggggcgggacgcgacgggcgacggcgtgcggcgcgcggacgagcgacgacggcgacggacgagcgacgcgacggcgatggacgagcggcgacgggacgggcaacccgacggcnnacggcgcgcggcgcgtggtncgncanacgacancggcgcggggcgcaaggcgcaacggcgacggacgagcggcgacgggacgggcgacgtgacgggcgacgcgacgggcgggcagcgncggcgcgcggcgcgaggttcgggcgcgggcgcggcagtggtgcgcggcgcgaggcggcgtcagcgcgtcaccggcggcgcggggctcgagatgacgcgacggcagcagcggcgacgcgacggctacgcggcgcggcgatggcgacggcaatggcgcgcggcgggacgaggcgcgaggcgcgacggcgacggctcggggcgcgaggcgcgcatggcaggggaggggaaggggctagggaacctcgtcgaacacctagaggctaatgaatacctcagtgtgattactccattgtaccttgtacatacgccacactttgctcctagtcctcttttctgcttcatccaatatccgaatcgggtgttctggatatgtgagatcattgctaatgtgaatctcttccagcggagcttgttcttccggcactcgtaagcatttctttaattgggatacatggaagattgggtgcacatccgcgatattctccggtaactgtaactgatatgcaacttctcctcgcctggcggtgatctggaatggccccacatatcttggtgccagttttcccttgaccttaaacctttttgttcccctcatcggagaaacctttagataaacgtaatctccctccttaaattccaggtttcttcttcgagtgtcggcgtaactcttttgtcgtgattgtgctacttttagacggtcacggatcaagcgaaccttttcttcggcttcttgaataatgtcaggtccaaacaccgcccgttctccagtctcggaccacattagcggggtacgacatcgtcgaccaaacaatgcctcagtgggtgacatctttaggcttgcttgaaagctgttgttgtaggagaattcagcgtagggcaaacatctctcccagtccttgctaaaatctagagcacaagccctcagcatgtcttctaggacctggttggttctctccgtctggccatctgtctgtggatgataagctgtgctaaatgcgagataacttcctagggcttcatggactttctcccagaaatgtgaggtaaactgtgtgcctcgatcagatataatcctcttaggtataccatgaagacacactatcctggtcatgtacaactcggcgagttttgcactgctatagtttgtcttgacgggaatgaatcttgccgttttggtgagtcgatccacgatcacccaaatggaatcatatcctgttgcggttttgggcaatccaacaataaaatccatacctatctcatcccatttccattcgggaatcctgagaggttgcaacaaacctgccggcctctggtgttcagccttcaccttctggcatacgtcgcagagtgctacgtattcggccacatctctcttcatgttgggccaccagtagccctccttcaaatcctggtacattttggtacttccggggtgtaatgagtatgccgattcgtgagcttcctttaaaattaatcccctcagtccaccctgtttgggtacgtaaattctctttttataccatagaacatctttttcgtcggttgaaaattcttttgcacgtccggcagctaagcgttccttcacctctcggacctcctcgttgtccttctgggcttcttctatttgggttctcaaaagaggttgaatgtccagggtgtttatctgtccatgaggcactatatataggttcagctgagctatttcctccctaagctcagggaccatcccttccattctcagatgattgcaatggctcttacgactcagagcgtcggctacaacgtttgctttgcctgggtgatagtgaacctctaaatcatagtccttgattaattctaaccatcgcctttgcctcaagttgagatctgactgggtgaagatatactttagactcttgtggtcagtgtagatatcgcaatggtttccaatcagataatgtctccaaatctttagcgcatgaaccacagctgcgagttctaggtcatgggtagggtagttttcctcatgtggtcgcaattgtcgcgacgcataggccaccacttttccgtcctgcatcagtactcctcctagtccttgccttgacgcatcacaatatataacaaagtctttcctgatgtcgggaagaactaaaataggcgctgaggtcagcttttccttgagctgctcaaagctttcctgacactgttctgaccacacaaacttcttttccttcttgaatagttgtgtcattggtcgggctatcttagagaacccttcaatgaaccgtcggtagtatccagccaagcctagaaaactctgaatttcagtcacagatttggatgctttccattccgtgacagcctccactttagcaggatccactgctactccaccggccgagattacgtggcctagaaaagcgacttcttttaaccagaactcgcacttgctgaattttgcatataacttatgcttccgaagtttctggagaaccaatcgtaagtgttccgcatgttcttcctcatctttggagtagatcagaatgtcatcaatgaataccaccacaaacttatccaagtaatccatgaatactttgctcataagattcatgaagtatgctggggcattggttagaccaaacgacattactgtgaattcatacaacccatagcgtgttgaaaacgcggttttggggatatcctcggtcctaatcttcagttggtggtatcctgatcgaaggtctatctttgaaaacaccttagctcccttaagttggtcgaagaggtcatcaatccggggtagtggatacttatttttgatagttacttcgttcagtgatcggtagtctacacacattctcatgctaccgtctttctttttaacaaacaacactggggctccccaaggtgacgaactggggcgtacaaatcccttctcttgcaactccctgatttgctttttaagttcttctaactcattgaccggcatccgatatggtctcttggatatgggggcagttccgggtatcaggtcaataatgaactctatgtcacgatctggtggcattccaggtaaatcttctgggaacacatcaggaaatcgctgcactactggcattccctttaggggtagcatggtaaatatacctccggcacgttcggttagcctaggatcttgatccatggttgctctcatatccgatccccagggtgtggtcagggtaacttctctacgtctacagtcaattactcctctatgctttgctaaccaatccatacccaaaatgacatcaagagtttggggtattaataccataagattggagggaaataccacatccctaaggcggatgggtacgtcaatgcaagctgtatccactgctatctcacccccaggtgaatgtattaacattggttgtcttaatttaactccgcgtccaaatccggtagcggtcctgttagtctgcggagtcctgaatagacctcgtccagcagcaggggtagcagtaccgtgaatagccgttgcattagctccggtacgaatgggtgtcttgtttggatgaggacatttattagcgaaatgcccatactctccacagttgaagcagctccctggccttactgatccagtggcggcctgattcggtgtaggagcgcggttctgaatggtaaccggcctgtggaaattgctggaggcggcaggtcgactggttgtcaccactgttggtctccatgctgagggggttgtccctttaggacgctggggggcggtctgaggcgggcggttcatggcaagcctccttttacgattgtgctccactaccttccggtcgttctccagcctgacgaccttattgattaagctctggaaactatcgtggtcttgtccaatcatgggcccgcgtaactcgtcattcaagccttcaatgaatttgtcgatcttttcctcttcgtcggcaagatctctagttgcgtagcgcgccagctgagtgaaacggttcaggtactcttgtactgtggtattcccttgccgtagtctcctgaactcgttcttcttcatccgcatcactgcggcaggcacaaagttgtcacggaaggctgtggtaaattcctcccagtttggttctccagcatcttcttctcgggcttctttgtacgtgtcccaccaatctccggctggtccttccaattggtttgccgcaaagatcaccttatcggcctcacgtactcgaacaagagttagcttcttctcaatgatccttaaccaatcttcagcatccataggttcttcagctgtggcgaatgtgggtggcttggtcctcataaactctccaaagcttgaccctccgcggttgccttggttgctcgcgatagcttgcagaagttgagtttgggtggccataattccggccagagtgtttaagtcgggtgtctgagtttcgtcattgctggttgttgcccgacgtcggcttgccat

SEQ ID NO: 23048 - DNA, 4413 bp, Oryza sativa
  Clone ID: TF_OsC1713_4736
ttaccagttgtagaatagatgcgggtactccgtcctcaagaattcttcgctttcccaggtggcttcatcctcagtgtgattactccattgtaccttgtacatacgccacactttgctcctagtcctcttttctgcttcatctaatatccgaatcgggtgttctgggtatgtgagatcattgctaatgtgaatctcttccagcggagcttgttcttccgacactcgtaagcatttctttaattgggatacatggaagactaggtgcacatcggcgatattctctggtagttgtaactgatatgcaacttctcctcgcctggcgatgatctggaatggccccacatatcttggtgccagttttcctttaaccttaaacctctttgttcccctcatcggagaaacctttagataaacgtaatctccttccttaaattccaggtctcttcttcgagtgtcggcgtaactcttttgtcgtgactgtgctacttttagacggtcacggatcaaacgaaccttttcttcggcttcttgaatgatgtcaggtccaaataccgcccgttccccagtctcggaccatattagcggggtacgacatcgtcgaccaaacaatgcctcattgggtgacatctttaggcttgcttgaaagctgttgttgtaggagaattcggcgtagggcaaacatctctcccagtccttgctaaaatccaaagcacaagccctcagcatgtcctccaggacctggttggttctctccgtctggccatccgtctgtggatgataagcggtgctaaatgcgaggtaacttcctagggcttcatggactttctcccagaaatgtgaggtaaactgtgtgcctcgatcagatataatcctcttaggtataccatgaagacacactatcctggtcatgtacaactcggcgagttttgcactgctatagtttgtcttgacggggatgaatcttgccgtcttggtgagtcgatccacgatcacccatatggaatcatatcctgttgcggttttgggcaatccaacaataaaatccatgcctatctcatcccatttccattcgggaatcctgagaggttgcaacaaacctgccggcctctggtgttcagccttcaccttctggcatacgtcgcagagtgctacgtattcggccacatctctcttcatgttgggccaccagtatccttccttcagatcttggtacatcttcgtacttccggggtgcaatgaatatgccgattcgtgagcttcctttaaaattaatcccctcagtccaccctgttcgggtacgtaaattctctttttataccatagaacatctttttcgtcggttgaaaattcctttgcacgtcctacagctaagcgctccttcacctctcggacttcctcgttgtccttctgggcttcttctatttgggttctcaaaagaggttgaatatccagggtgtttatctgtccacggggtactatatgtaggttcagctgcgccatttcctccctaagctcagggaccatcccttccgttctcagatgattgcaatggctcttacgactcagagcgtcggctacgacgtttgctttgcctgggtgataatgaacctctaaatcatagtccttgattaattctaaccatcgcctttgcctcaagttgagatctgactgggtgaagatatactttagactcttgtggtcagtgtagatatcgcaatggtttccaatcagataatgtctccaaatctttagcgcatgaaccacagctgcgagttctaggtcatgggtagggtagttttcctcatgtggtcgcaattgtcgcgacgcataggccaccacttttccctcctgcatcagtactcctcctagtccttgcctcgacgcatcacaatatataacaaagtctttcctgatgtcgggaagaactaaaataggtgctgaggtcagcttttctttgagctgctcaaagctttcttgacactgttccgaccatgcaaacttcttttccttcttgagtaattgtgtaattggtcgggctatcttagagaacccttcaatgaaccttcggtagtatccagccaagcctagaaaactccggatctcagtcaccgatttgggtgctttccattccgtgacagcctccactttagcagggtccactgctactccaccggctgagattacgtgacccagaaaagcgacttccttcaaccaaaattcgcacttgctgaattttgcgtataacttgtgctttcggagtttctggagaaccaatcttaagtgttccgcatgttcttcctcatctttggagtagataagaatgtcatcaatgaacaccaccacaaacttatccaagtattccatgaatactttgttcataagattcatgaagtatgctggggcattggttagaccaaacgacattactgtgaattcatacaacccatagcgtgttgaaaacgcggttttggggatatcctcggtcctaatcttcagttgatggtatcctgatcgaaggtctatctttgaaaacaccttagctcccttaagttggtcgaagaggtcatcaatccgtggtagtggatacttatttttgatagttacttcgttcagtgatcggtagtctacacacattctcatgctaccgtctttctttttaacaaacaacactggggctccccaaggtgacgagctggggcgtacaaatcccttctcttgcaactctctgatttgctttttaagttcttctaactcattgaccggcatccgatatggtctcttggatatgggggcagttccgggtatcaggtcaataatgaactctatgtcacgatctggtggcattccaggtaaatcttctgggaacacatcaggaaatcgctgcactactggcattccctttaggggtagcatggtaaatatacctccggcacgttcggttagcctaggatcttgatccatggttgctctcatatccgatccccagggtgtggtcagggtaacttctctacgtctacagtcaattactcctctatgctttgctaaccaatccatacccaaaatgacatcaagagtttggggtattagcaccataagattggagggaaataccacatccctaaggcgaatgggtacgtcaatgcaagctgtatccactgctatctcacccccaggtgaatgtactaacattggttgtcttaatttaactctggttaaattgtgttgttgacttgctttcaaagatataaatgaatgcgatgctcctgaatcgaagagaactttaactggagtggagttgagtgaaaacatacccatcagtacgccttggtcttcctgggcctcttcagctcgaacatggttcacttgcccgcgtccaaatccggtagcggtcctgttagtctgcggagtcctgaatagacctcgtccagcagcaggggtagcagtaccgtgaatagccgttgcattagctccggtacgaatgggtgtcttgtttggatgaggacatttattagcgaaatgcccatactctccacagttgaagcagctccctggccttactgatccagtggcggcctgattcggtgtaggagcgcggttctgaatggtaaccggcctgtggaaattgctggaggcggcaggtcgactggttgtcaccactgttggtctccatgctgagggggttgtccctttaggacgctggggggcggtctgaggcgggcggctcatggcaagcctccttttacgattgtgctccactaccttccggtcgttctccagcctgacgaccttattgattaagctctggaaactatcgtggtcttgtccaatcatgggcccgcgtaactcgtcattcaagccttcaataaatttgtcgatcttttcctcttcgtcggcaagatctccagttgcgtagcgcgccagctgagtgaaacggttcaggtactcttgtactgtggtattcccttgccgtagtctcctgaactcgttcttcttcatccgcatcaccgcggcaggcacaaagttgtcacagaaggctgtggtaaattcctcccagtttggttccccggcatcttcttctcgggcttctttgtacgtgtcccaccaatctccggctggtccttccaattggtttgccgcaaagatcaccttatcggcctcacgtactcgaacaagagttagcttcttctcaatgatccttaaccaatcttcagcatccataggttcttcagctgtggcgaatgtgggtggcttggtcctcataaactctccaaagcttgaccctctgcggttgccttggttgctcgcgatagcttgcagaagttgagtttgggtggccataattccggccagagtgtttaggtcgggcgtctgagtttcgtcattgccggttgttgcccgacgtcggcttgccat

SEQ ID NO: 23049 - DNA, 4365 bp, Oryza sativa
  Clone ID: TF_OsC1713_4922
ttaccagttttcaaatagatgcgggtattccgtcctcaagaattctttgctttcccaagtggcttcatcctcagtgtgattactccactgtaccttatacatacgccatactttgttcctagtcctcttttctgcttcatccaatatccggactaggtgttctggatacgtgagatcattgctaatgtgaatttcttccaacggagcttgttcttccggcactcgtaagcatttctttaattgagacacatggaagactgggtgcacatcagcgatattctctggtagctgtaactgatatgcgacttctcctcgtctagccgtgatttgaaaaggtcccacatatcttggcgctagttttcctttgaccttaaaccttttcgttcccctcatcagagaaacctttagataaacgtaatctccttccttaaattccaggtttcttcttcgggtgtcggcgtaactcttctgtcgtgattgtgccacttttagacggtctcgaatcaggcgaaccttttcttcggcctctttgataatgtcaggttcaaataccgcccgttcacctgtctcggaccacatcagtggggttcgacatcgtcgaccaaacaatgcctcattgggtgacatctttaggcttgcttgaaagctgttgttgtaggagaattcggcgtagggcaaacatctctcccagtccttgctaaaatccagagcacaagccctcagcatttcctccaggacctggttggttctctctgtctggccatctgtctgtggatgataagctgtgctaaatgcgaggtaacttcctagggcttcatggactttctcccagaaatgtgaggtaaactgtgtgccccgatcagatgtaattttcttaggtacaccatgaagacatactatcctggtcatgtataactcggctagcttagcactgctataatttgtcttaacgggaatgaatctcgccgtcttggtgagtcgatccacgatcacccaaatggaatcatatcctgttgcggttttgggcaatccaacaataaaatccatacctatctcatcccatttccattcgggaatcctaaggggttgcagcaagcctaccggtcgctgatgctcagccttcaccttttggcacacgtcacagagtgctatgtattccgccacatctctcttcatgttgggccaccagtatccttccttcagatcttggtacatcttggtacttccggggtgcaatgaatatgccgattcgtgagcttcctttaaaattaatcccctcagtccaccctgttcgggtacgtaaattctctttttataccatagaacatctttttcgtcggttgaaaattcctttgcacgtcctgtagctaagcgttccttcacctctcggacttcctcgttgtccttctgggcttcttctatttgggttctcaaaagaggttgaatgtccagggtgtttatctgtccacgaggtactatatgtaggttcagctgagctatctcctccctaagctcagggatcatcccttccattctcagatgattgcaatggctcttacgactcagagcgtcggccacaacgtttgctttgcctgggtgatagtgaacttctagatcatagtccttgattaattctaaccatcgcctttgcctcaagttgagatctgactgggtgaagatatactttagactcttgtggtcagtgtagatatcgcaatggtttccaatcagataatgtctccaaatctttagcgcatgaaccacagctgcgagttctaggtcacgggtagggtagttttcctcatgtggttgcaattgtcgcgacgcataggccacaacttttccgtcctgcatcagtactcctcctagtccttgccttgacgcatcacaatatataacgaagtctttcctgatgtcgggaagaactaaaataggcgccgaggtcagcttttctttgagctgctcaaagctttcctgacactgttctgaccacacaaacttcttttccttcttgagtagttgtgtcattggtcgggctatcttagagaacccttcaatgaaccgtcggtagtatccagccaagcctagaaaactccgaatttcagtcacagatttgggtgctttccattctgtgacagcctccactttagcaggatccactgctactccaccggccgagattacgtggcctagaaaagcgacttcttttaaccagaactcacacttgctgaattttgcatataacttatgcttccgaagtttctcgagtaccaatcgcaagtgttccgcatgttcttcctcatctttggagtagattagaatatcatcgatgaataccaccacaaatttgtccaagtagtccatgaacactttgttcataagattcataaagtatgccggagcgttggttaaaccaaacgacattacggtgaactcatataatccatagcgtgttgagaacgcagttttgggtatgtccccggttctaattttcaattggtggtatcctgaccgatggtcaatcttagagaacaccttagctcctttgagttgatcaaaaagatcatcaatccgtggtagtggatacttgtttttgatagttacttcgttcagtgagcggtagtccacacacattctcatgctaccatctttcttcttgacgaatagcactggggctccccaaggtgacgaactggggcgtacaaatcccttttcttgcaactccctaatttgctttttaagttcatccaactcattgaccggcatccgatatggtctcttggatatgggggcagttccgggtatcaggtcaataatgaactctgtgtctcgatctggtggcattccaggtaaatcttctgggaacacatcaggaaatcgctgcactacgggcattccctttaggggtagcatggtaaatatacctccggcacgttcggttagcctaggatcttgatccatggttgctctcatatccgatccccagggtgtggtcagggtaacttctctacgtctacagtcaattatccctctatgctttgctaaccaatccatacccagaatgacatcaagagtttggggtattagcaccataagattggagggaaataccacatcccgaaggcggatgggtacgtcaatgcaagctgtatccactgctatctcacccccaggtgaatgtactaacattggttgtcttagtttaactctgattaaattgtgttgttgacttgctttcaaagatataaatgaatgcgatgctcccatcagtacgccttggtcttcctgggcctcttcagctcgaacgtggttcacttgcccgcgtccaaattcggtagcggtcctgttagtctgcggagtcctgaatagacctcgtccagcagcaggggtagcagtcccgtgaatagccgttgcattagctccggtgcgaatgggtgtcttgttcggatgaggacatttattggcgaaatgcccatactctccacagttgaaacaacttcctggccttactgatccagtggcggcctgattcggtgcaggagcgcggttctgaatggtaaccggcctgtggaaattactggaggcggcaggtcgactggttgtcaccactgttggtctccatgccgaggaggttgtccctttaggacgctggggtgcggtctgaggcgggcggttcatggcaagcctccttttacgattgtgctccacgaccttccggtcgttctccaacctaacgaccttattgattaaactctggaaactatcgtggtcttgtccaatcatgggcccgcgtaactcgtcattcaagccttcaatgaatttgtcgatcttttcctcctcgttggcaagatctctagtcgcgtagcgcgccagctgagtgaaatggttcaggtactcttgtactgtggtattcccttgccgtagtctcctgaactcattcttcttcatccgcatcactgcggcaggcacgaagttgtcacggaaggctgtggtaaattcctcccagtttggttctccagcatcttcttctcgggattctttgtacgtgtcccaccagtctccggctggtccttccaattggtttgccgcaaagatcactttatcggcctcacgtactcgaataagagttagcttcttctcaatgatccttaaccaatcttcagcatccataggttcttcagctgtggcgaatgtgggtggcttggtcctcataaactctccaaagcttggccctccgcggttgccttggttgttcgcgatagcttgcagaagttgagtttgggtggccataactccggccagagtggctaagtcgggtgtctgagtttcgtcattgctggttgttgcccgacgtcggcttgccat

SEQ ID NO: 23050 - DNA, 3911 bp, Oryza sativa
  Clone ID: TF_OsC1713_4988
ccagttgccgaatagatgcgggtactccgtcctcaagaattcttcgccttcccaggtggcttcgtcctcagtgtgattactccattgtaccttgtacatacgccacactttgctcctagtcctctaatctgcttcatccaatatccggatcgggtgttctggatatgtgagatcattgctaatgtgaatctcttccagcggagcttgttcttccggcactcgtaagcatttctttaattgggacacatggaagactgggtgcacatcggcgatatattctggtagctgtaactgatatgcgacttctcctcgcctggcaatgatctggaatggccccacatatcttggtgccagttttcctttaaccttaaacctttttgttcctctcatcggagaaacctttagataaacgtaatctccttccttaaattccaggtttcttcttcgagtgtcggcgtaactcttttgtcgtgattgtgctacttttagacgatcacggatcaagcgaaccttttcttctgcttcttgaataatgtcaggcccaaataccgcccgttctccagtctcggaccacattagcggggttcgacatcatcgaccaaacaatgcctcgttgggtgatatctttaggcttgcttgaaagctgttgttgtaggagaattcggcgtagggcaaacatctctcccagtccttgctaaaatccagagcacaagccctcagcatgtcctccaggacctggttggttctctccgtctggccatctgtctgtggatgataagcggtgctaaatgcgaggtaacttcccagggcttcatggactttctcccagaaatgtgaggtaaattgtgtgcctcgatcagatataatcttcttaggtataccatgaagacacactatcctggtcatgtacaactcggcgagttttgcactgctatagtttgtcttgacggggatgaatcttgccgtcttgttgagtcgatccacgatcacccaaatggaatcatatcctgttgcggttttgggcaatccaacaataaaatccatgcctatctcatcccatttccattcgggaatcctgagaggttgcaacaaacctgccggcctctggtgttcagccttcaccttttggcatacgtcgcaaagtgctacgtattcggccacatctctcttcatgttgggccaccagtagccctccttcaaatcctggtacattttggtacttccggggtgtaatgagtatgccgactcgtgagcttcctttaaaattaatcccctcagtccaccctgttcgggtacgtaaattctctttttataccatagaacgtcttttccgtcggttgaaaattcttttgcacgtcctgcagctaagcgttccttcacctctcggacctcctcgtttccttctgggcttcttctatttgggttctcaaaagaggttgaatgtccagggtgtttatccgtccatgaggcactatatgtaggttcagctgagctatttcctccctaagctcagggaccatcccttccattctcagatgattgtaatggctcttacgactcagagcgtcggccacaacgtttgctttgcctgggtgatagtgaacctctaaatcatagtccttgattaattctaaccatcgtctttgcctcaagttgagatctgactgggtgaagatatactttagactcttgtggtcagtgtagatatcgcaatggtttccaattaggtaatgtctccaaatctttagcgcatgaaccacagctgcgagttctaggtcatgggtagggtagttttcctcatgtggtcgtaattgtcgcgacgcataggccacaacttttccgtcctgcatcagtactcctcctagtccttgccttgacgcatcacaatatataacaaagtctttcctgatgtcgggaagaactaaaataggtgccgaggtcagcttttctttaagctgttcaaagctttcctgacattgttctgaccatacaaacttcttttccttcttgagtagttgtgtcatcggtcgggctatcttagagaacccttcaatgaaccttcggtagtatccagccaagcctagaaaactccgaatttcagtcacagatttgggtgctttccattccgtgacagcctccactttagcagggtccactgctactccaccggctgagattacgtgacccagaaaagcgacttccttcaaccaaaattcgcacttgctgaattttttgtataacttgtgctttcggagtttctggagaaccaatcttaagtgttccgcatgttcttcttcatctttggagtagatcagaatgtcatcgatgaataccaccacaaatttttccaagtagtccatgaacactttgttcataagattcataaagtatgccggggcgttggttaaaccaaacgacattacggtgaactcatataatccatagcgtgttgagaacgcggttttgggtatatccccggtcctaattttcaattggtggtatcctaatcgaaggtcaatcttagagaacaccttagctcctttgagttgatcaaaaagatcatcaatccgtggtagtggatacttgtttttgatagttacttcgttcagtgagcggtagtccacacacattctcatgctaccatccttcttcttgacgaatagcactggggctccccaaggtgacgaactggggcgtacaaatcccttttcttgcaactccctaatttgctttttatgttcttctaactcattgaccagcatccgatatggtctcttggatataggggcagttccgggtatcaggtcaataatgaactctatgtcacgatctggtggcattccaggtaaatcttctgggaacacatcaggaaatagctgcactacgggcattccctttaggggtagcatggtaaatatacctccggcacgttcggttagcctaggatcttgatccatggttgctctcatatccgatccccagggtgtggtcagggtaacttctctacgtctacagtcaattactcctctatgctttgctaaccaatccatacccaatatgacatcaagggtctcacccccaggcgagtgtactatcataggctttctaactcctcgtccaccagcaggggtagcagccccgtgaatagccattgcattagctccggtgcgaatgggtgtcttgtttagatgaggacatttgttggcaaaatgcccatactctccacaattgaaacagcttcctggcctcattactccagtagcggcctgattcggtgcaggagctcggttctgagtggtaaccggcctgtggaagttgctatgtgcggtaggacggttcgttgttaccaccgttggtttccatcctgatgaggcagctcctttaggatgctgagttgccacctgaggtgggcggttcatggcaagcctcctcttacgattgtgctccacaaccttccggtcgttttccagcctaacgaccttattgatcaaactctggaaactctcatgatcttgcccaatcataggcccacgcaactcatcattcagcccttctatgaacttgtcgatcttttcctcttcatctgcgaggtctccgattgcgtagcgggtcaactgagtgaaccggtttagatattcttgcaccgttgtgtttccttgtcgcggccttctgaactcgttcttcttcatacgcatcaccgcagcaggcacgaagttctcatgaaaagctgcagtgaattcatcccaagtgggttctccagcatcttcttcccgagcttccttgtaagtatcccaccaatcgccagctggtccctccagttggtttactgtgaagatcactttgtcggcttcgcgcatccggacaagggtcagtttcttctctatgatgcatagccaatcttctgcctccat

SEQ ID NO: 23051 - DNA, 4291 bp, Oryza sativa
  Clone ID: TF_OsC1713_5164
ttggatttcgcttagatgcgggtaatctgtctccaagaattttttgctttcccaagtgggttcatcctcaggaagaatactccaatgtaccttggacatacgccacactttggtcctagtccttttttttggttcatcccaaatccggactgggtggtttggaaaagtgagatcaatggtatatgaattttttccaacggagcttggtcctccggcacttgtagcactttttttaattagacacaggaaaactgggtgcacatcagcgatatttttttggagctgtacatgatatgcaacttctccttgtctagcgatgattggaaaaggtcccacatatcttggtgctagtttccttaaccttaaacatttttgtacctctcatcggagaaaccttcagatatacataatccccttccttaaattctagatctcttctccgggtgtcagcgtaactcttttgtcgtgattgtgccacttttagacggtcgcggatcaagcgaaccttttcttcggcttcttgaataatgtcaggtccaagtaccgcccgttctccagtctcggaccacattagtggggttcgacatcgtcgaccaaacaatgactcattgagtgacatctttaggcttgcttgaaagctgttgttgtaggagaattcggcgtaaggcaaacatctctcccagtccttgctaaaatccagagcacaagccctcagcatgtcctccaggacctggttggttctctccgtctggccatctgtctgtggatgataagctgtgctaaatgcgaggtaacttcctagggcttcatggactttctcccagaaatgtgaggtaaactgtgtgccccgatcagatataattttcataggtacaccatgaagacatactatcctggtcatgtataactcggctagcttagcactgctataatttgtcttaacgggaatgaatctcgccgtcttggtgagtcgatccacgatcacccaaatggaatcatatcctgttgcgattttgggcaatccaacaataaaatccatacctatctcatcccatttccattcgggaatcctgagaggttgcaacaaacctgccggcctctggtgttcagccttcaccttctggcatacgtcgcagagtgctacgtattcggccacatctctcttcatgttgggccaccagtagccctccttcaaatcctggtacattttggtacttccggggtgtaatgagtatgccgattcgtgagcctcctttaggattaatcctcgcagtccaccctgttcgggtacgtaaattctctttttataccatagaacatctttttcgtcggttgaaaattcctttgcgcgtcctgcagctaagcgttccttcacctctcggatttcctcgttgtccttctgggcttcttctatttgggttctcaaaagaggttgaatgtccagggtgtttatctgtccatgaggcactatatgtaggttcagctgagctatttcctccctaagctcagggaccatcccttccattctcagatgattgcaatggctcttacgactcagagcgtcggccacaacgtttgctttgcctgggtgatagtgaacctctagatcatagtccttgattaattctaaccatcgcctttgcctcaagttgagatctgactgggtgaagatatacttcagactcttgtggtcagtgtagatatcgcaatggtttccaatcagataatgtctccaaattcctcctagtccttgccttgacgcatcacaatatataacgaagtctttcctgatgtcgggaagaactaaaataggcgccgaggtcagcttttctttgagctgctcaaagctctcctgacactgttctgaccatacaaacttcttttccttcttgagtagttgtgtcattggtcgggctatcttagagaacccttcaatgaaccgtcggtagtatccagccaagcctagaaaactccgaatttcagtcacagatttgggtgctttccattccgtgacagcctccactttagcagggtccactgctactccaccggctgagattacgtgacccagaaaagcgacttccttcaaccaaaattcgcacttgctgaattttgcgtataacttgtgctttcggagtctctggagaaccaatcgtaagtgttccgtatgttcttcctcatctttggagtagatcagaatgtcatcgatgaataccaccacaaacttatccaagtaatccatgaatactttgttcataagattcatgaagtatgctggggcattggttagaccaaacgacattactgtgaattcatacaacccatagcgtgttgaaaacgcggttttggggatatcctcggtcctaatcttcagttggtggtatcctgatcgaaggtctatctttgaaaacaccttagctcccttaagttggtcgaagagatcatcaatccttggtagtggatacttgtttttaatagttacttcgttcagtgatcggtagtctacacacattctcatgctaccgtctttctttttaacaaataacactggggctccccaaggtgacgaactggggcgtacaaatcccttctcttgcaactccctaatttgctttttaatttcttctaactcattgaccggcatccgatatggtctcttggatatgggggcagttccgggtatcaggtcaataatgaactctatgtcacgatctggtggcattccaggtaaatcttctgggaacacatcaggaaatcgctgcactacgggcattccctttaggggtagcatggtaaatatacctccggcatgttcggttagcctaggatcttgatccatggttgctctcatatccgatccccagggtgtggtcagggtaacttctctacgtctacagtcaattactcctctatgctttgctaaccaatccatacccaaaatgacatcaagagtttggggtattagcaccataagattggagggaaataccacatccctaaggcggatgggtacgtcaatgcaagctgtatccactgctatctcacccccaggtgaatgtactaacattggttgtcttagtttaactctgattaaattgtgttgttgacttgctttcaaagatataaatgaatgcgatgctcctgaatcgaagagaactttaactggagtggagttgagtgaaaacatacccatcagtacgccttggtcttcctgggcctcttcagctcgaacgtgcttcacttgcccgcgtccaaatccggtagcggtcctgttagtctgcggagtcctgaatagacctcgtccagcagcaggggtagcagtcccgtgattagccgttgcattagctccggtccgaatgggtgtcttgtttggatgaggacatttattggcgaaatgcccatactctccacagttgaaacagctccctggccttactgatccagtggcggcctgattcggtgcaggagcgcggttctgaatggtaaccggcttgtgaaaattgctagaggcggcaggtcgactggttgtcaccactgttggtctccatgccgagggggttgtccctttaggacgctggggtgcggtctgaggcgagcggttcatggcaagcctccttttacgattgtgctccacgaccttccggtcgttctccaacctaacgaccttattgattaaactctggaaactatcgtggtcttgtccaatcatgggcccgcgtaactcgtcattcaagccttcaatgaatttgtcgatcttttcctcctcgtcggcaagatctctagtcgcgtagcgcgccagctgagtgaaacggttcaggtactcttgtactgtggtattcccttgccgtagtctcctgaactcattcttcttcatcctcatcaccgcggcaggcacgaagttgtcacggaaggctgtggtaaattcctcccagtttggttctccagcatcttcttctcgggcttctttgtacgtgtcccaccagtctccggttggtccttccaattggtttgccgcaaagatcactttatcggcttcacgtacttgaacaagagttagcttcttctcaatgatccttaaccaatcttcagcatccataggttcttcagctgtggcgaatgtgggtggcttggttctcataaactctccaaagcttgaccctccgcggttgccttggttgttcgcgatagcttgcagaagttgggtttgggtggtcataactccggccagagtggttaagtcgggtgtctgagtttcgtcattgctggttgttgcccgacgtcggcttgccat

SEQ ID NO: 23052 - DNA, 4410 bp, Oryza sativa
  Clone ID: TF_OsC1713_5256
ccagtcttcgaataggtgcgggtattccgtcctcaaaaattcttcactttcccaggtggcttcatcctcagtgtgattgctccattgtaccttgtacatacgccacactttgctcctagtcctcttttcggcttcatccaatatccggatcgggtgttctggatatgtgagatcattgctaatgtgaatctcttccagcggagcttgctcttccggcactcgtaaacatttctttagctgagacacatggaagactgggtgtacatccgcgatattctctggtaactgtaactgatatgcaacttctcctcgcctggcgatgatctggaatggtcccacatatcttggtgccagttttcctttgaccttaaacctttttgttcccctcatcggagaaacctttagataaacgtaatctccctccttaaattccaggtttcttcttcgggtgtcggcgtaactcttttgtcgtgattgtgctacttttagacggtcacggattaagcgaaccttttcttcggcttcttgaataatgtcaagtccaaataccgcccgttctccagtctcggaccacattagcggggtacaacatcatcgaccaaacaatgcctcattgggtgacatctttaggcttgcttgaaagctgttgttgtaggagaattcgtcgtagggcaaacatctctcccagtccttgctaaaatccagagcacaagccctcagcatgtcctccaggacctggttggttctctccgtctggccatctgtctatggatgataagcggtgctaaatgcgaggtaacttcctagggcttcatggactttctcccagaaatgtgaggtaaactgtgtgtctcgatcagatataatcctcttagatataccatgaagacacactatcctggtcatgtacaactcggcgagttttgcactgctatagtttgtcttgacggggatgaatcttgccgtcttggtgagtcgatccacgatcacccaaatggaatcatatcctgttgcggtcttgggcaatccaacaataaaatccatacctatctcatcccatttccattcgggaatcctgagaggttgcaacaaacctgccggcctttggtgttcagcctttaccttctggcatacgtcgcagagtgctacgtattcggccacatctctcttcatgttgggccaccagtagccctccttcaaatcctggtacattttggtacttccggggtgtaatgaatatgccgattcgtgagcttcctttaaaattaatcccctcagtccaccctgttcgggtacgtaaattctctttttataccatagaacatctttttcgtcggttgaaaattcctttgcacgtcctgcagctaagcgttccttcacctctcggatttcctcgttgtccttctgggcttcttctatttgggttctcaaaagaggttgaatgtccagggtgtttatctgtccacggggtactatatgtaagttcagctgagctatttcttccctatgctcagggaccatcccttccattctcagatgattgcaatggctcttacgactcagagcgtcggccacgacgtttgctttgcctgggtgatagtgaacctctaaatcatagtccttgattaattctaaccatcgcctttgcctcaagttgagatctgactgggtgaagatatactttagactcttgtggtcagtgtagatatcgcaatggtttccaatcagataatgtcttcaaatctttagcgcatgaaccacagctgcgagttctaagtcatgggtagggtagttttcctcatgtggtcgcaattgtcgcgatgcataggccacaactttcccgtcctgcatcagtactcctcctagtccttgccttgacgcatcacaatatataacaaagtctttcctgatgtcgggaagaactaaaataggtgccgaggtcagcttttctttgagctgctcaaagctttcctgacactgttctgaccatacaaacttcttttccttcttgagtagttgtgtcattggtcgggctatctttgagaacccctcgataaacgttcggtagtatccggccaagcctagaaaactccgaatttcggtcaccgacttgggtgccttccattccgtaacagcctccacttttgcagggtccactgctactccactggctgagattacgtgacccagaaaagcgacttccttcaaccgaaattcgcacttgctgaattttgcgtataacttgtgctttcggagtttctggagaaccaatcgtaagtgttccgcatgttcttcctcatctttggagtagatcagaatgtcatcgatgaataccaccacaaacttatccaagtaatccatgaatactttgttcataagattcatgaagtatgctggggcattggttagaccaaatgacattactgtgaattcatacaacccatagcgtgttgaaaacgcggttttggggatatcctcggtcctaatcttcagttggtggtatcctgatcgaaggtttatctttgaaaacaccttagctcccttaagttggtcgaagagatcatcaatccttggtagtgggtacttgttcttaatagttacttctttcagtgatcgatagtctacacacattctcatgctaccgtctttcttcttaacaaatagcactggggctccccaaggtgacgaactggggcgtacaaatcccttttcttgcaactccctaatttgctttttaagttcttttaactcattgactggcatccgatatggtctcttggatatgggggcagttgcgggtatcaggtcaataatgaactctatgtcacgatctggtggcattccaggtaaatcttctgggaacacatcaggaaatcgctgcactacgggcattccctttaggggtagcatggtaaatatacctccggcacgttcggttagcctaggattttgatccatggttgctctcatatccgatccccagggtgtgatcagggtaacttctctacgtctacagtcaattactcctctatgctttgctaaccaatccatacccaatatgacatcaagggtctgtggtatcaaaaccataaggttggagggaaacaccacatccctaaggcgaataggtacatcaatgcaagctgtgtccacggctatttcacccccaggtgaatgtactaacattggttgccttagtttaactctggttaaattgtgttgttgacttgctttcagagatataaatgaatgcgatgctcctgaatcgaagagaactttaactggagtgaagttgagtgaaaacatacccatcagcacgccttggtcttcctgggcctcttcagctcgaacgtggttcacttgcccgcgtccaaatccggtagcggtcctgttagtctgcggagtcctgaatagacctcgtccagcagcaggagtagcagtcccatgaatagccgttgcattagctccggtgcgaatgggtgtcttgtttggatgaggacatttattggcgaaatgcccatactctccacagttgaaacagcttcctggccttactgatccagtggcggcctgattcggtgcaggagctcggttttgaatggtaaccggcctgtggaaattgctggaggtggcaggtcgactggttgtcaccactgttggtctccatgccgaagaggttgcccctttaggacgctggggtgcggtctggggcgggcggttcatggcaagcctccttttacgattgtgctccacgaccttccggtcgttctccagcctaacgaccttattgattaaactctggaaactatcgtggtcttgtccaatcatgggcccgcgtaactcgtcattcaagccttcaatgaatttgtcgatcttttcctcctcgttggcaagatctctagtcgcgtagcgcgccagctgagtgaaacggttcaggtactcttgtactgtggtattcccttgccgtagtctcctgaactcattcttcttcatccgcatcaccgcggcaggcatgaagttgtcacggaaggctgtggtaaattcctcccagtttggttctccagcatcttcttctcgggcttctttgtacgtgtcccaccagtctccagctggtccttccaattggtttgccgcaaagatcactttatcggcctcacgtactcgaacaagagttagcttcttctcaatgatccttaaccaatcttcagcatccataggttcttcagctatggcgaatgtgggtggcttggtcctcataaactctccaaagcttgaccctccacggttgccttggttgttcgcgatagcttgcagaagttgagtttgggtggccataactccggccagagtggtcaagtcgggtgtctgagtttcgtcattgctggttgttgcccgacgttggcttgccat

SEQ ID NO: 23053 - DNA, 4480 bp, Oryza sativa
  Clone ID: TF_OsC1528_2280
ttagtcttggcgtggcctgagatcacgcacacccaacaggtgccgtgcagtcgccagcttcgccgccggcagtccctttgtcattgcatctgctcgctgctcctcagaacgaacgaactcaatcagaatctgcccactctcaacacattcacgaatgaaatggtagcgggtatcaatatgcttgctcctcccgtggaacacaggattcttcatcaaggcgatcgccgacttgttgtcaacaaaaagtttcacccgctttgcttcagtacccatcatctcgctcagcaacgccctaagccagagcgcgtgacatgctgctgcagtggccgccatgaactctgcctcgcaagacgagagcgccactgtcttctgcttttgagaacaccaagacaccaagctgctgttcacatagaacgccatgccgccggtgctccgacggtcatccatgtcacctgccaagtcactgtcagtgaaacccgtgatgtccaacgagccactgccgcttgcaaacaccagaccagagtccagcgtcccctttagatatctgagtatcatcttgaccgccttgagatgcatcgttgtcggccgctccatgaacctgctcgccacgccaacggcgtaggacagatccggcctggtgtgtaacaagtatcgcaggcacccgatgacacgccggtactcggtcgcatcaattggatttccatcagcatccttgtgcagcagcgaccgtggctccatggggattgaggtgggattacatccctgcataccaaactgagacagaatcttcttcgcatacgcagcttgcttgatagcaatcccattctccccctgaattacttctatccccagatagtaagagagaagaccgagatcactcatctcaaattcccccatcatctgctgcttgaacatggctatctcatgtggattttctcctgtgacaatcaagtcatcaacatacacaccaacgattacaccagcttgcccctttcctctagtatacacggcctgctcctgcgtgcaccgtgcaaaaccgagttctttcaagcacttgtcgagacgcgtgttccacgcccgcggggcctggcgcaatccatagagcgccttgctcagcctgagcaccaagtgttcttctcctcgtttcacaaaaccctctggctgggctacgtacacttcttcttcaagatcgccattcaagaacgccgatttgacgtcgaggtggtgcacttcccaccgccgatcagctgcgatagccaggatgacacgaactgtgtcaagccgcgccactggcgcgaacacctcttcaaaatccaccccttgacgctgaacatagccctttgcaaccaaacgagccttgtgcttgattacttcgccggcagtgttctttttcagcttgtacacccacttgaggccaatgggtttgtgtcctgccggcaatgcagtgagagcccatgttgaattcttctcaatcgcctgcagctcctgtgccatggcgttctcccatgccggctggccagctgcctcgcggtagctcgatggctcctccatctctgcaagcagcgcgtccccatcgtgttcatcctccaccaggtccacgcggggtgcctcccgcatgatatcttcaagactcctgaaccggacgggaccctcatcgcttctaaggtcgccgccggaacctggtgacgccaccggcccggcagagccggtagcaggtgttgaaggcggtgtagagctcggtgatgactggggcgaagtcggcaatgacgatgacgcccctaccgggcttgccggaggcgattgcgggactgccggggatggcgcccggtaccgcggtactgggtaggccggcgctcctgccggcggtgcatcaactccatcctcctccaccgtgaactcggtagagttttgctcccctgcgactacactccattgccaaggtacattttcttcaaaaatgacatcacgacttacatggatacgcccacaacgcgggtcgaacaggcggtgcgccttgctgcctttttccacgccgagatacacatacggcgcgctccggtcatcaagtttcttctggttgggcgtcgtgatcttggcgtgtgctatgcacccaaacacccgcaggtgtcccagctgcggcttgcgccccgtccatgcctcgaacggggtccgatcgcccatcgccttcgtcggtagccggttgaggagatacaccgcatggcgcaccgcctccccccaaaacctgcccggcactgacatccctttcatcagagatcgtgccatcgccattaccgaacgatttcggcgttccaccaccccgttttgctggggtgagtatggcgccgtcagatgccgctggatgcccgcctgctcgcacaactgcgcgaattcgcccgacaggaattcgccaccgcgatccgatctcagcgtcttgatgcgccgcccggccgtgttctcggccagcggcttgaacttggtgaaagcctctagtgcctggtccttcgttttgatcacgaacatccacatccaccgtgagaaatcatcaacaattagcataaagtaacgattaccggccatagttgtcggggtgatcggtccacataaatcaatgtggagcaactcgagcggctcctccgccctgaagttcgccgttgcgggaaacggctgccttatctgctttgcaaccagacatgcctgacagagctggtttggatgtgtgatcgccgggatgccaccagccatgcccttgtcagccaacagcttcatcgcctggaaattgacatgcccaagccgtgcatgccagagccatgctggctcatccatccttgtcagcaggcacaccggagtggctagcttcagctcgatccggtacagccgattaggggtgcgcctcacccgcataaccagccgcaggggacttttgtcgaacacctcgagcacatcttcatccatcaccactctgtgccccgtttctgtgagctggcccaagctcaccatgttgcaacacagactagggatataaaaaacatcctgcagcagccattgatccccattcttgcaggagaacaggatagaccctttcccctgaattttcacagttgaggcgtccccgaacttgacgctcccggtgattgatacgtctagatctctgaacttagcacgatcacccgtcatgtggttgcttgccccattgtccaggaaccagatgtccccggtggctgctccgctgtcagccaacagcagctgcggccacacacgctcctcgtgtacgaccagcccgctcgccggctcgtcttcggtcaccgccagtaacaatgcagggtttgcgtcgtcggtttgcgcgagatgggcctccaccttcttcttcttgggatgagggcactgggtggagtagtggccgaattcttcgcagttgtagcacttgatgtggctcttgtcacggccaccgccgccagagccaccagcgccactgttccgcggcgcgctgccgcgtccaccacctccaccgtgccctctgccgcgaccgcgtccgccctgggcacggtttcccctgtcgctgggaggtttgtttttctgcggcgaagacgactcgctgccgtccttcctgaaacgcgcctcccactccgcctgagtgagaagtacttgaccgtcggcggtgacaccaccagcggccgccttcttcttgcgaactcgttcttcgtaggccttgagacgacccaccgcctcctcaaatggcatattatcaatctcataaaactgctcaatacctgcgacgaggctgatgaatttctctggcaccgtgtcgaacagcttcttcactatcgcggaatcactcagtgtcgagcccaacaccgagtgacgcacgctcatcgcggtgatgcggcccgcgtactgatccagagtttcccccggctccatcaccatggcaccaaattcacccttcaacgtctgcaggcgcgcttcgcgaacgcggtccgcgcccacgaaccttgtcttcaagcaatcccacacttcctttgccgatctcttctttgccacctgcatcagcaagtcctccgggagggactgcagcagatgggacttcgacttcttgtcccttcttgggtcgacggccaccccggccgccggctcgatggcgtcccacacgccctggtcctccatcattgcctgaacgcgaatgcaccagctggtgtaattcgtcgccgtgagttgtgggtaggagaacgcactccctgagctccccctcgccggatccgctgcggctcccgccggaaccaacgccatggtgtcagatcagccctcaacctgagtgctctgatacccacttgttggcgaagaacaccaatcgaacaccttgtgggcgtcctgtagctatccggcacagcagactgaagaaactttcagggagacagagaattcagagaatgcagagaacaagaacaaaataacttgggagagtatttgggcaactttcggtgtt

SEQ ID NO: 23054 - DNA, 4650 bp, Oryza sativa; identical to SEQ ID NO: 13996
  Clone ID: TF_OsC1528_1947

SEQ ID NO: 23055 - DNA, 3515 bp, Oryza sativa
  Clone ID: TF_OsC1528_2035
atggctgacaaccgttttgtagtcgaacaggctcatgagatacaaaccatagctaaggaactcgaactccttaagtgtgtcttacccgacaaatttgtggccgggtgcattattgcgaaactacctccatcatggagaagtttcggtactgcattcaaacacaagagacaggaatactccattgaggggttgatagcatctcttgatgttgaggagaaagctcgggaaaaagacgccgcgtctaaggatgatgctcaacagaccaccaacttcaagaggcagaagaagaacaacaacaatcctaaccaggatgagaggatttgctttgtgtgtgggcaacctggtcatctggctaggaagtatccacagcgcaaggggatgaaggcacctgcagggcagacttctaagtctgctaatgtgaccattggcaacactggagatggaagcgggtatggtaatttacctactgttttttcagttaatcagtctactaattggtgggttgatactggggccaatgtcgcacggggttccaccttcctaatggcgaatgggtcacatgcttctgttcatggtgttggcacggtagatgtgaagtttacttcgggaaagatcgtgcagctgaggaacgtgcagcatgtcccttctatcaacaggaatcttgttagtggctcccgtctaactagagatggatttaagttggtttttgagtctaataaagtagtcgtgtctaaacatggatattttattagtaaaggttatgagtgcggaggcctgttccgcttttccctttctgatttctgcaataagtctgtgaacaatatttgtggaagtgtggatgatgaggctaatgtttggcactcacgtttatgtcatattaattttggcttgatgtctcggctttccagcatgtgtttaatttctaagttttccattgtcaaaggttctaagtgccatagttgtgtgcaatcgaagcaacctcgcaagcctcacaaggctgccgaggagagaaacttggcaccactagaactcctacattcagatctttgtgaaatgaatgaggtgttgacgaagggtggaaaacaatatttcatgacgttaattgatgatgctactagattttgctatgtgtacttgttgaaaacgaaagacgaggctctagactattttaaaatttataaggcagaagttgaaaatcaacttgacagaaagataaaaaggcttaggtctgatcgtggtggagagtttttctcgaacgagtttgacttattctgtgacgaacatgacatcatacatgagaggactcctccctattctcccgagtctaatgggattgctgaaaggaagaaccgcacactgactgacttggtgaatgccatgttggacaccgcgggacaacctaaggcatggtggggggaggcattgttgaccacgaatcatgtgttaaacagagttcctaacagaaataagaacaaaacaccatatgagatatggattgggagaaaaccatcactttcttatttgcgcacatgggggtgcttggcgaaagtcaatgtaccaataacgaagaagcgcaaacttggacctaagactgtggactgtgtctttctaggatatgctcattacaacattgcctatagatttttaatagttaaattcgaggtacctgacatgcatgttggtacaattatggagtctcgtgatgctacctttttcgagagctttttcccaatgaagatacacatagtggttcgagccaaccctctgaaataattcccagttcaatcacaccaccataacaaactgaacatacacatgaacatgtcactgaggaggatgtcagtgaagctcttcgaaggagtaagagacaaaggacggctaaatcctttggtgatgatttcactgtgtacctcgtggatgacactcctaagtcaatttcagaagcataggcatctcctgatgcagactactggaaggaggctgtccgtagtgaaatggattccattatcgctaactggacttgggaggtgacagagcgaccctatggatgtaaacctgtggggtgcaagtgggtgttcaagaagaagcttaggcctgacggtactattaaaaagtacaaggctcggcttgttgctaagggctatactcagaaagaaggcgaagatttctttgacacttactcacctgttgctagattgaccacaattcgcgtgctactttccctagcagcctcacttggtcttctcgttcatcaaatggacgttaagacagcttttcttaatggagagctagatgagtagatctatatggatcaacctgatgggtttgtagttgaaggtcaagaaggcaaagtgtgcaaattgttgaagtctttgtatggtctgaaacaagatcctaagcaatggcatgagaaatttgacaaaacattgacatctgtaggctttgcagtcaatgaggcagataaatgtgtgtactatcgccatggtgggggtgagggagttattctgtgcttctatgttgacgacatactgatatttgggacaaaccttgaggtgataaatgagattaaatcattcttgtctcaaaattttgatatgaaggatttgggagtagctgatgttatcttaagcattaagctaattagaggtgataatgggattacactcttgcagtcccattatgtggagaagatcttgaatcgctttggctacattgatagtaagccttctccaacaccttatgatcctagcttgttgcttcgcaagaacaagagaattgctaggaattaactggaatactcccaaatcattggctcgctgatgtacctggctagtgcaactaggcctgatatctcctttgctgtgagcaagttgagccggtttacctctaatccgggagatgatcactggcgtgcgcttgagcgagtaatgcattatctgaaaggtactatggaattggggcttcactattctgggtatcctgcggtactggagggatatagtgattctaactggatctctgatgtggatgagatcaaagccactagtggatatgtcttcacactgggtggtggtgctgtttcgtggaggtcttgcaaacataccattttgacgaggtcaaccatggaagcagagctgacggcactggatactgctactgttgaggcaaaatggctgcgtgatctattaatggatctgcctattgttgaaaaaccggtgccggctatccttatgaactgtgacaatcaaacgacatgtgaaaagacgattgaagtctgtcaggaaattgagaaactccggagttataacgttggattacatccaaacagctagaaacctggcagaacccttcacaaagggactatcacgaaatgtgatagacaatgcatcgaaggagatgggtttgagacccattgcattcttgaaagaactcacctttgtaagcttgactgttggtcgcagtctatggagattttgggtgaatcttctaggaagcttactaaagacctaggagta

SEQ ID NO: 23056 - DNA, 5019 bp, Oryza sativa
  Clone ID: TF_OsC359_7926
gatctgtgtgactggcctggctttccacaacgcttcggagccttcctcgacagaaacgctctcctccgaacggtcggatactagagcaattaaactaaatcaacaaaacaatgatgacgtcatgctgacgtcagcaatggcggccggttagggtttgcgagctcgccggagctagggcggtcgaccgggtgattggaggacacctacgcgtagaaaacatcgagacgaacccgatggtactcaccacaacgtctatcgacgaacggtgatggccggcgacgaggaggaaggcggtggcagctcggcttgacggcgacggcggagctccggtggtcggcggcgaaggaggacgggcggccgagcttcctcacctccgtgcgcacaagagacaggaatactccattgaggggttgatagcatctcttgatgttgaggagaaagctcgggaaaaagacgccgcgtctaaggatgatggtgggcagtccagtgccaatgttgtgcacaaggcctagaacaagagcaaggggaaatataaagctcaacagaccaccaacttcaagaggcagaagaagaacaacaacaatcctaaccaggatgagaggatttgctttgtgtgtgggcaacctggtcatctggctaggaagtatccacagcgcaaggggatgaaggcacctattattaggcatagtccaatcggctatgacatcggcgagaacctcggacttgatggctgttcgtggtacaaagtggacgtcaaactggcttagctcgactacccatttcgcaatgcggccgataacgtctttgtttctcatgacttcgccaagagggaaggcggagacaactgtgaccctgtgggcttggaagtggtggtgtagctttcttgacgtcatgattactgcgtagagcagtttttggatctgtgcgtaccttgtcttcgcgtcgtggagagctttgctgacgtaatagactggtctctgtacattttctctttcgacaacaatgacagtactcacagagtagggtgtggcggtaatatagaggaataactcttcattaggttggggagcaacaagtacagggggatttgataggtagcacttgagtgcgatgaacgcttcttaggcttcttgtgtccatacaaatttgtcctgctttttagcagtgcgaagaaatgctgtccttgttctcccatcctaacgacgaacctacttagtgccgccatgcatccggttagcttcagtacctccttgagtcttgtgggcgacttcatgttctcgattgccttgatcttctcggggttcgcttctattcctctgccagagacaaggaacccaagcagtttacccgacggtaccccgaacgtgcacttctcaggattgagcatgaggcgatattgtctgaggttgtcgaaggtttcccgtagatcgtcaatcaatgagtcgcatgtcttggttttgacaacaatgtcatcgacgtaggcctcaacattgttacccagttgatcgctaagtgccccttggaccgtacgctggaaaatatttcctgcggttatcagtccaaacggcatttttacgtagcagaatacaccgaacgatgtgatgaatgttgtcttttcctcgtcctcttttgccatgcttatttggtggtagccggagtaagcgtcaaggaagcttaacagctcacaaccagctgttgagtccactagttggtctattcgagggagagggaagtgatccttggggcacgccttgttgaggtcggtgaagtcgacgcacatcctccacttcccgttggccttccgcaccatgactgggttggctagccactctggatggagtacttctctgatgaaaccagctttgagaagtttatcgagctcttctcgtatggcctgtttctgatctggtgcaaatctccgcagcttttgctttactggcttggcaacgggtcgcaccatgagtttgtactcaatcacctccctagggacccctggcatgtcggacagttgccaagcgaatacgtccgcattatcgcggaggaaggtgatgagcgcgagttctgtcttgtcggggttggcactggagagtggaacgattttaattgcgtcgtctggttttggcatcttagtcgttttgatcattttcttgggtggctcggctgtggcgggtgggctgggcgtgtgctcgaccatgtcgaggctctgcttgtcgcattggaccgccagctttgtgtttccttgaatagagattgttcccttcggctcgggcatcttgagtacctgatacgcgtagtgagatgcggccatgaacttcgcgagtgcagttcttccgatgatggcgttgtatgctgtatcaaactcagcaacatcgaatgttatcttctctgctcgaaagttgctcgcttggccgaaagacacaggaagcgtgatctagcccagtggcttggacgaagactaaggagtgattccatggaagggttgatcggtaggcgtcaactcgtttcgtggaatgcccattgcgtccaaggtgctggcaaagagaaggttgatggagctaccgccatcgacgaagactcgcgctaccttgatattccgaatagtgggttcaaccacgatcggatatcgtcgctgtggaacctccgaagatgtgcgagacatgaagatcggaatctggatacgccgagtccgagtcctgagtggttgcctcagtggccttctcaactacacgtactcgcttgcccttctccaaagccagctgctttgccaacgactttttgaagatgaggcactcctccagagaatgtttgtccgacttgtgtatggggcaccatattctcttcgtatcactgccttgtgggtctgggtgtttgggcgggcgcttgtattcagacacgaggacttccgcttgagctttcctcttcccactcttgccgcttttcttcttgcttgattcgggtgtgtccttggctggcttcttctctcctcccgcctttgactcgtcgttcttgcgtctcactgcgtcgtctgcatgggcgcatcgatcgacaacctcaaacaaacttcgagtcgttgtgattcgccttgttgccaactcctgggtagtatagcgatctctgacaccggttttgaaagcacgaatcacagaagcatcggtgatatcggggatcgtatttctgcactcattaaagcgccgaacaacacgtgtaaatcgtcttcgatcgcgtggcgcttgtaagttccctggaagttagcgacgaattgctaccacaaatctgcccatgaagagatcgagtagggtgggaggtgcatcagccacgaacgcgcagaacctttcaacgccgttggcaaatagtttgctaacgcgttgtcgtctgccccagcagcgtatagtaccgtggagtagacctggaggaattcttcagggtcagtactcccatcgtacttctctattgctccgggtcggaatctctcgggccatcggacatcacgtagagaacggttgaaagctctacacccagtgcagggggcggtgggttgtcggcgattgtgtgtcctccgtggatgtctatcggatgacgaagatgaagatgatgacgatgatgacggtggttcactcggctccggtgtgcgattccgagggcgacgtttaggttctcgagaattctgtcgtcatccaccattgttgtcctagcgccgatccccattatcatcaccgtcatgttgacgccctcgaccagcatcgtctggtgtccgctgttcgcgatcgtcgcggtcgcggcagttgtgacgtcgctcttcgttctcgcgacgttgtgaagaaacacgatgtcgggaatgattctcattgtctcgcgtgcgtcgtgcttctcggcggccattcagatggtcgcggagatcgccggtgctgcgaggtggatgggtagctcatctaggtgacgtccgctgctccggtggttcgccgttggcagcgccagctatcagtcgctcttgttgtgctctggtagcggcttcctcgaacgcgttactgagattggctaccgattcccatagtcgttctatccatcgtgcgagatcatcgttaagaacggggtcatagggagcttctctcagtactgcattgatggtgccgagatgttgggccggcgtgaccgtctggttctccgcccctgcgttagcgtgtgcagacgtgctagtcccaccgatggcaaacatgtcgcgtggtgtactggaagatgatgagccatagtcttcgagcaagtgtaggactgatggctcgtggggatcaatgtcgattactccaacaaatcgatccgaggtcaacgtcgctccttgttccttgtttgtgcccttacgagaggttcctacctgctggaccttaggaagcgtcgttttcatggcgtggagaaagaccttgtagcttgagaagtcgtgattcttcgtcttgtgaataggacaatagacatcatgagttggagaagtacgctggattccacgctctttgcaagcacgaattttagcttgtacgttgagaaaaacccagcaagcttgcaagttgtgcttcctggacttgtggataggataccaggacttttttacctcagaagttgtccttgtcggctcggagttcttgtcggaaggacaaggttcggccacactaggaaccttctcgggctcgtatgacgtcgatgttccattctctgctacggcgggaggatccttagacgcgggatcgtccggggttatagccacggcgttctcgtttccgataattgatggaccagccgagattggcaccgtggtgtaaaccgggaagatgatttcgccaacttgagtccacaccagcattgttcaagtagggactccatgaatggggccggtgctgacgccgttgtcgacgaagcttgatgtcatagtagtagaaccttgagcaccaaagctccctacgtggcgcgccactgtcgacgatgggtacccatagaccggatatagagggtattggggtacactggtacgatgat

SEQ ID NO: 23057 - DNA, 3092 bp, Oryza sativa
  Clone ID: TF_OsC1713_4658
atgtctcctctcgcccttcggcatttccttgtgaaatggtttttaaaattctcctccctgtccctctaattcttttagctgtcaaacctgaaggacaagccatcagctttgtgcatgtttggaagtcaagtcaagctaagcctcaagcttcgtgcaaagagcgagacagatggtcagcatgagggacaatttcatcgaatcaggaccctgtcagtttcatggggcaactcagtgcaattctaatagtattccacatcagcctcttgaagatcagcctcaaccccaagtcatggctaatcaaactcaaacagtggaagagttgttacaacagatgcgacgtcggtaccaaatataccagatgcaacggcaatgtcaggagtcgcgtcaatgtcaccaaccgcaggtgcaagtccagatgccagcccagaacccgaatcagagtcagagtcaggagttcccaatattggcaccgaagaccctctagtcccaatcctccttccagtccccttctcctggaaaagacatgagttctcatcaaatgcaacaatgcacttgaattggtcaatagccgagctaaccgagagaaggttaaccgttagggatatagctttaccatcctccatagctgcattagcctgaggtgcacctcggcctctaccatgatctccaatgcgacctccacggtcacctcctctaccaccatggcttcctccaaagccaccatgatttccaccaaatccaccataccatcctcgcattgatcccctaccaccactgtttcggggagtgggacaattgcagctcacatgacccacttggccacaattgtagcattccctatcatcagctacaatgtatgctgatcccataggatttgtacccctcatcaattttaacctcatttcctcctgtaccatggctgaaatggcctcttccatagtaggcaaagtagcctggtgaaacatagctgctcttctatcctcaaactcattgttcagccccttgttttgagcctcaaccatcatcattacacttccctcttctgagtacatgctgctcaatgttttccatacaactgctgcattttgaatggtttctagcatccgagcaatagatggagccaccgaattcctcaaccatgacaccacggttgaatttgtagtattccacatcctccaagctgaactttccttatcagcaggctctttataatcctcctgcaaaaaatgatccaccccttttgccctcaacattagttgggccctccttgaccaactcaaacaattcttacttccttccaatctcaattcatttggcatcaattctagtttcaattcggctgatcctccacctctagtacctatcattcccaactttactagatcctccaacaaatctttcatctcatcctttatgacaagggatgatgaagcaatcactacttctttttcctgacttcccacaacaccttccccttgcatggtaggatccatttcttcctcacaacagagtattgaaccggaccaggcttcaggcccctcatctgcatttgggttctgtggaacaattgacatgacgtcatctttagaaattcgaccttgtccatgggcaatgccatgaggaggtgcattgatgaggctggccttgacaactgatgttgggaaattcaacaagttaatcattttcctccagtgtgtaacgatggaattgcactcactgttaatacgactttggtagtgttcctccattgcatggcatacatgtttaaggaagtgtctcccattcaaatcaaaatcaacatttttaccaagcttagcaaaaatagctgacacctccccatcactgcataaatgatgtacaattattcctttgcgaccaagaaaagcaatatcatctgctctacacagaaggaaagacatgaaagcagaatatgcagtcacatcatttccaaactggggacatgtctgctcaaatgcaattaagttcctaaaatgggagacggtgctctgatcaacaaacaaataaggaaccatcaaagtaccattgtcaaagctaatatctaacagagaatggggattattcctatcaaatgactttttcttgaattgaactccagcttgatggtattgcactgcccgacggccacgaatacgtggatggtgatcctgaaagcagttaagcaaaggatctggtgacatatcgtgattgctatcggcaagcttacgtccaattttcaaatacctatagcatatattagcgaaagaatgaaaatatcttcctctctccaggtattgtgaaccctcaaccagctttttactaggcttgaggtacatctggaacaaatgcagcatatgatggaaatctttaggccgatgtgcttcctggattgctcttggatggtattgtatgaagttctccaacgattgagctactttgtctgtgagaaatgaaataggcctctcatttccagcaaaaagttcatatatcctcctaacaataaagaaaggaatttggttctctagtagcatcaggtcttgttcaatacagctgtcaaaccaggttccaatttgccaattattacattgagaagattcaagttcctcagtgtgatcaaagtcagttccttgactagtaacttcccgacttgaaccagcaaggacaagttctctctgtgtgcagatagagttatccctgctgcattgctcaccaaaattaccttgacttgtagtgcttttgtgtattgttctttccattataatgtccgaactgtcagcactacatatatttgcacccaaagtggatggaagtattccctctaaacctctgaaatggtgaacaaaaaggcaagaatcaaggagtagcatctgcagaaatttgtcatgttgcatgtcaatgtcttcatagcatgcccgtgcttcctcctctaaatctttgaccaaatttaggtagtcctccaactttatttcacgattcagtttaagaaaaagatcaaggcaattccatttttccttctcaaaggctagcaagtacgacaatccatggtggtatggaccaattgataacataattggctcataagccccatgatccat

SEQ ID NO: 23058 - DNA, 3954 bp, Oryza sativa
  Clone ID: TF_OsC97167_1
caattcatgcatatagaagaatttaggcgatatatgttttgtgagactcgtcttcacataacccgtttgtatttgtgcaacacaagctgaattatcttcataaataatggttggagttggtgtgatattcagcccacatctattcagtacatgttgtatcaccctcctcaaccacatgcattccttgctcgcttcaaataatgctataatctccgagtgatttgttgatgtcgcgaccatcgtctgcttcgtcgacttccatgagatggctgtaccaccacagagaaacacatacccagtctgtgacaatgctttatgggggtctgacaaatatccagcattagcatatcccgccatggtcaaatcgatatcttgtgtgccacgtaaataacggaagatttgcttaatgccattccaatgccgtttggtaggaaccgaactgaaccttgcaagtaggttaacagcaaatgcaatatcaggcctggtaccattcgcgagatacattaaagctccaatggcgcttaaatatggacattcaggtcccaataattcgtcgttattttcctgtggtctaaatgggtcactctctactgctagagatcttactaccatgggggttctcgtcggatatgaatccttcatattaaatttctccaatatcttctggatatatgcagactggtgtaacaataccccttcatgagtgtgctcaagctgcagacctaagcaatatttagtcttacagggacagtcatcattcttgatgaatccttttccttctaggaattcactgagccggttgtaccacatcctaccggattgttttaacccatacaatgatgtttgcaatttaacactgtatatgttgcattttgtttcttcaggaacttgaatcccatcgggaactttcatatagatttcagaatccaatgacccatataaatatgcggtcactacatccatcaactgcatttctaagttcaaattgactgccatagatattaagaaccggaatgtaattccatccattaaaggtgaataggtttcatcgaaatcgatgccaggtctctgcgtaaacccttgtgctactaatctcgctttataccgaactacctggttgttctcatcccgttttcggacgaacacccatttatatcctacaggggatatccctacgggggtacgatcaacaggaccgaatacttttcttttattgagcgagattaactctgcctttattgcttctttccatttgacccagtctgaacgctttttgcattctgccatggactttggttctggatccagatcaatgatcttagcgatcttttcggcaaagtatatgtcgacaatagtagtctctctattgtatgtttcacctgtatccacataactggtggatatttcctctattctttcacattcctgatcttcattgtttcccgcaatgtttaagtcaggaatttccggtctcccagtgctagtagtaattgcgcgcgcattctcactgggttcattgccatccgggcatatcactgcaggtggctcatctacctggtgagctccttcactattctctggtgctgtggtattctatccaatctgttgtttcataggacgtctcctagaaactttagtttggttgtgtgcaaccggtggtctccccctcttcctagaagttggggtagatgtagaaattaatttgaaaaccggttcctctgcgtcatgaggtatttctactctttccggtgcattcacaacaggtatatgagatttcatgatcccctttgggttagtgaaggcttctggcagattattttcaattctttgcaaatcaattatggtctgaacttcctggtcagattccttagtacgtggatctaaatgtaggagatttttagtttcccactcaatttcgcggcattcgaccttctgtaggtactttcctccccctaatgccgggaaatgatcttccttaaatatacaatcagcgtatcgacccatatgtaggtctcctgtcaatggttctaaaaatttaatgatagacggagattcaaatcctacatagattcccaattttctatgaggacccattgacgtacgcttaggtggcggtataggggcgtatacagcgcatccaaatttgcgcagatgggaaatatttggtgcatatccacgtgtaagctgcataggggatacagcattgtatgcagtaggtctgatttgaagtaacgccgctgcatgcaaaacagcgtgtccccaacatgtagttggtaggttgctatgcagtagcaatggcctagcgataagcttaatcctcttaattaatgattcggcgagaccattctgagtgtggacgtgtggtacagaatgttccactttaattcccaaagccatgcaatattcattaaataccttagaggtaaactccccggcattgtccattctaatggattgtatccggttatccgggaaacggaatgatccggacatgggattaattggtccacatatgtctccctgtattcgttgcaagaatactggtgattctgcgttcacctttagattagagggtctaacgattaatttccctgttgcacaatcagtgcaaacaaaatcttcttggtttgggaaatcgttagttcgtaaattatggccatttgaagttgagatgattcttctcatcatccctagacctggatgtcctaacctgtcatgccatattctgtatgactcaggatttttaaatattgttttcagtgcaacattttcgggttttatatgagtgtagtataggccagatttcaaggaagggagtttttcaacaacagtcttacgatttccgtctaatttcgttatgagaagaaattcgagtttattctcatctttggtttctacatgataaccattagcacggatatctttaaagcttagtagagtacgactggactctggatataacagagcattatttataatgatcttggtaccatgtgggagaactactgttgctcgtcccactccaacgatgtgtgcattgcttccggcaatagtagcgatttgaccagtatgcttgtcgatatgcatggcagccatcttctcctctgagtgctggatctcaacagtgaagtgtgactcatgctctgacttcttcttcccgtgcttctcttgataaagctcaatgagatgcttaggggtgcggcaaatgcgagaccagtgtcccctagtgccacacttgaagcatacctgatcttgctttccatattcaccactagtagagcctttcttagacttactgtgatttcctttcttcttgaaagacatcttgttaactttaccaccatttttccagaaattcttccctttgttctggttattttggttttcccccttcttaaaggagctagcatttgcttcgggtgttgctgaactttcattggggcgagacgtatgattttcaacaagtgtctcatcttctccttgcacttccatgagcacggagaccagttcagaatacttctcgtatttagcctggcggtattgcctctgaatattcacatgattggcatggaaggtggacaaagttttgtctatcatgtcagcatcagtgattttctctccacatagcttaagaaaagtgacaatgcggtgaagaactgagttatattgctccatatatttgtaatcctggaaacgtaagtgaagccactcacgttttgcttttgggagcaaagcctttacttgatggccatagcgatccttcagtgagtcccaaaggaccttcggatcttcctcagtcatatactcattcttgagagtagtattcaaatggtgcctcaggaaatgcagtgcctgatttttctcggctgaagttggtaaattattaactcctccagctgatgttgcaatagttgggtcctgaatgcagttcaggagtttcttagcaccaagcat

SEQ ID NO: 23059 - DNA, 4230 bp, Oryza sativa
  Clone ID: TF_OsC1528_1805
ttaattctgccgtgaccctagtgaacgaacaccaagaaggtgtctcgccgtcaccagcttcgccgccggcaatcctttcgtcagtgcatccgctcgctgctcctcagtccggacgaactccacaacaatttgcccgccatccacacactcccgtatgaagtgataacgggtgtcaatatgcttacttctcccatgaaacaccgggttcttcatcaatgcaattgctgacctattgtcgacgaagagcttcactgctttctcctccactcccgccacttctgctagcaacaatcttaaccagagcgcttgacaggccgccgtcgtggctgccatgaactcggcttcacacgacgatagtgccacagttttctgcttttgcgagctccacgccaccagactctgattgatgtagaacgccattccaccagtgctgcgccgatcatccaagtccccggcgaggtcactgtcagtataccctgtaatcttcagtgccccagtgcctgcagcatacacgagaccataatccatcgttcccttgatgtatctgagaatttgcttcacagccttgaaatgcatcacggttggcctctccatgaacctgcttgccaccccgacagcatatgacagatccggcctcgtgtgaagcaaataccgaagactaccgatgatccgccgatactcagttgcatccaccgggtgaccttctggatccttgctcagctgcgatctcggatcgattggaattgaaactgagttgcactccatcatcccaaactgagacagtaatttcttggcatatgcagtctgtttcaatgtggtagcactctcatcctgatcaacctctatcccgagataatatgtgagcaaaccgagatcactcatctcaaactcccccatcatttgttccttgaaaaccttcaattcagagggattttctccggtgacaatgagatcatcaacgtaaacgccgacaattatgccatcacttcctctgcctcgggtgtatactgcctgctcctgcgtacaccgatcaaagccgagctccctcaagcttctgtccaggcgtatattccaggctcgcggtgcctgccggagtccatacaatgccttatgcagcttgagcacaagatgctcttttcctgatctagcaaacccttccggttgtgcaacatacacctcttcttcaagttcaccattaaggaatgccgatttgacatcaagatgatgaacctgccagcggcgatcagccgccactgcaagcacaacacgaacggtatcaagcctcgctaccggagcaaacacctcttcaaaatcgaccccttgtttctgcacatatccttttgcaaccaaccgtgccttgtgcttgattatctcccctgccgtgttcttcttgagcttatacacccatttcagcccaatcgctcggtgcccggctggcaacatggccaactcccacgttttgttcttctcgattgcctccatctccctctgcattgcttcttcccacgcaggttggccggcagcttctcgatagcttgatggctcttctgactcagctaggagcgcctctccatcacattcgtcctccaccaaatccacacgcggggcctcacgcaggacatctgccagcgatctataccgcctaggcccatcatctgtatcgatgttgtcatctgtgcccggtgacggcaccaccccggcagagtttgtcgatggagaaccgggcgtgggcgttccaggcagagtcggtgatgctgccaccgggcttgccggtgacggtacttcttctgccgccaccactgcttccttcccggcgcgcctgccaggagacggtgcctggtacggcggtaccacgccggccgctgttgccgggctcggcagctgctcaccaggctcctcctccatcgcgaaatccgttggctcctgtcctgcagctgatgtccactcccaaggtacattttcctcaaatacaacgtcacgacttacatgtatgcgcccacgacgcggatcgaacagacgatgagccttgctcccttcctccacaccgagatacacgtacggtgcactcctgtcgtccagcttcttgaggtgcggctgcgtgtttttcgcgtgtgccgtgcagccgaacaccttgagatgtcccagctgtggcttcctccccgtccatgcctcgaacggagtacgatcacccattgccttcgtcgggagccggttaaggagatgcaccgcgtgacgcaccgcctccccccaaaacctgcccggtacgcgcatccccttcagtagtgagcgtgccatggccatcaccgtgcggttgcgcctctccaccaccccgttttgctggggcgagtacggcgctgtcaggtgacgttgaatccccgcctcctcgcacacctgtgcaaactcgcctgacaggaattcaccaccccggtctgaccgcaacgtcttcacgcgccgcccagccgtgttctcggccagtggcttgaactttacgaaagcatcgagcgattgatccttcgtcttgagtacgaacacccatatccaccgggaataatcatcaactataagaaaaaaatagcgattaccagacatcgtattcggtgtaatcgggccgcacagatctatgtgcagcagctcgagcggctcctccgccctgaagtgcgccgccgccgggaacggcgccctggcctgtttcgccaccaggcaagattggcacagctgattcgggtggacgattgccggaacacccccgccatctccttgtccaccagcagtttcattgcttgaaaatttacgtgtcccagccgcgcatgccacagccaagccgggtcgtcgaggcttcatcaccagccgccatggacttttgtcgaacacttcgagtacatcctcatccatgaccacgcgatgcccggtctctgttagttggcccaaactcaccatgttacattgcagactggggatgtagtagacgtcctgtagcagccattgatcatcgttcttgcatgaaaaaagaatcgaccccttccccttgatctgcactgtggaagcgtcgccgaacttcacccgtccggtgatcgactcgtccagctcccggaatttgcttcgatcgccggtcatgtggttgctggccccgttgtccaggaaccagacatcgccagcatgtccaccagcgtctgccagcagcagcttgggccacacgcgctgctcgcgtacgaccaagccgcacgacgcgcgctctggcacatcctccgtcaccgcaagcaacagggcaggcccggcgtcctccgtctgtgcaagatgtgcttctcccttcttcttcttcggatgtgggcattggttagagtagtgcccgtactcctcgcaattgaagcacttgatgtgactcttgtcacggccaccgccgccagagcctgcacctgagtcgccccgcggcgtcccgccgcgtccgcctgcgccacggcctctgccgcgaccgcgaccgccctggccgcgcccagcaccttcacctgaaggtttgttcttctgtggtggcgaggattccccgccgttcttcttgaagtgagcttcccactccgcttgagtgaggagcacctgcccgtcggtggtgaccccgccggcggcagccttcttcttccgcatgcgctcctcgtaggccttcagtcgacccactgcctcctcaaatggcatagtatcaatgtcataaaattgctcaatacctgcgacgaggctgacgaatttttccggcaccgtgtcgaacagcttcttcaccatcgcggaatcacccagcgtcgagcccaacgccgagtgacgcacgctcatcgcggtgatgcggcccgcgtactgatccagagtttcccctggctccatcaccatggcaccaaattcacccttcaacgtctgcaagcgcgcttcgcgaacgcggtccgcgcccacgaaccttgtcttcaagcaatcccacacttccttcgccgatctcttcttcgccacctgcatcagcaagtcctccggctgggactgcaacagatgggacctcgccttcttgtcccttcttgggtcgacggccaccccggccgccggctcgatggcgtcccagacaccctggtcctccatcatcgcctgaacccgaatgcaccagctggtgtagttcgttgccgtgagttgtgggtaggagaaagcactccccgagctccccctcgccggatccgctcccgctcccgccggaaccaacgccat

SEQ ID NO: 23060 - DNA, 4302 bp, Oryza sativa
  Clone ID: TF_OsC1528_1995
ttaattctgccgtggccctagtgaacgaacaccaagaaggtgtctcgccgtcgccagcttcgccgccggcaatcctttcgtcagtgcatccgcccgctgctcctcagtccggacgaactccacaacaatttgcccgccatccacacactcccgtatgaagtgataacgggtgtcaatatgcttacttctcccatgaaacaccgggttcttcatcaatgcaattgctgacctattgtcgacgaagagcttcactgctttctcctccactcccgccacttctgctagcaacactcttaaccagagcgcttgacaggccgccgtcgtggctgccatgaactcggcttcacacgacgatagtgccacagttttctgcttttgcgagctccacgccaccagactctgattgatgtagaacgccattccaccagtgctgcgccgatcatccaagtccccggcgaggtcactgtcagtataccctgtaatcttcagtgccctagtgcctgcagcatacacgagaccataatccatcgttcccttgatgtatctgagaatttgcttcacagccttgaaatgcatcacggttggcctctccatgaacctgcttgccaccccgacaacatatgacagatccggcctcgtgtgaagcaaataccgaagactaccgatgatccgccgatactcagttgcatccaccgggtgaccttctggatccttgctcagctgcgatctcggatcgattggaattgaaactgagttgcactccatcatcccaaactgagacagtaatttcttggcatatgcagtctgtttcaatgtggtagcactctcatcttgatcaacctctatcccgagataatatgtgagcaaaccgagatcactcatctcaaactcccccatcatttgttccttgaaaaccttcaattcagagggattttctccggtgacaatgagatcatcaacgtaaacgccgacaattatgccatcacttcctctgcctcgggtgtatactgcctgctcctgcgtacaccgatcaaagccgagctccctcaagcttctgtccaggcgtatattccaggctcgcagtgcctgccggagtccatacaatgccttatgcagcttgagcacaagatgctcttttcctgatctagcaaacccttccggttgtgcaacatacacctcttcttcaagttcaccattaaggaatgccgatttgacatcaagatgatgaacctgccagcggcgatcagccgccactgcaagcacaacacgaacggtatcaagcctcgctaccggagcaaacacctcttcaaaatcgaccccttgtttctgcacatatccttttgcaaccaaccgtgccttgtgcttgattatctcccctgtcgtgttcttcttgagcttatacacccatttcagcccaatcgctcggtgcccggctggcaacatggccaactcccatgttttgttcttctcgattgcctccatctccctctgcattgcttcttcccacgcaggttggccggcagcttctcgatagcttgatggctcttctgactcagctaggagcgcctctccatcacattcgtcctccaccaaatccacacgcggggcctcacgtaggacatctgccagcgatctataccgcctaggcccatcatctgtatcgatgttgtcatctgtgcccggtgacggcaccaccccggcagagtttgtcgatggagaaccgggcgtgggcgttccaggcagagtcggtgatgctgccaccgggcttgccggtgacggtacttcttctgccgccaccactgcttccttcccggcgcgcctgccaggagacggtgcctggtacgacggtaccacgccggccgctgttgccgggctcggcagctgctcaccaggctcctcctccatcgtgaaatccgttggctcctgtcctgcaactgatgtccactcccaaggtacattttcctcaaatacaacgtcacgacttacatgtatgcgcccacgacgcggatcgaacagacgatgagccttgctcccttcctccacaccgagatacacgtacggtgcactcctgtcgtccagcttcttgaggtgcggctgcgtgtttttcgcgtgtgccgtgcagccgaacaccttgagatgtcccagctgtggcttcctccccgtccatgcctcgaacggagtacgatcacccattgccttcgtcgggagccggttaaggagatgcaccgcgtgacgcaccgcctccccccaaaacctgcccggtacgcgcatccccttcagtagtgagcgtgccatggccatcaccgtgcggttgcgcctctccaccgccccgttttgctggggcgagtacggcgctgtcaggtgacgttgaatccccgcctcctcgcacacctgtgcaaactcgcctgacaggaattcaccaccccggtctgaccgcaacgtcttcacgcgccgcccagccgtgttctcggccagtggcttgaactttacgaaagcatcgagcgattgatccttcgtcttgagtacgaacacccacatccaccgggaataatcatcaactataagaaaaaaatagcgattaccagacatcgtactcggtgtaatcgggccgcacagatctatgtgcagcagctcgagcggctcctccgccctgaagtgcgccgccgccgggaacggcgccctggcctgtttcgccaccaggcaagattggcacagctgattcgggtggacgattgccggaacaccccccgccatctccttgtccaccagcagtttcattgcttgaaaatttacgtgtcccagccgcgcatgccacagccaagccgggtcgtcgaggctggacagcagggacacgggatgcgccagcttcaactcaattcggtaaagacgatttacagtgcgcctcaccttcatcaccagccgccatggacttttgtcgaacacttcgagtacatcctcatccatgaccacgcgatgcccggtctctgttagttggcccaaactcaccatgttacattgcagactggggatgtagtagacgtcctgtagcagccattgatcaccgttcttgcatgaaaaaagaatcgaccccttccccttgatctgcactgtggaagcgtcgccgaacttcacccgtccggtgatcgactcgtccagctcccggaatttgcttcgatcgccggtcatgtggttgctggccccattgtccaggaaccagacatcgccagcatgtccaccagcgtctaccagtagcagcttgggccacacgcgctgctcgcgtacgaccaatccgcacgacgcgcgctctggcacatcctccgtcatcgcaagcaacagggcaggcccggcgtcctccgtctgtgcaagatgtgcttctcccttcttcttcttcggatgtgggcattggttagagtagtgcccgtactcctcgcaattgaagcacttgatgtgactcttgtcacggccaccgccgccagagcctgcacctgagtcgccccgcggcgtcccaccgcgtccgcctgcgccacggcctctgccgcgaccgcgaccgccctggccgcgcccagcaccttcacctgaaggtttgttcttctgtggtggcgaggattccccgccgttcttcttgaagtgagcttcccactccgcttgagtgaggagcacctgcccatcggtggtgaccccgccagcggcagccttcttcttccgcatgcgctcctcgtaggccttcggtcgacccactgcctcctcaaatggcatagtatcaatgtcataaaattgctcaatacctgcgacgaggctgacgaatttttccggcaccgtgtcgaacagcttcttcaccatcgcggaatcacccagcgtcgagcccaacgccgagtgacgcacgctcatcgcggtgatgcggcccgcgtactgatccagagtttcccctggctccatcaccatggcaccaaattcacccttcaacgtctgcaagcgcgcttcgcgaacgcggtccgcgcccacgaaccttgtcttcaagcaatcccacacttccttcgccgatctcttctttgccacctgcatcagcaagtcctccggcagggactgcaacagatgggacctcgccttcttgtcccttcttgggtcgacggccaccccggccgccggctcgatggcgtcccagacaccctggtcctccatcatcgcctgaacccgaatgcaccagctggtgtagttcgttgccgtgagttgtgggtaggagaaagcactccccgagctctccctcgccggatccgctcccgctcccgccggaaccaacgccat

SEQ ID NO: 23061 - DNA, 1101 bp, Oryza sativa
  Clone ID: TF_OsC359_6150
gaaccgtttttccgtgtttttccccccaaaagcgggagaaacccgtcatgtcgccagctcgtgtgccactatatgcgttcattgcgaggaagaccatccacccgacaggtgtccaacgagcaggatcacttgtttcttttgtgaaggaactgatcatgtaccaaaagattgtcaattcagttttctgctgacgaagaagatggctaaccaacccgccagttccaacggagagaagcatcaaggcaacaccaatcctcgccaagattacagtttcagcctaactccagtgccaggacagaggaatcaaaatgagaaaagaaaatgccgagtccgggaagatatctgttgcttcaattgtcaaggaatgggtcatttcgccgacaagtgcccaaaaccgagaaacataactgccagcacgtcagtccacgcaactccctgcaatctgaagcttgctcctcagcgaattgtcatccatgcatcccgaagcagtcctatagcccgcgttgcaacagctccaactccagcgagtgcattaccacaaggtgtcaatgctcactttcagccccagcaaagaattgtcgtcgatggaagaagttgtgtctctccccgacctactccaggccaagcaaagggcaatcgacctccggagggcgataccaagcagaagaccgtcatccgcttcaaccagcaatcagaaggaagcttctcctgtgaatgatagcaatatgcagtcctatcacatcatcacagaaccaatcaaggatgcagtcactagaacaatgccagctgcaaggagtgaaatcttcaactcggtatcagatgctacacggagtgaaaagtgcaagccccggttaccaggttgactccgaagatatgaatcatgagaagttctggaacggaagcatcattgaactaccgcaacctagtctgagtcagccaaaaggtgcaccctggtccaagtcaggtgaagagaagattccatccgcaacaggaggtcaagccaagcagttccgagtggtgaagttttgctggaagtttgtcaagacgcaacggaagaagtcagacaagaagagaagaccgcccaacctatcttcttgctag

SEQ ID NO: 23062 - DNA, 4822 bp, Oryza sativa
  Clone ID: TF_OsC1713_5144
ttaccagttttcgaataggtgcaggtattccgtcctcaagaattcttcgctttcccaggtggcttcgtcctcagtgtgattactccattgtaccttgtacatacgccacactttgctcctagtcctcttttcggcttcatccaatatccggaccgggtgttctggatacgtgagatcattgctaatgtgaatctcttccagcggagcttgttcctccggcactcgtaagcacttctttaattgagacacacggaagactgggtgtacatcggcgatattttctggtagctgtaactgatatgcgacttctcctcgtctagccatgacttggaaaggtcccacatatcttggcgctagtttctctttgaccttaaacctttttgtgcctctcatcggagaaaccttcagacaaacataatctccttccttgaattccaggtttcttcttcgggtgtcagcgtgactcttttgtcgtgattgtgccacctttaaatggtcacggatcaggctaaccttttcttcggcctctttgataatgtcaggtccaaataccgcccgttctaccgtctgatttgttctctttgtctggccatctgtctgtggatgataagctgtgctaaaagcaagataacttcttagggcttcatgtactttttcccagaaatgcgaggtaaactgtgtgcctcgatcggatataattctcttaggcacaccatgaagacacactatcctggtcatgtacaactcggcgagtttggcaccgctatagtttgtcttgacagggatgaatcttgccgtcttggtgagtcgatccacaatcacccagatggaatcatatcctgttgcggtcttgggcaacccaactataaaatccatacctatttcatcccatttccattcgggaattctaaggggttgcaacaaacctgctggtctctggtgctcagccttcaccttctggcatacgtcatagagcgctacgtattctgccacatctctcttcatgttgggccaccagtatccttccttcagatcctggtacatttcagtacttccggggtgcaatgaatatgccgattcgtgagcttcctttaggattaatcctctcagtccaccctgttcgagtacaaagattcgctttttataccataggacatctttctcatcggtcgaaaattcctttgcaaaccctgcagctaagcgttctttcacctcttggatttctctgttctccctctgggcttcttctatttgggttctcaaaagaggtcgaatgtccagggtgtttatccgcccacgaagtactatatgcaggtttagctgggctatttcctctttaagctcaggagccatctcttccattctcagatgattgcaatgactcttacgactcaaagcgtcggccacaacgtttgccttgcctgggtgatagtgaacctctagatcatagtccttgattaattccaaccatcgcctttgcctcaagttgagatctgactgggtgaaaatatacttcagactcttgtggtcagtgtagatatcgcaatggtttccaatcaaatagtgtctccaaatctttagtgcatgaaccacagctgctagttctaggtcatgggtagggtaattttcctcgtgtggtcgcagttgtcgcgatgcataggccacaacctttccgtcctgcatcagtactcctcctagtccttgccttgatgcatcacaatatataacaaagtctttcctattgtcggggagaactagaataggcgcagaggtcaacttttctttgagctgctcaaagctctccttgcactgttctgaccacacaaactccttttcctttttgagtagttgcgtcattggtcgagctatcttagagaatccctcaatgaaccttcggtagtatccggccaaacctagaaaactccgaatctcggtcacagatttaggtgccttccattccgtaacagcctccactttagcaggatccactgctactccaccggctgagatcacatggcctagaaaggcgacttcctttaaccagaactcacatttactaaattttgcatataacttatgcttccgaagtttctcgagtaccaaacgcaagtgctccgcatgctcttctgtgaactcatacaatccatagcgtgttgagaacgcggttttgggtatatccccagtcctaattttcagttggtggtatcctgatcgaaggtcgatcttagagaacaccttagctcctttaagttggtcgaagagatcatcaatccgtggtagtggatacttgtttttgatagttacttcgttcagtgaacggtagtttacacacattctcatgctaccatcttttttcttgacgaataacactggggctccccaaggtgacgaactggggcatacaaatcccttctcttgcaactctctgatttgctttttaagttcctccaactcattgactggcatccgatatggtctcttggatatgggagcagttccgggtatcaggtcaataatgaactctatgtcacgatctggtggcattccaggtaaatcttctggaaacacatcgggcaatcgctgcactatgggcattcccttcatgggtagcatggtgaatatgcctccggcacgttcggccagtctaggatcttgatccatagttgctcttatatccgatccccagggtgtggtcagggtaacttctctacgtctacagtcgattactcctctgttctttgttaaccaatccatacccaatatgacatccagggtctgaggtatcacaactataaggttggagggaaacaccacatccctaaggcgaataggtatgttgatgcaagcatgacttacggttatctcgcccccaggggagtgtactatcataggctttctaagtcccactagggttaagttgtgcttttgactagcctccagggatatgaatgaatgcgatgcaccagaatcgaacagaactttaaccgggctagaattgatagagaacatacccattagtacgcccttatcttcctgggcctcttcagctcggacatggttcacttgtccgcgtccaaatccggtagcggtcctgttagtctgcggagtcttgaatagacctcgtccgacagcaggggtagcagttccacgaacagtcattgcattagcgccagtacggacaggagttttgcgtggatgtgggcaggtgttggcataatgcccatactccccgcagttgaagcagtccacattcttcttgactccaggggcagccagggttggtgtaggggtgcggttctgaaccgcaactggcctattgaaattgctaggcgcagcgggacggttggttgccacaatagtgggcttccgtccagacgaagtggcccccttgagtcgctgaggtactccctgaggcgggcgattcatagcaagcctcctcttgcggttgtgctctacagtcctttgatcattctccaacttgtcgatcttttcctcttcatctgcgaggtctccgattgcgtagcgggccaactgagtgaaccggttcagatattcttgcaccgttgtgtttccttgtcgcagccttctgaactcgttcttcttcatgcgcatcaccgcggcaggcacgaagttctcacgaaaagctgcagtgaattcttcccaagtgggttctccagcatcttcttctcgagcttccttgtaagtatcccaccaatcaccagctggtccctccagttggtttactgcgaagatcactttgtcggcttcgcgcatccggacaagggtcagtttcttctttatgttgcgtagccaatcttctgcccccataggctcgtctgccgtagcgaaagtgggtggcttagtcctcataaactctccaaagctcgatcctccgcggttgccttgattgtttgcaatagcttgcagaagttgggtttgagtggccataactccggccagggtggttaggtcgggtacttgagtttcttcattgctggttgacgccctatgtcggcttgccatctctggatctggcttgggcttcttgcccggaggtcgtgtgctcttgcgagcagtgctgagggtatgagggcctccgacaaaggtgatgcggtggacaggagtctcatcctctgaaggatcagtgatgtccggctctatctctggctcagtgtcggtcccctctgtctgaagctgtgccttcagtgagtctatctcactgccccaagcctggtgctcctcctctagctgaagctgctgcactgtgaggttagtcacctcagtctctaactctcccacacgtctctgctggtcgtcaatctctaacagagcctcctcgtagaagtcgtctactgcctcagcccatcgggacagtcgagtcactatcgggttgtagcagcaaggtgtgtcctggactgtgcagacggagttgctctcctcttgaaacgggtggtgagcaaactcggtactcgctaactcagctcgttgaatagagctaagtcggaggaaggcctcccgggctgcatcctgcatcgcggtctccggtaagtcgtgacggtggcgtgtcggaaagctgtagtctgactctaaaggaactcgtgtatgaacctcaacccgagcctcccaaacgggtccacaccatctcactcggtagatcggaaatctggggtaccgtaggcgcctcatcaaccggtgtagctcaatgacgtatccctctgagcggggtacgcccatctcccagtggtggtgaatcctgatctgccatctttccatctagagggtgcaaacttgttagattcctcgtgccgaattcctcagcccg

SEQ ID NO: 23063 - DNA, 5044 bp, Oryza sativa
  Clone ID: TF_OsC359_6360
ttattctgcacttgtgggtgtgtcttgttgagtacggtggttgtacttagtcttgctcaatttttcccaaacccagaagaggagcccctcgatgatgaaggctttggtgtctagctcgtgcctgccgtcaagcgcctgtggtagtcgccctagtcttccgctgtttctcgtttgtctctgtgtgtgctgggccttcgctgcccatatggccggcagcgtcagccgtcgtggtttggacatgactggcttcgtcttggagctacggggcatgtgcgttgtcctggggtatccgcctggagtggactaccaggccaggccgcttccggagcaggagggtgacgatgcagagccccacgctgcgtgggaggttactgcagtgatcctcactggctctcccgagcggacttcgctggcagtcaccgcgggtggagattccttccccgccgcttgccagaacgccgctctcctcgccatcggcactcttcaccagcgctacccggacgagttgcagcactcgccctaccgctaccaccctcgctgcggaggagcccgcgacttcgccaccttccgggatgctagctcggaggatgacgctaccatcgtgcacctggcgcgcatggtggaggcgtacgacgcggctcgtatcgacttccaacagatggtgcgccgtgggatggtcgagaacaacatgaagatcctggagctgcgtcaggagaatctgcagctgaagaaggacctacacgcgttggaggcgcagctgtgtcagcttaaggtcgcccagggtgagatggtgatgaccaggagaagtgctaataccggtgatggcaaccaacctgagggcagcaaccacaacaaccatggcagcccacccccacctcctcctccgcctccaccaccaccaccagataccaacgctattctcacccaaatcctcgcccagcaggccaacatgatgactgctttcctccaccacctccaaaatccgccacaacataatgctccaccaccacctccccaacactcaaaactcgctgagttcctccgcatccgcccacctaccttctccagctccaacaaccccgtggatgcgttggattggttgcatgccgtggggaaaaagctagacactgtgcagtgcagcgatgaggagaaagtcgtcttcgccgcccaccagctgcaggggcccgcatctctatggtgggaccatttgcaggctacgcagccagagaggcagcctattacttgggcccgtttcaccgccgatttccggaggacccatgtgcccgccggagtcgtggcccttaagaaaagagaattccgagagttgaagcaaggcaaccgctccgatgtgcgggaagatgaggagaagcaagagaagttcttggcaggaatggaccctgagctgtccgtccgtctagtctccggggactatccggatttccaacgtctggtggacaagagcatccgcttggaagccaagcacaaggaactggagtcgcacaagcgccgcttggcgaatttccgcaatcaacagggtgctaaccaaagggtccgctacaccaatccctatccagggggatcctcctcgcagcagcaacaacagcagcagcaacctcgctccgcgcctcgacctcaattcgtggtgcgcgtcccacagccgcagcagcagcagaatcaacaagggactcgtgcgccccgtcctcctacgccaactgtgcagcctggtcaaggccgcagggacgctcaaggtccgcagcgtctgtgcttcaactgctacgagcccgggcactttgcggataaatgcccaaagccgaggcgccagcaaggcaaagcgcctccccgctccaacaatggtggtaacgatgtcattcggggtcgtgtgaaccacgtgacggccgagaacgtgctgacaactccagacgtcatcgttggtacgttcctcattcattccatccctgctaccattttgttcgactctggagcttcccactcgtttatatctgtgccattcgtggggagaaatcagttgggggtagaaaggcttaggaaccctctgctcatcaccacccctggagtggttatgacagcaaagtattatagccctgccgtccctatagaaattcaggggattccttttccctcggatcttattctgctagacaccaagaacttggatgtgatccttgggatgaattggttggctcaattccaaggagtagtggattgcgcgagacgcactgtcactctgtaccgagggccggaacaaccggttgttttctttgcgcccccaacctctgtcagtagttcagaacttcatcagataggactgtcagaaatccccatcgtcagagagttcggagacgtgtttccggaagaactactcggtatgccacccaagcgagagattgagttccggatagatcttgctccaggaaccactcctctgtacaagcgaccctaccgtatggcagcaaatgaactggctgaagtcaagaaacagttggaagagttgaaaggaaaggggtatatacgtccgagtacttcccccaggggtgctcctgtgatttttgtggagaagaaagacaagacgaagaggatgtgcgttgactacagaactctcaatgaagtcaccatcaaaaacaagtaccctcttccccggatcgatgatctgttcgatcagcttaaaggtgccactgtattctccaagattgatcttcgttccggatatcaccaattacgtattcgtgaagaagatattccgaagaccgcattcaccacacgatacggactcaattgtgagttctggttgtccgaagtcaaattcttagggcacatgatatctgctaaaggagctgctgtggaccccgaaacagtgaccgccgtcactgattggaagcaacccaagaccgtcactcaaattcgcagtttcttaggtttggcaggatactatcggaggttcatcgagaacttctcccaaatcgctcgacccatgacacagttgttgaagaaagaagagaaatttgtgtggagcccgcaatgcgagaaggcgtttcaaactctcaaggaaatgctggtttcctcgccagtgttagtcttgccagatactcgtaaggatttcatggtgtattgtgacgcttcgcgccaaggactgaggtgcgtgctcatgcaggaaggacatgtggtagcctatgcctcacgccagttacggccccatgaaggcaactaccctacccatgatttggagttagccgcggtggttcatgctctaaaaatctggcggcactatctcattgggaatcgctgtgaaatatatactgatcataagagtttgaaatacatcttcacccagtcggatctgaatcttcggcagaggagatggttagaactcatcaaggattatgatgtgggaattcactatcatcctggtagggctaacgtggttgccaacgctctaagccgaaaaagccattgcaacactcttaacatccgtggcattccacccgaacttaatcaacagatggcagccctgaaactaagcatagttagccgtggattcttggctgcgttggaagccaagcctaccttgctcgatcaaatccgcgaggctcagaagaatgatccggacatgcatggactcctcaagaatatgaaacagggtaaagccgctggtttcacagaggatgaacatggaaccctatggaacggaaatcgggtatgcgttccagataacagagaacttaaacagctgatacttcaggaagcccacgaaagtccttattccatccaccctggcagtacgaagatgtacttagacttgaaggagaaatactggtgggtcagtatgaagcgggaaattgcagagttcgtggccctttgtgatgtgtgccagcgtgtcaaggcagagcaccaacgaccggccggacttctccaacctctccaagtaccagaatggaaatgggatgaaattgggatggatttcatcaccggacttccaaaaacccaaggtggatatgattctatatgggtagttgtggatcggttaaccaaggtagctcgatttattcctgtgaagaccacctatggagggaacaaattagccgagctctacttcgctaggatcgtgagtctccatggcgttcccaagaaaatcgtatctgattggggaagccaattcacctctcacttttggaagaagctccaagaagagctgggtacccgattaaatttcagcaccgcatatcacccgcagacggatggacagaccgagtgtctaaatcagatcctagaagatatgcttcgcgcatgtgtcctagatttcgggaagacctgggataagagtctcccctacgccgagttctcctacaataacagctaccaagccagtatacaaatggcaccttatgaagcgttgtatgggcgcaaatgccggacaccgctcttgtgggaccaagttggggaaagccaagtgttcgggactgatatcttgagagaagctgaagcgaaggtcagaaccattcgggataatcttaaggtggcacagtcccggcagaaaagttatgcatataaccgtcgccgtgacctggaattcgcaatggatgactttgtgtatcttcgggtcacgccattgcgaggtgtacacaggtttcagacaaaagggaagctcgcacctcggttcgtgggtcctttccgtatcattgctcggcgcggagaagtcgcttaccagctggagctgcccgcctctttgggcaacgtgcatgatgtgttccatgtgtcgcaactcaagaaatgccttcgagtgccatccgagcaggccgactcagagcaaattgaagttcgcgaagacttgacctacgtggagaggccagtgaaaatcctggacaccatggaacgcaggaccaggaaccgggtaatccgtttttgcaaggtccagtggagcaaccacgccgaggaagaagctacttgggagcgtgaagacgagctgaaggcagcccatcccgatctcttcgccagttcttccgaatctcggggtcgagattccgtttaa

SEQ ID NO: 23064 - DNA, 9826 bp, Oryza sativa
  Clone ID: TF_OsC359_7817
atggttatgccgatggtgacgaccaggagaaatgctgccaccgatgatggcaaccaacctgagggcagcaaccacaacaaccatggcagcccacctccacctcctcctccgcctccaccaccaccaccagataccaacgccattctcacccaaatcctcgcccagcaggccaacatgatgactgctttcctccaccacctccaaaatccgccacaacataatgctccaccaccacccccacaacactctaaactcgccgagttcctccgcatccgcccacctaccttctctaactccaacaaccccgtggatgcgttggattggttgcatgcagtggggaaaaagcaagacactgtgcagtgcagcgatgaggagaaagtcatcttcgccgcccaccagctgcaggggcccgcatctctatggtgggaccatttccaggctacgcagccagagggacagcctattacttgggctcgcttcaccgccgctttccggagaacccatgtgcccgccggagtcgtggcccttaagaaaagagaattccgagagttgaagcaaggcaaccactccgtgatggagtatttgcatgagttcaacaacctggcccgttacgccccggaggatgtgcgggaagatgaggagaagcaagagaagttcttggcaggaatggaccctgagctgtccgtccgtctagtctccggggactatccggatttccaacgtctggtggacaagagcatccgcttggaagccaagcacaaggaactggagtcgcacaagcgccgcttggcgaatttccgcaatcaacagggtgctaaccaaagggtccactacaccaatccctatccagggggatcctcctcgcagcagcaacaacaacagcagcaacctcgctccgcgcctcgacctcaattcgtggtgcgcgtcccacagccgcagcagcagcagaatcaacaagggactcgtgcgccccgtcctcctacgctagccgtgcagcctggtcaaggccgcagggacgctcaaggtcagcagcgtctgtgcttcaactgctacgagcccgggcactttgcggataaatgcccgaagccgaggcgccagcaaggccaagcgcctccccgctccaacaacggtggtaaggatgtcattcggggtcgtgtgaaccacgtgacggccgaggacgtgctgacaactccagacgtcatcgttggtacgttcctcattcattccatccctgctaccattttgtttgactctggagcttcccactcgtttatatctgtgccattcgtggggagaaatcagttgagggtagaaaggcttaggaaccctctgctcatcaccacccctggaggggttatgacagcaaagtattatagccctgccgtccctatagaaattcaggggattccttttccctcggatctgattctgctagacaccaagaacttggatgtgatccttgggatgaattggttggctcaattccaaggagtagtgataggactgtcagaaatccccatcgtcagagagttcggcgacgtgtttccggaagaactactcggtatgctgcccaagcgagagattgagttccggatagatcttgctccaggaaccactccgctgtacaagcgaccctaccgtatggcagcaaatgaactggccgaagtcaagaaacagttggaagagttgaaagaaaaggggtatatacgtccgagtacttccccctggggtgctcctgtgatttttgtggagaagaaagacaagacgaagaggatgtgcattgactacagagctctcaatgaagtcaccatcaaaaacaagtaccctcttccccggatcgatgatctgttcgatcagcttaaaggtgccacggtattctccaagatcgatcttcgttccggatatcaccaattacgcattcgtgaagaagatattcctaagaccgcattcaccacgcgatacggactgtatgaattcacggtgatgtcgttcggtttaaccaatgcacctgccttcttcatgaacttaatgaacaaagtgttcatggaatacttggataagtttgttgtggttttcattgatgacattctgatatactcacaatcagaggaagaccatcagcaccatctccgtctggtgttgggaaagttgcgggaacatcaattgtatgccaaacttagcaagtgtgagttctggttgtccgaagtcacattcttagggcacgtgatatctgctaaaggagttgctgtggaccccgaaacagtgaccgccgtcactgattggaagcaacccaagacagtcactcaagttcgcagtttcttaggtttggcaggatactaccggaggtttatcgagaacttctccaaaatcgctcgacccatgacacagttgttgaagaaagaagagaaatttgtgtggagcccgcaatgcgagaaggcgttcaaaactctcgaagaaaagctggttgcctcgccagtcttaatcttgccggatactcgcaaggatttcatggtgtattgtgacgcttcgcgccaaggattggggtgcgtgctcatgcaggacggtcatgtggtggcctatgcctcacgccagctacggcctcatgaaggcaactaccctacccatgatttggagttagccgcggtggttcatgctctaaaaatctggcggcactatctcattgggaatcgctgtgaaatatatactgatcataagagtttgaaatacatcttcactcagtcggacctgaatcttcggcagaggagattgttagaactcatcaaggattatgatgtgggaattcactatcatcttggtaaggccaacgtggttgccgacgctctaagtcgaaaaagccattgcaacactcttaacgtctgtggcattccacccgaacctaaccaacagatggaagccctgaacctaagcatagttagtcgtggattcttggctacgctggaagccaagcctaccttgctcgatcaaatccgcgaggctcagaagaatgatccggacatgcatggactcctcaagaatatgaaacagggtaaagccgctagtttcacagaggatgaacacggaaccctatggaacggaaaccgggagaaatattggtgggttagtatgaagcgggaaattgcagagttcgtggccctctgtgatgtgtgccagtgtgtcaaggcagagcaccaacgaccggccggacttctccaacctctccaagtaccagaatggaaatgggatgaaattgggatggattttatcaccggacttccaaaaacccaaggcggacatgattctatatgggtagtcgtggatcgactaaccaaggtagcacggttcattcccgtaaagaccacctatggagggaacaaactagctgaactctacttcgctaggatcgtaagtctgcatggcgtccccaagaaaattgtatctgatcggggaagccagttcacctctcacttttggaagaagctccaagaagagctgggtacccgattaaatttcagcaccgcgtatcacccgcagacagatgggcagaccgagcgtctaaatcagatcctagaagatatgctttgcgcatgtgtcctagatttcgggaagacctgggataagagtctcccctatgccgagttctcctacaataacagttatcaagccagcatacaaatggcaccttatgaagcgttgtatgggcgcaaatgccggacaccgctcttgtgggaccaagttggggaaagccaagtgttcgggactgatatcctgagagaagctgaagctaaagtcagaaccatttgggataatctaaaggtggcacagtcccggcagaaaagttatgaaaataaccgtcgccgtgacctggaattcgcagtgggtgactttgtgtatcttcgggtcacgcccttgcggggtgtgcacaggtttcagacaaaggagaagctcgcacctcggtatgtgggtcctttccgtatcattgctcggcgtggagaagtcgcttaccagttggagctgcccgcctccttgggcaacgtgcacgatgtgttccatgtgtcgcaactcaagaaatgtcttcgagtgccatccgaacaggccgactcagaccaaattgaagtttgcgaagacttgacctacgtggagaggccagtaaaaatcctggacaccatggagcgcaggaccaggaaccgggtaatccgtttttgcaaggtccagtggagcaaccacgccgaagaagaagctacctgggagcgcgaagacgagctgaaggcagcccatcccgatctcttcgccaggccgccgccggcgaccataggggcgcgggcgcgccgcctcccgtcggccgtgtcggcgaggccgccttcgggcgcgccccgcggctgccaggtggggcccggccgtcagccgcccgcgccctcggcacctcggccatttaaggaccggtcttcgggcctctgttgcaaagcactaccgtacttccacatgtctagtggggcaaatgaaggctacacgagctgcggcccggtagtcgagatgtcatggcacagggccggtgtcctgctgctaggggctcagtcctgcctgcctgtcccgggggttccggccgtaggtgggattgggtcgatgtacacctctgatcagagtataatctattcgaatagccgcgccctcggttatgggcaagccgagcaatgtacccaaatggccggcagcgtcacccgtcgtggtttgagcatgactggcttcgtcttggagctgcggggcatgtgcgtggtcctggggtatccacatggagtggactaccaggccaggccgcttccggagcaggagggtgacgacgcagagccccacgctggttgggaggtcactgcagtgatcctctctggctctcccgagcggacttcgctggcagtcaccgcgggtggagattctttccccgccgcttgccagaacgccgctctcctcgccatcggcactcttcaccagcgctacccggacgagttgcagcactcgccctaccgctaccaccctcgccacgaaggagcccgcgactacgccaccttccgagatgctagctcggaggatgacgctactatcgtgcacctggcgcgcatggtggaggcgtacgacgtggctcgtatcgacttccatcagatggtgcgccgtgggatggtcgagaacaacatgaagatcctggagctgcgtcaggagaacctgcagctcaagaaggacttagacgcggtggaggcgcagctgcatcagctcaagatcgcccagggagaggtctgccgccccaagcgtcgccgcgtctgccgcagccagaagatcaccgcccgcaagagcacctccaggcccgagcttgttcgtcagtccctggcgtggacctgcttcatggagacccctcgtgccgagcccgcgcccgtggttccccaggagggggaagcctccggcgttggtagcacggaggatgcgctgttgctcaccttccatggtgacgaccaggagaaatgctgccaccggtgatggcaaccaacctgaaggcagcaaccacaaccaccaaggcaacccacctccacctcctcctccgcctccaccaccaccaccagacaccaacgccattctcacccaaatcctcgcccagcaagccaacatgatgactgctttcctccaccacctccaaaatccgccacaacataatgctccaccaccacctcccgaacactctaaactcgctgagttcctccgcatccgtccacctaccttctctagctccaacaaccccgtggatgcgttggattggttgcatgccgtggggaaaaagttagacaccgtgcagtgcagcgatgaggagaaagtcatcttcgccgcccaccagctgcaggggcccgcatctctatggtgggaccattttcaggctacgcagccagaagggcagcctattacttgggctcgcttcaccgccgctttccggagaacccatgtgcccgccggagtcgtggcccttaagaaaagggaattccgagagttgaagcaaggcaaccgctccgtgatggagtatttgcatgagttcaacaacctggcccgttacgccccggaggatgtgcgggaagatgaggagaagcaagagaagttcttggcaggaatggaccccgagctgtccgtccgtctagtctctggggactatccggattttcaacgtctggtggacaagagcatccgcttggaagccaagcacaaggaactggagtcgcacaagcgccgcttggcgaatttccgcaatcaacatggtgctaaccaaagggtccgctacaccaatccctatccagggggatcctcctcgcaacagcaacaatagcagcagcaacctcgctccgcgcctcgacctcaattcgtggtgcgcgtcccacagccgcagcagcagcagaatcaacaagggactcgtgcgccccgtcctcctacgccaactgtgcagcctggtcaaggccgcagggacgctcaaggtcagcagcgtctgtgcttcaactgcttcgagcccgggcactttgcggataaatgcccgaagccgaggcgtcagcaaggccaagcgcctccccgctctagcaatggtggtaaggatgtcattcggggtcgtgtgaatcacgtgacggccgaggacgtgctgacaactccagacgtcatcgtcggtacgttcctcatacattccatccctgctaccattttgttcgactctggagcttcccactcgtttatatctgtgccattcgtggggagaaatcagttgggggtagaaaggcttaggaaccctctgctcatcaccacccctggaggggttatgacagcaaagtattatagctctgccgtccctatagaaattcaggggattccttttccctcggatctaattctgctagacaccaagaacttggatgtgatccttgggatgaattggttggctcaattccaaggagtaatggattgcgcgagacgcactgtcactctgtaccgagggccggaacaaccagttgttttctttgcacccccaacctctgtcaaaagttcagaacttcatcagataggactgtcagaaatccccatcgtcagagagttcggagatgtgtttccggaagaactacccggtatgccgcccaagcgagagattgagttccggatagatcttgctccaggaaccactccgttgtacaagcgaccctaccgtatggcagcaaatgaactggccgaagttaagaaacagttggaagagttgaaagaaaaggggtatatacgtccgagtacttccctctggggtgctcctgtgatttttgtagagaagaaagacaagacgaagaggatgtgcgtcgactacagagctctcaatgaagtcaccctcaaaaacaagtatcctcttccccggatcgatgatctgttcgatcagcttaaaggtgccactgtattctccaagattgatcttcgttccggatatcaccaattacgtattcgtgaagaagatattccgaagaccgcattcaccacgcgatacggactgtatgaattcacggtgatgtcattcggtctaactaatgcacctgccttcttcatgaacttaatgaacaaagtgttcatggaatacttggataagtttgtcgtggttttcattgatgacattctgatatactcacgatcagaggaagaccatcagcaccatccccgtctggtgttgggaaagttgcgtgaacatcaattgtatgccaaacttagcaagtgtgagttctggttgtccgaagtcaaattcttagggcacgtgatatctgctaaaggagttgccgtggaccccgaaacagtgaccgccgtcactgattggaagcaacccaagacagtcactcaagtccgcagtttcttaggtttggcaggatactaccggaggttcatcgagaacttctccaaaatcgctcgacccatgacacagttgttgaagaaagaagagaaatttgtgtggagcccgcaatgcgagaaggcgttccaaactctcaaagaaaagctggtttcctcgccagtgttaatcttgccggatactcgcaaggatttcatggtgtattgtgacgcttcgcgccaaggattggggtgcgtgctcatgcaggacggtcatgtggtggcctacgcctcacgccagctacgacctcatgaaggcaactaccctacccatgacttggagttagccgcggtggttcatgctctaaaaatctggcggcactatctcattgggaatcgctgtgaaatatatactgatcataagagtttgaaatacatcttcacccagtcggatctgaatcttcggcaaaggagatggttagaactcatcaaggattatgatgtggggattcactatcatcctggtaaggccaacgtggtcgctgacgctctaagtcgaaagagccattgcaacactcttaacgtccgtggcattccacccgaacttaatcaacagatggaagccctgaacctaagcatagttggtcgcggattcttggctgcgttggaagccaagcctaccttgctcgatcaaatccgcgaggctcagaagaatgatccggacatgcatggactcctcaagaatatgaaacagggtaaagccgctggtttcacagaggatgaacacggaaccctatggaacggaaagcggcgtgtcaaggcagagcaccaacgaccggccggacttctccagcctctccaagtaccagaatggaaatgggatgaaattgggatggatttcatcaccggacttccaaaaacccaaggtggatatgattctatatgggtagttgtggatcgattaaccaaagtagctcgatttattcctgtgaagaccacttatggagggaacaaactagccgagctctacttcgctaggattgtgagtctccatggcgttcccaagaaaattgtatctgataggggaagccaattcacctctcacttttggaagaagctccaagaagagctgggtacccgattaaatttcagcaccgcgtatcacccgcagacagatggacagaccgagcgtctaaatcagatcctagaagatatgcttcgcgcatgtgtcctagatttcgggaagacctgggataagagtctcccctatgccgagttctcctacaataacagctatcaagccagcatacaaatggcaccttatgaagcgttgtatgggcgcaaatgccggacaccgctattgtgggaccaagttggagaaagccaagtgttcgggactgatatcctgagagaagctgaatctaaagtcagaatcattcgggataatctaaaggtggcacagtctcggcagaaaagttatgcagataaccgtcgccgtgacctggaattcgcagtgggtgattttgtgtaccttcgggtcacaccattgcgaggtgtacacaggtttcagacaaaagggaagctcgcacctcggtatgtgggtcctttccgtatcattgctcggcgcggagaagtcgcctaccagttggagctgcccgcctccttgggcaacgtgcatgatgtgtttcatgtgtctcaactcaagaaatgccttcgagtgccatccgagcaggccgactcagagcagattgaagttcgcgaagacttgacctatgtggagaggccagtgaaaatcctggacaccatggagcgcaggaccaggaaccgggtaatccgtttttgcaaggtccagtggagcaaccacgctgaagaagaagctacctgggagcgtgaagacgagctgaaggcagcccatcccgatctcttcgtcagtccttccgaatctcggggtcaagattccgtt

SEQ ID NO: 23065 - DNA, 6230 bp, Oryza sativa
  unsure (1)..(6230): unsure at all n locations
  Clone ID: TF_OsC359_5747
acggccgggcccacctggcagccgcggggcgcgcccgaaggcggcctcgccggcacggccgacggaaggcggcgcacccgcgccccgatggtcgccgccggcgaccaacggcgcgacggagcggcgcccgagagaggggagggaagggggaagtgaaacaacggtcctcggctcaccccgggacgacgaggacggcggaaacgacgaccggagcggaggaaggcggcggcgcggttcggatcgacgaggacggcggcgctccgacggtcggcgggcgaaacggaggcgcggacgaggtcgacgaggacgcggcgaagccgatggaggtgacgccgagacgggaggaggtccggggcgacgacggcggcgaactgaagctcggcggcgacggcggagagagaggacgacggcgcgagcacgaatccgacggggagagtccttttttccccccttccctcttgggccggctcggcccacttccctccctctctctcctctcccccgcggcccaatcggcctcctccccgccgcgtgccgctgacgggcgggcccgcccgccaccctcgctgacgggtggggcccacccgcacgcacgtaaggaacgcccgttggtgatcctcgctggctctcccgagcggacttcgctgacagtcaccgcgggtggagattctttccccgccgcttgccagagcgccgctctcctcgccatcggcactcttcaccagcgctacccggacgagttgcagcactcgccctaccgctaccaccctcgccgcggaggagcccgcgactacgccaccttccgggatgctagctcggaggatgacgctaccatcatgcacctggcgcgcatggtggaggcgtacgacgcggctcgtatcgacttccatcagatggtgcgccatgggatggtcgagaacaacatgaaaatcctggagctgcgtcaagagaacctgcagctcaagaaggacctagacgcggtggaggcgcagctgcatcagctcaagatcgcccagggagaggtctgccgccccaagcgtcgccgcgtctgccgcagccagaagatcaccgcccgcaagagcacctccaggcccgagcttgttcgtcagtccctggcgtggacttgcttcgtcgagacccctcgtgccgagcccgcgcccgtggttccccaggagggggaagcctccggcgttggtagcacggaggatgcgctgttgctcaccttccgtcctggcccgtcgcagcagagaaatgctgccaccggtgatggcaaccaacccgaaggcagcaaccacaaccaccagggcagcccacctccacctccacctcctcctccgcctccaccaccgccagataccaacgccattctcacccaaatcctcgcccagcaggccaacatgatgactgctttcctccaccacctccaaaatccgccacaacataatgctccaccaccacctccccaacactctaaactcgccgagttcctccgcatccgcccacctaccttctctagctccaacaaccccgtggatgcgttggattggttgcatgccgtggggaaaaagctagacactgtgcagtgcagcgatgaggagaaagtcatcttcgccgccaaccagctgcaggggcccgcatctctatggtaggaccatttccaggctacgcagccagaggggcaacctattacttgggctcgcttcaccgccgctttccggaggacccatgtgcccgccggagtcgtggcccttaagaaaagagaattccgagagttgaagcaaggcaaccgctccgtgacggagtatttgcatgagttcaacaacctggcccgttacgccccggaggatgtgcgggaagatgaggagaagcaagagaagttcttggtaggaatggaccctgagctgtccgtccgtctagtctccggggactatccggatttccaacgtctggtggacaagagcatccgcttggaagccaagcacaaggaactggagtcgcacaagcgccgcttggcgaatttccgcaatcaacagggtgctaaccaaagggtccgctacaccaatccctatccagggggatcctcctcgcagcagcaacaacagcagcagcaacctcgctccgcgcctcgacctcaattcgtggtgcgcgtcccacagccgcagcagcagcagaatcaacaagggactcgtgcgccccatcctcctacgccaactgtgcagcctggtcaaggcagcaggcacgctcaaggtccgcagcgtctgtgcttcaactgcttcgagcccgggcacttcgcggataaatgcccgaatccgaggcgtcagcaaggccaagcgcctccccgctccaacaacggtgggaaggatgtcattcggggtcgggtgaaccacgtgacggccgaggacatgctgacaactccagacgtcatcgttggtacgttcctcattcattctatccctgctaccattctgttcgactctggagcttcccactcgtttatatctgtgccattcgtggggaggaatcagttgggggtagaaaggcttaggaaccctctgctcatcaccacccctggaggggttatgacagcaaagtattatagccctgccgtccccatagaaattcaggggattccttttccctcggatctgattctgctagacaccaagaacttggatgtgatccttgggatgaattggttggctcaattccaaggagtagtggattgtgcgagacgcactgtcactctgtaccgagggccggaacaaccggttgttttctttgcacccccaacctctgtcagtagttccgaacttcatcagataggactgtcagaaatccccatcgtcagagagttcggagacgtgtttccggaagaactacccggtatgccgcccaaacgagagattgagttccggatagatcttgctccaggaaccactcctctgtacaagcgaccctatcgtatggcagcaaatgaactggccgaagttaagaaacagttggaagagttgaaagaaaaggggtatatacgtccgagtacttccccctggggtgctcctgtgatttttgtggagaagaaagacaagacgaagaggatgtgcgttgactacagagctctcaatgaagtcaccatcaaaaacaagtaccctcttccccggatcgatgatctgttcgatcagcttaaaggtgccactttattctccaagatcgatcttcgttctggatatcaccaattacgtattcgggaagaagatatccctaagaccgcattcaccacgcgatacggactgtatgaattcacggtgatgtcattcggtttaaccaatgctcctgccttcttcatgaacttaatgaacaaagtgttcatggaatacttggataagtttgttgtggttttcattgatgacattctggtatactcacaatcagaggaagaccatcagcaccatctccgtctggtgttgggaaagttgcgggaacatcaattgtatgccaaacttagcaagtgtgagttctggttgtccgaagtcaaattcttagggcacgtgatatctgctaaaggagttgctgtggaccccgaaacggtgaccgccgtcactgattggaagcaacccaagacagtcactcaagtccgcagtttcttaggtttggcaggatactaccggaggttcatcgagaacttctccaaaatcgctcgacccatgacacagttgttgaagaaagaagagaaatttgtgtggagcccgcaatgcgagaaggcgttcaaaactctcaaagaaaagctggttgcctcgccagtgttaatcttgccggatactcgcaaggatttcatggtgtattgtgacgcttcgcgccaaggattggggtgcgtgctcatgcaggatggtcatgtggtggcctatgactcacgccagctacggcctcaagaaggcaactaccctacccatgatttggagttagccgcggtggttcatgctctaaaaatctggcggcactatctcattgggaatcgctgtgaaatatatactgatcataagagtttgaaatacatcttcactcagtcggacctgaatcttcggcaaaggagatggttagaactcatcaaggattatgatgtgggaattcactatcatcctggtaaggccaacgtggtcgccgacgctctaagtcgaaaaagccattgcaacactcttaacgtccgtggcattccacccgaacttagtcaacagatggaagcccctgacacctaagcaatagttggtcgcggatttttggctgcgtggaggnnnnnnnnnnnnnnnnnnnnnnnnnnnnnnnnnnnnnnnnnnnnnnnnnnnnnnnnnnnnnnnnnnnnnnnnnnnnnnnnnnnnnnnnnnnnnnnnnnnntagaattcacggagttncgnaccctttgtgatgtgtgccagcgtgtcaaggcagagcaccaacgaccggccggacttctccaacctctccaagtacctgaatggaaatgggatgaaattgggatggatttcatcaccggacttccaaagacccaaggtggatatgattctatatgggtagtggtggatcgattaaccaaggtagctcgattcattcctgtgaagaccacctatggagggaacaaactagccgagctctacttcgctaggatcgtgagtctccatggcgttcccaagaaaatcgtatctgataggggaagccaattcacctctcacttttggaagaagctccaagaagagctgggtacccgattaaacttcagcaccgcataccacccgcagacagatgagcagaccgagcgtctaaatcagatcctagaagatatgcttcgcgcatgtgtcctggatttcgggaagacctaggataagagtctcccctatgccgagttctcctacaataacagctatcaagccagcatacaaatggcaccttatgaagcgttgtatgggcgcaaatgccggacaccgctcttgtgggatcaagttggggaaagccaagtgttcgggactgatatcctgagagaagctgaagctaaagtcagaaccattcgggataatctaaaggtggcacagtcccggcagaaaagttatgcagataaccgtcgccgtaacctggaattcgcagtggacgattttgtgtatcttcgggtcacgccattgcggggtgtacacaggtttcagacaaaagggaagctcgcacctcggtatgtgggtcctttccgtatcgttgcccgacgcggagaagtcgcttaccaattggagctgcccgcctccttgggcaacgtgcatgatgtgttccatgtgtcgcaactcaagaaatgccttcgagtgccatccgagcaggccgactcagagcaaattgaagttcgcgaagacttgacctacatggagaggccagtgaaaatcctggacaccatggagcgcaggaccaggaaccgggtaatccgtttttgcaaggtccagtggagcaaccacgccgaagaagaagctatctgggagcgtgaagacgagcttctcccgcctcggcgtcgcctccttcggctccgccgcgtcctcgccgacctcgtccacccctccgttttgcccgccgaccgccggaacgccgccgtccccgtcgacccgagccacaccgccgccttcctccgctccggtcgccgttcccgtcgtcgccgtcgacccggggtgagccgtggaccgcccttttcgtttcccccttccctcccctctctcggccgccgctccgccgtgcctatggccgccgccggcgaccataggggcgcgggcgcgtcgcctcccgtcggctgtgccggcgaggctgccttcgggcgcgccccgcggcgtctccccgccggaatcgagctcgcgccgtcgccctctctctccaccgtcgccgacgacctccggccggccttctccgctcgccgggaccgtctcccgccccggcgtcgcctcctccggcttcgccgcaccgccgtcgaccccgtccaccccctcgacgagctcgccgaccgccggaacgccgccgaccccgtcgaccagagccgcgccgccgccttcctccgctccggccgccttttttgtcgtcgccgtcgacctagggtgagccgtggaccgccgcctcttttcccccttcccttcccctctctcggccgctgctccgccgtgcctatggccaccgccggcgaccataggggcgcgggtgccgcctcccgctggctgcgccat

SEQ ID NO: 23066 - DNA, 4528 bp, Oryza sativa
  Clone ID: TF_OsC1713_4419
aaatgtaaattgcacaaatgtaaatgcgacaatcaaatgagacaaggagacaagagatttttcaccgaggttcggaaactcgccggtttcctactccccgttgaggcgagcccaactccaccactcaaccacgaagccaccgcacgcccccttcgtcaaggggtgggcaaggcgtgagccggcccacggagaggactacccaagcctcgatcactagggtagttcttccttcactctgaagaccgtgctactttgcaacggctagaaaactagccgttgtagtgctgtcagagggccccatcggcctggccggtcagaccggcctcggctcggtcagaccgccatcggctcggtttgaccgaatacggctccgtcggctctgtatcagccaccctgagcagcaccatcccggcctctagtgggccggtctgaccgcgcatgtgccgccggtcagaccggccttatgcgccggtcagaccgccgtcttgtggccagtcagaccggccagggcacgccggtctgaccgcccctggtcaggccgaacacggggagctccaagctgaaggcggggcttgtactgcttgtgcttcttcaaattttgcccagcagccccaagcttgtctttaatcaacctcatgatgtaaggggcataatagattccctgagtgaaggtccccttggagatggcaatctcttgcatcataaaagacacaatgtcgaactgacgaccctgaatgattgcatcgatgacgtgccaagccaccccccaaatgtcatcattgttgccaaggcgagggaggatagtggctctcacaatcctgttaaccacactggggatagtcctcaagccggcaaccttcccatgtgtgtaccgcgctccatcttcatagaactgagagagatagtctatggagagcggattgtgggtgtgcgcctcatgcaaatcatgtccaaaatccaagcgtatgttaaggagccgccggaactgcctccgagagatagaacactgaagggtgtcggacatccacttcatatcactatagtctccagccacccacactgtagcatagaactgccggatcaaatcttcattatagtcttgcttgagggtcacaatccggtcaatgccaacagtcttgaagagatcctgcaagctcttaaactctggagtctcattgatgtctctccaagaaatccacttatactctgcaaaagctttccctacataaacctgctcatacactgtcttctggaaaacggtgtgaaaccggggatccggggtgacccgaggcctcaagaactgatcatgatgcctcaagatggtatactgcgatggattcctcatgttcaccacaaactggatggagggatcaattttcatctcatcactttgttcatcctcatcctccccactatcactgacatcatctctacttgcctcctcactagccccctcaacatttgcctcaacctcttcatcactttgagcgtaatcctctccactcgattcttcaggctcactcatgggatccggagtgggcgcacgacgactatggcgagtgcggggaggcatcactccctcatcaaggtcgagatgcccgttggttgccataggtgtcttgatgggcttcgcatcctccaggccaaacctcttgagtagatccttgatgtacttggtttggctcacgaacgtcccatccttgagttgcgccaccaatcttgccttatttctcaccaccaacccattctcatcttgtttgttcctaaagacccactttgtacctatgacattgtggtctctaggtctttcaaccaaagtccacaccttgtttcttgcaaagctgttgagctcttcatgcatagcattcatccaatccggatcaaaaagagcttcatctatatgttttggctcaagacaagaaacaaacgagtaatgttcacaaatcgaagcgacacgagatcgagtttgaacacccttactaatgtcacccaacacttggtcaattgggtgatccatggaaagagcggtgtgtatacttggaggcataggtggatcttgtgccttctcctcctccacctcaacttgagcttgacttggcgtagcggaagtagatggctcatcttgagtggaggtggatggcttgtcttccacttcaataggcttgacatctccgatagacatattcttcatagctctcatcaagccttcatcacctacatcatccaaattctcgtgcccctcttgggagccattagtttcatcaaattgaacatcggcggtttcttccacaatacctttgttcttattgtagacccggtatgccttgctatttgaggcattacctagaagaaacccttcatcacaccgactttcaaatttggttagtctaacaccctttcggtaaatataacacttgcaaccaaaaattcgaaaataggcaacattaggcttcctcccaacaattagctcatagaaagtctttttcaagagacgatgcaaataaagcctattggttgcatggcaagcggtgtttatggcttcggcttgacaagcactacaaagcttatctttctcaaacttcacatctttcaaacccacaactaggtcacgttttgaaagtttgctcaattgattcatgccaacatgggctagcctcctatgccaaagccaacccaatgaagtttttgcaactaactcaattacctttcctttgctattgtctccaaatgtcactttctcttgttctttccctcctacttcaaatgtggtgaacatagccctatcaccggtcatgtgttgagtgcatccactatcaagcacccaatggctcccaccggtgcggtagttcaccaccgagtataggggaacccacatatctagcaacaatgctaccatcatgagccttcccttgaagcatctctccaaactcttgttgagcttagccacttgctccttaagctcattgttctcaacaacaagtgaggtatcacaaatagaaacacaagagctagagctaggcatatccacaagatcatcacaagaggtagaaatgctagatgatgcaacatgagcaatatggcaagtagtactatcatcaagcaaatcacaagatatgccaacatcaatatgagctccatgttgagtagtgaaaaggaggttgtcatgagcttccttaagcttctcatgagaaatggtgagtctctcatgagaggtctttagctccttatacaagacctccaaagaagcatgatccttctttagagtcttgaacttgacaatctccttctcactataagcatggagctcctcaaacatactcacaagctcatcataggaaacatcatcacaatcattattactctcactatcactaagagatgttaccttagaggagccctttgccatgagacaaagtggagcgaagagtgatggagcctccttgatggcaacaacggtcatcttcttcttcttggagcttgcatcatcaccaccttcttcctcggacccggatgaggcggagctctcctcatttgagtcccattccccgatgaaggcctcaatcttcttcccttccttcttgagcttcttcaagagcttgtagcctccactcttcttcttggatgacttgtctccatcatcatccttcgaagggcacttggaagcaaagtgtcccttctcaccacactcaaagcacctaaagttggagagagtcttattgggtctactatttcttctcctattggagttagagcctcttcctctctcctttctccttcccaagagatcattgaaccttctagcaagaagggcaatctcttcctccaagtcctcattggcttcattcaccttgcccttgcccttgtcttcaacttcggcttggagagcaatgcacttcttggaaggtgatgaggcttcctccatctccttcttcttcaacttgtacatatcattggtgttgatcttccccaagaggcttgcgggtgtcatccttgatatgtcggagttaatgagcatggtgacaagggtctcatacttctccggtagagccccaagtatcttttgggcaacctcaagatcggtgtagtttaccccaagccccttgagatcattcacaatgacattgagcctcccatacatgtcattcacactctcatgaggcaacatggagaatgtctcatattgaatcttgaggaaatgaagcttggcatccttgtactcgcttgtgacctcatggatctccgccaacttgttccaaatctcatatgcggtctcaaggttgctcactctatcgaactcctcttggctcaaagagttgaacaaagcattcatagcttgggcattgagttggaggtagcggtgatctatctccgtcaatggcgtgccggtgatagcaaagcctacatccacaatactccaaatatggaagctcatagctttgaggtgagtagacattttaattttccaagtggagtagtttgtgccattaaacataggagccttccctacatggttcacctcgttcgacat

SEQ ID NO: 23067 - DNA, 1972 bp, Oryza sativa
  unsure (1)..(1972): unsure at all n locations
  Clone ID: TF_OsC1713_4729
tcacgccgagtgatagaacactgcataggccctgacatccacttcatagcactctataatacggccttctgaaactgtgtggaatcttggatcatctgagtctctgggcacccggaactgatcatgatggcgaagaatggtgtattgagtgggattcctcaagttgagcacaaactgaatggaaggatcaagaggtccctcatcatcctcgccatcatcgttaccatcatcattttcttcttcctcagcccccttaacctcttcttcttcctctttctcactctgagcgtattgttccgcatccttaagctcattgttctcaacaacaagtgaggcatcacaaatagaatcacaagagctagagttaggcatatccataagatcatcacaagaagtagagatgctagatgatgcaacatgagtaatatgacaggtagtactatcatcaagcaagtcacaagatatgccaacatcaatatgagctccatgttgagtaatggaaaggagggtgtcatgagcttccttaatcttctcctgagaaatggtgagtctctcatgtgaagtctttagctcctcatacaagacctcgaaagaagcatgatccttctttagagccttgaacttgacaatctctttctcactacgcatgatcatactcacaagcttaaaagaaccctttgccatgaggtaaagtgaagcgaagagtgatggagcttccttgatagcaactacggccatcttcttcttcttggagcttgcatcatcatcactatcttctgcttcgaacccggatgaagcggagctctcttcatttgagtcccattgcccaatgaatgccttaatcttctttctctccttctgaagcttgttcatgagcttgtagcctccactcttcttcttggatgacttgtctccatcatcatcctttgaaggacacttggaagcaaagtgtcccttctcaccacactcaaagcatctaaagttggagaaagtcttgttgggtctcctatttcttcttctattggagttagagccctttcctctctcatttcttcctaatagatcattgaacattctagcaagaagagcaatctcttctggtgtcatccttgacatgtcggagttgatgacgaaggtgactaagtgctcatacttgtccgatagagcccatagcatcttttgagccaccttaatgtcggagtagattgcctcaagccccttgagatcattgactatcgcattcaacatcatggcaaacgcctcatattggatcttgaggaaatgaagctttgcatccttgtactcactagtgccctcatgaatctcactcaacttgttccatatctcatatgcggtctcaaggttgttcactctatcaaactcctcttggctcaaagagttgaacaatgcattcatggcttgagcattgagttggaggttgtggtgatcagcttccgttaaggggctaccggtgatggcaaaacctttgagagcaatcaaggttcgaagccgagacaaggcagatgctcgattcatatgctgtgatctatcctccacagcctgggcgatgatgccagtggggcggtggcggaggcggacggcggactcgcgcttgttgcggtgctggccgccggggccggacgccttgaacgtgcccatctcgcactgccccatcagctcgtcgtcgctcatccccaggtagtcatcccacccgccgccgccgccgcccttctcaccgggaccatccgagctattcgcggtcgccgcagcagaggaggatggggccgaggaagatgagagggagaggaagcggaagcggagaggaggcgcggcgccgcggtggtggagcggcggcgggaggcgtggggacggggagagcgggcaatagctgcgggttattcggaggagggctcgagccatggcgccgcgccgcgccgncnagtgcgctgccaccgcacggagccgactgcgg

SEQ ID NO: 23068 - DNA, 5876 bp, Oryza sativa
  Clone ID: TF_OsC1528_2012
atggccggcttttctttgatcagttgcgctgtgggtatcatcttcttctccgtttgctacctgcctgcggctcctgccgccgccttgtccttcaactactccaccttcagctcggacaaccaggaggacttcacattcgaaggcaacgcctccatccacgacgggtgtattgatttcgttgcgaacgggacctggggcaggggctacaggccctacagcaccggacgggtgtcctacaaattgccggtgcggctctgggacgctgccaccggcgaggtggccagcttcaccacaaccttctccttcaacatcacgccgatgaatattagcgacaagggcgatggcatggccttctttctcgtcagctatccatcaaggatgccgctgaccgccgacggcgacactctcggcctcgtgagcaacaaacccgaaaacgctccggccggcggcgaccaattcgtcgccgtcgagtttgacacctacccaaaccccggcttggaccctaacgctaccggtgaccacatcggcatcgacatcaactcagtccgatcgttgacgaccgaacccttgaccaactccagcctcatcggtaacatgaccgccatcgtccactacgatagcagttcgagcatcctgtcggtgaagctgtggataaatgacacgacgaagccgccttacaaccttagctacgaaattgttgatctcaagaaaaaattgccggagaacgtcaccatcggcttctcggcggcaacgggcgcatcagatgagctacaccagctgacttcttggtacttcaactcgagctcgtcgttcgagcataagcatggacgtgccggggttgtagcgggagccaccgtcggcgcgacgttgttcgttgtgctgctcttcactgctgcagctatcctcatacggcgacgtcggatcaaaaacaggaaggaggcagaggatgagcaggacataagctcggacagcgaagacaatgacggcgagcccatcgtggagattgagatggggactgcgccaaggcgattgccatactatgagctcgtcgaggcgaccaagaacttcgcggtggaggagaagctcgggcaaggcggcttcggttcggtgtaccgaggctacctaagagagcagggcctcgccgtcgccattaaacgcttcgccaaagattcctccaagcaagggaggaaggagtataagtcggagatcaaggtgataagccggctgcgccaccgcaatctcgtgcagctcgtcggctggtgccatggacgcaacgagctcctccttgtctatgagctcgtccccaaccgcagtcttgacgtccatctccatggcaatggcaccttccttacttggccaatgaggatcaagattgttctcgggctcggatcagcactactctacctccaccaagagtgggaacaatgtgtcgtgcaccgtgacatcaaaccaagcaacgtcatgttggatgaatccttcagtgccaagctaggtgacttcgggctcgcgaggctcatcgaccacaccatcggtataaagacaatgaccgccatgtcaggaacaccgggctaccttgaccctgaatgtgtgatcaccggtagagcgagtgccgagtcctacgtttacagtttcggcattgtcctactggaggtggcatgcgggaggagaccgatgagcctactagacagccagaataacggcgtcttccgactggttgagtgggcctgggatttgtatggcaagggagatgttctcatggccgccgacaagcgtctcgacggcgactacgattctgcggagatggagcgtgtcatcgctctcgggctctggtgcgtgcaccctgacccaagtgtgcgaccgtctatcagagacgccatggccatactccagtcgagtggaggccaactgccagtgctatcggccaagatgcccgtgccaatgtacgcgccgccgatggcctcgtttgacgggctagctgtttgcgtcatctacagggatgtcgtcgtcctcaggtgtgacgcagtcgtcgtccacatcgacgacgagcggccatgctattcacacctcgtgttcctcgactactccatcccgatcgtcagcgtgcaccggcaatcgggagagcaggtctccggaacctctgccttcgacgtcctgcaccgggagaaggcggcaataaggcgctgtgattttactatggctggttttgccgatgcactgaggccggataaattcaccggtgtgcactttaagagatggcagatcagggtcgctttgtggctgacagctatgaaatgcttctgggtgagtactggtaaacctgaaggaattcttgctgctgatcagcataagcaattcgagaaagccactactctctttgtgggatgcattcttagcgttcttggcaatcgtctggtcgaggtgtatatgcacatgaccaacgctaaggagttgtgggatgcactgaatactaaattcggtgctactgatgctagcaatgatctgtacatcatggagcagtttcatgactacaggatggctgacaaccgttctgtagtcgaacaggctcatgaggaatactccgttgaggggttgatagtgtctcttgatgttgaggagaaagctcgggaaaaggacgccgcgtctaagggcgacggtgggcagtccagtgccaatgttgtgcacaaggcccagaacaagagcaaggggaaatacaaagctcagcagaccaccaacttcaagaagcagaagaagaacaacaacaatcctaatcaggatgagaggacttgctttgtgtgtagccaacctagtcatctggctaggaagtgtccacagcgcaaggggatgaaggcacctgcagggcagacttctaagtctgctaatgtgaccattggcaacactggagatggaagcgggtatggtcgcacggggttccaccgtcctaatggggaatgggtcacatgcttctgttcatggtgttggcacggtagatctgaagtttacttcgggaaagatcgtgcagctgaagaacgtgcagcatgtctcttctatcgacagaaatcttgttagtggctcccgtctgactagagacggatttaagttgttttttgagtctaataaagtagtcgtgtctaaacatggatattttattggtaaaggttatgagtgcggaggcctgttccgcttttcctttctgatttctgcaataagtctgtgaaccatatttgtggcagtgtggatgatgaggctaatgtttagcactcacgtttatgtcatattaattttggcttgatgtctcggctttccagcatgtgtttaattcctaagttttccattgtcaaaggttctaagtgccatagttgtgtgcaatcgaagtaacctcgcaagcctcacaaggctgccgaggaaagaaacttggcaccactagaactcctacattcagatctttgtgaaatgaatggggtgttgacaaagggtggaaaacgatatttcatgactttgattgatgatgctactagattttgctatgtgtacttgttgaaaacgaaagacgacgctctagactattttaaaatttataaggcagaagttgaaaatcaacttgacagaaagataaaaagacttaggtctgatcgtggtggagagtttttctcaaacgagtttgacttattctgtgaggaacatggcatcatacatgagaggatgcctccctattctcccgagtctaatgggattgctgaaagaaagaaccgcacactgactgacttggtgaatgccatgttggacactgcgggactacctaaggcatggtggggggaggcattgttgaccttgaatcatgtgttaaacagagttcctaacagaaataaggacaaaacaccatatgagatatggattgggagaaaaccatcactttcttacttgcgcacatggggtgcttggcgaaagtcaatgtaccaataacgaagaagcgcaaacttggacctaagactatggactgtgtcattctgggatatgcttatcacagcattgcctatagatttttaatagttaaatctgaggaacctgacatgcatgttggtacaattatggagtctcgtgatgctaccttctttgaaagctttttcccaatgaaggatacacatagtagttcgagccaatcatctgaaataattcccagttcaatcacaccaccagaacaaactgaacatacacatgaacatgtcactgaggaggatgacagtgcagctccacgaaggagtaagagacaaaggacggctaagtcttttggtaaggattttactttgtacctcgtggatgacactcctaagtcaatttcagaagcatatgcatctcctgatgctgactactggaaggagactgtccgtagtgaaatggattccattatcgctaacgggacttgggaggtgacagagcgaccctatgggtgtaaacctatgggatgcaagtgggtgttcaaaaagaagcttaggcctgacggtactattgaaaagtacaaggctcggcttattgctaagggctatactcagaaagaaggcggagatttctttgacacttactcacctgttgctagattgaccacaattcgtgtgctactttccctagcagcctcacatggtcttctcgttcatcaaatggacgttaagacaacttttctgaatggagagctggatgaggagatctatatggatcagcctgatgggtttgtagttgaaggtcaagaaggcaaggtgtgcaaattgttgaagtctttgtatggtctgaaacaagcttctaagcaatggcatgagaaatttgacaaaacattgacatctgcaggcttcgcagtcaatgaggcagataaatgtgtgtactatcgccatggtgggggtgagggagttattttatgcttgtatgttgatgacatactgatatttgagacaaatcttgaggtgataaatgaggttaaatcattcttgtctcaaaattttgatatgaaggatttgggagtagctgatattatcttaaacattaagctaattagaggtgagaatgggattacactcttgcagtcccattatgtggagaagatcttgaatcgctttggctatattgatagtaagccttctccaacacctgatgatcctagcttgttgcttcgcaagaacaagagaattgctaggaatcaactggaatactcccaaatcattatctcgttgatgtacctggctagtgcaactaggcctgatatctcctttgctgtgagcaagttgaaccgatttacctctaatccgggagatgatcactggcgtgtgcttgagcgagtaatgcgctatctgaaaggtactgtggaattggggcttcactatactgggtatcctgcggtactggagggttatagtgattctaactggatctctgatgtggatgagatcaaagccactagtggatatgtcttcacactgggtggcggtgctgtttaatggaggtcttgcaaacagaccattttgacgaggtcaaccatggaagcagagctgatggcactggatactgctactgttgaggcagaatggctgcatgatctattaatggatctgcctattgttgaaaaatcgacatgtgaaaagacgattgaagtctgtcaggaaattaagaaactctagagttataacgttggattacatccaaacagctagaaacctggcagatcctttcacgaagggactatcacgaaatgtgatagacaatgcatcgaaggagatgggtttgagacccatagtattcttcaaagaactcacctttgtgagcttgattgttggtcgcagtctatggagattttgggtgaatcttctaggaagcttactatagacctaggagta

SEQ ID NO: 23069 - DNA, 5730 bp, Oryza sativa
  Clone ID: TF_OsC1528_1880
atggcgaggggcgtagcgcgcgcggcgtcgttcggtggccgcgccgcgaccgcgaggtggtgctcgtaccggcgcatcacggtagccgtctgcctcgggaacctcgtcgccgcgctcctcgtgctccgctccctcacctccctcgcccccacaccgcccaaacgtgaggaagtggtggagtatacggaggagcagattaggaaggcggaggagtcgatccggattcgccgcgaggcggagcccgtcgagcttgtcgaggcggtgaagaatctgcggaagattttcaggcgggaggagaagaggcggaaggagttgccactggagttgaagcagaaggtctcgtatgagattgtgcagctcctgctcgatttgggggataacagcagtttcgctcagcaacgagctcggttgagctctcagccagcagcagcaccggctgctcctccttcccctttccctcccccctctccacgcagcagccccccggaggtgcgccatttccgacgttcggttgcctcgagcactcggcgtcagcaggacgccgagctcgccgcagcagaagagcgcaggcgagcaacggctcagaccgctgcagcagcagcgagggcggctagactggcggcagcggagttggcagcagccagggcggaggcggaagcagaggtggcggaagatgcggcacgtgcggcggaggtagaggttgagaccttgcgcagcagcatcaatggctccatcgccggcgacatcaccgccgacagggagcttgaggagctagcaagaggaagggcacgggagcgggcagagcggtgggcagcagcccacctccacggcggcggcggcggccaaagggaccgtgcgcccgctgacgggaacccagatgggcgcgggcgtgtcggcggcagcacggagcccgcgcgctgccctcgcaggcagcgtgactctctctcccttgaccggcgccatggccaccacggcgtccagacggtggtcagggactttggtcccggcggtgggtggcctaccctcaccaaaaccaactacatcgagtgggccgcggtgatgagggtgaggctccaggtgcggcacatgtgggaggcagtatggtacggcgacgtcgactacgacgaggatcggcgggcactggatgccctcatcgctacagtcccgcccgagatgcagttctcgctttcccagaagcggactgccaaggaggcctgggatgccatcgctgcggcacgcatctgcagtgaccgcgcccgcaagtccacactgcaggcactccgcaaggagtgggagaacatggccttcaagccagagaagtacaggcagatcgctcgctcgatcgagtctcagctggacctctccacgatgtcgatcgaggaggcgttaggtcgcctcaaggtcgtcgacggtgatgagccacagcctctctcggggcctatcaccattggcgggaagctccatctcactcgggaccagtgggaggcctctcagggtgacgggaggaagggggagtcatcttccccgacaggcggccgtaagctgcgcaaggtgcggggaggtgtccagctacggtgggcgcgaagacgtgccgagggtggcgcccgcagaggcgcccaaggcggcgccaccggcaaccacaagccggcacgagacgacgcctaccgcaactgtggcaagcttggccattgggccaaagactgtcgacagccacgacgcggccaggcccacgtcgcacgtgtggaggaggaagagccggctctgctcctggctcacgcaagcatcgagctacctccaacggcaccggccgcagcagtttttctccaccttgatgagccgaaggtactcgtctccctctgcaacggctctagcaacgacaaggctgatgggtggtacctcgacaccggcgccacccatcacatgaccggccgacgggagttcttcaccgagttcgactccagcgtccgaggctccgtcaagtttggggacgcctccggcgtggagatcaagggcgttggctccgtcaccttcaccgccaagtccggtgagcacaggttgctcaccggagtctactacatccccgcgttgaggaattctatcatcagcgtgggacagctggatgagaacggctcacgcgtgttggtcgaggacggtctcatgaggatttgggatcgccgtcgtcgccttcttgccaaggttgcacaaccagtttgcctcgccgctcgtcgagacgatgaggcgtggcagtggcacgagcgcttcgggcacctccacttcgaggcgttgaagcggctcaatgccaaggagatggtgcgaggcatgccgtgccttgaccacgtggagcaactctgcgacgtctgcgtggtaacgaagcaacggcgactcccctttccccagcagacgagcttccgagccaaggagcggctcgagctcgtgcacggggacttgtgtggcccagtgacaccggccacaccaggaggacgacgttacttcctgctgctcgtcgacgacctctcccgctacatgtgggtgatggtcctcgacagcaagggagaggctgcggacgccatcaggcgcgcgcaggctgctgcagaggcggagtgtggccgcaagctgcgcgtgctgcgcaccgacaacggcggcgaattcacggcggctgaatttgcttcgtactgcgctgatgagggcattcagcgccactacatcgcgccgtacagcccgcagcagaacgacgtcgtcgagcggcgcaaccagacggtggtggggatggctcgggctctcctcaagcagagggggatgccggccatcttctggggagaggcggtggtgacggccgtctatatcctcaaccgctctcctaccaagaccctcgatggcaggacaccgtacgaggcatggcatgggcgcaagccggcggtctcccacctgcgggtcttcggctacctcgcgttcgccaaggagcttggccacatcggcaagctcgacgacaggagcaccccaggggtgttcatcggctacgcggagggctcgaaggcctaccgcatcctcgacccggagacacatcgtgtgcgcacagcgcgcgacgtagtgttcgacgaagggcgagggtgggtatgggacaaggcggtggacgatggttcgactccgacgtacgacgacttcaccatcgagtacgtccacttcgagggagctgggggagtaggcagctcttcttcaccgagcgtgtctaccccagtccccgagcctccaccgactccgacatcaacacatcctcgggccacgacttcgactacgacgagctcttcgccgacaccaccccagccggtgaccccacgcactccagcaccaacagccactcctccaggcacgtatactcagacgccagctcgtgttgagcgcagcccggtggagttcgctactccgctctcccacgacggggagcgcatcgacgcataccacgacggcgagcagctacggtaccgtacgatggaggatcttctcggcgaccagccggtgccgggactggtgcctcgcgacctggaggcgcagttacaccttgcgtgcgacgacggtgagcctcggtcttttgcagaggccgagaaacacgcggcatggcgtgccgcgatgcagtcggagatggacgcggttcaggagaaccgcacctgggagcttgttgacctccctcgtggtcaccgcacgatcacccttaagtgggtgttcaagctgaagagggatgaagccggagccatcgtcaagcacaaggctcgcttggtggcacgcggtttcgtgcagcaagaggggatcgactacgacgatgccttcgctcccgtggcacggatggagtccgtgcgactccttgcgctggctactcaggaaggctggggcgtccatcacatggacgtcaagtcggcgtttctgaacggcgacttgaaggaggaggtctacgtgcaccagccgccgggatttgtgatccctggcaaggagggcaaggatgcggaggtcgcggcgttcaaggaggagatgaaggccaccttccagatgagtgatctcgggcctctctccttctacatggggatcgagaccgcctacgccaagcgcatcgttgagctggctgggctcaccgattgcaacccagctctcactccgatggaggagagactaaagctgagccgcgatagcacgacggaggaagtggatgctacacagtaccggcatcttgtggggagccttcgctacctcacccacacacggccggacttggccttctccgtcggctacgtcagtcggttcatgcagcgaccgacgacggagcaccagcaggctgtgaagaggatcatccgctacgttgcggggactctcgaccacggtctctactacccgaggtgtcctggcaaggcacacttcatcggctgcgaggccgagtacatggcggccttcgccgcttcgacccaggcgctctggcttgctcgactgcttagtgatctcctcggcagagacactggagcggtggagctcagggtggatagcaagtccgctctggccttggcaaagaaccccgtttttcacgaacagagcaagcacatccgggtgaggtaccacttcatccgaagctacttggaggaagggagcatcaaggcgagctacatcaacaccaaggaccagcttgcggacttgctcaccaagcctcttgggaggatcaaactaggagggtgcagcaataggcttgcagccagctatggttatatatatgtatccaacctccctcgggaagaagcagtggaatcatggcgtttcgagaagttaaaagatataaaaagtgcatctattcagaactcaacaaagttagacctctccaacgaggaagcaagaaccttaaagcgagcactacagttcaactggcatgtgctgctggaagacattggtctttggataccatcagaagtctcacacactgaacatgatgacaaacctgagaatgaaccagaagaagaagagataatagctggtccacctttgccctcacaatgcaatgctgagctacatactgattacgatggtgctgctgttagatggggcttaacacaccccaaagaatctgctgccgattgctgtcaagcatgtctagaccaggctaagaatgccaggccaggtgaactaaggtgtaatatatgggtttattgcccatcagagtttggatgtttctctccagataaatatgagcataaacatcaggagtgctggttgaaacaggctgaccaccctaaactcaacttcaaagacaagtattccgagtcatacagagattctcatcccactgcccctgtcgttgtgccctggatgtcaggtgtcatcagcgcatgagctgttagtccccagaggctcatctgagattgggagatttgtaccgatgaaaaacttaaccaaagcaacttcatataccgattcttcctcgttttttttttcttttgccatgatacgtttctctttctcttgtcttgggtatatacgaatatgatgtaaaccttagattagtcgttctgatagcaaaaggttcatttgagggaggcttattttgtggccaagggaatgtgagtagactgattaaatacaatggttccatcaagagaaatgatggtgctcttgcacattttccgctccaattcttttgtctctgatcacgaactttcctaaagcaccattcggattactaatccaaaacggacttaatct

SEQ ID NO: 23070 - DNA, 4548 bp, Oryza sativa; identical to SEQ ID NO: 14064
  Clone ID: TF_OsC91_2308

SEQ ID NO: 23071 - DNA, 1410 bp, Oryza sativa
  Clone ID: TF_OsC1528_1619
tcactgcaagccgcccgacgagtctgcgccagacccgccgccaccaaaagcaattgctatcccagcaaccgcttcctcctggactccacctgcaacagtgcacccacgcagcttataaagatgcgactccaccttctctccagtcatcacagccatcttgccattcatgatctcaatggtcttcctattccgattaccgcggaatattaacccttcttcatgcaaggttccaagcgaaatcagattcctctttagccctggtacatgcctgactccctgaagaacatgttcacctccatcttctagcttgattttgacttcacctactcccatggccggataacttgtgtcatcgcctaagtagacaaaaccaaactcaccagacttgtatgaagagaaccactccttccttggcgtcatatgaaacaagctagctgaatctaatatccacgcttctgcatccttagactgtgcacttgacatcgtgagaaaatcacaaccatcgctatccgagtcatttgaagaagtcactgtattagcctttgcttttcccttcagtgttggacactccctgcttatatgcccccactcatcacatctgaagcattgcaccatcttcttctttttgttcttctttaccttatgcccagcatgatcttctttgactagcaaaccctccgcttgagatgtttcaccctctttattctttctcatctgatcacgagccagcaacgcagaagtgatatctttagttttgatggtctccttgccgtacgtcaaagtagtcaccacatgctcatacgatttaggtaacgaacacaaaagaactatggccttgtcttcatcgtcaacttccacatccatcttcacaagatcagtgactagttgattgaaaacgttcacatgtgctgtcagatccgccccttcctgcatttttaacccatacaacttctgatctgagagacatagccttattgtcgcagccgcctgcaactgcatctcctcccaatcgtcatcctccatcttggccggtttgacacccttcaaagcctttgaacctccttgttgagctaacaaatctttgaccctagtcgtgttcgctataatccgatgtgaccaatcttccaccctcgatgtgcctctactccgcatgatctcgtcggcctggcttggtcgacccatacgcgcgcactttgtcacgagcctctgcacagcaagcctattgagccccttgtaccatgtttgaccaatgtcctgccgagccgcccaaaaatcgctgccgctttgttgctttggttcggctctctcttcggcacgtgcgtcgggcgcgccgtccatggcgctacccctcagatctctccagtcgccttcggccacgcccggccccgtcttccggtcattttccgccat

SEQ ID NO: 23072 - DNA, 3339 bp, Oryza sativa; identical to SEQ ID NO: 14079
  Clone ID: TF_OsC359_5822

SEQ ID NO: 23073 - DNA, 5291 bp, Oryza sativa; identical to SEQ ID NO: 14082
  Clone ID: TF_OsC359_6222

SEQ ID NO: 23074 - DNA, 3373 bp, Oryza sativa
  Clone ID: TF_OsC359_7153
aaggtgggttgtgagcatatggttttgatggttgtgctcatgacaattaaggaccggttcgcgagctactgttgtgaaacatttaccgtgccaaccacaagccagcatgggcaacggctttatcttttgtatagcatgatttattatggtgtgccagactgtgaagcggcgagaagtctgtgggggtcgctggggagtccattgcctctggttttgagggggagatcatgatccaggaacggtgcactgtgatgagttgtgttgtgcgaggggtattgtcacagttcctttccaagaaattccaggcgtgacacgtagctcctccagcacctcccgcagttcccgcagcgctcgcagctccagctccggttccggctcccgttccagtgtcagctccggcgtccgctctctccttctctccagcgtcagccgccaggggtccagccagtggcaacggagatggtcaacatcaggaatggcagccgcgcagccggtgagggcagcaatggcgaagagcacaccgacagtggatatcccaacagcgcctctggcaatgggcaacagggcagtaactgagtacctccatgagttcaatcgccaagcgcgatatgcaccggaggatgtccgcactgacgcggagaagcaggagaagttcctagcaggcctggatgacgagctgaccaaccagttgatctctagggattacgctgacttcgagaagctggtagacaaggcaatccgccaggaggatcagcgcaacaaaatggacaggaagagaaaggcagcgcagttccggtccaaccaaggaagtcaccagcgaccgcgcttcactcccggacagcagggtggacctaccaccatgattgtccaccagtatcgcccgttcaactcaagtagcttccaccaggtcgccagtggcagccagaaccacccgggaggtcagcccaaccgcagtgcagctccgcgcccaccaatggccacagcacaggcagctccatcagtccaagccaagaaggagactggagtaaagccagggtcctgcttcaactgtggcgagcatggccactttgctgacaagtgcccgaagctaaggcgtgctgggccaaggtttgcccaagctcgtgtcaaccacgcgtccgcggaagaggcgcaagcagcactagaggtcgtactggaaatccaaatatcaccatttctagccaacctcgtccttctcgaatccaaagacctagatgtcattcttgggatggattggctgaccaagttcaagggtatcattgattgtgcgaatcgcacggtcaccttgaccaatgagagaggggaaacagtggtgtacaagtcaccagtcgcactgaagcagggaatctccttaaatcagattgaggtggagaattcggtggtcaccgcggagaaaagttcgaggaaattggaagatatccccatagtctgcgagtattcagaggtgttccctgaggacctcactaccatgccacccaagagagagattgaattccggattgatttggcaccggggactgctccaatttacaagagaccgtacagaatggcagccaatgagctggcagaggtcaagaagcaggttgatgagcaactgcagaaagggtacattcgaccaagtacttcaccttggggtgctccggtcatttttgtggagaagaaggacaagacgaagagaatgtgcgtcgattatcgcgcactcaatgaggtcacaatcaagaacaaataccctttgccacggattgatgatctgtttgatcagctgaaaggagccaaggtgttttccaaaatagacctacgatcaggttaccaccagttgaggattcgggaagaggatattcccaagacagctttcaccactcggtatgggttgtatgagtgcacggttatgtcttttggacttaccaatgcacctgcattcttcatgaatctgatgagcaaagtgtttatggagtttcttgacaagtttgtcatggtgttcattgacgacatacttatctattcaaagtccgaagaagaacatgagcaacatctccgtctggtactcgagaagttgaaggagcaccagttatatgccaagttcagtaagtgtgacttctggttgtcggaagtcaaatttctgggtcacgtcattactgctcaaggtgtggcagtggatccatcgaatgtggagtcagttaccaagtggaccccacctaagacagtgtcacagattcggagtttccttggacgtgcgggttattaccgtcggttcattgaaaatttttccaggattgccagacctatgactcagttgcttaagaaagacgagaaattcaagtggacagccgagtgtgacaagggttttgaggagctcaagaagaaattagtgtctgctctagttctgaatttgcccgaccagacgaaagacttccaagtctattgcgacgcgtctcgtcatgggcttggatgcattctaatgagggcagagtggtcgcttatgcctcacggcagttgcgtctgcatgaaggaaactatccaacacatgacctggaattggcagcgaggcacggcctacgctcgtggatcaagtcagagcagctcatgtaaatatcctgagatagctgaactgaaaaagaatatgagggtcggaaaagcccgggatttccacgaagatgaacatggcacaatctggttgggagaaagattgtgcgtacctgatgacaaagagctgaaagatctgatactcaccgaggctcaccagactcagtactccattcatccaggtagtaccaagatgtaccaagatctcaaagagaaattttggtgggccagtatgagaagagaaatcgctgaattcgtcgcactctgcgatgtttgtcagcgagtcaaagcagaacataagaggcccgcaggactgcttcaacctcttcagatcccggaatggaaatgggaagagattgggatggatttcatcacagatggccagaccgagagcgtcaatcagattttggaggatatgttgcgagcctgtgcgcttgattttggaggagcttgggataaaagtctgccttatgcggagttctcctacaacaacaattaccaggctagtctgcaaatggcaccgttcgaagcgttgtatggccggaagtgccgcacacctctcttctgggatcaaacaggcaaacgtcaactgtttggaacagaagtgctaacggaagcagaggagaaagtcagaaccatcagagagaggctgagaattgcacaatctcgacagaagagctacgcagacaaccgccgaagggagctcacttttgaagcaggggattatgtgtaccttcgtgttactccgctccggggagtacaccgtttctag

SEQ ID NO: 23075 - DNA, 529 bp, Oryza sativa
  unsure (1)..(529): unsure at all n locations
  Clone ID: TF_LIB4371-025-R1-K1-B10
gggagatgagtgcgtcttcgtccaccttccgccccccaccggcggctgctcactccgacggccgccgtccaggaaaagcccagctgctgccccctcgtcctcctgggcagatgtcgtcagggccccgcgcgcgggcccgcctaccttgtcgcagcgggacattgaagctggctggtgcgtggtgaagcgtcggagtaaaagctcttctgccggtccaaccaccgccatttctccgcctgcgagcgctcgtccgattccccgatggctccagggcagatgcttctgctgtctcggtctggggcaccttaaagcagcctgcaaggaaccccggcgctgctaccggtgttggtaccccggccatctggagagagactgcaaagagggttcgncctcccccaagcgagcggctncgggcactgcggcggcggnaacccttgcgaaagcggctncggnccagattgcgacggcgaagaagggaggcgcggnccccgncctgactncggcgcgtctggcggngaagaaggggggc

SEQ ID NO: 23076 - DNA, 6024 bp, Oryza sativa
  Clone ID: TF_OsC359_5505
atggagcccgagatttccgcggccgattccttcccctccggccgccctctctcactcccgacgctatttaaacgctccccgtgcctctctcctccgtttccgccactcgccgcactctctccccgtcggattcgagctcgcgccgtcgtcctctctctccgccgtcggcgccgagctccggttcgccgccgtcgtcgccccgtacctcctcccgcttcggcatcgcctccttcggcttcgccgcgttctcgtcgacctcgtccactcctccgtttcgcccgccaaccgccggagcaccgccgtcctcgtcgacccgagccgcgccgccgcctctctccgctttggtcgccgttcccgtcatcgccgtcgacccggggtgagccgaggaccgccatttcgtttcccccttccctcccctctctcggccgccgctccgcgtgcctatggccgccgccggcgaccataggggcgcgggcgcgccgcctcccgtcggccgtgccggcgaggccgccttcgggcgcgccccgcggctgccaggtggggcccggccgtcagccgcccgcgcctgcgggtacggctgacgcgtgggacccacggcgccagccggcgtcagccgcgtgcgcccggtccaccgtggacccacctcggccatataaggaccggtcttcgggcctctgttgcaaagcactaccgtactttcacatgtctagtggggcaaatgaaggctacacgagctgcggcccggtagtcgagatgtcatggcacagggccggtgtcctgctgctaggggctcagtcctgcctgcatgtcccgggggttccggccgtaggtgggattgggtcggtactcttgtctatggctaggatgggttggaaactatgtcacgtctttcgtctgtataccgtggtgatggccggcagcgtcacccgtcgcggtttggacatgactggtttcgtcttggagctgcggggcatgtgcgttgtcctggggtatccacatggagtggactaccagggcaggccgcttccggagcaggagggtgacgatggagagccccacgctgcttgggaggtcactgcagtgatcctcgctggctctcccgagcggacttcgctggcagtcaccgcgggtggagattctttccccgccgctagccagagcgccgctctcctcgccatcggcactcttcaccagcgctacccggacgagttgcagcactcgccctaccgctaccaccctcgccgcggaggagcccgcgactacgccaccttccgggatgctagctcggaggatgacgctaccatcgtgcacctggcgcgcatggtggaggcgtacgacgcggctcgtatcgacttccatcagatggtgcgccgtgggatggtcgagaacaacttgaagatcctggagctgcgtcaggagaacctgcagctcaagaaggacctagacgcggtggaggcgcagctgcatcagctcaagatcgcccagggagaggtctgccgccccaagcgtcgccgcgtctgccgcagccagaagatcaccgcccgcaagagcacctccaggcccgagcttgttcgtcagtccctggcgtggacttgcttcgtcgagacccctcgtgccgagcctgcgcccgtggttccccaggagggggaagcctccggcgttggtagcacggaggatgcgctgttgctcaccttccgtcctggcccgtcgcagcggaggagtgctaacaccggtgatggcaaccagcctgaaggaagcaaccaccaccaccagggcagcccacctccacctcctcctccgcctccaccaccaccaccagataccaacgccattctcacccaaatcctcgcccagcaggccaacatgatgactgctttcctccaccacctccaaaatccgccacaacataatgctccaccaccacccccacaacactctaaactcgccgagttcctccgcatccgcccacctaccttctctagctccaataaccccgtggatgcgttggattggttgcatgccgtggggaaaaagctagacactgtgcagtgcagcgatgaggagaaagtcatcttcgccgcccaccagctgcaggggcccgcatctctatggtgggaccatttccaggctacgcagccagaggggcaacctattacatgggcccgtttcaccgccgctttccggagaacccatgtgcccgccggagtcgtggcccttaagaaaagggaattccgagagttgaagcaaggcaaccgctccgtgatggagtatttgcatgagttcaacaacctggcccgttacgccccggaggatgtgcgggaagatgaggagaagcaagagaagttcttggcaggaatggaccctgagctgtccgtccgtctagtctccggggactatccggatttccaacgtctggtggacaaaagcatccgcttggaagccaagcacaaggaactggagtcgcacaagcgccgcttggcgaatttccgcaatcaacagggtgctaaccaaaggatccgctacaccaatccctatccagggggatcttcctcgcagcagcaacaacagcagcagcaacctcgcttcgcgcctcgacctcaattcgtggtgcgcgtcccacagccgcagcagcagcagaatcaacaagggactcgtgcgccccgtcctcctacgccaactgtgcaacctggtcaaggccgcagggacgctcaaggtccgcaacgtctgtgcttcaactgcttcgagcccgggcactttgcggataaatgcccaaagctgaggcgtcagcaaggccaagcgccttcccgctccaacaacggtgagaaggatgtcatttggggtcgggtgaaccacgtgacagccgaggacgtgctgacaactccagacgtcatcgtcggtacgttcctcattcattccatccctgctaccattctgttcgactctggagcttcccactcgtttatatctgtgccattcgtggggagaaatcagttgggggtagaaaggcttaggaaccctctgctcatcaccacccctggaggggttatgacagcaaagtactatagccctgccgtccctatagaaattcaggggattccttttccctcggatctgattctgctagacaccaagaacttggatgtgatccttgggatgaattggttggctcaattccaaggagtagtggattgtgcgagacgcactgtcactctgtaccgagggccggaacaaccggttgttttctttgcacccccaacctctgtcagtagttccgaacttcaccagatagaactgttagaaatccccatcgtcagggagttcggagacgtgtttccggaagaactacccggtatgccgcccaaacgagagattgagttccggatagatcttgctccaggaaccactcctctgtacaagcgaccctaccgtacggcagcaaatgaactggccgaagtcaagaaacagttggaagagttgaaagaaaaggggtatatacgtccgagtacttccccctggggtgctcctgtgatttttgtggagaagaaagacaagacgaagaggatgtgcgttgactacagagctctcaatgaacttaaaggtgctactgtattctccaagatcgatcttcgttccggatatcaccaattacgtattcgtgaagaagacattccgaagaccgcattcaccacgcgatacggactgtatgaattcacggtgatgtcgttcggtttaaccaatgcacctgcctttttcatgaacttaatgaacaaagtgttcatggaatacttggataagtttgttgtggttttcattgatgacattctggtatactcacaatccgaggaagaccatcagcaccatctccgtctggtattgggaaagttgcgggaacatcaattgtatgccaaacttagcaagtgtgagttctggttgtccgaagtcaaattcttagggcacgtgatatctgctaaaggagttgctgtggaccccgaaacagtgaccgccgtcactgattggaagcaacccaagacagtcactcaagtccgcagtttcttaggtttggcaggatactaccgaaggtttatcgagaacttctccaaaatcgctcgacccatgacacagttgttgaagaaagaagagaaatttgtgtggagcccgcaatgcgagaaggcgtttaaaactctcaaagaaaagctggtttcctcgccagtgttaatcttgccggatactcgcaaggatttcatggatggtcatgtggtggcctacgcctcacgccagctacggcctcatgaaggcaactaccctacccatgatttggagttagctgcggtggttcatgctctaaaaatctggcggcactatctcattgggaatcgctgtgaaatatatactgatcataagagtttgaaatacatcttcactcagtccgacctgaatcttcggcaaaggagatggttagaactcatcaaggattatgatgtgggaattcactatcatcctggtaaggccaacgtggtcgccgacgctctaagtcgagaaagccattgcaacactcttaacgttcgtggcattccacccgaacttagtcaacagatggaagccctgaacctaagcatagttggtcgcggattcttggctgcgttggaagccaagcctaccttgctcgatcaaatccgcgaggctcagaagaacgatccggacatgcatggactcctcaagaatatgaaacagggtaaagccgctggtttcacagaggatgaacacggaaccctatggaacggaaatcgagtatgcgttccagataacagagaacttaaacagctgatacttcaggaagctcacgaaagtccttattccatccaccctggcagtacgaagatgtacttagacttgaaggagaaatactggtgggttagtatgaagcgggaaattgcagagttcgtggccctttgtgatgtgtgccagcgtgtcaaggcagagcaccaacgaccggccggacttctccaacctctccaagtacctgaatggaaatgggatgaaattgggatggatttcatcaccggacttccaaagacccaaggtggatatgattctatatgggtagttgtggatcgattaaccaaggtagctcgattcattcctgtgaagaccacctatggagggaacaaactagccgagctctacttcgctaggatcgtgagtctccatggcgttcccaagaaaatcgtatctgacaggggaagccaattcacctctcacttttggaagaagctccaagaagagctgggtacccgattaaacttcagcaccgcataccacccgcagacagatgggcagaccgagcgtctgaatcagatcctagaagatatgcttcgcgcatgtgtcctggatttcgggaagacctgggataagagtctcccctatgccgagttctcctacaataacagctatcaagccagcatacaaatggcaccttatgaagcgttgtatgggcgcaaatgccggacaccgctcttgtgggatcaagttggggaaagccaagtgttcgggactgatatcctgagagaagctgaagctaaagtcagaaccattcgagataatctaaaggtggcacagtcccggtttcggacaaaagggaagctcgcacctcggtatgtgggtcctttccgtatcgttgcccgacgcggagaagtcgcttaccaattggagctgcccgcctccttgggcaacgtgcatgatgtgttccatgtgtcgcaactcaagaaatgccttcgagtgccatccgagcagactgacccagagcaaattgaagttcgcgaagacttgacctacgtggagaggccagtgaaaatcctggacaccatggagcgcaggaccaggaaccgggtaatccgtttttgcaaggtccagtggagcaaccacgccgaagaagaagctacctgggagcgtgaagacgagctgaaggcagcccatcctgatctcttcgccagttcttccgaatctcggggtcgagattccgtttaa

SEQ ID NO: 23077 - DNA, 5361 bp, Oryza sativa; identical to SEQ ID NO: 14171
  Clone ID: TF_OsC359_5520

SEQ ID NO: 23078 - DNA, 2513 bp, Oryza sativa
  Clone ID: TF_OsC359_5522
atgtcatggcacagggccggtgtcctgctgctaggggctcagtcctgcctgcctgtcccgggggttccggccatggccggcagcgtcacccgtcgcggtttggacatgactggtttcgtcttggagctgcggggcatgtgcgttgtcctggggtatccacatggagtggactaccagggcaggccgcttccggagcaggagggtgacgatggagagccccacgctgcttgggaggtcactgcagtgatcctcgctggctctcccgagcggacttcgctggcagtcaccgcgggtggagattctttccccgccgctagccagagcgccgctctcctcgccatcggcactcttcaccagcgctacccggacgagttgcagcactcgccctaccgctaccaccctcgccgcggaggagcccgcgactacgccaccttccgggatgctagctcggaggatgacgctaccatcgtgcacctggcgcgcatggtggaggcgtacgacgcggctcgtatcgacttccatcagatggtgcgccgtgggatggtcgagaacaacttgaagatcctggagctgcgtcaggagaacctgcagctcaagaaggacctagacgcggtggaggcgcagctgcatcagctcaagatcgcccagggagaggtctgccgccccaagcgtcgccgcgtctgccgcagccagaagatcaccgcccgcaagagcacctccaggcccgagcttgttcgtcagtccctggcgtggacttgcttcgtcgagacccctcgtgccgagcctgcgcccgtggttccccaggagggggaagcctccggcgttggtagcacggaggatgcgctgttgctcaccttccgtcctggcccgtcgcagcggaggagtgctaacaccggtgatggcaaccagcctgaaggaagcaaccaccaccaccagggcagcccacctccacctcctcctccgcctccaccaccaccaccagataccaacgccattctcacccaaatcctcgcccagcaggccaacatgatgactgctttcctccaccacctccaaaatccgccacaacataatgctccaccaccacccccacaacactctaaactcgccgagttcctccgcatccgcccacctaccttctctagctccaataaccccgtggatgcgttggattggttgcatgccgtggggaaaaagctagacactgtgcagtgcagcgatgaggagaaagtcatcttcgccgcccaccagctgcaggggcccgcatctctatggtgggaccatttccaggctacgcagccagaggggcaacctattacatgggcccgtttcaccgccgctttccggagaacccatgtgcccgccggagtcgtggcccttaagaaaagggaattccgagagttgaagcaaggcaaccgctccgtgatggagtatttgcatgagttcaacaacctggcccgttacgccccggaggatgtgcgggaagatgaggagaagcaagagaagttcttggcaggaatggaccctgagctgtccgtccgtctagtctccggggactatccggatttccaacgtctggtggacaaaagcatccgcttggaagccaagcacaaggaactggagtcgcacaagcgccgcttggcgaatttccgcaatcaacagggtgctaaccaaaggatccgctacaccaatccctatccagggggatcttcctcgcagcagcaacaacagcagcagcaacctcgcttcgcgcctcgacctcaattcgtggtgcgcgtcccacagccgcagcagcagcagaatcaacaagggactcgtgcgccccgtcctcctacgccaactgtgcaacctggtcaaggccgcagggacgctcaaggtccgcaacgtctgtgcttcaactgcttcgagcccgggcactttgcggataaatgcccaaagctgaggcgtcagcaaggccaagcgccttcccgctccaacaacggtgagaaggatgtcatttggggtcgggtgaaccacgtgacagccgaggacgtgctgacaactccagacgtcatcgtcgggagttcggagacgtgtttccggaagaactacccggtatgccgcccaaacgagagattgagttccgaatagatcttgctcaagaaaccactcctctgtacaagcgaccctaccgtatggcagcaaatgaactggctgaagttaagaaacagttggaagagttgaaagaaaaggggtatatacgtccgagtacttccccctggggtgctcctgtgatttttgtggagaagaaagacaagacgaagaggatgtgcattgactacagagctctcaatgaagtcaccatcaaaaccaagtaccctcttccccggatcgatgatctgttcgatcagcttaaaggtgccactgtattctccaagatcgatcttcgttccggatatcaccaattacgtattcgtgaagaagatattccgaagaccgcattcaccacgcgatacggattgtatgaattcacg

SEQ ID NO: 23079 - DNA, 1624 bp, Oryza sativa
  Clone ID: TF_OsC359_5526
atgaagatcctggagctgcggcaggagaacctgcagctcaagaaggacctcgacgcggtggaggcgcagctgcatcagctcaagatcgcccagggagaggtctgccgccccaagcgtcgccgcgtctgccgcagccagaagatcaccgcccgcaagagcacctccaggcctgagcttgttcgtcagtccctggcgtggacctgcttcgtcgagacccctcgtgccgagcccgcgcccgtggttccccaggagggggaagcctccggcgttggcagcaaccacaaccaccagggcaacccacctccaccttcttcttccgcctccgccaccaccaccagacaccaacgccattctcacccaaatcctcgcccagcaagccaacatgatgactactttcctccaccacctccaaaatccgccacaacagaatgctccaccaccacctccccaacactctaaactcgccgagttcctccgcatccgcccacctaccttctctagctccaacaaccccgtggatgcgttggattggttgcatgccgtggggaaaaagctggacactgtgcagtgcagtgatgaagagaaagtcatcttcgccgcccaccagctgcagggacccgcatctctatggtgggaccacttccaagctacgcagccagagggacagcctattacatgggctcgcttcaccgccgctttccggagaacccatgtgctcgccggagtcgtggccctcaagaaaagggaattccgagagttgaagcaaggcaaccgctccgtgatggagtatttgcatgagttcaacaacctggcccgttacgccccggaggatgtgcgggaagatgaggagaagcaagagaagttcctggcaggaatggaccccgagctgtccgtccgtctagtctctggggactatccggatttccaacgtctggtggacaagagcatccgcttggaagccaagcacaaggagctggagtcgcacaagcgccgcttggcgaatttccgcaatcaacagggtgctaaccaaagggtccgctacaccaatccctatccagggggatcctcctcgcagcagcaacaacagcagcagcaacctcgctccgcgcctcgacctcaattcgtggtgcgcgtcccacagccgcagcagcagcagaatcaacaagggactcgtgcgccccgtcctcctacgccagccgtgcagcctggtcaaggccacagggacgctcaaggtcagcagcgtctgtgcttcaactgctttgagcccgggcactttgcggataaatgcccgaagccaaggcgtcagcaaggccaagcgcctccccgctccaacaacggtggcaaggacgtcattcggggtcgtgtgaatcacgtgacggccgaggacgtgctgacaactccagacgtcatcgttgagaagaaagacaagacgaagaggatgtgcgtcgactacagagctctcaatgaagtcaccatcaaaaacaacgtgtcaaggcagagcaccaacgaccggccggactcctccaaccactccaagtacccgaatggaaatgggatgaaattgggatggatttcatcaccggacttccaaagacccaaggtggatatgattctatatgggtag

SEQ ID NO: 23080 - DNA, 2359 bp, Oryza sativa
  Clone ID: TF_OsC359_5535
atgtcgtggcagagggttggtgccctgctgcttggggctcagtcctgcctgcctgtcccggagatggccggcagcgtcacccgtcgtggtttggacatgactggcttcgtcttggagctgcggggcatgtgcgtggccctggggtatccacatggagtggactaccaggccaggccgcttccggatcaggagggtgacgacgcggagccccacgctggttgggaggtcaccgcagtgatcctctctggctctcccgagcggacttcgctggcagttaccgcgggtggagattccttccccgccgcttgccagaacgccgctctcctcgccatcggcactcttcaccagcgctacccggacgagttgcagcactcgccctaccgctaccaccctcgtcgcggaggagcccacgactacgccaccttccgggatgctagctcggaggatgacgctaccatcgtgcacctggcgcgcatggtggaggtgtacgacgcggctcgtatcgacttccatcagatggtgcgtcgcgggatggtcgagaacaatctgaagatcctggagctgcgtcaggagaacctgcagctcaagaaggacctagacgcggtggaggcgcagctgcatcagctcaagatcgcccagggagaggtctgccgccccaagcgtcgccgcgtctgccgcagccagaagatcaccgcccgcaagagcacctccaggcccgagcttgttcgtcagtccctggcgtggacttgcttcgtcgagacccctcgtgccgagcccgcgcccgtggttccccaggagggggaagcctccggcattggtagcacggaggctctttctctgtttgctggttctgtgtggggttttcagatggtgacgaccaggagaaatgctgccaccggtgatggcaaccaacccgaaggcagcaaccacaaccatcagggcaacccacctccacctcctcctccgcctccaccaccaccaccagacaccaacgccattctcacccaaatcctcgcccagcaagccaacatgatgactgctttcctccaccacctccaaaatccaccacaacataatgctccaccaccacccccacaacactctaaactcgccgagttcctccgtatccgcccacctaccttctctagctccaacaaccccgtggatgcgttggattggtttcatgccgtggggaaaaagctagacacggtgcagtgcagcgatgaggagaaagttatcttcgccgcccaccaactgcaggggcccgcatctctatggtgggaccatttccaggctacgcagccagaggggcagcctattacttgggcccgcttcaccgccgctttccggagaacccatgtgcccgccggagtcgtggcccttaagaaaagggaattccgagagttgaagcaaggcaaccgctccgtgatggagtatttgcatgagttcaacaacctagcccgttacgccccggaggatgtgcgggaagatgaggagaagcaagaaaagttcttggcaggaatggaccctgaactgtccgtccgtctagtctctggggactatccggattttcaacgattggtggacaagagcatccgcttggaagccaagcacaaggagctggagtcgcacaagcgccgcttggcgaatttccgcaatcaacagggtgctaatcaaaggggccgctacaccaatccctatccagggggatcctcctcgcagcagcaacaacagcagcagcaacctcgccccgcgccccgacctcaattcgtggtgcgcttcccacagccgcagcaacagcagaatcaacaagggactcgtgcgccccgtcctcctacgccaacggtgcagcctggtcaaggccgcagggacgctcaaggtcagcagcgtctgtgcttcaactgcttcgagcccgggcactttgcggataaatgcccaaagccaaggcgtcagcaaggccaagcgcctccccgctccaacaacggcgggaaggatgtcattcggggtcgtgtgaatcacgtgacggccgaggacgtgctgacaactccagacgtcatcgttgggagttcggagatgtgtttccggaagaactacccggtatgccgcccaagcgagagattgagttccggatagatcttgctccaggaaccactcctttgtacaagcgaccctaccgtatggcagcaaatgaactggccgaagtcaagaaacatcgggatacctggcgggcagctggattaaatgaatcgcgcaacccccggggagaggcggtttggtattggggccttttccgcttcctcgaaaactacaatttgtccacaaggccccctcaagggtcgcgcaacctcaacaaggccgc

SEQ ID NO: 23081 - DNA, 3960 bp, Oryza sativa; identical to SEQ ID NO: 14114
  Clone ID: TF_OsC359_5541

SEQ ID NO: 23082 - DNA, 3205 bp, Oryza sativa
  Clone ID: TF_OsC359_5556
atggcggccggatcttccgcggccgagtccccctcatccggccgctctctccccctcccaacactatacaaaaactccccgtgcctccctccaccgtttccgccactcgccgctctctctccccgtcggattcgagctcgcgccgtcgccttctctctccgccgtcgccgccgagctccggtccgccgccgtcgtcgccccggacctcctcccgcttcggcatcgcctccttcggcttcgccacgtcctcgccgacctcgtccactcctccgtttcgcccgccgaccgccggaacaccgccgtcctcgtcaacccgagccgcgccgccgccttcctccgctccggtcgtcgtttccgccgtcctcgtcgacccggggtgagccgtggaccgaccctttcgcttcccccttccctcccctctctcgggcgccgctccgccgcgtcggtggtcgccggcggcgaccatcggggcgcgggcgcgccgcctcccgtcggccgtgccggcgaggtcaccttcgggcgcgccccgtggctgccatgtggggcccggccgtcagccgcccgcgcccgcgggtgcggctgacgcgtgggacccacggcgccggccggcgcaagccgcgtgctcccggtccaccgtggacccacctcggccatataaggaccggtcttcgggcctctgttgcaaagcactaccgtacttccacatgtctagtggggcaaatgaaggctacacgagctgcggcccggtagtcgagatgtcatggcacagggccggtgtcctgctgctaggggctcagtcctgcctgcctgtcccggaggttccggccgtaggtgggattgggtcgatgtacacctctgatcagagtataatctattcgaatagccgcgccctcggttatgggcaagccgagcaatgtacccaaatggccggcagcgtcacccgtcgtggtttggacatgactggcttcgtcttggagctgcggggtatgtgcgttgtcctggggtatccacatggagtggactaccaggccaggccgcttccggagcaggagggtgacgacgcagagccccacgctggttgggaggtcactgcagtgatcctcgctggctctcccgagcggacttcgctggcagtcaccgcgggtggagattccttccccgccgcttgcaaaacgccgcttttctcgccatcggcactcttcaccagcgctacccggacgagttgcagcactcgccctaccgctaccaccctcgtcgcggaggagcccgcgactacgccaccttccgggatgctagctcggaggatgacgctaccatcatgcacctggcgcgcatggtggaggcgtacgacgcggctcgtatcgacttccatcagatggtgcgccgtgggatggtcgagaacaacatgaagatcctggagctgcgtcaggagaacctgcagctcaagaaggacctagacgcggtggaggcgcagctgcatcagctcaagatcgcccagggagaggtctgccgccccaagcgtcgccgcgtctgccgcagccagaagatcaccgcccgcaagagcacctccaggcccgagcttgttcgtcagtccctggcgtggacttgcttcgtcgagacccctcgtgccgagcccgcgcccgtggttcctcaggagggggaagcctccggcgttggtagcacggaggatgcgctgttgctcaccttccgtcctggcccgtcgcagcggagaagtgctgccaccggtgatggcaaccaacctgaaggcagcaaccaccaccagggcagcccacctccacctcctcctccgcctccaccaccaccgccagataccaacgccattctcacccaaatcctcgcccagcaggccaacatgatgactgctttcctccaccacctccaaaatccgccacaacataatgctccaccaccacctccccaacactctaaactcgccgagttcctccgcatccgcccacctaccttctctagctccaacaaccccgtggatgcgttggattggttgcatgccgtgggaaaaaagctagacactgtgcagtgcagcgatgaggagaaagtcatcttcgccgcccaccagctgcaggggcccgcatctctatggtgggaccatttccaggctacgcagccagaggggcagcctattacttgggcccgtttcaccgccgctttccggaggacccatgtgcccgccggagtcgtggcccttaagaaaagagaattccgagagttgaagcaaggcaaccgctccgtgatggagtatttgcatgagttcaacaacctggcccgttacgccccggaggatgtgcgggaagatgaggagaagcaagagaagttcttggcaggaatggaccctgagctgtccgtccgtctagtctccggggactatctggatttccaacgtctggtggacaaaagcatccgcttggaagccaagcacaaggaactggagtcgcacaagcgccgcttggcgaatttccgcaatcaacagggtgctaaccaaagggtccgctacaccaatccctatccagggggatcctcctcgcagcagcaacaacagcagcagcaacctcgctccgcgcctcgacctcaattcgtggtgcgcgtcccacagccgcagcagcagcagaatcaacaagggactcgtgcgccccgtcctcctacgccaactgtgcagcctggtcaaggccgcagggacgctcaaggtccgcagcgtctgtgcttcaactgcttcgagcccgggcactttgcggataaatgcccaaagccgaggcgtcagcaaggccaagcgcctccccgctccaacaacggtgggaaggatgtcattcggggtcgggtgaaccacgtgacggccgaggacgtgctgacaactccagacgtcatcgttggtacgttcctcattcattccatccctgctaccattctgttcgactctggagcttcccactcgtttatgtctgtgccattcgtggggagaaatcagttgggggtagaaaggcttaggaaccctctgctcatcaccacccctggaggggttatgacagcaaacgtgtcaaggcagagcaccaacgaccggccggacttctccaacctctccaagtaccagaatggaaatgggatgaaattgggatggatttcatcaccggacttccaaaaacccaaggttgatatgattctatatgggtag

SEQ ID NO: 23083 - DNA, 6041 bp, Oryza sativa; identical to SEQ ID NO: 14243
  Clone ID: TF_OsC359_5558

SEQ ID NO: 23084 - DNA, 3547 bp, Oryza sativa
  Clone ID: TF_OsC359_5560
aaagggttttataaaaagaaaaatccctaaaagtcttttccccctccccttttcccttcttgggccggctcggcccagtccctccctctctctctctcttcccccgcggcccattggcctcccccgcgcgcgcgcgccgctgacaggcgggcccgcccgccgccctcgctgacgggtgggtcccacctgtcatccctgtcctcgcgccgcgcccgccgccgcccgtgccctagcgccgccgccgccgcggattccgccgcatcccgccgtccccgcgcgcattaaagagggggaaatcactccccgtgattccctctcccgtttccccctcttttccctctctctctccctcggattcgtccgatttgaatcccgcaatcgtcgccggcgtcttcaatggagccgagatctccgcggccgattcctccctctccggccgcgctctccccctcccggcgctatatatttgctccccgtgccttcctcctccgtttccgccgttcgccgcttgctctcgccgtcggattcgtgctcgcgacgtccacctctctctccgccgtcgccgccgacctccggtacgccgccgacgtcgctccgggctccctcccgactcggcgtcacctccatccgcttcgccgcgtcgtcgtccaccccgtccgccccttcgcttcgcccgccgaccgccggagctccgtcgccctcgtcatcccgaaccgcgccgccgtcttcctccgcttcggtcgccgttgccgtcgccgccgtcgacccggggtgagccgaaggccgtcgcttcgcttccctcttctctcctctctctcgggcgccgctccgccgcgccggtggtcgccggcggtgaccatcggggcgcgggtgcgccgcctcccgtcggccgtgccggcgaggccgccttcgggcgcgccccgcggctgccaggtggggcccggccgtcagccgcccgcgcccgcgggtgcggctgacgcgtgggacccacggcgccgaccgccgccagccgcgtgctcccggtccaccgtggacccacctcggccgtttaaggaccggtcttcgggcctctgttgcaaagcactaccgtacttccacatgtctagtggggcaaatgaaggctacacgagctgcggcccggtagtcgagatgtcatggcagagggttggtgccctgctgctaggggctcagtcctgcctgcctgtcccgggggttccggccgtaggcgggattgggtcgatgtacacctctaatcagagtataatctattcgaatagccgcgccctcggttatgggcaagccgagcaatgtacccaaatggccggcagcgtcacccgtcgtggtttggacatgactggcttcgttttggagctgcggggcatgtgcgtggtcttggggtatccacatggagtggattaccaggccaggccgctcccggagcaggagggtgaggatgcagagccccacgctggttgggaggtcactgcagtgatcctctctggctctcccgggcggacttcgctggcagtcaccgcgggtggagattccttccccgccgcttgccagaacgccgctctcctcgccatcggcacccttcaccagcgctacccggacgagttgcagcactcgccctaccgctaccaccctcgtcgcggaggagcccgcgacttcgccaccttccgagatgctagctcggaggatgacgctaccatcgtgcacctggcacgcatggtggaggcatacgacgcagctcgtatcgacttccatcagatggtgcgccgtgggatggtcgagaataacatgaagatcctggagctgcggcaggagaacctgcagctcaagaaggacctcgacgcagtggaggcgcagctgcaccagctcaagatcgcccagggagaggactgccgccccaagcgtcgccgcgtctgccgcagccagaagatcaccgcccgcaagagcacctccaggcctgagcttgttcgtcagtccctggcgtggacttgcttcgtcgagacccctcgtgtcgagcctgtgcccgtggttccccaggagggggaagcctccggcgttggtagcacggaggatgcgccgttgctcaccttccatggtgacgaccagaagaaatgttaacaccggtgatggcaaccaacccgaaggcagcaaccacaaccaccaaggcaatccacctccacctcctcctccgcctccaccaccaccaccagacaccaacgccattctcacccagatcctcgcccagcaagccaacatgatgactgctttcctccaccacctccaaaatccgtcacaacagaacgctccaccaccacctccacaacactctaaactcgccgagttcctccgcatccgcccacccaccttctctagctccaacaaccccgtggatgcgttggattggttgcatgccgtggggaaaaagttagacacggtgcagtgcagtgatgaagagaaagtcatcttcgccgcccaccaactgcaggggcccgcatctttatggtgggaccacttccaagctacgcagccagaggggcaacctatcacttgggctcgcttcaccgccgctttccggagaacccatgtgcccgccggagtcgtggctcttaagaagagggagttccgagagttgaagcaaggcaaccgctccgtgatggagtatttgcatgagttcaacaatctggcccggtacgctccggaggatgtgcgggaagatgaggagaagcaagagaagttcttggcgggaatggaccctgaactgtccgttcgtctagtttctggggactacccggacttccaacgtctggtggacaagagcatccgcttggaggccaagcacaaggaactggagtcgcacaagcgccgcttggcgagtttccgcaatcaacagggtgctaaccaaagggtccgctacaccaatccctatccagggggatcctcctcacagcagcaacaacagcagcagcaacctcgctccgcgcctcgacctcaattcgtggtgcgcgtcccacagccgcagcagcagcagaatcaacaagggactcgtgcgccccgtcctcctacgccggctgtgcagcccgttcaaggccgcagggacgctcaaggtccgcagcgtctgtgcttcaactgctttgagcccgggcactttgcggataaatgcccaaagccaaggcgtcagcaaggccaagcgcctccccgccccaacaacggtggcaaggacgtcattcggggtcgtgtgaaccacgtgacggccgaggacgtgctgacaactccaaacgtcattgttggtacgttcctcattcattccatccctgctactattctgttcgactctggagcttcccactcatttatatctgtgccattcgtggggaaaaatcagttgggggtagaaaggcttagaaaaccctctgctcatcaccacccctggaggggttatgacagcaaagtattatagccctgccgttcctatagaaattcaggggattccttttccctcggatctgattctgctaaataccaacaacttggatgt

SEQ ID NO: 23085 - DNA, 5991 bp, Oryza sativa
  Clone ID: TF_OsC359_5596
atggagcccgagagcgccgcgccggtttccttctcctccggccgccctctctcactcccaaccctatataaaccatccccgtgcctccctcctccgtttccgccgctcgccgctctctctccccgtcggaatcgagctcgcgccgtcgccctctctctccgccgccgccgccgagctccggtctgccgccgtcgtcgccccggaccttctcccgtttcggcgtcgccttcttcgggttcgccgcaacatcgccgacctcgtccacccctccgtttcgcccgccgaccgccggaacgccgccgtcctcgtcgacccgagccgcgccgccgcctttttccgctccggtcgccgttcccgtcgtcgccgtcgacccggggtgagccgtggaccgcccatttcgtttcccccttccctcccctctctcggccgccgctccgccgtgcctatggccgccgccggcgaccataggggcgcgggcgcgccgcctcccgtcggctgtgccggcgaggccgccttcgggcgcgccccgcggctgccatgtggggcccggccgtcagccgcccgcgcctcgggtacggctgacgcgtgggacccacggcgccggccggcgtaagccgcgtgcacccgttccaccgtggacccacctcggccatataaggaccggtcttcgggcctctgttgcaaagcactaccgtacttccacatgtctagtggggcaaatgaaggctacacgagctgcggcccggtagtcgagatgtcatggcacagggccggtgtcctgctgctaggggctcagtcctgcctacctgtcccgggggttccggccgtaggtgggattgggtcgatgtacacctctgatcagagtataatctattcgaatagccgcgccctcggttatgggcaagccgagcaatgtacccaaatggccggcagcgtcacccgtcgtggtttggacatgactggcttcgtcttggagctgcggggcatgtgcgtggtcctggggtatccgcatggagtggactaccaggccaggccgcttccgaagcaggagggtgacgatgcagagccccacgctgcttgggaggtcactgcagtgatcctcgctggctctcccgagcggacttcgctggcagtcaccgcgggtggagattctttccccgccgcttgccagaacgccgctctcctcgccatcggcactcttcaccagcgctacccggacgagttgcagcactcgccctaccgctaccaccctcaccgcggaggagcccgcgactacgccaccttccgggatgctagctcggaggacgacgctaccatcgtgcacctggcgcgcatggtggaggcgtacgacgcggctcgtatcgacttccatcagatggtgcgccgtgggatggtcgagaacaacctgaagatcctggagctgcgtcaggagaacctgcagctcaagaaggacctagacgcggtggaggcgcagctgcatcagctcaagatcgcccagggagaggtctgccgccccaagcgtcgccgtgtctgccgcagccagaagatcaccgcccgcaagagcacctccaggcccgagcttgttcgtcagtccctggcgtggacctgcttcgtggagacccctcgtgccgagcccgcgcctgtggttccccaggagggggaagcctccggcgttggtagcacggaggatgcgctgttgctcaccttccatggtgacgaccaggagaagtgctaatgccggtgatggcaaccaacctgaaggcagcaaccgcaaccaccatggcagcccacctccacctcctcctccgcctccaccaccaccaccagataccaacgccattctcacccaaatcctcgcccagcaggccaacatgatgactgctttcctccaccacctccaaaatccgccacaacagaatgctccaccaccacccccgcaacactctaaactcgccgagttcctccgcatccgcccacccaccttctctagctccaacaaccccgtggatgcgttggattggttgcatgccgtggggaaaaagctagacactgtgcagtgcagcgatgaggagaaagtcatcttcgccgcccaccaactgcaggggcccgcatctctatggtgggaccatttccaggctacgcagccagaggggcagcctattacttgggcccgtttcaccgccgctttccggagaacccatgtgcccgccggagtcgtggctcttaaaaaaagggaattctgagagttgaagcaaggcaaccgctccgtgatggagtatttgcatgagttcaacaacctggcccgttacgccccggaggatgtgcgggaagatgaggagaagcaagagaagttcttggcaggaatggaccctgagctgtccgtccgtctagtctccggggactatccggatttccaacgtctggtggacaagagcatccgcttggaagccaagcacaaggaactggagtcgcacaagcgccgcttggcgaatttccgcaatcaacagggtgctaaccaaagggtccgctacaccaatccctatccagggggatcctcctcgcagcagcaacaacagcagcagcaacctcgctccgtgcctcgacctcaatacgtggtgcgcgtcccacagccgcagcagcagcagagtcagcaagggactcgtgcgccccgtcctcctacgccagccgtgcagtctggtcaaggctgcagggacgctcaaggtcagcagcgtctgtgcttcaactgcttcgagcccgggcactttgcggataaatgcccgaaaccgaggcgccagcaaggccaagcgcctccccgctccaacaacggtgggaaggatgtcattcagggtcgtgtgaaccacgtgacggccgaggacgtgctgacaactccagacgtcatcgttggtacgttcctcattcattccatccctgctaccattttgttcgactctggagcttcccactcgtttatatctgtgccattcgtggggagaaatcagttgggggtagaaaggcttagaaaccctctgctcatcaccacccctggaggggttatgacagcaaagtattatagtcctgccgtccctatagaaattcaggggattccttttccctcggacctgattctgctagacaccaagaacttggatgtgatccttggaatgaattggttggctcaatttcaaggagtagtggattgcgcgagacgcactgttactctgtaccgaggaccggaacaaccggttgttttctttgcacccccaacctctgtcagtagttcagaacttcatcagataggactgtcagaaatccccatcgtcagagagttcggagatgtgtttccggaagaactacccggtatgccgcccaagcgagagattgagttccggatagatcttgctccaggaaccactcctctgtacaagcgaccctaccgtatggcagcaaatgaactggccgaagttaagaaacagttggaagagttgaaagagaaggggtatatacgtccgagtacttccccctggggcgctcctgtgatttttgtggagaagaaggacaagacgaagaggaggtgcgtcgactacagagccctcaatgaagtcaccatcaaaaacaagtaccctcttccccggatcgatgacctgttcgatcagcttaaaggtgccacggtattctccaagattgatcttcgttccggatatcaccagttgcgcatccgcgaagaagatattccgaagaccgcattcaccacgcgatacggactgtatgaattcacggtgatgtcgttcggtttaaccaatgcacctgccttcttcatgaacttaatgaacaaagtgttcatggaatacttggataagtttgttgtggttttcattgacgacattctgatatactcacaatcagaggaagaccatcagcaccatctccgtctggtgttgggaaagttgcgggaacatcaattgtatgccaaacttagcaagtgtgagttctggttgtccgaagtcaaattcttagggcacgtgatatctgctaaaggagttgctgtggaccccgaaacagtgaccgccgtcactgattggaagcaacccaagaccgtcactcaagtccgcagtttcttaggtttggcaggatactaccggaggttcatcgagaacttctccaaaatcgctcgacccatgacacagttgttgaagaaagaagagaaatttgtgtggagcccgcaatgcgagaaggcgtttcaaactctcaaagaaaagctggtttcctcgccagtgttagtcttgccagatactcgcaaggatttcatggtgtattgtgacgcttcgcgccaaggattggggtgcgtgctcatgcaggacggtcatgtggtggcctatgcctcacgccagctacgacctcatgaaggcaactaccctacccatgatttggagttagccgcggtggttcatgctctaaaaatctggcggcactatcttattgggaatcgctgtgaaatatataccgatcataagagtttgaaatacatcttcacccagtcggatctgaatcttcggcagaggagatggttagaactcatcaaggattatgatgtgggaattcactatcatcctggtaaggccaacgtggtcgccgacgctctgagtcgaaaaagccattgcaacactcttaacgtccgtggcattccacccgaacttaatcaacagatggaagccctgaaccttggcatagttagtcgtggattcttggctgcgttggaagccaaacctaccttgctcgatcaaatccgcgaggctcagaagaacgacccggacatgcatggactcctcaagaatatgaaacagggtaaagccgctggtttcacagaggatgaacacgggaccctatggaatggaaatcggcgtgtcaaggcagagcaccagcgaccggccggacttctccaacctctccaagtaccagaatggaaatgggatgaaattgggatggatttcatcaccggacttccaaaaacccaaggtggatatgattctatatgggtagttgtggatcgattaaccaaggtagctcgatttattcctgtgaagaccacctatggagggaacaaactagccgaactctacttcgctaggatcgtgagtcttcatggcgttcccaagaaaatcgtatctgataggggaagccaattcacctctcacttttggaagaagctccaagaagagctgggtaaatcagatcctagaagatatgcttcgcgcatgtgtcctagattttgggaagacctgggataagagtctcccctatgccgagttctcctacaataacagctaccaggccagtatacaaatggcaccttatgaagcgttgtacgggcgcaaatgccggacaccgctattgtgggaccaagttggggaaagccaagtgttcgggactgatatcctgagggaagctgaagctaaagtcagaaccattcgggataatctaaaagtggcacagtcccggcagaaaagttatgcagataaccgtcgccgtgacctggaattcgcagtgggtgactttgtgtatcttcgggtcacgccattgcgaggtgtacacaggtttcagacaaaagggaagctcgcacctcggtatgtgggtcctttccgtatcattgctcggcgcggagaagtcgcttaccagttggagctgcccgcctccttgggcaacgtgcatgatgtgttccatgtgtcgcaactcaagaaatgtctccgagtgccatccgagcaggccgactcagcgcaaattgaagttcgcgaagacttgacctacgtggagaggccagtgaaaatcctggacaccatggagcgcaggaccaggaaccgggtaatccgtttttgcaaggtccaatggagcaaccacgccgaggaagaagctacctgggagcgtgaagacgagctgaaggcggcccatcccgatctcttcgccagttcttccgaatctcggggtcgagattccgtt

SEQ ID NO: 23086 - DNA, 5337 bp, Oryza sativa; identical to SEQ ID NO: 14287
  Clone ID: TF_OsC359_5714

SEQ ID NO: 23087 - DNA, 2017 bp, Oryza sativa
  Clone ID: TF_OsC359_5748
caaatactcgcccagcaggccaacatgatggctgctttcctccaccacatccagaatctgccgcaaaacaatgctccacctccaccaccacccccacagcactctaagcttgccgagttcctccgcatccgcccgcctaccttctctagctcccataaccccattgatgctttggactggttgcatgccgtggggaaaaagttggacaccgtacagtgcaatgatgaggagaaagtcatcttcgccgctcaccaactgcaggggcccgcatctctatggtgggaccacttccaggctacgcagccagagggacagcctatcacctgggcccgtttcactgccgccttccggaggacccatgtgcccgccggagtcatggcccttaagaagagggaatttcgggagttgaaacaaggcaaccgctccgtgatggagtatttgcacgagttcaataatttggcccggtacgccccagaggatgttcgtgaagatgaggagaagcaggagaaattcctggcagggatgaaccctgagctgtctgtgcgtctggtctccggggactatcctgatttccagcgcctggtggacaagagcatccgcctggaagccaagcaaaaggaattggagtcgcacaagcgtcgcttggcgaatttccgcaaccaacgggggctaaccaaaggatccgctacaccaatccttatccaaggggatcctcctcgcagcagcagcaacagcaacctcgctccgcgcccttacctcaattcgtgcctggacaaggccacagggatgctcaaggtcaacagcgtctgtgcttcaactgcttcgagcccgggcactttgcggataaatgcccaaagccgaggcgccagcaaggccaagcgcctccccgccccaacaacggtggtaaggatgtcattcggggccgtgtgaaccacgtgactgccgaggatgtgttgacaactccagacgtcatcgttggtacgttcctcattcattccatccctgctaccattttgttcgactctagagcttcccactcgtttatttctgtgccattcgtggggagaaatcagctgggggtagaaaggcttatgaaccctctgctcatcaccacccctggaggtgttatgacaacaaagtattatagccctgccgttcctatagaaatccaaggaattcctttcccctcggatttgatacttctagacaccaagaacttgatgtgatcctcgggatgaattggttggctcaattccaaggagtagtggattgcgcaaggcgcactgtcactctgtatcggggccctgatcaaccggttgttttctttgcacccccaacttccgccggcagttcagtacttcattagctaggattgccagaaatacccatcgtcaatgagttcggagatgtgtttccagaagagctacccggtatgccgcccaagcgagagattgagttccggatagatcttgctccaggaaccactcctttatacaagcgaccctaccgtatggcagcaaataaactagccgaagtcaagaaacagttggaagagttgaaagaaaagggatatatacggccgagcacttccccctggggtgctcccgtgatttttgtggagaagaaagacaagacaaagaggatgtgcgttgactacagagctctcaatgaagttactataaaaaacaagtaccctcttccccggatcgatgatctgttcgatcaacttaaaggtgccactgtattctccaagattgatcttcgttccggatatcaccagttgcgcatccgtgaaaaagatatcccgaagaccgcattcaccacgctatacggactatatgaattcacggtgatgtcgttcggtctgaccaatgcttctgccttcttcatgaacttaatgaacaaagtgttcatggaatacctggataagtttgttgtggtctttattgacgacatactggtgtactcacaatcagaggaagaccatcagcatggctgccgcgtggggcccggccgt

SEQ ID NO: 23088 - DNA, 5109 bp, Oryza sativa
  Clone ID: TF_OsC359_5749
atggacatctctagggcaaatgaaggctacacgagctgcggcccggtagtcgagatgtcatggcacagggccggtgtcctgctgctaggggctcagtcctgcctacctgtcccggagattccggccgtaggtgggattgggtcggtactcttgtctatggctaggatgggttggaaactatgtcacgtcttccgtctgtataccgtggtgatggccggcagcatcaaccgtcgtggtctggacctgactggctttgttttggagctgcggggcatgtgtgttgtcctggggtatccgcatggagtggactaccagggcaggcagctcccggagcaggagggtgacgatgcagagccccacgctgcttgggaggttactgcagtgatcctcactggctctcccgagaggacttcgttggcagtcaccgcgggtggagattctttctccgccgcttgccagaacgccgctctcctcgccatcggcactcttcaccagcgctacccggacgagttgcagcactcgccctaccgctaccaccctcgccgcggaggagcccgcgaccacgccacctttcgggatgctagctcggaggatgacgctaccatcatgcatctggcgcgcatggtggaggcgtacgacgcggcccgtatcgacttccatcagatggtgcgccgtgggatggtcgagaacagcatgaagatcctggagctgcgtcaggagaatctgcagctgaagaaggacctagacgcagtggaggcgcagctgcatcagctcaagatcgcccagggagaggtctgtcgccccaagcgtcgccgcgtctgccgcagccagaagatcaccgcccgcaagagtacctccaggcccgagcttgttcgccagtccttggcatggacctgcttcgtcgagacccctcgtgccgagcccgcgcccgtggttcctcaggagggggaagcctcaggcgttggtagcacggaggatgcgctgttgctcaccttccgtcctggcccgtcgcagcggagaagtgctaacaccggtgatggcaaccaacctgaaggcagcaaccacaacaaccatggcagcccacctccacctcctcctccgcctccaccaccaccactagacaccaatgccatcctcacccaaatcctagcccagcaggccaacatgatggctgctttcctccaccacatccaaaatccgccacaacataatgctccaccaccacccccacaacactctaaactcgccgagttcctccgcatccgtccacctaccttctctagctccaataaccccgtggatgcattggattggttgcatgccgtggggaaaaagttagacaccgtgcagtgcagcgatgaggagaaagtcgtcttcgccgcccaccagctgcaggggcccgcatctctatggtgggaccatttccaggctacgcagccagaggggcagcctattacttgggcccgcttcaccgccgccttccggaggacccatgtgcccgccggagtcatggcccttaagaaaagggaattccgagagttgaagcaaggcaaccgctccgtgatggagtatttgcatgagtttaacaacctggcccggtacgccccggaggatgtacgggaagatgaggaaaagcaggagaagttcttggcaggaatggaccctgagctgtccgtgcgtctagtctccgggggatcgtcctcgcagcagcaacagcagcaacaacctcgctccgcgccccgacctcaattcgtggtgcgcatcccacagccgcaacaacagcagagtcagcaagggacccgtgcgccccgtcctcctacgacagccgcgcagtctggtcaaggccgcagggacgttcaaggtccgcagcgtctgtgcttcaattgcttcgagcctgggcactttgcggataaatgcccaaagccgaggcgccagcaaggccaagcgcctccccgctccaacaacggtggtaaggatgtcattcggggtcgtgtgaaccacgtgacggccgaggacgtgctgacaactccagacgtcatcgttggtacgttcctcattcattccatccctgctaccattttgttcgactctggagcttcccactcgtttatatctgtgccattcgtggggagaaatcagttgggggtagaaaggcttaggaaccctccgctcatcaccacccctggaggggttatgacagcaaagtattatagccctgctgttcctatagaaattcagggaattccttttccttcggatctgattcttctagacaccaagaacttggatgtgatccttgggatgaattggttggctcaattccaaggagtagtggattgcgcgagacgcactgtcactctgtaccgagggccggaacaaccggttgttttctttgcacccccaacctctgtcagtagtttagaacttcatcagataggactgtcagaaatccccatcgtcaaagagttcggagacgtgtttccggaagaactacccggtatgccgcccaagcgagagattgagttccggatagatcttgctccaggaaccactcctctgtacaagcgaccctaccgtatggcagcaaatgaactggccgaagttaagaaacagttggaagagttgaaagaaaaggggtatatacgtccgagtacttccccctggggtgctcctgtgatttttgtggagaagaaagacaagacgaagaggatgtgcgttgactacagagctctcaatgaagtcaccatcaaaaacaagtaccctcttccccggatcgatgatctgttcaatcagcttaaaggtgccacggtattctccaagattgatcttcgttccggatatcaccagttgcgcatccgtgaagaagatattccgaagaccgcattcaccacgcgatacggactgtatgaattcacggtgatgtcgttcggtttaaccaatgctcctgccttcttcatgaacttaatgaacaaagtgttcatggaatacttggataagtttgttgtagttttcattgatgacattatggtatactcacaatcagaggaagaccatcagcaccatctccgtctggtgttgggaaagttgcgggaacatcaattgtatgccaaacttagcaagtgcgagttctggttgtccgaagtcaaattcttagggcacgtgatatctgctaaaggagttgctgtggaccccgaaacagtgaccgccgtcaccgattggaagcaacccaagacagtcactcaaattcgcagtttcttaggtttggctggatactaccggaggttcatcgagaacttctccaaaatcgctcgacccatgacacagttgttgaagaaagaagagaaatttgtgtggagcccgcaatgcgagaaggcgttccaaactctcaaagaaaagctggaaggtcatgtggtggcctatgcctcacgccagctacggccccatgaaggcaattaccctacccatgatttggagttagccgctgtggttcatgctctaaagatctggcggcactacctcattgggaatcgctgtgaaatatatactgatcataagagtttgaaatacatcttcacccagtcggatctgaatcttcggcagaggagatggttagaactcatcaaggattatgatgtgggaattcactatcatcctggtaaggccaacgtggtagccgacgctctaagtcgaaaaagccattgcaacactcttgtcgtccgtggcattccacccgaacttaatcaacagatggaagccctgaatctaagcatagttagtcgtggattcttggctacgctggaagccaagccttccttgctcgatcaaatccgcgaggctcagaagaacgatccggacatgcgtggactcctcaagaatatgaaacagggtaaagccgctggtttcacagaggatgaacacggaaccctatggaacggaaatcgggtatgcgttccagatgtcagagaacttaaacagctgatacttcaggaagctcacgagagtccttattccatccaccctggcagcacgaagatgtacttagacttgaaagagaaatactggtgggttagtatgaagcgggaaattgcagagttcgtggccctttgtgacgtgtgccagcgtgtcaaggcagagcaccaacgaccggccggacttctccaacctctccaagtaccagaatggaaatgggatgaaattgggatggatttcatcaccggacttccaaaaacccaaggtggatatgattctatatgggtagttgtggaccgattaaccaaggtagctcggtttattcctgtgaaaaccacctatggagggaacaaactagccgagctctacttcgctaggatcgtgagtctccatggcgttcctaagaaaattgtatctgataggggaagccaattcacctctcacttttggaagaagctccaagaagagctgggtacccgattaaatttcagcaccgcgtatcacccgcagacagatggacagaccgagcgtctaaatcagatcctagaagatatgcttcgcgcatgtgtcctagatttcgggaagacctgggataagagtctcacctatgccgagttctcctacaataacagctatcaagccagcatacaaatggcaccctatgaagcgttgtatggacgcaaatgccggacaccgctattgtgggaccaagttggggaaagccaagtgttcgggactgatatcctgagagaagctgaagctaaagtcagaaccattcgggataatctaaaggtggcccagtctcggcagaagagttatgcagacaaccgacgccgtgacctggaattcgcagtggatgactttgtgtatcttcgggtcacgccattgcgaggtgtacacaggtttcagacgaaagggaagctcgcacctcggttcgtgggtcctttccgcatcattgctcgacgcggagaagttgcttaccagttggagctgcccgcctccttgggcaacgtgcatgatgtgttccatgtgtcgcaactcaagaaatgtcttcgagtgccatccgagcaggccgactcagagtccaatggagcaaccacgccgaggaagaagctacctgggagcgtgaagacgagctga

SEQ ID NO: 23089 - DNA, 4995 bp, Oryza sativa
  Clone ID: TF_OsC359_5759
atggacatctctagggcaaatgaaggctacacgagctgcggcccgatggccggcagcatcaaccgtcgtggtctggacctgactggctttgttttggagctgcggggcatgtgtgttgtcctggggtatccgcatggagtggactaccagggcaggcagctcccggagcaggagggtgacgatgcagagccccacgctgcttgggaggttactgcagtgatcctcactggctctcccgagaggacttcgttggcagtcaccgcgggtggagattctttctccgccgcttgccagaacgccgctctcctcgccatcggcactcttcaccagcgctacccggacgagttgcagcactcgccctaccgctaccaccctcgccgcggaggagcccgcgaccacgccacctttcgggatgctagctcggaggatgacgctaccatcatgcatctggcgcgcatggtggaggcgtacgacgcggcccgtatcgacttccatcagatggtgcgccgtgggatggtcgagaacagcatgaagatcctggagctgcgtcaggagaatctgcagctgaagaaggacctagacgcagtggaggcgcagctgcatcagctcaagatcgcccagggagagatggtgacgaccaggagaagtgctaacaccggtgatggcaaccaacctgaaggcagcaaccacaacaaccatggcagcccacctccacctcctcctccgcctccaccaccaccactagacaccaatgccatcctcacccaaatcctagcccagcaggccaacatgatggctgctttcctccaccacatccaaaatccgccacaacataatgctccaccaccacccccacaacactctaaactcgccgagttcctccgcatccgtccacctaccttctctagctccaataaccccgtggatgcattggattggttgcatgccgtggggaaaaagttagacaccgtgcagtgcagcgatgaggagaaagtcgtcttcgccgcccaccagctgcaggggcccgcatctctatggtgggaccatttccaggctacgcagccagaggggcagcctattacttgggcccgcttcaccgccgccttccggaggacccatgtgcccgccggagtcatggcccttaagaaaagggaattccgagagttgaagcaaggcaaccgctccgtgatggagtatttgcatgagtttaacaacctggcccggtacgccccggaggatgtacgggaagatgaggaaaagcaggagaagttcttggcaggaatggaccctgagctgtccgtgcgtctagtctccggtgactatccggatttccaacgtctggtggacaagagcatccgcttggaagccaagcacaaggaactggagtcgcacaagcgccgcttggcgaatttccgcaatcaacagggagctaaccaaaggatccgctacaccaatccctatccagggggatcgtcctcgcaacagcaacagcagcagcaacctcgctccgcgccccgacctcaattcgtggtgcgcgtcccacagccgcagcaacagcagagccagcaagggacccgtgcgccccgtcctcctacgccagccgcgcagtctggtcaaggccgcagggacgttcaaggtccgcagcgtctgtgcttcaactgcttcgagcctgggcactttgcggataaatgcccaaagccgaggcgccagcaaggccaagcgcctccccgctcaaacaacggtggtaaggatgtcattcggggtcgtgtgaaccacgtgacggccgaggacgtgctgacgactccagacgtcatcgttggtacgttcctcattcattccatccctgctaccattttgttcgactctggagcttcccactcgtttatatctgtgccattcgtggggagaaatcagttgggggtagaaaggtttaggaaccctctcctcatcaccacccctggaggggttatgacagcaaagtattatagtcctgccgtccctatagaaattcaggggatcccttttccctcggatctgattcttctagacaccaagaacttggatgtgatccttgggatgaattggttggctcaattccaaggagtagtggattgtgcaagacgcactgtcactctgtaccgagggccggaacaaccggttgttttctttgcacctccaacctctgtcagtagttcagaacttcatcagataggactgtcagaaatccccatcgtcagagagttcggagacgtgtttccggaagaactacccgatatgccgcccaagcgagagattgagttccggatagatcttgctccaggaaccactcctctgtacaaacgaccctaccgtatggcagcaaatgaactggccgaagttaagaaacagttggaagagttgaaagaaaaggggtatatacggccgagtactttcccctggggtgctcctatgatttttgtggagaagaaagacaagacgaagaggatgtgcgttgactacagagctctcaataaagtcaccatcaaaaacaagtaccctcttccccggatcgatgatctgttcgatcagcttaaaggtgccacggtattctccaagattgatcttcgttccggatatcaccagttgcgcatccgtgaagaagatattccgaagaccgcattcaccacacgatacggactccatggtcacatcattctggtatactcacaatcagaggaagaccatcagcaccatctccgtctggtgttgggaaagttgcgggaacatcaattgtatgccaaacttagcaagtgtgagttctggttgtccgaagtcaaattcttagggcacgtgatatctgctaaaggagttgctgtggaccccgaaacagtgaccccgtcccgattggaagcaacccaagacagtcactcaaatccgcagtttcttaggtttggcaggatactaccggagttgttgaagaaaaaatataaatttgtgtggagcccgcaatgcgagaaggcgttcaaaactctcaaagaaaagctggtttcctcgccagtgttaatcttgccggatactcgcaaggacttcatggtgtattgtgacgcttcgcgccaaggattggggtgcgtgctcatgcaggaaggtcatgtggtggcctatgcctcacgccagctacggcctcatgaaggcaactaccctacccatgatttggagttagccgcggtggttcatgctctaaaaatctggcggcattatctcattgggaatcgctgtgaaatatatactgatcataagagtttgaaatacatcttcacccagtcggatctgaatcttcggcagagaagatggttagagctcatcaaggattatgatgtgggaatccactatcatcccggtaaggccaacgtggtcgtcgacgctctaagtcaaaaaagccattgcaacactcttaacgtccgtggcattccacccgaacttaatcaacagatggaagccctgaacctaagcatagttggtcgcggattcttggctgcgttggaggccaagcctaccttgctcgatcaaatccgcgaggctcagaagaatgatccggacatgcgtggactcctcaagaatatgaaacagggtaaagccgctggtttcacagaggatgaatacggaaccctatggaacggaaatcgggtatgcgttccagataacagagaacttaaacagctgatacttcaggaagctcacgaaagtccttattccatccaccctggcagtacgaagatgtacttagacttgaaggagaaatactggtgggttagtatgaagcgggaaattgcagagttcgtggccctttgtgatgtgtgccagcgtgtcaaggcagagcaccaacgaccggccggactcctccaacctctccaagtaccagaatggaaatgggatgaaattgggatggatttcatcaccggacttccaaaaacccaaggtggatatgattctatatgggtagttgtggaccgactaaccaaagtagctcggtttattcctgtgaagaccacctatggagggaacaaactagccgagctctacttcgctaggatcgtgagtctccatggcgttcctaagaaaattgtatctgataggggaagccaattcacctctcacttttggaagaagctccaagaagagctgggtacccgattaaatttcagcaccgcgtatcacccgcagacagatggacagaccgagcgtctgaatcagatcctagaagatatgcttcgcgcatgtgtcctagatttcgggaagacctgggataagagtctcccctatgccgagttctcctacaataacagctaccaagccagcatacaaatggcaccctatgaagcgttgtatggacgcaaatgccggacatcgctattgtgggaccaagttggggaaagccaagtgttcgggactgatatcctgagagaagctgaagctaaagtcagaaccattcgggataatctaaaggtggcacagtcctggcagaaaagttatgcagataaccgtcgccgtaacctggaattcgcagtggacgattttgtgtaccttcgggtcacgccattgcgaggtgtacacaggtttcagacgaaagggaagctcgcacctcggtatgtgggtcctttccgtatcgttgcccgacgcggagaagtcgcttaccagttggagctgcccgcctccttgggcaacgtgcatgatgtgttccatgtgtcgcaactcaagaaatgtcttcgagtgccatccgagcaggccgactcagagcaaattgaagttcgcgaagacttgacctacgtggagaggccagtgaaaatcctggacaccatggagcgcaggaccaggaaccgggtaatccgtttttgcaaggtccaatggagcaaccacgccgaggaagaagctacctgggagcgtgaagacgagctgaaggcagcccatcccgatctcttcgccagttcttccgaatctcggggtcgagattccgtttaa

SEQ ID NO: 23090 - DNA, 7068 bp, Oryza sativa
  Clone ID: TF_OsC359_5812
atggatgaagtcgggggtcgatggacattctccagggcaaatgaaggctacacgagctgcggcccgatggccggcagcgttacccgtcgtggtttggacatgaccggcttcgtcttggagctgcgaggcatgtgcgtggtcttggaatatccacatggagtggattaccaggccaggccgctcccggagcaggagggtgaggatgcagagcctcacgctggttgggaggtcactgcagtgatcctctccggctctcccgagcggacttcgctggcagtcacagcgggtggggactccttccccgccgcttgccagaacgccgctctcctcgccatcggcacccttcaccagcgctacccggacgagttgcagcactcgtcctaccgctaccaccctcgtcgcggaggagcccgcgacttcgccaccttccgagacgccagctcggaggatgacgctaccgtcgtgcatctggcacgcatggtggaggcgtacgacgcggctcgtatcgacttccaccagatggtgcgtcgtggcatggtggagaacaacatgaagatcctggagctgcgtcaggagaatctgcagctcaagaaggacctcgacgcgttggaggcgcagctgcaccagctcaagatcgcccagggagagatcagccgtcccaagcgtcgccgcgtctgccgcagccagaagatcaccgcccgcaagagcacctccaggcccgagcttgttcgtcagtccctggcgtggacctgcttcgtcgagacccctcgtgccgagcctgcgcccgtggttccccaggagggggaagcctccggcgttggtagctcggagggtgcgctgttgctcaccttccgtcctggcccgtcgcagcggagaaatgttaacaccggtgaaggcaaccaacccgagggcagcaaccccaacccccaaggcaatccacctccaccaccaccaccagacaccaacgccattctcacccagatcctcgcccaacaagccaacatgatgaatgctttcctccaccacctccaaaacccgccacaacagaatgctccaccaccacctccccaacactccaaactcgccgagttcctccgcatccgcccacctaccttctctagctccaacaaccccgtggatgcgttggattggttgcatgccgtggggaagaagctagacacggtgcagtgcagtgatgaagagaaagtcatcttcgccgcccaccagctgcaggggcccgcatctatctggtgggaccacttccaggctacgcagccagcgggacaaccgatcacttgggctcgcttcacctccgctttccggagaacccattatttgcacgagttcaacaatctggcccggtacgctccggaggatgtgcgggaagatgaggagaagcaagagaagttcttggcaggaatggaccctgagctgtccgttcgtctagtctctggggactatcctgacttccaacgactggtggacaagagcatccgcttggaagccaagcacaaggagctggaatcgcacaagcgccgcttggcgaatttccgcaatcaacagggtgctaaccagagggttcgctacaccaatccctacccagggggatcctcctcgcagcagcagcagcagcagcagcaacctcgctccgcgcctcgacctcaattcgtggtgcgcgtcccacagccgcagcagcagcagaatcagcaagggactcgtgcaccccgtcctcctacgccagccgtgcagcccgttcaaggccgcagggacgctcaaggtcagcagcgtctgtgcttcaactgtttcgagcccgggcactttgcggataaatgcccgaagccaaggcgtcagcaaggccaagcgcctccccgctccaacaacggcgggaaggatgtcattcgaggtcgtgtgaatcacgtgacggccgaggacgtgctgacaactccagacgtcatcgttggtacgttcctcgtccaatccatccctgctactattttgttcgactctggagcttcccactcgttcatatctgtgccattcgtggggagaaatcagttgggggtagaaaggcttagaaaccctctgctcatcaccacccctggcggggttatgacagcaaagtattatagccctgccgttcctatagaaatccaggggattccttttccctcggatctgattctgctagacacaaagaacttggatgtgatccttgggatgaattggttggctcaattccaaggagtagtggactgcgcgagacgcactgttactctgtaccgaggaccagaacaaccggttgttttctttgcacccccaacctctgtcagaagttcagaactgcatcagatagaactgtcagaaatccccatagtcagagagttcggagacgtgtttccggaagaactacctggtatgccgcccaagcgagagattgagttccggatagatcttgctccaggaaccactcctctgtacaagcgaccctaccgtatggcagcaaatgaactggccgaagtaaagaaacagttggaagagttgaaagaaaaggggtacatacgtccgagtacttccccatggggtgctcctgtgatttttgtggagaagaaagacaagacgaaaaggatgtgcgtcgactacagagctctcaatgaagtcaccatcaaaaacaagtaccctcttccccggatcgatgatctgttcgatcagcttaaaggtgccaccgtattctccaagattgatctccgttccggatatcaccaattacgtattcgtgaagaagatattccgaagaccgcattcactacgcgatatggactgtatgaattcacggtgatgtcgttcggcttaaccaatgctcctgccttcttcatgaacttgatgaacaaagtgttcatggaatacttggataaattcgttgtggttttcatcgatgacattctgatatactcacaatcagaggaagaccatcagcaccatctccgtctggtgttgggaaagttgcgggaacatcaattgtatgccaagcttagcaagtgtgagttctggttgtccgaagtcaaattcttggggcacgtgatatctgctaaaggagttgctgtggaccccgaaacagtgaccgccgtcaccgattggaagcaacccaagacagtcactcagattcgcagtttcttaggtttggcaggatactatcggagattcatcgagaacttctccaaaatcgctcgacccatgacacagttgttgaagaaagaagaaaagtttgtgtggagcccgcaatgcgagaaggcgttccaaactctcaaagaaaagctggtttcctcgccagtgttaatcttgccggatactcgcaaggatttcatggtgtactgtgatgcttcgcgccaaggattggggtgcgtgctcatgcaggacggtcatgtggtagcctatgcttcacgtcagctacgacctcatgagggcaactaccctacgcatgacttggaattagccgcagtggttcatgctctaaaaatctggcggcactatctcattgggaaccgctgtgaaatatatactgatcataaaagtttgaaatacatcttcactcagtcagatctgaatcttcggcaaaggagatggttagaactcatcaaggactatgatgtgggaattcactatcaccctggtaaggccaacgtggttgccgacgctctaagtcgaaagagccattgcaacactcttaacgtccgtggcattccacccgaacttagtcaacagatggaagccctgaacctaagcatagttggtcgcggattcttggctgcgttagaagccaagcccaccttgctcgatcaaatccgcgaggctcagaagaatgatccggacatgcatggactcctcaagaatatgaaacagggtaaggccgctggtttcacagaggatgaacacggaaccttatggaacggaaagcgggtatgcgttccagatagcagagaacttaaacagctgatacttcaggaagctcacgaaagtccttactccattcacccgggcagtaccaagatgtacttagacttgaaggagaaatactggtgggtcagcatgaagcgggaaattgcagagtttgtggccctatgtgatgtgtgccagcgtgtcaaggcagaacaccaacgaccggccggacttctccaacctctccaagtgccggaatggaaatgggatgaaattgggatggatttcatcaccggcctcccaaaaacccaaggtggatatgactctatatgggtaatagtggatcgattaaccaaggtagctcgattcattcctgtgaagaccacctatggagggaacaaactagcggagctctacttcgctaggatcgtgagtctccatggcgttcccaagaaaatcgtatctgataggggaagccaattcacctctcacttttggaagaagctccaagaagagcttggtacccgactaaatttcagcaccgcgtatcacccgcagacagatggacagaccgagcgtctaaatcagatcttagaagatatgctccgcgcatgtgtcctagatttcgggaagacttgggataagagtctcccctatgccgagttctcctacaataacagctaccaagccagcatacaaatggcaccctatgaagcgttgtacgggcgcaaatgccggacaccgctattgtgggaccaagttggagaaagccaagtgttcgggactgatatcctgagagaagctgaagctaaagtcagaatcattcgggataatctaaaggtggcacagtctcggcagaaaagttatgcagataaccgtcgccgtgatctggaattcgcagtggatgattttgtgtaccttcgggtcacgccattgcgaggtgtgcacaggtttcagacaaaagggaagctcgcacctcggtatgtgggtcccttccgtatcatcgctcgacgtggagaagttgcttaccagctggagttgcccgcctccttgggcaacgtgcatgatgtgttccatgtgtcgcaactcaagaaatgtcttcgagtgccatccgagcaggccgactcagagcaaattgaagttcgcgaagacctgacgtatgtggagaagccagtgaaaatcctggacaccatggagcgcaggaccaggaaccgtgtaatccgtttttgcaaggtccagtggagcaaccacgccgaagaagaagctacttgggagcgcgaagacgagctgaaggcagcccatcccgatctcgttgaagtcgaagccgtcgattgggaaaacgagcaaggcaagacacatcatcttgatcatattgaatcccagacgagctgggacccagggtcgggttgccagttcggtctgaatcatcataggccttgggttaaggcagccgcccgggctgaggaagccgctaaggaggaggccgcccgggctcgccaggctgaggcaacagctgctgctggcgcgtcaactgggcccactccctcgggcaaccctcaggcgacagcctccggggaggcacgcgacgtggccgcgggcacatcgcctgggcccacctccccgggcgacgcccaggatcaaacgggtccgggggacatccctgagcccagcacgtcctccggggggccgagccgcatcgccttctctccaaggcggctcttctcctcatcttccgtcgccccgctgagcgccgagcccattctgcaggccttggccgccgcaaacaccgcggtgctggatgggtttagcgcccaagtggaggccctgcgcgcggaacgagcggagctcgaggccgcatgggcacgcgttgaggaggggcggcgctcggtggacgccatggtggaggtgggccgtaaggctcaccgccgccacatctcggagcttgaagcccgcaaggcggcgctggcggagatcgcccgagaggtggaggaggagcgagaggccgccctcatcgccaccaccgcgatgatcgaggcgcaagacaccctccgccttcagcacgcaagctgggaggcggagctgaagaaaaagctcgacgccgcccaaggggtccttgactccgccgctgcccgagagcggcgggtaacggagactgaagcggcgtctcggcggcgcgaggaggcccttgaggcccgtgccatggcgctggaagaacacgccggcgccgtggagaggggcttgacggaccgcgaggccgccgctgttctccgggaggcgacgctggcggcgcacgaggccgcctgcgccgaggaggagtgcgcgctccgcctccgcgaggacgcactcgctgagcgggagcgagctctcgaggaggctgaggccacgaccaaacggctggcggacagcctgtcccttcgcgaggcggcgcaggaggagcaggcgcgccgcaatcttgaatgcgtccgcgccgagagagccgcactggagcagcgggctgccgacctcgaggcgcgggaaaaagagctggacgcaagggcgcgcgtcggtggggcggctgcgggcgaaagcgacttagccgctcgcctcgcggctgccgaacacaccgtcgctgacatgcagcgcgcactagattcctccatcggggaggccgaggccctccgcttggcgggcgagatggggcccgacatgctttgggactcggtctcccgcatggatcgcgccggtcggcaagcgggcctctggaaaggccagacgaggatgcgccccgccaacctggaaggcctcgctccgcacctcaacaggatggcctgggtcctcgaacaactccccgaggagctcgagaagaccatcaagtcatcctcgagggacctcgcccggggggcggtcgaactcgtgctagcgagttaccaggcccgggaccccaacttctccccatggatggcgctggaggagttccctcccgggaccgaggacgatgcgcgcgcgcgcgtccgggatgccgccgaccacatcgtcaacggcttcgagggctcggcccctcggctcgcgttcgcccccagctccgacgaggagggcgatgccagcggtgaggacgacggtggcgacgaggccggcgacccgggcgcgtcagaatga

SEQ ID NO: 23091 - DNA, 3888 bp, Oryza sativa
  Clone ID: TF_OsC359_6001
atggttacgccgatggtgacgaccaggagaaatgttaacaccggtgaaggcaaccaacccgagggcagcaaccccaacccccaaggcaacccacctccaccaccaccaccagacaccaacgccattctcacccaaatcctcgcccagcaagccaacatgatgaatgctttcctccaccacctccaaaatccgccacaacagaatgctccaccaccccctccccaacactccaaactcgccgaattcctccgcatccgcccacccaccttctctagctccaacaatcccgtagatgcgttggattggttgcatgccgtggggaaaaagctagacacggtgcagtgcagcgatgaggagaaagtcgtcttcgccgcccatcagctgcaggggcccgcatctctctggtgggaccacttccaggctacgcagccagaagggcaacctattacttggactcgcttcaccgccgctttccggaaaacccatgtgcccgccggagtcgtggctcttaagaaaagggaattccgagagttgaagcaaggcagccgctccgtgatggagtatttgcatgagttcaacaatctagcccgttatgccccggaggatgtgcgggaagatgaggagaagcaagagaagttcttggcaggaatggaccctgagctgtccgttcgtctagtctctggggactatcctgattttcaacgactggtggacaagagcatccgcttggaagccaagcacaaggagctggaatcgcacaagcgccgcttggcgaatttccgcaatcagcagggtgctaaccagagggtccgctacaccaatccctacccagggggatcctcctcgcagcagcagcagcagcagcagcagcaacctcgctccgcgcctcgacctcaattcgtggtgcgcattccacagccgcagcagcagcagaatcagcaagggactcgtgcaccccgtcctcctacgccaactgtgcagcctgttcaaggtcgcagggacgctcaaggtccgcagcggctgtgcttcaactgcttcgagcccgggcactttgcggataaatgcccgaagccaaggcgtcagcaaggccaagtgcctccccgctccaacaacggcgggaaggatgtcattcggggccgtgtgaatcatgtgacggccgaggacgtgctgacaactccagacgtcatcgttgaacttcatcagataggtctgtcagaaatccccatagtcagagagttcggagacgtgtttccggaagaactacctggtatgccgcccaagcgagagattgagttccggatatatcttgctccaggaaccactcctctgtacaagcgaccctaccgtatggcagcaaatgaactggccgaagttaagaaacagttggaagagttgaaagaaaaggggtatatacgtccgagtacttccccttggggtgctcctgtgatttttgtggagaagaaagacaaaacgaagaggatgtgcgttgactacagagctctcaatgaagtcaccatcaaaaacaagtaccctcttccccggatcgatgatctgttcgatcagcttaaaggtgccactgtattctccaagattgatcttcgttccggatatcaccaattacgtattcgtgaagaagatattcctaagaccacattcaccacgcgatacggactgtatgaattcacggtgatgtcgttcggtttaaccaatgcacctgccttcttcatgaacttaatgaacaaagtgttcatggaatacttggataagtttgttatggtgttcattgatgacattctggtgtactcacaatcagaggaagaccatcagcaccatctccgtctggtgttgggaaagttgcatgaacatcaattgtatgccaaacttagcaagtgtgagttctggttgtccgaagtcaaattcttagggcacgtgatatctgctaaaggagtcgctgtggaccccgaaacagtgaccgccgtcaccgattggaagcaacccaagacagtcactcaaattcgcagtttcttaggtttggcaggatactaccggaggttcatcgagaacttctccaaaatcgctcgacccatgacacagttgttgaagaaagaagagaaatttgtgtggagcccgcaatgcgagaaggcgtttcaaactctcaaagaaaagctggtttcctcgccagtgttaatcttgccggatactcgcaaggacttcatggtgtattgtgatgcttcgcgccaaggattggggtgcgtgctcatgcaggatggtcatgtggtggcctatgcctcacgccagctacggcctcatgaaggcaactaccctacccatgatttggagttagccgcggtggttcatgctctaaaaatctggcggcactatctcattgggaatcgctgtgaaatatatactgatcataagagtttgaaatacatcttcactcagtcggacctgaatcttcagcagaggagatggttagaactcatcaaggattatgatgtgggaattcactatcatcctggtaaggccaacgtggtcgccgacgctctaagtcgaaagagccattgcaacactcttaacgtccgtggcattccacccgaacttaaccaacagatggaagccctgaatctaagcatagtgggtcgtggattcttggctgcgttggaagccaagcccaccttgctcgatcaaatccgcgaggctcagaagaacgacccggacatgcatggactcctcaagaatatgaaacagggtaaagccgctggtttcacagaggatgaacacggaaccctatggaacggaaatcgggagaaatactggtgggttagtatgaagcgagaaattgcagagttcgtggccctttgtgttgtgtgccagcgtgtcaaggcagagcaccaacgaccggccggactcctccaacctctccaagtaccagaatggaaatgggatgaaattgggatggatttcatcaccggacttccaaaaacccaaggtggatatgattctatatgggtagttgtggatcgcttaaccaaggtagctcgatttattcctgtgaagaccacctatggagggaacaaactagccgagctctacttcgctaggatcgtgaatctccatggcgttcccaagaaaatcgtatctgataggggaagccaattcacctctcacttttggaagaagctccaagaagagctgggtacccgattaaatttcagcaccgcgtatcacccgcagacagatggacagaccgagcgtctaaatcagatcctagaagatatgcttcgcgcatgtgtcctagatttcgggaagacctgggataagagtctcccctatgccgagttctcctataataacagctatcaagccagcatacaaatggcaccttatgaagcgttgtatgggcgcaaatgccggacaccgctcttgtgggaccaagttggggaaagccaagtgttcgggactgatatcctgagagaagctgaagcaaagacaaaagggaagctcgcacctcggtttgtgggtcctttccgtatcattgctcggcgcggagaagtcgcttaccagttggagctgcccgcctccttgggcaacgtgcatgatgtgttccatgtgtcgcaactcaagaaatgtcttcgagtgccatccgagcaggccgactcagagcaaattgaagttcgcgaagacttgacctacgtggaaaggccagtgaaaatcctggacaccatggagcgcaggaccaggaactgggtaatccgtttttgcaaggtccagtggagcaaccacgccgaggaagaagctacttgggagcgtgaagacgagctgaaggcagcccatcctgatctcttcgccagttcctccgaatctcggggtcgagattccgtttaa

SEQ ID NO: 23092 - DNA, 5525 bp, Oryza sativa
  unsure (1)..(5525): unsure at all n locations
  Clone ID: TF_OsC359_6007
attctgcatttggggtgtgtcttgttgagtacggtggttgtactcagtcttgctcaatttttcccaagcccagaagaggagctccttgaagatgaaggctttggtgtctagctcgtgcctgccgtcaagcgcctgtggttgtcaccctagtcttccgctgtctctcgttagtctttgtgtgtgctgggccttgcctcctgggacaaggattaatgcacgcacgtaaggaatgcccgttgggttatttccggtcgtgacaacttctccgcgccgagcagtgatacggaaaggacccacataccgaggtgcgagcttcccctttgtccgaaacctgtgtacacctcgcaatggcgtgacccgaacatacacaaagtcatccgctgcgaattccaggtcacggcgacggttatctgcataacttttctgccgggactgtgccatctttagattatcccgaatggttctgaccttcgcttcagcttgtctcaggatatcagtcccgaacacttggctttccccaacttggtcccacaatagcggtgtccggcatttgcgtccatacaacgcttcataaggtgccatttgtatgctggcttggtagctgttattgtaggagaactcggcataggggagactcttatcccaggtcttcccgaaatccaggacacatgcgcgaagcatatcttctaggatctgatttagacgctcggtctgcccatctgtctgcgggtgatacgcggtgctgaagtttaatcgggtacccagctcttcttggagcttcttccaaaagtgagaggtgaactggcttcccctatcagatacgattttcttggggacgccatgcagacttacgatcctagcgaagtagagttcagctagtttgttccctccataggtggtctttacgggaatgaaccgtgctaccttggttaatcgatccacaactacccatatagaatcatatccaccttgggtttttggaagtccggtgatgaaatccatcccaatttcatcccatttccattctggtacttggagaggttggagaagtccggccggtcgttggtgctctgccttgacacgctggcacacatcacaaagggccacgaactctgcaatttcccgcttcatactaacccaccagtatttctccttcaagtctaagtacatcttcgtactgccagggtggatggaataaggactttcgtgagcttcctgaagtatcaactgtttaagttccctgatatctggaacgcatacccgatttccgttccatagggttccgtgttcatcctctgtgaaaccagcggctttaccctgtttcatattcttgaggagcccatgcatgtccggatcattcttctgagcctcgcggatttgatcgagcaaggtaggcttggcttccagcgcagccaagaatccacgactaactatgcttaggttcagggcttccatctgttgattaagttccggtggaatgccacggacgttaagagtgttgcaatggctctttcgacttagagcgtcggcgaccacgttggccttaccaggatgatagtgaattcccacatcataatccttgatgagttctaaccatctcctttgccgaagattcagatccgactgggtgaagatgtatttcaaactcttatgatcagtatatatttcacagcgattcccaatgagatagtgccgccagatttttagagcatgaaccaccgcggctaattccaagtcatgggtagggtagttgccttcatgaggtcgaagctggcgtgaggcataggccaccacatgaccgtcctgcatgagcacgcaccccaatccttggcgcgaagcgtcacaatacactatgaagtccttgcgagtatccggcaagattaacactggcgaggcaaccagcttttctttgagagttctgaacgccttctcacattgcgggctccacacaaatttctcttctttcttcaacaactgtgtcatgggtcgagcgattttggagaagttctcgatgaaccttcggtagtatcctgccaaacctaagaaactgcgaacttgagtgactgtcttgggttgcttccaatcggtgacggcgatcactgtttcggggtccacagcaactcctttagcagatatcacgtgccctaagaatttgacttcggacaaccagaactcacacttgctaagtttggcatacaattgatgttcccgcagctttcccaataccagacggagatggtgctgatggtcttcctctgattgtgagtatatcagaatgtcatcaatgaaaaccacaacaaatttatccaagtattccatgaacactttgttcattaagttcatgaagaaggcgggtgcattggttaaaccgaatgacatcaccgtgaattcatacagtccgtatcgcgtggtgaatgcggtcttcggaatatcttcatcacgaatacgcagttggtgatatccggaacgaagatcaatcttggaaaatacagtggcacctttaagctgatcgaacagatcatcgatccggggaagagggtacttgttttttatggtgacttcattgagagctctatagtcaacgcacatcctcttcgtcttgtctttcttctccacaaaaatcacaggagcaccccagggggaagtgctcggacgtatgtaccccttttctttcaactcttccagctgtttcttgacttcggccagttcatttgctgccatacggtagggtcgcttgcacagaggagtggttcctggagcaagatctatctggaactcaatctctcgcttgggcggcataccaggtagttcttccggaaacacgtctccgaactctctgactatggggatttctgacagacctatctgatgcagttctgaactactgacagaggttgggggtgcaaagaaaacaaccggttgtcccggccctcggtacagagtgacagtgcgtctcgcgcaatccactactccttggaattgagccaaccaattcatcccaaggatcacatccaagttcttggtgcctagcagaatcagatccgagggaaaaggaatcccctgaatttctatagggacggcagggctataatactttgctgtcataacccctccaggggtggtgatgagcagagggtttctaagcctttctacccccaactgatttctccccacgaatggcacagatataaatgagtgggaagctccagagtcgaacaaaatggtagcagggatggaatgaatgaggaacgtaccaacgatgacgtctggagttgtcagcacgtcctcggccgtcacatggttcacacgaccccgaatgacgtccttaccaccgttgttggggcggggaggcgcttggccttgctgacgccttggcttcgggcatttatccgcaaagtgcccgggctcgaagcagttgaagcacagacgctgcggaccttgagcgtccctgcggccttgaccaggctgcacagtcggtggaggaggacggggcgcacgagtcccttgttgattctgctcctgctgcggctgtgggacgcgcaccacgaattgaggtcgaggcgcggagcgaggttgctgctgctgctgttgctgctgcgaggaggatccccctggatagggattggtgtagcggaccctttggttagcaccctgttggttgtggaaattcgccaagcggcgcttgtgcgactccagttccttgtgcttggcttccaagcggatgctcttgtccaccagacgttggaaatccggataatccccggagactagacagacggacagctcagggtccattcctgccaggaacttctcttgcttctcctcatcttcccgcacatcctccggagcgtaacgggccaggttgttgaactcgtgcaaatactccatcacggagcggttgccttgcttcaactctcggaattcccttttcttaagggccacgactccggcgggcacatgggttcttcggaaagcgggggtgaagcgagcccatgtaataggctgtccctctggctgcgtagcctggaaatggtcccaccatagagatgcgggtccctgcagctggtgggcggcgaagatgactttctcctcatcgctgcactgcacagtgtctagctttttccccacggcatgcaaccaatccaacgcatccacggggttgttggagctagagaaggtaggtggacagatgcggaggaactcggcgagtttagagtgttggggaggtggtggtggagcattatgttgtggcggattttggaggtggtggagaaaagcagtcatcatgttggcctgctgggcgaggatttgggtgagaatggcattggtatctggtggtggtggtgaaggcgnagnagnaggtgaaggtgggctgccatggttgttgtggttgctgccttcgggttggttgccatcactggtgccagcatttctcctggtagaacacacgcgcaagcctactaactgctcgtctactgctgcgacgggccaggacggaaggtgagcaacagcgcatcctccgtgctaccaacgccggaggcttccccctcctggggaaccacgggcgcgggctcggcacgaggggtctccacgaagcaagtccacgccagggactgacgaacaagctcgggcctggaggtgctcttgcgggcggtgatcttctggctgcggcagacacggcggcgcttggggcggcagacctctccctgggcgatcttgagctgatgcagctgcgcctccaccgcgtctaggtccttcttgagctgcaggttctcctgacgcagctccaggatcttcatgttgttctcgaccatcccacgacgcaccatctgatggaagtcgatacgagccgcgtcgtacgcctccaccatgcgcgccaggtgcacgatggtagcgtcatcctccgagctagcgtcccggaaggtggcgtagtcgcgggctcctccgcgacgagggtggtagcggtagggcgagtgctgcaactcgtccgggtagcgctggtgaagagtgccgatggcgaggagagcggcgctctggcaagcggcggggaaggagtccccacccgcggtgactgtcagcgaagtccgctcgggagagccagcgaggatcactgcagtgacctcccaagcagcgtggggctctgcatcgtcaccctcctgctccggaaatggcctggcctggtagtccactccatgtggataccccaggaccacgcacatgccccgcagctccaagacgaagccagtcatgtccaaaccacgacggctgacgctgccggccatttgggtacattgctcggcttgcccataaccgagggcgcggctattcgaatagattttactctgatcagaggtgtacatcgacccaatcccatctacggccggaacccccgggacaggcaggcaggactgagcccctagcagcaggacaccggccctgtgccatgacatctcgactaccgggccgcagctcgtgtagccttcatttgccctggagaatgtccatcgacccccgacttcatccac

SEQ ID NO: 23093 - DNA, 5415 bp, Oryza sativa; identical to SEQ ID NO: 14174
  Clone ID: TF_OsC359_6023

SEQ ID NO: 23094 - DNA, 7806 bp, Oryza sativa
  Clone ID: TF_OsC359_6034
atggttatgccgatggtgacgaccaggagaaatgttaacaccggtgaaggcaaccaacccgaaggcagcaaccccaaccaccaaggcaacccacctccacctccacctccacctccaccaccaccaccagataccaacgccattctcactcaaatcctcgcccaacaggcaaacatgatgactgctttcctccaccacctccaaaacccgccacaacagaatgctccaccaccacctccccaacactctaaactcgccgagttcctccgcatccgcccacctaccttctctagctccaacaaccccgtggatgcgttggactggttgcatgccgtggggaaaaagctagacacggtgcagtgcagcgatgaggagaaagtcgtcttcgccgcccatcagctgcagggacccgcatctctatggtgggaccacttccaggctacgcagccagaggggcaacctattacttggactcgcttcaccgccgctttccggagaacccatgtgcccgctggagtcgtggctcttaagaaaagggaattccgggagttgaagcaaggcaaccgctccgtgatggagtatttgcatgagttcaacaatctagcccgttacgctccggaggatgtacgggaagatgaggagaagcaagagaagttcttggcaggaatggaccctgagctgtccgtccgtctagtctctggggactatcctgattttcaacgactggtggacaagagcatccgcttggaggccaagcacaaggagctggaatcgcacaagcgccgtttggcgaatttccgcaatcaacagggtgctaaccagagggtccgctacaccaatccctacccagggggatcctcctcgcagcagcagcaacagcagcagcaacctcgctccgcgcctcgacctcaattcgtggtgcgcgtcccacagccgcagcagcagcagaatcaacaagggactcgtgcaccccgtcctcctacgccaactgtgcagcccgttcaaggccgcagggacgctcaaggtcagcagcgtctgtgcttcaactgcttcgagcccgggcactttgcggataaatgcccgaagccaaggcgtcagcaaggccaagcgcctccccgctccaacaacggcgggaaggatgtcattcggggccgtgtgaatcatgtgacggccgaggacgtgctgacaactccagacgtcatcgttgaacttcatcagatagaactgtcagaaattcccatcgtcagagagttcggagacgtgtttccggaagaactacccggtatgccgcccaagcgagagattgagttccgaatagatcttgctccaggaaccactcctctgcacaagcgaccctaccgtatggcagcaaatgaactggccgaagttaagaaacagttggaagagttgaaagaaaaggggtacatacgtccgagtacttccccatggggtgctcctgtgatttttgtagagaagaaagacaagacgaagaggatgtgcgttgactacagagctctcaatgaagtcaccatcaaaaacaagtaccctcttccccggatcgatgatctgttcgatcagctcaaaggtgccactgtattctccaagattgatctccgttccggatatcaccaattacgtattcgtgaagaagatattccgaagaccgcattcaccacgcgatacgggctgtatgaattcacggtgatgtcgttcggtttgaccaatgcacctgccttcttcatgaacttaatgaataaagtgttcatggaatacttggataagtttgttgtggttttcattgatgacattctgatatactcacaatcagaggaagaccatcagcaccatctccgtctggtgttgggaaagttgcgggaacatcaattgtatgccaagcttagcaagtgtgagttctggttgtccgaagtcaaattcttagggcacgtgatatctgcaaaaggagttgctgtggatcccgaaacagtgaccgccgtcaccgactggaagcaacccaagacagttacccaagtccgcagtttcttaggtttggcaggatactaccggagattcatcgagaacttctccaagatcgctcgacccatgacgcagttgttgaagaaagaagagaaatttgtgtggagcccgcaatgcgagaaggcgtttcaaactctcaaggaaaagctggtttcctcgccagtgttaatcttgccggatactcgcaaggacttcatggtgtattgtgatgcttcgcgccaaggattggggtgcgtgctcatgcaggacggtcatgtggtagcctatgcctcacgccagctacgtcctcatgaaggcaactaccctacacatgatttggagttagccgcagtagttcatgctctaaaaatctggcggcactatctcattgggaatcgctgtgaaatctataccgaccataagagtttgaaatacatcttcactcagtcggacctgaatcttcggcaaaggagatggttagaactcatcaaggactatgatgtgggaattcactatcatcctggtaaggccaacgtggttgccgacgctctaagtcgaaagagccattgcaacaatcttaacgtccgtggcattccacccgaacttagtcaacagatggaagccctgaacctaaacatagttggtcgtggattcttggctgcgttagaagccaagcctaccttgctcgatcaaatccgcgaggctcagaagaatgatccggacatgcatggactcctcaagaatatgaaacagggtaaagccgctggtttcacagaggatgaacacggaaccctatggaacggaaatcggcgtgtcaaggcagagcaccaacgaccggccggacttctccaaccactccaagtacccgaatggaaatgggatgaaattgggatggatttcatcactggacttccaaagacccaaggcggatatgattccatatgggtagttgtggatcgattaaccaaggtggctcgatttattcctgtgaagaccacctatggagggaacaaactagcggagctctacttcgctaggatcgtgagtctccacggcgttcccaagaaaatcgtatctgataggggaagccaattcacctctcacttttggaagaagctccaagaagagctgggcactcgattgaatttcagcaccgcctatcacccgcagacagatggacagaccgagcgtctaaatcagatcctagaagatatgctccgcgcatgtgtactagatttcgggaagacctgggataagagtctcccctatgccgagttctcctacaataacagctatcaagccagcatacaaatggcaccatatgaagcgttgtacgggcgcaaatgccggacaccgctcctgtgggaccaagttggggaaagccaagtgttcgggactgatatcctgagagaagctgaagctaaagtcagaatcattcgggataatctaaaggtggcacagtcacggcagaaaagttatgcagataaccgtcgccgtgatctggaattcgcagtggatgactttgtgtatcttcgggtcacgccattgcgaggtgtacacaggtttcagacgaaagggaagcttgcacctcggtatgtgggtcctttccgtatcgttgctcgacgcggagaagtcgcttaccagttggagctgcccgcctccttgggcaatgtgcatgatgtgttccatgtgtcgcaactcaagaaatgtcttcgagtgccgtccgagcaggccgactcagagcaaattgaagttcgcgaagacttgacctatgtggaaaggccagtgaaaatcctggacaccatggagcgcaggaccaggaaccgggtaatccgtttttgcaaggtccagtggagcaaccacgccgaagaagaagctacttgggagcgtgaagacgagctgaaggcagcccatcccgatctcttcgccacggcaaagggaggtcctgtcaaaaaggtggctaagaagaaaggactcgtcgatgtcgctcgcgtttttagcgacgatgagtcctccgacgggactccgacctcgcccgctggtcgcagcctggatctttcggccgcccccattccttcactcggcgtcgctggagtgggcggtagtaccgccgctggggcttcggcttctgcggaaaggattgtgacggccgcggcgaaagtattcggcagtcctccgcatcagccggttgcgtcgccgctgattgaggcgaagggaaagagagcggtcgctgagacgtccacttcggaatattcgctctcggtaccccgcttcgcccctggcgatttcgagacgcgggcggacctccttccttttgtggagggggtaagcaatcttgtactgcccgccagtgccccgagcttgttcaccgaactgaatgagttcgatgaggggtgtactgctataaaaagcctggctgttcggatcctcgcggctcactgctcaatggagcgaaccgtgcgagcccgacttgatgggttcaaaagccatcttcgggccaaggatgatgaactaggccgtaaaaatttggagatggacgcccttgccaactcccttaaggaggcgaaggctgaaaacaagcggctccaatcggaactggagaaagggaaagaagccagggccgaagtcgatcgcttaaaggccgaactggagaaagagaaggcccacaccgccgtgctcatagattattacagcctcaccgagccgaagatggaggctcttcggcaggaggttcgcaaggccgaagcaagcgctgcagaggagtcgtggcggttttcgcgggagatagtgaaaaccaccgagtccgcgcggacagcgtgccaaacgcttcgcctcgcccgtattgacatgggcgcgaaagtgtggggtgtcccctccgaagatgcatcagccttcgacttctccgaatggacccaacaggctggtggttcggtttccgactgcgccaccgcatacggcgactgctgtgcgcgcgtgtcagcgacctttaccatgggcctcctgcagcagttcggctgcgagcacatcgccgagttccccaagtacgcgaagggggattgggaaatcagtgcgcaagacatttcgcccacacttcgtgcgtggcgaaaacaattttggcagaaggacggccgctccgccgctaaggcgcgccttttggagcagctggcgaaagctgaggcggcggacctttgtgaagatgaaggcgcggcggccagagggggtggaggcgatgcccgggaccatgcagagatcatactggggcgcggcttggcttcggccatgacgctggcaactttcgcacttcttgatttgctcaacacagactttcaacacagtgggccaataaactccttgtctaaatactttggaggccactgttcttgcagcctggtgcgcgccacatagtccctggtgtatttcctttgccatttcttcgccttcggcaaaagagatgcaacaaagtaagggttgaagtaccccggagcggtaaagctgacccgagaccatcttatacttcgtggctctaagttgcaaacgctttgcttttgcttcgtctaccggaagccagccagtttcaaggtgtttcacaaatggggttcgccagtcatatgggtcttcgcccagtttctcctggtcgattgccatgacttccgagctgtccatggacacacttggagcatgtaggacttcgaaaaagatgccaggcgaatgtgggccaccacaagcagcggatttcgccagggcgtctgcttcctcgttctggcttctaggtaagtgttcgaccgttatgccagtgaagtatttttccatgaaccgaacagcctccagatacctcttcattccttcttcttttgcttcgaaggagttgtcaacatgacctgctaccaacttggagtcgattcgaattagcaagcgccggactcctagtgctttcgcctttcttaggcccaggaaaacggcttcgtattctgctgcgttgttggttgtgtcgaactgcagtcttgctgcgtaccgaatcggcacatcattcggcgaaaagaggactgccgcaatacctgcccccctgtgcgaccacgagccatcagagcacatcacccagaattgttcggcgggctcggggtcgagggcaagtaccggtgtccattcagctacgaagtcagctagcacttgagacttgatagcagagcgtgcaacaaaatgcaagtcgaacggggatagctctgccgcccacttgctgagccggcccgtgacttccttgcctcggagtatttcgcccaaggggtactgtgatggcactatgactttgtgggcctggaagtagtgcttaagctggcacgaggccatcactagggcgtaagcgagcttttccatttcgatgtatcttgtcttcgctccttgcagtgcttcggagacgaagtagaccggtttctgtccgaactctgtttcttggacgagtgcagcactgactgccaccggcgaagctgctaagtataatagcagttcgcttcctgggggtgggcttatcagggctggcgggctttgcaagtattgctttagctcgtcgaatgttgcctggcactctggggtccaatcaaactttcccgcgcccaggagggtcttgaagaagggcaaacctctttcggctgcctttgagaggaatcgactgagtgccgcaattcggcctgcaagcttttgtacttcatgtacgcttgacggaggcttcatttgctggatggcatcgattttctcgggattcgcctcgatgccaaggactttgtacaccagtctggcgaaggttgctcctgcattccttaagccgaaaggcatcctgaggtgacaaaatgtgccaaacggagtgatgaaggatgctttggggatgtcaagcgggttcatgtggatctggtggtagtcggaatatgcgtccaggaaactcatgagctcgcatccagctgttgaatccacgagctggtcgatccgtggcaaggggaagtcgtctttcggatacgctttgtttaggtctgagaaatcgacacacatgcgccatttgccatttgacttccgcaccaacactggattcaccaaccactccggatggtcaatctcttggattacccctgccctgagcaatttttgtacctcggctttcgccgcttcttggcggtcggcagacatcttgcgcaacttctgttttcttggcttaatgtccagcttgaccgccaggtgatgcatgatgagatctgccggaacaccccccacctcgtcagggctccaggcgaatgtgtcgatgttcttcttgagcacctctaggatactctcaacttcttcttcgcccatgtcgccccccagtgatacaagctttgtggggtcggcatcatcaatctgcactttcgttatcttgccgtgaggggtgggctttggcatgttcttcggctgttcatgcggttcggtctcaacgctgtgcactgctctgttgattatggctagatcgcttttcgaagcggccgaagactgaagccccttgactactatcacccctgccaggccgggcatcttgagcttgaggtaattgtggtgggaaatggcttcaaacttgttcagggttgcacggccgaagatggcgttgtagttgtacgggatgtcgacgacgtcgaacagtatttgctcttcacgtctgttctcccccgagccaaaggctatcagcaagagtgcttggccgagtacttgaactgcttctccgccgaaaccgcggagtgatgctggtgctggggtaagtgcttgggtaggcaaccccat

SEQ ID NO: 23095 - DNA, 5487 bp, Oryza sativa
  Clone ID: TF_OsC359_6104
atgtcatggcacagggctggtgtcctgctgctaggggctcagtcctgcctgcctgtcccggtggttccggccgtaggcggggttgggtcggtactcttgtctaaggctaggatgggttggaaactatgtcacgtcttccgtctgtataccgtggtgatggccggcagcgttacccgtcgtggtttgcacatgactggcttcgtcttggagctgcggggcatgtgcgtggtcttggggtatccacatggagtggattaccaggccaggccgctcccggagcaagagggtgaggatgcagagcctcacgctggttgggaggtcactgcagtgattctctccggctctcccgagcggacttcgctggcagtcaccgcgggtggggattccttccccgccgcttgccagaacgccgctctcctcgccatcggcacccttcaccagcgctacccggacgagttgcagcactcgccctaccgctaccaccctcgtcgcggaggagcccgcgactacgccaccttccgagacgccagctcggaggatgacgctaccgtcgtgcatctggcacgcatggtggaggcgtacgacgcggctcgtatcgacttccatcagatggtgcgccgtggcatggtggagaacaacatgaagatcctggagctgcgccaagagaatctgcagctcaagaaggacctcgacgcgttggaggcgcagctgcatcagctcaagatcgcccagggagaggacagccgtcccaagcgtcgccgcgtctgccgcagccagaagatcaccgcccgcaagagcacctccaggcccgagcttgttcgtcagtccctggcgtggacctgcttcgtcgagacccctcgtgccgagcctgcgcccgtggttccccaggagggggaagcctccggcgttggtagctcggaggttttaatcgtcagctctccttctctgtttgctggttctgtgaggggttttcagatggtgacgaccaggagaaatgttaacaccggtgaaggcaaccaacccgagggcagcaaccccaaccaccaaggcaatccacctccacctccgcctccaccaccaccaccagacaccaacgccattctcacccaaatcctcgcccagcaagctaacctgatgaatgctttcctccaccacctccaaaacccgccacaacacaatgctccaccaccccctccccaacactccaaactcgccgaattcctccgtatccgcccacccaccttctctagctccaacaaccccgtggatgcgttggattggttgcatgccgtggggaagaagttagacactgtgcagtgcagtgacgaagagaaagtcatcttcgccgcccatcagctgcaggggcccgcatctctatggtgggaccatttccaggccacgcagccagaagggcaacctattacttggactcgcttcaccgccgctttccggagaacccatgtgcccgccggagtcgtggctcttaagaaaagggaatttcgggagttgaagcaaggcaaccgctccgtgatggagtatttgcatgagttccacaatctagcccgttatgccccggaggatgtgcgggaagatgaggagaagcaagagaagttcttggcaggaatggaccctgagctgtccgttcgtctagtctcttgggactatcctgattttcaacgactggtggacaagagcatccgcttggaagccaagcacaaggagctggaatcgcacaagcgccgcttggcgaatttccgcaatcagcagggtgctaaccagagggtccgctacaccaatccctacccagggggatcctcctcacagcagcagcagcagcagcaacctcgctccgcgcctcgacctcaattcgtggtgcgcgtcccacagcagcaacagcagcagaatcagcaggggactcgtgcgccccgtcctcctacgccaactgtgcagcccgttcaaggccgcagggacgctcaaggtcagcagcgtctgtgcttcaactgcttcgagcccgggcactttgcggataaatgcccgaagccaaggcgtcagcaaggccaagcgcctccccgctccaacaacggcgggaaggatgtccttcggggccgtgtgaatcacgtgacggccgaggacgtgctgacaactccagacgtcatcgttggtacgttcctcgttcattccatccctgctaccattttgttcgactctggagcttcccactcgtttatatctgtgccattcgtggggaaaagtcagttgggggtagaaaggcttagaaaccctctgctcatcaccacccctggaggggttatgacagcaaagtactatagccctgccgtccctatagaaattcaggggattccttttccctcggatctgattctgctagacaccaagaatttggatgtgattcttgggatgaattggttggcccaattccaaggggtagtggattgcgcgagacgcactgtcactctgtaccgaggaccagagcaaccggttgttttctttgcacctccaacctctgtcagaagttcagaactgcatcagataggtctgtcagaaatccccatagtcagagagttcggagacgtgtttccggaagaactacctggtatgccgcccaagcgagagattgagttccggatagatcttgctccaggaaccactcctctgcacaagcgaccctaccgtatggcagcaaatgaactagccgaagtaaagacacagttggaagaattgaaagaagaggggtacatacgtccgagtacttccccatggggtgctcctgtgatctttgtagagaagaaagacaagacgaagaggatgtgcgttgactacagagctctcaatgaagtcaccatcaaaaacaagtaccctcttccccggatcgatgatctgttcgatcagcttaaaggtgccactgtattctccaagattgatcttcgttccggatatcaccaattacgtattcgtgaagaagatattccgaagaccgcattcactacgcgatacgggctgtatgaattcacggtgatgtcgttcggcttgaccaatgctcctgccttcttcatgaacttaatgaacaaagtgttcatggaatacttggacaagtttgttgtggttttcatcgatgacattctgatatactcacaatcagaggaagaccatcagcaccatctccgtctggtgttgggaaagttgcgggaacatcaattgtatgccaagcttagcaagtgtgagttctggttgtccgaagtcaaattcttaggacacgtgatatctgctaaaggagttgctgtggaccccgaaacagtgaccgccgtcaccgattggaagcaacccaagacagtcactcagattcgcagtttcttgggtttggcaggatactaccggaggttcatcgagaacttctccaaaatcgctcgacccatgacacagttgttgaagaaagaagagaagtttgtgtggagcccgcaatgcgagaaggcgttccaaactctcaaagaaaagctggtttcctcgccagtgttaatcttgccggatactcgcaaggatttcatggtgtactgtgatgcttcgcgccaaggattggggtgcgtgctcatgcaggacggtcatgtggtagcctatgcctcacgccagctacgacctcatgaaggcaactaccctacacatgacttggagttagcagcggtggttcatgctttaaaaatctggcggcactatctcattgggaaccgctgtgaaatatatactgatcataagagtttgaaatacatcttcacccagtcggatctgaatcttcggcaaaggagatggttagaactcatcaaggattatgatgtgggaattcactatcaccctggtaaggctaacgtggttgccgacgctctaagtcggaagagccattgcaatactctcaacgtccgaggcattccacccgagcttaatcaacagatggaagccctgaacctaaacatagttggtcgtggatttttggccgcgctagaagcccagcccaccttgctcgatcaaatccgcgaggctcagaagaatgatccggacatgcatggactcctcaagaatatgaaacagggtaaagccgctggtttcacagaggatgaacacggaaccttatggaacggaaagcgggtatgcgttccagatagcagagaacttaaacagctgatacttcaggaagctcacgaaagtccttattccattcacccgggcagtaccaagatgtacttagatttgaaggagaaatactggtgggtcagcatgaagcgggaaattgcagagtttgtggctctatgtgatgtgtgccagcgtgtcaaggcagaacaccaacgaccggccggacttctccaacctctccaagtgccagaatggaaatgggatgaaattgggatggatttcatcaccggccttccaaaaacccaaggtgggtatgattctatatgggtaatagtggatcgattaaccaaggtagctcgatttattcctgtgaagaccacctatggagggaataaactagcggagctctacttcgctaggatcgtgagtctccatggcgttcccaagaaaatcgtatctgataggggaagccaattcacctctcacttttggaagaagctccaagaagagctgggtactcgattgaatttcagcaccgcatatcacccgcagacagatggacagaccgagcgtctaaatcagatcctagaagatatgctccgcgcatgtgtcctggacttcgggaagacttgggataagagtctcccctatgccgagttctcctacaataacagctaccaagccagcatacaaagggcaccctatgaagcgttgtacgggcgcaaatgccggacaccgctattgtgggaccaagtcggagaaagccaagtgttcgggactgatatcctgagagaagctgaagctaaagtcagaatcattcgggataatctaaaggtggcacagtctcggcagaaaagttatgcagataaccgtcgccgtgatctggaattcgcagtgtatgactttgtgtatcttcgggtcacgccattgcgaggtgtgcacaggtttcagacaaaagggaagctcgcacctcggtatgtgggtcccatccgtatcactgctcgacgcggagaagtcgcctaccagctggagttgcccgcctccttgggcaacgtgcatgatgtgttccatgtgtcgcaactcaagaaatgtcttcgagtgccatccgagcaggccgactcagagcaaattgaagttcgcgaagacttgacctatgtggagaagccagtgaaaatcctggacgccatggagcgcaggaccaggaaccgagtaatccgtttttgcaaggtccagtggagcaaccacgccgaagaagaagctacttgggagcgcgaagacgagctgaaggcagcccatcccgatctcttcgccagttcttccgaatctcggggtcgagattccgtttaa

SEQ ID NO: 23096 - DNA, 3999 bp, Oryza sativa; identical to SEQ ID NO: 14270
  Clone ID: TF_OsC359_6110

SEQ ID NO: 23097 - DNA, 4218 bp, Oryza sativa; identical to SEQ ID NO: 14104
  Clone ID: TF_OsC359_6132

SEQ ID NO: 23098 - DNA, 5416 bp, Oryza sativa
  Clone ID: TF_OsC359_6141
atggatgaagtcgggggtcgatggacattctccagggcaaatgaaggctacacgagctgcggcccgatggccggcagcgttacccgtcgtggtttggacatgactggcttcgtcttggagctgcggggcatgtgcgtggtcttggggtatccacatggagtggattaccaggccaggccgctcccggagcaggagggtgaggatgcagagcctcacgctggttgggaggtcactgcagtgatcctctccggctctcctgagtggacttcgctggcagtcactgcgggtggagattccttccccgccgcttgccagaacgccgctctcctcgccatcggcactcttcaccagcgctacccggacgagttgcagcactcgccctaccgctaccacccccgtcgcggaggagccagcgaccacgccaccttccgagacgccagctcggaggatgacgctaccgtcgtgcatctggcacgcatggtggaggcgtacgacgcggctcgtatcgacttccatcagatggtgcgtcgtggcatggtggagaacaacctgaagatcctggagctgcgccaagagaatctgcagctcaagaaggacctcgacgcgttggaggcgcagctgcatcagctcaaggtcgcccagggagagatctgccgccccaagcgtcgccgcgtctgccgcagccagaagatcaccgcccgcaagagcacctccaggcccgagcttgttcgtcagtccctggcgtggacttgcttcgtcgagacccctcgtgccgagcctgcgcccgtggttccccaggagggggaagcctccggcgttggtagctcggagggtgcgctgttgctcaccttccgccctggcccgtcgcagcgctctccttctctgtttgctggttctgtgtggggttttcagatggtgtcgaccaggagaaatgttaacaccggagaaggcaaccaacccgaaggcagcaaccccaacccccaaggcaacccacctccaccaccaccaccaccagacaccaacgccattctcacccaaatcctcgcccagcaagccaacatgatgaatgctttcctccaccacctccaaaatctgccacagcagaatgctcccccaccacctccccaacactccaaactcgccgaattcctccgcatccgtccacccaccttctctagctccaacaaccctgtggatgcgttggattggttgcatgccgtggggaagaagctagacacggtgcagtgcagcgacgaagagaaagtcatcttcgccgcccaccagctgcaggggcccgcatctctatggtgggaccacttccaggctacgcagccagaggggcaaccgattacttgggctcgcttcaccgccgctttccgaagaacccatgtgcccgctggagtcgtggctcttaagaaaagggaattccgggagttgaagcaaggcaaccgctccgtgatggagtatttgcatgagttcaacaatctagcccgttatgccccggaggatgtgcgggaagatgaggagaagcaagagaagttcttggcaggaatggaccctgagctgtctgttcgtctagtctctggggactacccggattttcaacggctggtggacaagagcatccgcttggaagccaagcacaaggaactggagtcgcacaagcgccgcttgggcgaatttccgcaatcagcagggtgctaaccagagggtccgctacaccaatccctacccagggggatcctcctcgcaacagcagcagcagcagcaacctcgctccgcgccccgacctcaattcgtggtgcgcgtcccacagcagcaacagcagcagaatcagcaagggactcgtgcgccacgtcctcctacgccaactgtgcagcctgttcaaggtcgcagggacgctcaaggtcagcagcgtctgtgcttcaactgtttcgagcctgggcactttgcggataaatgcccaaagccaaggcgtcagcaaggccaagcgcctccccgctccaacaacggtggcaaggacgtcatccgtggtcgcgtgaatcacgtgacggccgaggacgtgctgacaactccagacgtcatcgttggtacgttcctcgttcattccatccctgctacaattttgttcgactctggagcctcccactcgtttatatctgtgccattcgtggggaaaaatcagttgggggtagaaaggcttagaaaccctctgctcatcaccacccctggaggggttatgacagcaaagtattatagccctgccgttcctatagaaattcagggaattccttttccctcggatctgattctgttagacacaaagaacttggatgtgattcttgggatgaattggttggcacaattccaaggagtagtggattgcgcgaggcgcactgtcactctgtaccgaggaccggaacagccggttgttttctttgcacctccaacctctgtcagaagttcagaactgcatcaggtaggtctgtcagaaatccccatagtcagagagttcggagacgtgtttccggaagaactacctggtatgccgcccaagcgagagattgagttccggatagatcttgctccaggaaccactcctctgtacaagcgaccctaccgtatggcagcaaatgagctagccgaagttaagaaacagttggaagaattgaaagaaaaggggtatatacgtccgagtacttccccatggggtgctcctgtgatttttgtagagaagaaagacaaaacgaaaaggatgtgcgttgactacagagctctcaatgaagtcaccatcaaaaacaagtaccctcttccccggatcgatgatctgttcgatcagcttaaaggtgccaccgtattctccaagattgatcttcgttccggatatcaccaactacgtattcgtgaagaagatattccgaagaccgcattcactacgcgatatggactgtatgaattcacggtgatgtcgttcggtttgaccaatgctcctgccttcttcatgaacttaatgaataaagtgttcatggaatacttggacaagtttgttgtggtttttatcgatgacattctgatatactcacaatcagaagaagaccatcagcaccatctccgtctggtgttgggaaagttgcgggaacatcaattgtatgccaagcttagcaagtgtgagttctggttgtccgaagtcaaattcttggggcacgtgatatctgctaaaggagttgctgtggatcccgaaacagtgaccgccgtcaccgattggaagcaacccaagacagtcactcagattcgcagtttcttgggtttggcaggatactatcggagattcatcgagaacttctccaaaatcgctcgacccatgacacagttgttgaagaaagaagagaagttcgtgtggagcccgcaatgcgagaaggcgttccaaactctcaaagaaaagctggtttcctcgccagtgttaatcttgccggatactcgcaaggatttcatggtgtactgtgatgcttcgcgccaaggattggggtgcgtgctcatgcaggacggtcatgtggtagcctatgcttcacgccagctacgacctcatgaaggcaactaccctacacatgacttggagttagcagcggtggttcatgctctaaaaatctggcggcactatctcattgggaaccgctgtgaaatatatactgatcacaagagcttgaaatacatcttcactcagtcagatctgaaccttcggcaaaggagatggttagaactcatcaaggattatgatgtgggaatacactatcatcctggtaaggccaacgtggttgccgacgctctaagtcgaaagagccattgcaacactctcaacgtccgaggcattccgcccgagcttaatcaacagatggaagccctgaacctaagcatagttggtcgcggattcttggccgcgttagaagcaaagcccaccttgctcgatcaaatccgcgaggctcagaagaatgatccggacatgcatggactcctcaagaatatgaaacaaggtaaagccgctggtttcacagaggatgaacacggaactctatggaacggaaagcgggtatgcgttccagatagcagagaacttaaacagctgatacttcgggaagctcacgaaagtccttattccattcacccgggcagtaccaagatgtacttagacttgaaggagaaatactggtgggtcagcatgaagcgggaaatcgcagagtttgtggctctatgtgatgtgtgccagcgtgtcaaggcagaacaccagcgaccggccggactcctccaacctctccaagtgccagaatggaaatgggatgaaattgggatggatttcatcaccggacttccaaaaacccaaggtggatatgattctatatgggtaatagtggatcgattaaccaaggtggctcgattcattcctgtgaagaccacctatggagggaataaactagcggagctctacttcgctaggatcgtgagtctccacggtgttcccaagaaaatcgtgtctgataggggaagccaattcacctctcacttttggaagaagctccaagaagagctgggtactcgattgaatttcagcaccgcatatcacccgcagacagatggacagaccgagcgtctgaatcagattctagaagatatgctccgcgcatgtgtcctagatttcgggaagacttgggataagagtctcccctatgccgagttctcctacaataacagctatcaagccagcatacaaatggcaccttatgaagcgttgtacgggcgcaaatgccggacaccgctattgtgggaccaagttggagaaagccaagtgttcgggactgacatcctaagagaagccgaagctaaagtcagaatcattcgggaaaatctaaaggtggcacagtcccggcagaaaagttatgcagataaccgtcgccgtgatctggaattcgcagtggatgattttgtgtatcttcgggtcacgccattgcgaggtgtgcacaggtttcagacaaaagggaagctcgcacctcggtatgtgggtcccttccgtatcactgctcgacgcggagaagttgcttaccagctggagttgcccgcctccttgggcaacgtgcatgatgtgttccatgtgtcgcaactcaagaaatgtcttcgagtgccatccgagcaggccgactcagagcaaattgaagttcgcgaagacttgacctatgtggagaggccagtgaaaatcctggacaccatggagcgcaggaccaggaaccgggtaatccgtttttgcaaggttcagtggagcaaccacgccgaagaagaagctacttgggagcgcgaagacgagctgaaggcagcccatcccggtctcttcgccagttcttccgaatctcggggtcgagattccgtttaa

SEQ ID NO: 23099 - DNA, 5473 bp, Oryza sativa; identical to SEQ ID NO: 14294
  Clone ID: TF_OsC359_6142

SEQ ID NO: 23100 - DNA, 4792 bp, Oryza sativa; identical to SEQ ID NO: 14101
  Clone ID: TF_OsC359_6230

SEQ ID NO: 23101 - DNA, 2957 bp, Oryza sativa
  Clone ID: TF_OsC359_6231
atgggcactcttcaccagcgctacccgtacgagttgcaacactcgccctaccgctaccaccctcgtcgcggaggagcccgcgactacgccaccttccgggatgctagctcagaggatgacgctaccatcgtgcacctggcgcggatggtggaggcgtacaacgcggctcgtatcgacttccaccagatggtacgtcgcgggatggtcgagaacaacatgaagatcctggaactgcgccaggagaacctgcagctcaagaaggacctagacgcggtggaggcgcagctgcatcagctcaagatcgcccagggaaaggtctgtcgccccaagcgtcgccgcgtctgccgcagccagaagatcaccgcccgcaagagcacctccaggcccgagcttgttcgtcagtccctggcgtggacttgcttcatcgagacccctcgtgccgagcccgcgcccgtggttccccaggagggggaagcctccggcgtcgctctttctctgtttgctggttccgtgtggggttttcagatggtgacgaccaggagaaatgcggttaccggtgatggcaaccaacccgaaggcagcaaccacaaccaccaaggcaacccaccttcaccttctcctcctcctccaccaccaccaccagacaccaacgccattctcacccaaatcctcgcccagcaggccaacatgatgactgctttcctccaccacctccaaaatccgccacaacagaatgccccaccaccacctccccaacactctaaactcgccgagttcctccgcatccgcccacctaccttctctagctccaacaaccccgtggatgcgttggattggttgcatgccgtggggaaaaagctagacactgtgcagtgcagcgatgaggagaaagtcatcttcgccgcccatcagctgcagggacccgcatctctatggtgggaccatttccaggctacgcagccagagggacagcctattacttgggctcgcttcaccgccgcttttcggaggacccatgtgcccgctggagtcgtggcccttaagaaaagggaattccgagagttgaagcaaggcaaccgctccgtgatggagtatttgcatgagttcaacaacctggcccgttacgctccggaggatgtgcgggaagatgaggagaagcaagagaagttcctggcaggaatggaccccgagctgtccgtccgtctagtctctggggattatccggatttccaacgtctggtggacaagagcatccgcttggaagccaagcacaaggaactggagtcgcacaagcgccgcttggcgaatttccgcaaccaacagggtgctaaccaaagggtccgctacaccaatccctatccagggggatcctcctcgcagcagcaacagcagcagcagcaacctcgctccgcgcctcgacctcaattcgtggtgcgcgtcccacagccgcagcaacagcagaatcaacaagggactcgtgcgccccgtcctcctacgcaaactgtgcagcctggtcaaggccgcagggacgctcaaggtcagcagcgtctgtgcttcaactgcttcgagcccgggcactttgcggataaatgcccgaagccaaggcgtcagcaaggccaagcgcctccccgccccaacaacggtgggaaggatgtcattcggggtcgtgtgaaccacgtgatggccgaggacgtgctgacaactccagacgtcatcgttgtgaccgccgtccccgattggaagcaacccaagacagttactcaagtccgcagtttcttaggtttggcaggatactaccggagcgtgtcaaggcagagcaccaacgaccggccggacttctccaacctctccaagtaccagaatggaaatgggatgaaattgggatggatttcatcaccggacttccaaaaacccaaggtggatatgattctatatgggtagttgtggatcgattaaccaaggtagctcgatttattcctgtgaagaccacctatggagggaacaaactagccgagctctacttcgctaggatcgtgagtctccatggcgttcccaagaaaatcgtatctgataggggaagccaattcacctctcacttttggaagaagctccaagaagagctgggtacccgattaaacttcagcaccgcatatcacccgcagacagatgggcagaccgagcgtctaaatcagatcctagaagatatgcttcgcgcatgtgtcctagatttcgggaagacctgggataagagtctcccctatgccgagttctcctacaataacagctatcaagccagcatacaaatggcaccttatgaagcgttgtatgggcgcaagtgccggacaccgctattgtgggaccaagttggggaaagccaagtgttcgggactgatatcctgagagaagctgaagcgaaggtcagaaccattcgggataatctaaaggtggcacagtcccggcagaaaagttatgcagataaccgtcgccgtgacctggaattcgcagtgggtgattttgtgtatcttcgggtcacgccattgcgaggtgtacacaggtttcagacaaaagggaagctcgcacctcggttcgtgggtcctttccgtatcattgctcggcacggagaagtcgcttaccagctggagctgcccgcctccttgggcaacgtgcatgatgtgttccatgtgtcgcaactcaagaaatgtctccgagtgccatccgagcaggccgactcagagcaaattgaagttcgcgaagacttgacctacgtggaaaggccagtaaaaatcctggacaccatggagcgcaggaccaggaaccgggtaatccgtttttgcaaggtccaatggagcaaccacgccgaagaagaagctacttgggagcgtgaagacgagctgaaggcagcccatcccgatctcttcgccagtccttccgaatctcggggtcgagattccgtttaa

SEQ ID NO: 23102 - DNA, 5421 bp, Oryza sativa; identical to SEQ ID NO: 14268
  Clone ID: TF_OsC359_6295

SEQ ID NO: 23103 - DNA, 5352 bp, Oryza sativa; identical to SEQ ID NO: 14209
  Clone ID: TF_OsC359_6321

SEQ ID NO: 23104 - DNA, 5340 bp, Oryza sativa
  Clone ID: TF_OsC359_6368
atgtcatggcacagggccggtgtcctgctgctaggggctcagtcctgcctgcctgtcccgggggttccggccgtaggaggaatggttggcctgggttggcttgggacgagctgggacccagggtcgggttgccggttcggtctgaatcatcgtaggccttgggttaaggcagatggccggcagcatcagccgtcgtggtctggacctgactggtttcgtcttggagctgtggggcatggcaggccgctcccggagcaggagggtgacgatgcagagccccacgctgcttgggaggttactgcagtgatcctcactagctcacccgagaggacttcgttggcagtcaccgcgggtggagattctttctccgccgcttgccagaacgccgctctcctcgccatcggcactcttcaccagcgctacccggacgagttgcagcactcgccctaccgctaccaccctcgccacggaggagcccgcgacttcgccaccttccgggatgctagctcggaggatgacgctaccatcatgcacctggcgcgcatggtggaggcgtacgacgcgacttgtatcgacttccatcagatggtgcgccgtgggatggtcgagaacaacatgaagatcctggagccgcgtcaggagaatctgcagctgaagaaggacctagacgcagtggaggcgcagctgcatcagctcaagatcgcccagggagaggtctgtcgccccaagcgtcgccgcgtctgccgcagccagaagatcaccgcccgcaagagcacctccaggcccgagcttgttcgtcagtccctggcgtggacttgcttcgttcagacccctcgtgccgagcccgcgcccgtggttcctcaggagggggaagcctccggcgttggtagcacggaggatgcgctgttgctcaccttccgtcctggcccgtcgcagcggagaagtgctaataccggtgatggcaaccaacctgagggcagcaaccacaacaaccatggcagcccacctccacctcctcctccgcctccaccaccaccaccagacaccaacgccattctcacccaaatcctcgcccagcaggcctacatgatgactgctttcctccaccacctccaaaatccgccacaacagaatgctccaccaccacccccacaacactctaaactcgccgagttcctccgcatccgtccacctaccttctctagctccaacaaccccgtggatgcgttggattggttgcatgccgtggggaaaaagctagacaccgtgcagtgcagcgatgaggagaaagtcgtcttcgccgcccaccgactgcaggggcccgcatctctatggtgggaccatttccaggctacgcagccagaggggcagcctattacttgggcccgcttcaccgccgccttccggaggacccatgtgcccgccgaagtcatggcccttaagaaaagggaattccgagagttgaagcaaggcaaccgctccgtgatggagtatttgcatgagtttaacaacctggcccggtacgccccggaggatgtacgggaagatgaggaaaagcaggagaagttcttggcaggaatggaccctgagctgtccgtgcgtctagtctccggtgactatccggatttccaacgtctggtggacaagagcatccgcttggaagccaagcacaaggaactagagtcgcacaagcgccgcttggcgaatttccgcaatcaacagggtgctaaccaaagggtccgctacaccaatccctatccagggggatcgtcctcgcagcagcaacagcagcaacaacctcgctccgcgccccgacctcaattcgtggtgcgcgtcccacagccgcagcaacagcagagtcaacaagggactcgtgcgacccgtcctcctatgccagccgtgcagcctggtcaaggccgcagggacgttcaaggtccgcagcgtctgtgcttcaactgcttcgagcccgggcactttgcggataaatgcccgaagccgaggcgccagcaaggccaaccgcctccccgctccaacaacggtggtaaggatgtcattcgggatcgtgtgaaccacgtgacggccgaggacgtgctgacaactccagacgtcatcgttggtacgttcctcattcattccatccctgctaccattttgttcgactctggagcttcccactcgtttatatcggtgccattcgtggggagaaatcagttgggggtagaaaggcttaggaaccctctgctcatcaccacccctggaggggttatgacagcaaagtattatagtcctgccgtccctatagaaattcaggggattccttttccctcggatctgattcttctagacaccaagaacttggatgtgatccttgggatgaattggttggctcaattccaaggaatagtggattgtgcaagacgcactgtcactctgtaccgagggccggaacaaccggttgttttctttgcacccccaacctctatcagtagttcagaacttcatcagataggactgtcagaaatccccatcgtcagagagttcggagacgtgtttccggaagaactacccggtatgccgcccaagcgagagattgagttccggatagatctttctccaggaaccactcctctgtacaagcgaccctaccgtatggcagcaaatgaactggccaaagttaagaaacagttggaagagttgaaagaaaaggggtatatacgtccgagtacttccccctggggtgctcctgtgatttttgtggagaagaaagacaagacgaagaggatgtgcgttgactacagagctctcaatgaagtcaccatcaaaaacaagtaccctcttccccggatcgatgatctgttcgatcagcttaaaggtgccacggtattctccaagattgatcttcgttccggatatcaccagttgcgcatccgtgaagaagatattccgaagaccgcattcaccacgcgatacggactgtatgaattcacggtgatgtcattcggtttaaccaatgctcctgccttcttcatgaacttaatgaagaaagtgttcatggaatacttggataagtttgttgtggttttcattgatgacattctggtatactcacaatcagaggaagaccataagcaccatctccgtctggtgttggggaagttgcgggaacatcaattgtatgccaaacttagcaagtgtgagttctggttgtccgaagtcaaattcttagggcacgtgatatctgctaaaggagttgctgtggaccccgaaacagtgaccgccgtcactgattggaagcaacccaagacagtcactcaaattcgcagtttcttaggtttggcaggatactaccggaggtttatcgagaacttctccaaaatcgctcgacccatgacacagttgttgaagaaagaagagaaatttgtgtggagcccgcaatgcgagaaggcgttccaaactctcaaagaaaagctggtttcctcgccagtgttaatcttgcaggatactcgcaaggacttcatggtgtattgtgacgcttcgcgccaaggattggggtgcgtgctcatgcatgacggtcatgtggtggcctatgcctcacgccagctacggcctcatgaaggcaactaccctacccatgatttggagttagccgcggtggttcatgctctaaaaatctggcggcactatctcattgggaatcactgtgaaatatatactgatcataagagtttgaaatacatcttcacccagtcggatctgaatcttcggcagaggagatggctagaactcatcaaggattatgatgtgggaattcactatcatcctggtaaggccaacgtggtcgccgacgctctaagtcgaaaaagccattgcaacactcttaacgtccgtggcattccacccgaacttaaccaacagatggaagccctgaatctaagcataaatatgaaacagggtaaagccgctggtttcacagaggatgaacacggaaccctatggaacggaaatcgggtatgcgttccagataacagagaacttaaacaactgatacttcaggaagctcacgaaagtccttattccatccaccctggcagtacgaagatgtacttagacttgaaggagaaatactggtgggttagtatgaagcgggaaattgcagagttcgtggccctttgtgatgtgtgccagcgtgtcaaagcagagcaccaacgaccggccggacttctccaacctctccaagtaccagaatggaaatgggatgaaattgggatggatttcatcaccggacttccaaaaacccaaggtggatatgattctatatgggtagttgtggatcgattaaccaaggtagctcgatttattcctgtgaagaccacctatggagggaacaaactagccgagctctacttcgctaggatcgtgagtctccatggcgttcccaagaaaatcgtatctgataggggaagccaattcacctctcacttttggaagaagctccaagaagagctgggtacccgattaaatttcagcaccgcgtatcacccgcagacggatggacagaccgagcatctaaatcagatcctagaagatatgcttcgcgcatgtgtcctagatttcgggaagacctgggataagagtctcccctatgccgagttctcctacaataacagctaccaagccagtatacaaatggcaccttatgaagcgttgtatgggcgcaaatgccggacaccgctcttgtgggaccaagttggggaaagtcaagtgttcgggactgatatcctgagaaaagctgaagcgaaggtcagaaccattcgggataatctaaaggtggcacagtcccggcagaaaagttatgcagataaccgtcgccgtgacctggaatttgcagtggacgattttgtgtaccttcgggtcacgccattgcggggtgtacacaggtttcagacaaaagggaagctcgcacctcggttcgtgggtcctttccgtatcattgctcggcgcggagaagtcgcttaccagttggagctgcccgcctccttgggcaacgtgcatgatgtgttccatgtgtcgcaactcaagaaatgtcttcgagtgccatccgagcaggccgactcagagcaaattgaagttcgcgaagacttgacctacgtggagaggccagtgaaaatcctggacaccatggagcgcaggaccaggaaccgggtaatccgtttttgcaaggtccaatggagcaaccacgccgaggaagaagctacctgggagcgtgaagacgagctgaaggcagcccatcccgatctcttcgctagttcttccgaatctcggggtcgagattccgtttaa

SEQ ID NO: 23105 - DNA, 1221 bp, Oryza sativa; identical to SEQ ID NO: 14304
  Clone ID: TF_OsC359_6432

SEQ ID NO: 23106 - DNA, 4033 bp, Oryza sativa
  Clone ID: TF_OsC359_6549
atggttatgccgatggtgacgaccagaagaaatgctgccaccggtgatggcaaccaacccgaaggcagcaaccacaaccaccagggtaacccacctccacctcctcctccgcctccaccaccaccaccagacaccaacgccattctcacccaaatcctcgcccagcaagccaacatgatgactgctttcctccaccacctccaaaatccaccacaacataatgctccaccacctccccaacactctaaactcgccgagttcctccgcatccgcccacctaccttctctagctccaacaaccccgtggatgcgttggattggttgcatgccgtggggaaaaagctagacacggtgcagtgcagcgatgaggagaaagttatcttcgccgcccaccagctgcagggacccgcatctctatggtgggaccatttccaggctacgcagccagaggggcagcctattacttgggcccgcttcaccgccgctttccgaagaacccatttcaataacctggcccgttacgctccagaggatgtgcgggaagatgaggagaaacaggagaagttcttggcaggaatggaccccgagctgtccgtccgtctagtctccggggactatccggatttccaacgactggtggacaagagcatccgcttggaagccaagcacaaggaactggagtcgcacaagtgccgcttggcgaatttccgcaatcagcagggtgctaaccagagggtccgctacaccaatccctatccagggggatcctcctcgcagcagcaacaacagcagcagcagcaacctcgctccgcgcctcgacctcaattcgtggtgcgcatcccacagccgcagcagcagcagaatcaacaagggactcgtgcgccccgtcctcctacgccaactgtgcagcctggtcaaggccgcagggacgctcaaggtcagcagcgtctgtgcttcaactgcttcgagcccgggcactttgcggataaatgcccaaagccaaggcgtcagcaaggccaagcgcctccccgctccaacaacggcgggaaggatgtcattcggggtcgtgtgaaccacgtgacggccgaggacgtgctgacaactccagacgtcatcgttgaactgcatcagattggactgtcagaaatccccattgtcagagagttcggagacgtgtttccggaagaactacctggtatgccgcccaagcgagagattgagttccggatagatcttgctccaggaaccactcctctgcataagcgaccctaccgtatggcagcaaatgaactggccgaagtaaagaaacagttggaagagttgaaagaaaaggggtacatacgcccgagtacttccccatggggtgctcctgtgatttttgtagagaagaaagacaagacgaagaggatgtgcgtcgactacagagctctcaatgaagtcaccatcaaaaacaagtaccctcttccccggatcgatgatctgttcgatcaacttaaaggtgccactgtattctccaagattgatcttcgttccggatatcaccaattacgtattcgtgaagaagatattccgaagaccgcattcaccacgcgatacgggctgtatgaattcacggtgatgtcgttcggtttaaccaatgcacctgccttcttcatgaacttaatgaacaaagtgttcatggaatacttggataagtttgttgtggttttcattgatgacattctgatatactcacaatcagaggaagaccatcagcaccatctccgtctggtgttgggaaagttgcgggaacatcaattgtatgccaagcttagcaagtgtgagttctggttgtccgaagtcaaattcttagggcacgtgatatcagctaaaggagttgctgtggaccccgaaacagtgaccgccgtcaccgattggaaacaacccaagacagttactcaagtccgcagtttcttaggtttggcaggatactaccggagattcatcgagaacttctccaagatcgctcgacccatgacacagttgttgaagaaagaagagaaatttgtgtggagcccgcaatgcgagaaggcgtttcaaactctcaaggaaaagctggtttcctcgccggtgttaatcttgccggatactcgcaaggacttcatggtgtattgtgacgcttcgcgccaaggattggggtgcgtgctcatgcaggacggtcatgtggtagcctatgcctcacgtcagctacgacctcatgaaggcaactaccctacccatgatttggagttagcagcggtggttcatgctctaaaaatctggcggcactatctcattgggaatcgctgtgaaatctatactgatcataagagtttgaaatacatcttcactcagtcggacctgaatcttcggcaaaggagatggttagaacttatcaaagactatgatgtgggaattcactatcatcctggtaaggccaacgtggttgccgacgctctaagtcgaaagagccattgcaacactcttaacgtccgtggcattccacccgagcttaaccaacagatggaagccctgaacctaagcatagttagtcgtggattcttggccgcgttggaagccaagcccaccttgctcgatcaaatccgcgaggctcagaagaacgacccggacatgcatggactcctcaagaatatgaaacagggtaaagccgctggtttcacagaggatgaacacggaaccctatggaacggaaagcgggtatgcgttccagataacagagaacttaaacagctgatacttcaggaagctcacgaaagtccttattccatccaccctggcagtacgaagatgtacttagacttgaaggagaaatactggtgggttagtatgaagcgggagattgcagagtttgtggccctacgtgatgtgtgccagcgtgtcaaggcagagcaccagcgaccggccggacttctccaacctctccaagtacctgaatggaaatgggatgaaattgggatggatttcatcaccggacttccaaagacccaaggtggatatgattctatatgggtagttgtggatcgattaaccaaggtagctcgattcattcctgtgaagaccacctatggagggaacaaactagcggagctctacttcgctaggatcgtgagtctccatggcgttcccaagaaaatcgtatctgataggggaagccaattcacctctcacttttggaagaagctccaagaagagctgggtactcgattaaatttcagcaccgcctatcacccgcagacagatgggcagaccgagcgtctaaatcagatcctagaagacatgcttcgtgcatgtgtactagatttcgggaagacctgggataagagtctcccctatgccgagttctcctacaataacagctatcaagccagcatacaaatggcaccttatgaagcgttgtacgggcgcaaatggcggacaccgctattgtgggaccaagttggagaaagccaagtgttcgggactgatatcctgagagaagctgaagctaaagtcagaatcattcgggataatctaaaggtggcacagtcccggcagaaaagttatgcagataaccgtcgccgtgacttggaattcgcagtggatgactttgtgtaccttcgggtcacgccattgcgaggtgtacacaggtttcagacgaaagggaagctcgcacctcggtatgtgggtcctttccgtatcgttgctcgacgcggagaagtcgcttaccagttggagctgcccgcctccttgggcaacgtgcatgatgtgttccatgtgtcgcaactcaagaaatgccttcgagtgccatccgagcaggccgactcagagcaaattgaagttcgcgaagatttgacctacgtggagaggccagtgaaaatcctggacaccatggagcgcaggaccaggaaccgggtaatccgtttttgcaaggtccagtggagcaatcacgccgaagaagaagctacttgggagcgtgaagacgagctgaaggcagcccatcccggtctcttcgcca

SEQ ID NO: 23107 - DNA, 5412 bp, Oryza sativa; identical to SEQ ID NO: 14274
  Clone ID: TF_OsC359_6552

SEQ ID NO: 23108 - DNA, 4617 bp, Oryza sativa; identical to SEQ ID NO: 14155
  Clone ID: TF_OsC359_6647

SEQ ID NO: 23109 - DNA, 5605 bp, Oryza sativa
  Clone ID: TF_OsC359_6674
atggatgaagtcgggggtcgatggacattctccagggcaaatgaaggctacacgagctgcggcccggtagtcgagatgtcgtggcagagggttggtgccctgctgcttggggctcagtcctgcctgcctgtcccggaggttccggccgtaggcgggattgggtcgatggccggcagcgtcacccgtcgtggtttggacatgactggcttcgtcttggagctgcggggcatgtgcgtggccctggggtatccacatggagtggactaccaggccaggccgcttccggatcaggagggtgacgacgcggagccccacgctggttgggaggtcaccgcagtgatcctctctggctctcccgagcggacttcgctggcagttaccgcgggtggagattccttccccgccgcttgccagaacgccgctctcctcgccatcggcactcttcaccagcgctacccggacgagttgcagcactcgccctaccgctaccaccctcgtcgcggaggagcccacgactacgccaccttccgggatgctagctcggaggatgacgctaccatcgtgcacctggcgcgcatggtggaggtgtacgacgcggctcgtatcgacttccatcagatggtgcgtcgcgggatggtcgagaacaatctgaagatcctggagctgcgtcaggagaacctgcagctcaagaaggacctagacgcggtggaggcgcagctgcatcagctcaagatcgcccagggagaggtctgccgccccaagcgtcgccgcgtctgccgcagccagaagatcaccgcccgcaagagcacctccaggcccgagcttgttcgtcagtccctggcgtggacttgcttcgtcgagacccctcgtgccgagcccgcgcccgtggttccccaggagggggaagcctccggcattggtagcacggaggctctttctctgtttgctggttctgtgtggggttttcagatggtgacgaccaggagaaatgctgccaccggtgatggcaaccaacccgaaggcagcaaccacaaccatcagggcaacccacctccacctcctcctccgcctccaccaccaccaccagacaccaacgccattctcacccaaatcctcgcccagcaagccaacatgatgactgctttcctccaccacctccaaaatccaccacaacataatgctccaccaccacccccacaacactctaaactcgccgagttcctccgtatccgcccacctaccttctctagctccaacaaccccgtggatgcgttggattggtttcatgccgtggggaaaaagctagacacggtgcagtgcagcgatgaggagaaagttatcttcgccgcccaccaactgcaggggcccgcatctctatggtgggaccatttccaggctacgcagccagaggggcagcctattacttgggcccgcttcaccgccgctttccggagaacccatgtgcccgccggagtcgtggcccttaagaaaagggaattccgagagttgaagcaaggcaaccgctccgtgatggagtatttgcatgagttcaacaacctagcccgttacgccccggaggatgtgcgggaagatgaggagaagcaagaaaagttcttggcaggaatggaccctgaactgtccgtccgtctagtctctggggactatccggattttcaacgattggtggacaagagcatccgcttggaagccaagcacaaggagctggagtcgcacaagcgccgcttggcgaatttccgcaatcaacagggtgctaatcaaaggggccgctacaccaatccctatccagggggatcctcctcgcagcagcaacaacagcagcagcaacctcgccccgcgccccgacctcaattcgtggtgcgcttcccacagccgcagcaacagcagaatcaacaagggactcgtgcgccccgtcctcctacgccaacggtgcagcctggtcaaggccgcagggacgctcaaggtcagcagcgtctgtgcttcaactgcttcgagcccgggcactttgcggataaatgcccaaagccaaggcgtcagcaaggccaagcgcctccccgctccaacaacggcgggaaggatgtcattcggggtcgtgtgaatcacgtgacggccgaggacgtgctgacaactccagacgtcatcgttggactgtcagaaatccccatcgtcagggagttcggagatgtgtttccggaagaactacccggtatgccgcccaagcgagagattgagttccggatagatcttgctccaggaaccactcctctgcacaagcgaccctaccgtatggcagcaaatgaactggccgaagtaaagaaacagttggaagagttgaaagaaaaggggtacatacgtccgagtacttccccatggggtgctcctgtgatttttgtagagaagaaagacaagacgaagaggatgtgcgtcgattacagagctctcaatgaagtcaccatcaaaaacaagtaccctcttccccggatcgatgatctattcgatcagcttaaaggtgccactgtattctccaagattgatcttcgttccggatatcaccaattacgtattcgtgaagaagatattccgaagaccgcattcaccacgcgatacggactgtatgaattcacggtgatgtcattcggtttaaccaatgctcttgcattcttcatgaacttaatgaacaaagtgttcatggaatacttggataagtttgttgtggtgttcattgatgacattctgatatactcacaatccgaggaagaccatcagcaccatctccgtctggtgttgggaaagttgcgggaacatcaattgtatgccaagcttagcaagttcatcgagaacttctccaaaatcgctcgacccatgacacagttgttgaagaaagaagagaaatttgtgtggagcccgcaatgcgagaaggcgtttcaaactctcaaggaaaagctggtttcctcgccggtgttaatcttgccggatactcgcaaggacttcatggtgtattgtgacgcttcgcgccaaggattggggtgcgtgctcatgcaggacggtcatgtagtagcctatgcctcacgtcagctacgacctcatgaaggcaactaccctacacatgacttggagttagccgcggtggttcatgctctaaaaatctggcggcactatctcattgggaatcgctgtgaaatatataccgaccataggagtttgaaatacatcttcacccagtcggatctgaatcttcggcaaaggagatggttagaactcatcaaagactatgatgtgggaattcactatcatcctggtaaggccaacgtggttgccgacgctctaagtcgaaagagccattgcaacactcttaacgtccgtggcattccacccgaacttagtcaacagatggaagccctgaacctaagcatagttagtcgcggattcttggctgcgttagaagccaagcctaccttgctcgatcaaatccgcgaggcttcagaagaatgatccggacatgcatggactcctcaagaatatgaaacagggtaaagccgctggttttacagaggatgaacacagaaccctatggaacggaaagcgggtatgcgttccagataacagagaacttaaacagctgatacttcaggaagctcacgagagcccttattccattcacccgggcagtacaaagatgtacctagacttgaaggagaaatactggtgggttagcatgaagcgggaaattgcagagtttgtggccctatgtgatgtgtgccagcgtgtcaaggcagagcaccaacgaccggccggacttctccaacctctccaagtaccagaatggaaatgggatgaaattgggatggatttcatcaccggacttccaaaaacccaaggtggatatgattctatatgggtagttgtggatcgattaaccaaggtagcacggttcattcccgtaaagaccacctatggagggaacaaactagccgagctctacttcgctaggatcgtgagtctccatggcgttcccaagaaaatcgtatctgataggggaagccaattcacctctcacttttggaagaagctccaagaagagctgggtactcgattgaatttcagcaccgcctatcacccgcagaaagatggacagaccgagcgtctaaatcagatcctagaagatatgctccgcgcatgtgtactagatttcgggaagacctgggataagagtctcccctatgccgagttctcctacaataacagctatcaagccagcatacaattggcaccttatgaagcgttgtacgggcgcaaatgccggacaccgctattgtgggaccaagttggagaaagccaagtgttcgggactgatatcctgagagaagctgaagctaaagtcagaatcattcgggataatctaaaggtggcacagtcccggcagaaaagttatgcagataatcgtcgccgtgacctggaattcgcagtgggtgattttgtgtaccttcgggtcacgccattgcgaggtgtacacaggtttcagacaaaagggaagctcgcacctcggtatgtgggtcctttccgtatcgttgctcgacgcggagaagtcgcttaccagttggagctgcccgcctccttgggcaacgtgcatgatgtgttccatgtgtcgcaactcaataaatgccttcgagtgccatccgagcaggccgactcagagcagattgaagttcgcgaagatttgacctacgtggagaggccagtgaaaatcctggacaccatggagcgcaggaccaggaaccgggtaatccgtttttgcaagctccagtggagcaaccatgccgaagaagaagctacctgggagcgtgaagacgagctgaaggcagcccatcccgatctcctcgccaccgcccgcgcccgcgggtgcggtgacgcgtgggacccacggcgccggccggcgtcagccgcgtgcgcccggtccaccgtggaccgtgagggtgacgcgtgggccccactcccgtggacccgccccacggtccacggtggaccgggcgcacgcggctggcggcggtcggcgccgtgggtcccgcgcgtcagccgcacccgcgggcgcgggcggctgacggccgggcccacttggcagccgcgagggcgcgcccgagggcggcctcgccggcgcggccgacgggagcggcgcgcccgcgccccgatggtcaccgccggcgaccaccggcgcggcggagcggcgcccgagagagaggagggaagggggaaggcgaacggcggtcctcggctcaccccgggacaacgacgacgacgagaacggcggccggagcggaggaagacggcggcgcggctcgggatgacgatggcgacggcgctccgacggtcggcgagcgaaacggaggcgcggacgaggtcgacggcgatgcggcgatgccgagggaggtggcgccgagtaaggaggaagtccggagcggcggcggcggcggaacggagctcggcggcgatggcggagagagcggagcacggcgcgagcacgaatccgacggcgagagcgagcggcgagcggcggaaacggaagagcggagctcgggcaacgtttaaatag

SEQ ID NO: 23110 - DNA, 5848 bp, Oryza sativa
  Clone ID: TF_OsC359_6898
agaagtcaagaacccatttttgtgctttgtttctgctgttatgtggagtttagtagagtaaaagcccttttcttttccgttggtcgtgtagacgctgcagcttcggaagatccgctcttcgggaagttgaagccgacgtttgggaaagcgagcaaggcaagtcacatcatcacctctcttcctctttcaaaacccctaaaacctgttttcggtgaggtttgggtgcatgccagttatgggaagtagcaccccggccactataaggattaagctcgggcctctgttgcaaagcactaccgtacttccacatgtctagtgggtaaggcttagtttgtggctcagtctggttataaacaaaagtacacggatggaggtggatgaagtcgggggtcgatggacattctccagggcaaatgaaggctacacgagctgcggcccggtagtcgagatgtcatggcacagggccggtgtcctgctgctaggggctcagtcctgcctgcctgtcccgggggttccggccgtaggtgggattgggtcggtactcttgtctatggctaggatgggttggaaactatgtcacagcttccgtctgtataccgtggtgatggccggcagcgtcacccgtcgtggtttggacatgactggcttcgtcttggagctgcggggcatgtgcgtggtcttggggtatccacatggagtggattaccaggccaggccgctcccggagcaggagggtgaggatgcagagccccacgctggttgggaggttactgcagtgatcctctctggctctcccgagcggacttcgctggcagtcaccgcgggtggagattccttccccgccgcttgccagaacgccgctctcctcgccatcggcactcttcaccagcgctacccggacgagttgcagcactcgccctaccgctaccaccctcgtcgcggaggagcccgcgactacgccaccttccgggatgctagctcggaggatgacgctaccatcgtgcacctggcgcgcatggtggaggcgtacgacgcagctcgtatcgacttccaccagatggtacgccgtgggatggtcgagaacaacatgaagatcctggagctgcgtcaggagaacctgcagctcaagaaggacctagacgcggtggaggcgcagctgcagcagctcaagatcgcccagggggaggactgccgtcccaagcgtcgccgcgtctgccgcagccagaagatcaccgcccgcaagagcacctccaggcccgagcttgttcgtcagtccctggcgtggacttgcttcgtggagacccctcgtgccgagcccgcgcccgtggttccccaggagggggaagcctccggcgttggtagcacggaggatgcgctgttgctcaccttccgtcctggcccgtcgcagcggagaaatgctaacaccggtgatggcaatcaacctgaaggcagcaaccacaaccgccagggcaacccacctccacctcctcctccgcctccaccaccaccaccagataccaacgccattctcacccaaatcctcgcccagcaagccaacatgatgacggctttcctccaccacctccaaaatccgccacaacataatgctccaccaccacctccccaacactctaaactcgccgagttcctccgcatccgtccacccaccttctccagctccaacaaccccgtggatgcgttggattggttgcatgccgtggggaaaaagctagacactgtgcagtgcagcgatgaggagaaagtcgtcttcgccgcccaccagctgcaggggcccgcatctctatggtgggaccatttccaagctacgcagccagaggggcagcctattacttgggcccgcttcaccgccgctttccggagaacccatgtgcccgccggagtcgttgctcttaagaagagggagttccgagagttgaagcaaggcaaccgctccgtgatggagtatttgcatgagttcaacaatctggcccgttacgccccggaggatgtgcgggaagatgaggagaagcaagagaagttcttggcaggattggaccctgaactgtccgtccgtctagtctctggggactatccggatttccaacgtctggtggacaagagcatccgcttggaggccaagcacaaggaactggagtcgcacaagcgccgcttggcgaatttccgcaatcaacagggtgctaaccaaagggtccgctacaccaacccctatccagggggatcctcctcgcaacagcaacaacagcagcagcaacctcgctccgcgccccgacctcaattcgtggtgcgcgtcccacagccgcagcagcagcagaatcagcaagggactcgtgcgccccgtcctcctacgccaactgtgcagcctggtcaaggccgcagggacgctcaaggtcagcagcgtctgtgcttcaactgcttcgagcccgggcactttgcggataaatgcccgaagccaaggcgtcagcaaggtcaagcgcctccccgctccaacaacggtgggaaggatgtcattcggggtcgtgtgaatcacgtgacggccgaggacgtgttgacaactccagacgtcatcgttggtacgttcctcgttcattccatccctgctaccattttgttcgactctggagcttcccactcgtttatatctgtgccattcgtggggagaaatcagttgggggtagaaaggcttaggaaccctctgctcatcaccacccctggaggggttatgacagcaaagtattatagccctgccgtccctatagaaattcaggggattccttttccctcggatctgattctgctagacaccaagaacttggatgtgattcttgggatgaattggttggctcaattccaaggagtagtggattgcgcgagacgcactgtcactctgtaccgagggccggaacaaccggttgttttctttgcacccccaacctctgtcagtagttcagaactgcatcagataggactgtcagaaatccccatagtcagggagttcatagatgtgtttccggaagaactacccggtatgccgcccaagcgagagattgagttccggatagatcttgctccaggaaccactcctctgcacaagcgaccctaccgtatggcagcaaatgaactggccgaagtaaagaaacagttggaagagttgaaagaaaaggggtatatacgtccgagtacttccccctggggtgctcctgtgatttttgtggagaagaaagacaagacgaagaggatgtgcgttgactacagagctctcaatgaagtcaccatcaaaaacaagtaccctcttccccggatcgatgatctgttcgatcagcttaaaggtgccactgtattctccaagattgatcttcgttccggatatcaccaattacgtattcgtgaagaagatattccgaagaccgcattcaccacgcgatacgggctgtatgaattcacggtgatgtcattcggtctaaccaatgcacctgccttcttcatgaacttaatgaacaaagtgttcatggaatacttggataagtttgttgtggttttcattgatgacattctgatatactcacaatcagaggaagaccatcagcaccatctccgtctggtgttgggaaagctgcgggaacatcaattgtatgccaagcttagcaagtgtgagttctggttgtccgaagtcaaattcttaggacacgtgatatctgctaaaggagttgctgtggaccccgaaacagtgaccgccgtcgccgattggaagcaacccaagacagttactcaagtccgcagtttcttaggtttggcaggatactaccggagattcatcgagaacttctccaaaatcgctcgacccatgacacagttgttgaagaaagaagagaaatttgtgtggagcccgcaatgcgagaaggcgttccaaactctcaaggaaaagctggtttcctcgccggtgttaatcttgccggatactcgcaaggacttcatggtgtattgtgacgcttcgcgccaaggattggggtgcgtgctcatgcaggacggtcatgtggtagcctatgcctcgcgtcagctgcgacctcatgaaggcaactaccctacacatgatttggagttagccgcggtggttcatgctctaaaaatctggcggcactatctcattgggaatcgctgtgaaatatataccgatcataagagtttgaaatacatcttcacccagtcggatctaaatcttcggcaaaggagatggttagaactcatcaaggactatgatgtgggaattcactatcatcctggtaaggccaacgtggttgccgacgctctaagtcgaaagggccattgcaacactcttaacgtccttggcattccacccgaacttaatcaacagatggaagccctgaacctaagcgtagttggtcgcggattcttggctgcgctagaagccaagcctaccttgctcgatcaaatccgcgaggctcagaagaatgatccggacatgcatggactcctcaagaatatgaaacaggataacagagaacttaaacagctgatacttcaggaagctcacgagagcccttattccattcacccgggcagtacaaagatgtacttagacttgaaggagaaatactggtgggttagtatgaagcgggaaattgcagagttcgtggccctttgtgatgtgtgccagcgtgtcaaggcagagcaccaacgaccggccggacttctccaacctctccaagtaccagaatggaaatgggatgaaattgggatggatttcatcacaggacttccaaaaacccaaggtggatatgattctatatgggtagttgtggatcgattaaccaaggtagctcgatttattcctatgaagaccacctatggagggaacaaactagccgagctctacttcgctaggatcgtgagtctccatggcgttcccaagaaaatcgtatctgataggggaagccaattcacctctcatttctggaagaaactccaagaagagttgggaacccgattaaatttcagcaccgcgtatcacccgcagacagatggacagaccgagcgtctaaatcaaatcctagaagatatgctccgcgcatgtgtactagatttcgggaagacctgggataagagtctcccctatgccgagttctcctacaataacagttatcaagccagcatacaaatggcaccttatgaagcgttgtacgggcgcaaatgccggacaccgctcttgtgggaccaagttggagaaagccaagtgttcgggactgatatcctgagagaagctgaagctaaagtcagaatcattcgggataatctaaaggtggcacagtcccggcagaaaagttatgcggataaccgacgccgtgatctggaattcgtagtggatgactttgtgtatcttcgggtcacgccattgcgaggtgtacacaggtttcagacaaaagggaagctcgcacctcggtatgtgggtcctttccgtatcgttgctcgacgcggagaagtcgcttaccagctggagctgcccgcctccttgggcaacgtgcatgatgtgttccatgtgtcgcaactcaagaaatgccttcgagtgccatccgagcaggccgactcagagcaaattgaagttcgcgaagatttgacctatgtggagaggccagtgaaaatcctggacaccatggagcgcaggaccaggaaccgggtaatccgtttttgcaaggtccagtggagcaaccatgctgaagaagaagctacttgggagcgtgaagacgagctgaaggcagcccatcccgacctcttcaccagttcttccgaatctcggggtcgagattccgtttaa

SEQ ID NO: 23111 - DNA, 4536 bp, Oryza sativa; identical to SEQ ID NO: 14135
  Clone ID: TF_OsC359_6901

SEQ ID NO: 23112 - DNA, 5271 bp, Oryza sativa; identical to SEQ ID NO: 14228
  Clone ID: TF_OsC359_6955

SEQ ID NO: 23113 - DNA, 5001 bp, Oryza sativa; identical to SEQ ID NO: 14185
  Clone ID: TF_OsC359_7002

SEQ ID NO: 23114 - DNA, 6051 bp, Oryza sativa
  Clone ID: TF_OsC359_7171
aatggagccgagatctccgcggccgtttcctccctctccggccgcgctctccccctctcggcgctatatatttgctccccgtgcctctctcctccgtttccgccgctcgccgctcgctctcgccgtcggattcgtgctagcgccgtcctcctctctctccgccgtcgccgccaaccttcggttcgccgccgtcgtcgctccggacttcctcccgactcggcgccacctccatcggcttcgccgcgtcgtcgtcgaccccgtccgctcctccgtttcgcccgccgaccgccggagcaccgtcgccctcgtcatcccgaaccgcgccgccgcctctcgccgcttcggtcgtcgtttccgccgccctcgtcgtcccggggtgagccgaggaccgccgttcgctttccctcttctctccgctctctcgggcgccgctccgccgcgccggtggtcgccggcggtgaccatcggggagcgggtgcgccgcctcccgtcggccgtgccggcgaggccgccttcggccgcctcccgcggctgccaggtggggcccggccgtcagccgcccgcgcccgcgggtgcggctgacgcgtgggacccacggcgccgaccgccgccagccgcgtgctcccggtccaccgtggacccacctcggccatataaggaccggtcttcgggcctctgttgcaaagcactaccgtacttccacatgtctagtggggcaaatgaaggctacacgagctgcggcccggtagtcgagatgtcatggcagagggttggtgccctgctgctaggggctcagtcctgcctgcctgtcccggaggttccggccgtaggcgggattgggtcgatgtacacctctgatcagagtttaatctattcgaatagccgcgccctcggttatgggcaagccgagcaatgtacccaaatggccggcagcgtcacccgtcgtggtttgcacatgactggcttcgtcttggagctgcggggcatgtgcgtggtcttggggtatccacatggagtggattaccaggccaggccgctcccggagcaggagggtgaggatgcagagccccacgctggttgggaggtcactgcagtgatcctctctggctctcccgagcggacttcgctggcagtcaccgcgggtggagattccttccccgccgcttgccagaacgccgccctcctcgccatcggcacccttcaccagcgctacccggacgagttgcagcactcgccctaccgctaccaccctcgtcgcggaggagcccgcgacttcgccaccttccgggatgctagctcggaggatgacgctaccatcgtgcacctggcacgcatggtggaggcgtacgacgcggctcgtatcgacttccatcagatggtgcgccgcggtatggtcgagaacaacatgaagatcctggagctgcggcaggagaacctgcagctcaagaaggacctcgacgcggtggaggcgcagctgcatcagctcaagatcgcccagggagaggtctgccgccccaagcgtcgccgcgtctgccgcagccagaagatcaccgcccgcaagagcacctccaggcctgagcttgttcgtcagtccctggcgtggacctgcttcgtcgagacccctcgtgccgagcccgcgcccgtggttccccaggagggggaagcctccggcgttggtagcacggaggatgcgctgttgctcaccttccatggtgacgaccaggagaaatgctgttaccggtgatggcaatcaacctgaaggcagcaaccacaaccaccagggcaacccacctccacctcttccttcggcctccgccaccaccaccagacaccaacgccattctcacccaaatcctcgcccagcaagccaacatgatgactactttcctccaccacctccaaaatccgccacaacagaatgctccacctccacctccccaacactctaaactcgccgagttcctccgcatccgcccacctaccttctctagctccaacaaccccgtggatgcgttggattggttgcatgccgtggggaaaaagctggacactgtgcagtgcagtgatgaagagaaagtcatcttcgccgcccaccagctgcagggacccgcatctctatggtgggaccacttccaagctacgcagccagagggacagcctattacatgggctcgcttcaccgccgctttccggagaacccatgtgcccgccggagtcgtggccctcaagaaaagggaattccgagagttgaagcaaggcaaccgctccgtgatggagtatttgcatgagttcaacaacctggcccgttacgctccggaggatgtgcgggaagatgaggagaagcaagagaagttcctggcaggaatggaccccgagctgtccgtccgtctagtctctggggactatccggatttccaacgtctggtggacaagagcatccgcttggaagccaagcacaaggaactggagtcgcacaagcgccgcttggcgaatttccgcaatcaacagggtgctaaccaaagggtccgctacaccaatccctatccagggggatcctcctcgcagcagcaacaacagcagcagcaacctcgctccgcgcctcgacctcaattcgtggtgcgcgtcccacagccgcagcagcagcagaatcaacaagggactcgtgcgccccgtcctcttacgccagccgtgcagcctggtcaaggccacagggacgctcaaggtcagcagcgtctgtgcttcaactgctttgagcccgggcactttgcggataaatgcccgaagccaaggcgtcagcaaggccaagcgcctccccgctccaacaacggtggcaaggacgtcattcggggtcgtgtgaatcacgtgacggccgaggacgtgctgacaactccagacgtcatcgttggtacgttcctcgttcattccatccctgctaccattttgttcgactctggagcttcccactcgtttatatctgtgccattcgtggggagaaatcagttgggggtagaaaggcttaggaaccctctgctcatcaccacccctggaggggttatgacagcaaagtattatagccctgccgtccctatagaaattcaggggattccttttccctcggatctgattctgctagacaccaagaagttggatgtgatccttgggatgaattggttggctcaattccaaggagtagtggtttgcgcgagacgcactgtcactctgtaccgagggccggaacaaccggttgttttctttgcacccccagcctctgtcagaagttcagaacttcatcagataggactgtcagaaatccccatagtcagggagttcggagacgtgtttccggaagaactacctggtatgccgcccaagcgagagattgagttccggatagatcttgctccaggaaccactcctctgtacaagcgaccctatcgtatggcagcgaatgaactggccgaagtcaagaaacagttggaagagttgaaagaaaaggggtatatacgtccgagtacttccccatggggtgctcctgtgatttttgtagagaagaaagacaagacgaagaggatgtgcgtcgactacagagctctcaatgaagtcaccatcaaaaacaagtaccctcttccccggatcgatgacctgttcgatcaacttaaaggtgccactgtattctccaagattgatcttcgttccggatatcaccaattacgtatccgtgaggaagatattccgaagactgcattcaccacgcgatacgggctgtatgaattcacggtgatgtcgttcggcttgaccaatgctcctgccttcttcatgaacttaatgaacaaagtgttcatggaatacttggataagtttgttgtggttttcattgatgacattctgatatactcacaatcagaagaagaccatcagcaccatctccgtctggtgttgggaaagttgcgggaacatcaattgtatgccaagcttagcaagtgtgagttctggttgtccgaagtcaaattcttagggcacgtgatatctgctaaaggagttgctgtggatcccgaaacagtgaccgccgtcaccgattggaagcaacccaagacagtcactcaaattcgcagtttcttaggtttggcaggatactaccggaggttcatcgagaacttctccaaaatcgctcgacccatgacacagttgttgaagaaagaagagaaatttgtgtggagcccgcaatgcgagaaggcgtttcaaactctcaaggaaaagctggtttcctcgccggtgttaatcttgccggatactcgcaaggacttcatggtgtattgtgacgcttcgcgccaaggattggggtgcgtgctcatgcaggacggtcatgtggtagcctatgcctctcgccagcttcggcctcatgaaggcaattaccctacccatgatttggagttagccgctgtggttcatgctctaaaaatctggcggcactatctcattgggaatcgctgtgaaatatataccgatcataagagcttgaaatacatcttcacccagtcggatctgaatcttcggcaaaggagatggttagaactcatcaaggattatgatgtgggaattcactatcatcctggtaaggccaacgtggttgccgacgctctaagtcgaaagagtcattgcaacactcttaacgtccgtggcattccacccgaacttagtcaacaaatggaagccctgaacctaagcatagttggtcgtggattcttggctgcgttggaagccaagcctaccttgctcgatcaaatccgtgaggctcagaagaatgatccggacatgcatggactcctcaagaatatgaaacagggtaaagccgctggtttcacagaggatgaacacggaaccctatggaacggaaatcggcgtgtcaaggcagagcaccagcgaccggccggactcctccaacctctccaagtgccagaatggaaatgggatgaaattgggatggatttcatcaccggacttccaaaaacccaaggcggatatgattctatatgggtagttgtggatcggttaaccaaggtggctcgattcattcctgtgaagaccacctatggagggaacaaactagcggagctctacttcgctaggatcgtgagtctccatggtattcccaagaaaatcgtatctgataggggaagccaattcacctctcacttttggaagaagctccaagaagagcttggtacccgattaaatttcagcaccgcgtaccacccgcagacagatggatagaccgagcgtctaaatcagatcctagaagatatgcttcgcgcatgtgtcctagatttcgggaagacctgggataagagtctcccctatgccgagttctcctacaataacagttatcaagccagcatacaaatggcaccttatgaagcgttgtacgggcgcaaatgccggacaccgctattgtgggaccaagttggagaaagccaagtgttcgggactgatatcctgagagaagctgaagctaaagttagaaccattcgggataatctaaaggtggcccagtcccggcagaaaagttatgcagataaccgtcgccgtgacctggaattcgcagtggatgattttgtgtaccttcgggtcacgccattgcgaggagtacataggttccagacaaaagggaagctcgcacctcggtatgtgggtcctttccgtatcattgctcggcgcggagaagtcgcttaccagttggagctgcccgcctccttgggcaacgtgcatgatgtgttccatgtgtcacaactcaagaaatgtcttcgagtgccatccgagcaggccgactcagagcaaattgaagttcgcgaagatttgacctacgtggagaggccagtgaaaatcctggacaccatggagcgcaggaccaggaaccgggtaatccgtttttgcaaggtccagtggagcaaccacgccgaagaagaagctacttgggagcgtgaagacgagctgaaggcagcccatcccgatctcttcgccagttcttccgaatctcggggtcgagattccgtt

SEQ ID NO: 23115 - DNA, 2987 bp, Oryza sativa
  Clone ID: TF_OsC359_7226
atggcggccggacctcccgcgccggtttcctcccttccccggccaccctctctcgacccggctctatttaaaccctccccgctcctcctccttcagtttccgcctctcgccgcccttcctcctcgccggaatcaaggtcgcgccgtcgctctctccctccgccgtcgccatcgagctccggtccgccgccgtcgtcgtcccggatcacctcccacctcggcgccgcctccttcggctttgccgcatcctcgccgacctcgtccacccctccgtttcggtcgccgaccgccggaacgccgtcgaccccgtcgactcgagccgcgccgccgccttcctccgctccggccgcctttttcgtcgtcgccgtcgacctagggtgagccgtggaccgccgcttcttttcccccttcccttcccctctctcggccgccgctccgccgtgcctatggccgccgccggcgaccataggggcgcgggcgccgcctcccgccggccgcaccggcttggccgccctcgggcgcaccgagtggctgccgcgtggggcccggccgtcagccgcccgcgcccttaggtgcggctgacgcgtgggacccacggtgccggccggtgtgagcccgggtgcacccggtccaccgtggacccacctcggccatataaggaccggtcttcgggcctctgttgcaaagcactaccgtacttccacatgtctagtgggacaaatgaaggctacacgagctgcggcccggtagtcgagatgtcatggcacagggccggtgtcctgctgctaggggctcagtcctgcctacctgtcccgggggttccggccgtaggtgggattgggtcgatgtacacctctgatcagagtataatctattcgaatagccgcgccctcggttatgggcaagccgagcaatgtacccaaatggccggcagcatcaatcgtcgtggtctggacctgactggcttcgttttggagctgcggggcatgtgcgttgtcctggggtatccgcatggagtggactaccagggcaagcagctcccggagcaggagggtgacgatgcagagccccacgctgcttgggaggttactgcagtgatcctcactggctcacccgagaggacttcgttggcagtcaccgcgggtggagattccttctccgccgcttgccagaacgccgcactcctcgccatcggcactcttcaccagcgctacccggacgagttgcagcactcgccctaccgctaccaccctcgccgcggaggagcccgcgactacgccaccttccgggatgctagctcggaggatgacgctaccatcatgcacctagcgcgcatggtggaggcgtacgacgcggcccgtatggacttccatcagatggtgcgccgcgggttggtcgagaacaacatgaagatcctggagctgcgtcaggagaatctgcagctgaagaaggacctagacgtagtggaggcgcagctgtgtcagctcaagatcgcccagggagaggtctgtcgccccaagcgtcgccgcgtctgccgcagcctgaagatcaccgcccgcaagagtacctccaggcccgagcttgttcgtcagtccctggcgtggacctgcttcgtcgagacccctcgtgccgagcccgcgcccgtggttcctcaggaggatggagtctccggcgttggcagcacggaggatgcgctgctgctcaccttccatggtgacaaccaggagaagtgctgctaccggtgatggcaaccaacccgtaggcagcaaccacaacaaccatggcagcccacctccacctcctcccccgcctccaccaccaccactagacaccaacaccatcctcacccaaatcatcgcccagcgggccaacatgatggctgctttcctccaccacatccaaaatccgccacaacataatgctccaccaccacccccacaacactctaaactcgccgagttcctccgcatccgtccacctaccttctctagctccaataaccccgtggatgctttggattggttgcatgccgtggggaaaaagttagacaccgtgcagtgcaacgatgaggagaaagtcatctttgccgctcactaactgcaggggcccgcatctctatggtgggaccacttccaggctacgtagccagaggggcagcctattacttgggcccgcttcaccgcctctttccagagaacccatgtgcccgtcggagtcatggcccttaagaaaagggaattctgagagttgaagcaaggcaaccgctccatgatggagtatttgcatgagtttaacaacctggcccggtacgccccggaggatgttcgtgaagatgaggagaagcaagagaagttcttggcaggaatggaccctgagctgtccgtgcgtctggtctccggggactatccggatttccaacgtctggtggacaagagcatccgcttggaagccaagcacaaggaactggagtcgcacaagcgtcgcttggcgaatttccgcaaccaacagggggctaaccaaagggtccgctacaccaatccctatccagggggatcctcctcgcagcagcagcagcagcagcaacctcgctccacgtcccgacctcaattcgtggtgcatgtcccacagccgcagcaacagcagagtcagcaagggactcgtgcgccccgtcctcctacgccagccgtgcagcctgttcaaggccgcagggacgctcaaggtcagcagcgtctgtgcttcaactgcttcgagcctgggcactttgcggataaatgcccaaagccgaggtgccagcaaggccaagcgcctccccgctccaacaacggtggtaaggatgtcattcggggtcgtgtgaaccacgtgacggccgagaacgtgctgacaactccagacgtcatcgttggtacgttcctcattcattccatccctgctaccatttttgtcacgtcccaaaacgactctaaaatacatcctctaaattatgcctag

SEQ ID NO: 23116 - DNA, 3140 bp, Oryza sativa
  Clone ID: TF_OsC359_7283
tcaggtccgcagcgtctgtgcttcaactgcttcgagcccggacactttgcggataaatgcccgaagccaaggcgtcagcaaggccaagcgcctccccgctccaacaacggtgggaaggatgtcattcgtggtcgtgtgaatcacgtgacggccgaggacgtgctgacaactccagacgtcatcgttggtacgttcctcgttcattccatcctctgtaccgagggccagaacacccagttgttttctttgcacctccaacctctggtatgccgcccaagcgagagattgagttccggatagatcttgctccaggaaccactcctctgcacaagcgaccctaccgaatggcagcaaatgaactggccgaagtaaagaaacagttggaagagttgaaggaaaaggggtatatacgtctgagtactttcccatggggtgctcctgtgatttttgtggagaagaaagacaagacgaagaggatgtgcgttgactacagagctctcaatgaagtcaccatcaagaacaagtaccctcttccccggatcgatgatctgttcgatcagcttaaaggtgccactgtattctccaagatcgatcttcgttccggatatcaccaattacgtatttgtgaagaagatattccgaagaccgcattcaccacgcgatacgggctgtatgaattcacggtgatgtcgttcggtctaaccaatgcacctgccttcttcatgaacttaatgaacaaagtgttcatggaatacttggacaagtttgttgtggttttcatcgatgacattctgatatactcacaatcagaggaagaccatcagcaccatctccgtctggtgttgggaaagttgcgggaacatcaattgtatgccaagcttagcaagtgtgagttctggttgcccgaagtcaaattcttggggcatgtgatatctgctaagggagttgctgtggaccccgaaacagtgaccgccgtcaccgattggaagcaacccaagacagttactcaagtccgcagtttcttaggtttggcaggatactaccggagattcatcgagaacttctccaaaatcgctcgacccatgacacagttgttgaagaaagaagagaaatttgtgtggagcccgcaatgcgagaaggcgttccagactctcaaagaaaagctggtttcctcgccggtgttaatcttgccggatactcgcaaggatttcatggtgtactgtgatgcttcgcgccaaggattcgggtgcgtgctcatgcaggatggtcatgtggtggcctatgcctcacgccagctacggcctcatgaaggcaactatcctacccatgatttggagttagccgcggtggtgcatgctctaaaaatctggcggcactatctcattgggaatcgctgtgaaatatatactgatcataagagtttgaaatacatcttcactcagtcggacctgaatcttcggcaaaggagatggttagaactcatcaaggattatgatgtgggaattcactatcatcctggtaaggccaacgtggttgccgacgctctaagtcggaaaagccattgcaacactcttaacgtccgtgacatcccacccgaacttaatcaacagatggaagccctgaacctaagcatagttggtcgtggattcttggctgcgttggaagccaagcctaccttgctcgaccaaatccgcgaggctcagaagaatgacccggacatgcatggactcctcaagaatatgaaacagggtaaagccgctggtttcacagaggatgaacacggaaccctatggaacggaaagcgggtatgcgttcccgataacagagaacttaaacagctgatacttcaggaagctcacgagagcccttattccattcacccgggcagtacaaagatgtacctagacttgaaggagaaatactggcagagcactagcgaccggccggacttctccaacctctccaagtaccagaatggaaatgggatgaaattgggatggatttcatcaccggacttccaaaaacccaaggtggatatgattctatatggcaccgcgtatcacccgcaaacagatggacagaccgagcgtctaaatcagatcctagaagatatgcttcgcgcatgtgtactagatttcgggaagacctgggataagagtctcccctatgccgagttctcctacaataacagctatcaagccagcatacaaatggcaccttatgaagcgttgtacgggcgcaaatgccggacaccgctcttgtgggaccaagttggagaaagccaagtgttcgggactgatatcctgagagaagctgaagctaaagtcagaatctttcgggataatctaaaggtggcacagtcccggcagaaaagttatgcagataaccgtcgccgtgacctggaattcgcagtgggtgattttgtataccttcgggtcacgccattgcgaggtgtacacaggtttcagacgaaagggaagcttgcacctcggtatgtgggtcctttccgtatccttgctcggcgcggagaggtcacttaccagctggagctgcccgcctccttgggcaacgtgcatgatgtgttccatgtgtcgcaacttaagaaatgtcttcgagtgccatccgagcaggccgactcagagcaaattgaagttcgcgaagatttgacctacgtggagaggccagtgaaaatcctggacaccatggagcgctggaccaggaaccgggtaatccgtttttgcaaggtccagtggagcaaccacgctgaagaagaagctacctgggagcgtgaagacgagctgaaggcagcccatcccgatctcttcgccaacgctgcagcttcggaggatacgctcttcgtggaagttgaagccgacgtttgggaaagtgagcaaggcaatcttgctcaatttttcccaagcccagaagaggagctccttgaagatgaaggctttggtgtctagctcgtgcctgccgtcaagcgcctgtggtcgtcgccctagtcttccgctgtttctcgtttgtctttgtgtgtgctgggccttgcctcctgggacaaggattaatgcacgcacgtaaggaatgcccgttgggttatttccggtcgtgacaagttctgcccgcctccttgggcaacgtgc

SEQ ID NO: 23117 - DNA, 5334 bp, Oryza sativa; identical to SEQ ID NO: 14253
  Clone ID: TF_OsC359_7369

SEQ ID NO: 23118 - DNA, 5490 bp, Oryza sativa
  Clone ID: TF_OsC359_7370
atggaggtggatgaagtcgggggtcgatggacattctccagggcaaatgaaggctacacgagctgcggcccggtagtcgagatgtcatggcacagggccggtgtcctgctgctaggggctcagtcctgcctgcctgtcccgggggttccggccgtaggtgggattgggtcggtactcttgtctatggctaggatgggttggaaactatgtcacgtcttccgtctgtataccgtggtgatggccggcagcgtcacccgtcgtggtttggacatgactggcttcgtcttggagctgcgaggcatgtgcgtggtcttggggtatccacatggagtggattaccaggccaggccactcccggagcaggagggtgaggatgcagagccccacgctggttgggaggtcactgcagtgatcctctccggctctcccgagcggacctcgctggcagtcaccgcgggtggagattccttccccgccgcttgtcagaacgccgctctcctcgccatcggcactcttcaccagcactacccggacgagttgcagcactcgccctaccgctaccaccctcgtcgcggaggagcccgcgactacgccaccttccgggatgctagctcggaggatgacgctaccatcgtgcacctggcgcgcatggtggaggcgtacgacgcggctcgtatcgatttccatcagatggtgcgccgcgggatggtcgagaacaacatgaagatcctggagctgcgtcaggagaacctgcagctcaagaaggacctagatgcggtggaggcgcagctgcatcagctcaagatcgctcagggagaggactgccgtcccaagcgtctgccgcagccagaagatcaccgcccgcaagagcacctccaggcccgagcttgttcgtcagtccctggcgtggacctgcttcgtcgagacccctcgtgccgagcctgcgcccgtggttccccaggagggggaaacctccggcgttggagaaatgttaacaccggtgatggcaatcaacctgaaggcagcaaccccaaccaccagggcaacccaccttcaccttctgcttcgcctccaccaccaccaccagataccaatgccattctcacccaaatcctcgctcagcaggccaacatgatgactgctttcctccaccacctccaaaatccgccacaacagaatgctccaccaccacctccacaacactctaaactcgccgaattcctccgcatccgcccacctaccttctcgagctccaacaaccccgtggatgcgttggattggttgcatgccgtggggaaaaagctagacacggtgcagtgcagcgatgaggagaaagtcatcttcgccgcccaccagctgcaggggcccgcatctctatggtgggaccacttccaggctacgcagccagaggggcaacctatcacctgggctcgcttcaccgccgctttccggagaacccatgtgcccgccggagtcgtggccctcaagaagagggagttccgggagttgaagcaaggcaaccgctccgtgatggagtatttgcacgagttcaacaacctggcccgttacgctccggaggatgtgcgggaagatgaggagaagcaagagaagttcttggcgggaatggaccctgagctgtccgtccgtctagtctccggggactatccggatttccaacgtctggtggacaagagcatccgcttggaagccaagcacaaggaactggagtcgcacaagcgccgcttggcgaatttccgcaatcaacagggtgctaaccagcgggttcgctacaccaatccctacccagggggatcctcttcgcagcagcagcagcaacaacctcgctccgcgcctcgacctcaattcgtggtgcgcgtcccacagccgcagcagcagcagaatcaacaagggactcgtgtgccccgtcctcctacgccagccgtgcagcctggtcaaggccgcagggacgctcaaggtcagcagcgtctgtgcttcaactgcttcgagcccgggcattttgcggataaatgcccaaagccgaggcgtcagcaaggccaagcgcctcctcgctccaacaacggtgggaaggatgtcactcggggtcgtgtgaaccatgtgacggccgaggacgtgctgacaactccagacgtcatcgttggtacgttcctcatccattccgtccctgctaccactttgttcgactctggagcttcccactcgtttatatctgtgccattcgtggggagaaatcagttgggggtagaaaggcttagaaaccctctgctaatcaccacccctggaggggttatgacagcaaagtattatagccctgccgtccctatagaaattcaggggattccttttccctcggatctgattctgctagacaccaagaacttggatgtgatccttgggatgaattggttggctcaattccaaggagtagtggattgcgcgagacgcactgtcaccctgtaccgagggccggaacaaccggttgtcttctttgcacccccaacctctgttagaagttcagaactgcatcagataggactgtcagaaatccccatagtcggagagttcggagacgtgtttccggaagaactacctggtatgccgcccaagcgagagattgagttccggatagatcttgctccaggaaccactcctctgtacaagcgaccctaccgcatggcagcaaatgaactggccgaaaagaaagacaagacgaagaggatgtgcgttgactacagagctctcaatgaagtcaccatcaagaacaaatatcctcttccccggatcgatgatctgttcgatcaacttaaaggtgccactgtattctccaagatcgatcttcgttccggatatcaccaattacgtattcgggaagaagatattccgaagaccgcattcaccacgcgatacgggctgtatgaattcacggtgatgtcattcggtctaaccaatgcacctgccttcttcatgaacttaatgaacaaagtgttcatggaatacttggacaagtttgttgtggttttcattgatgacattctgatatactcacaatctgaggaagaccatcagcaccatctccgtctggtgttgggaaagttgcgggaacatcaattgtatgccaagcttagcaagtgtgagttctggttgtccgaagtcaaattcttagggcatgtgatatctgctgaaggagttgctgtggaccccgaaacagtgaccgccgtcaccgattggaagcaacccaagacagtcactcaaattcgcagtttcttaggtttggcaggatactaccggagattcatcgagaatttctccaaaatcgctcggcccatgacacaattgttgaagaaagaagagaaatttgtgtggagcccgcaatgcgagaaggcattccaaactctcaaagaaaagctggtttcctcgccagtgttaatcttgccggatactcgcaaggatttcatggtgtactgtgatgcttcgcgccaaggattggggtgcgtgctcatgcaggatggtcatgtggtggcctatgcctcacgccagctacggccccatgaaggcaactaccctacccatgatttggagttagcagcggtggttcatgctctaaaaatctggcggcactatctcattgggaatcgctgtgaaatatatactgatcataagagtttgaaatacatcttcacccagtcagatctgaatcttcggcaaaggagatggttagaactcatcaaggattatgatgtgggaattcactatcatcctggtaaggccaacgtggttgccgacgctctaagccggaaaagccattgcaacactcttaacgcccgaggcattccacccgaacttaatcaacagatggaagccctgaacctaagcatagtgggtcgtggattcttagctgcgttggaagccaagcccaccttgctcgatcaaatccgcgaggctcagaagaatgatccggacatgcatggactcctcaagaatatgaaacagggtaaagctgctggtttcacagaagatgaacacggaaccttatggaacggaaatcggcgtgtcaaggcagagcaccaacgaccggccggacttctccaacctctccaagtaccagaatggaaatgggatgaaattgggatggatttcatcaccggacttccaaaaacccaaggtggatatgattctatatgggtagttgtggatcgattaaccaaggtagctcgatttattcctgtgaagaccacctatggagggaacaaactagccgagctctacttcgctaggatcagtcaaactgcaggcatggagttgggaacccggctgaatttcagcaccgcgtatcacccgcagacagatggacagaccgagcgtctaaatcagatcctcgaagatatgcttcgcgcatgtgtcctagatttcgggaagacttgggataagagtctcccctatgccgagttctcctacaataacagctatcaagccagcatacaaatggcaccctatgaagcgttgtacgggcgcaaatgccggacaccgctattgtgggaccaagttggggaaagtcaagtgttcgggactgatatcctgagagaagctgaagctaaagtcagaatcattcgggataatctaaaggtggcacagtcccggcagaaaagttatgcggataaccgtcgccgtgacctggaattcgcagtgggtgattttgtatatcttcgggtcacgccattgcgaggtgtacataggtttcagacaaaggggaagctcgcacctcggtatgtgggtcctttccgcatcattgctcggcgtggagaagtcgcttaccagctggagctgcccgcctccttgggcaacgtgcatgatgtgtttcatgtgtctcaactcaagaaatgtcttcgagtgccatccgagcaggccgactcagagcaaattgaagttcgcgaagatttgacctacgtggagaggccaatgaaaatcctggacaccatggagcgcaggaccaggaaccgggtaatccgtttttgcaaggtccagtggagcaatcacgccgaagaagaagctacttgggagcgcgaagacgagcgtcgtcatcgtcttcccgaaccgcgccgccgccttcttccgcttcggccgccattctcgtcgtcgtcgttgtcccggggtgagccgaagaccgccgttcgccttccccctttcctcctctttctcgggtgccactccgccgcgccgttggtcgccggcggcgaccatcggggcgcgggtgcgcgccgttcccgtcggccgcgccggcgaggccgccctcgggcgcgccctcgcggctaccaagtgggcccggcagtcagccgcccgcgcccgcgggttcggctgacgcgcgggacccacggcgccgaccgccgccagccgcgtgcgcccggtccaccgtggaccgagcggcttgttcaccctagaataaacaaaaccccaactagtggacactctattcat

SEQ ID NO: 23119 - DNA, 5865 bp, Oryza sativa
  Clone ID: TF_OsC359_7388
atggacatctctaggacaaatgaaggctacacgagctgcggcccggtagtcgagatgtcatggcacagggccggtgtcctgctgctaggggttcagtcctgcctacctgtcccggaggttccggccgtaggtggggttgggtcggtactcttgtctatggctaggatgggttggaaactatgtcacgtcttccgtctgtataccgtggtgatggctggcagcatcaaccgtcgtggtctggacctgactggcttcgttttggagctgcggggcatgtgcattgtcctggggtatccgcatggagtagactaccagggcaagcagctcccggagcaggagggtgacgatgcagagccccacgctgcttgggaggttactgcagtgatcctcactggctcacccgagaggacttcgttggcagtcaccgcgggtggagattccttctccgccgcttgccagaacgccgcactcctcgccatcggcactcttcaccagcgctacccggacgagttgcagcactcgccctaccgctaccaccctcgccgcggaggagcccgcgactacgccaccttccgggatgctagctcggaggatgacgctaccatcatgcacctggcgcgcatggtggaggtgtacgacgcggcccgtatcgacttccatcagatggtgcgtcgcgggttggtcgagaacaacatgaagatcctggagctgcgtcaggagaatctgcagctggagaaggacctagacgcagtggaggcgcagctgcgtcagctcaagatcgcccagggagaggtctgtcgcctcaagcgccgtcgcgtctaccgcagcctgaagatcaccgcccgcaagagtacctccaggcccgagcttgttcgtcagtccctggcgtggacctgcttcgtcgagacccctcgtgccgagcccgcgcccgtggttcctcaggaggatggagcctccggcgttggcagcacgaaggatgcgctgttgctcaccttccgccctggcccgtcggagcaagtcgtatggggcatggttatgccgatggtgacgaccaggagacgtgctaataccggtgatggcaatcaacccgaaggtagcaaccacaacaaccatggcagcccacctccacctcctcctccgcctccaccaccaccaccagacaccaacgccatcctcacccaaatcctcgcccagcaggccaacatgatgcctgctttcctccaccacatccaaaatccgccacaacataatgctccaccaccgcccccacaacactctaaactcgtcgagttcctccgcatccgtccgcctaccttctctagctccaataaccccgtggatgcattggattggttgcatgccgtggggaaaaagttagacaccgtgcagtgcagcgatgaggagaaagtcatcttcgccgcccaccaattgcaggggcccgcatctctatggtgggaccatttccaggctacgcagccagaagggcagccttttacttgggcccgcttcaccgccgctttccggagaacccatgtgcccgctgaagtcatggcccttaagaaaagggaattccgagagttgaaacaaggcaaccgctctgtgatggagtatttgcatgagtttaacaacctggcccgatacgccccggaggatgttcgtgaagataaggagaagcaagagaagttcttggcaggaatggaccctgagctgtccatgcgtctggtctccggggactatccggatttccagcgtttggttgacaagagcatccgcttggaagccaagcacaagaaactggagtcgcacaagcgttgcttggcgaatttccgcaatcaacagggggctaaccaaagggtccgctacaccaatccctatctagggggatcgtcctcgcagcagcaacagcagcagcaacctcgctccgcgccccgacctcatttcgtggtgcgcgtcccacagccgcagcaacagcagagtcagcaagggactcgtgcgccccgtcctcctacgccagccgtgcagcctggtcaaggccgcagggacgttcaaggtcagcagcgtctgtgcttcaactgcttcgagcctgggcactttgcggataaatgcccaaagccgaggcgccagcaaggccaaccgcctccccgccccaacaacgatggtaaggatgtcatttggggtcgggtgaaccacgtgacggccgaggatgtgctgacaactccaaacgtcatcgttggtacgttcctcattcattccatccctactaccattttgttcgactctggagcttcccactcgtttatatctgtgccattcgtggggagaaatcagttgggggtagaaaggcttaggaactctctgctcatcaccacccctagaggggttatgacagcaaagtattatagccctgccgttcctatagaaattcagggaattccttttccctcggatctgattcttctagacaccaagaacttggatgtgatccttgggatgaattggttggctcaattccaaggagtagtggattgtgcaagacgcactgtcactctgtaccgagggccggaacaaccggttgttttctttgctcccccaacctctgtcggtagttccgaacttcatcagataggactgtcagaaatccccatcgtcagagagttcggagacgtgtttccggaagaactacccggtatgccgccgaagcgagagattgagttccggatagatcttgctccaggaaccactcccctgtacaagcgaccctaccgtatggcatcaaatgaactggccgaacttaaaggtgccactgtattctccaagattgatcttcgttccggatatcaccaattgcgtattcgtgaagaagatatccctaagaccgcattcaccacgcgatacggactgtatgaattcacggtgatgtcgttcggtttaaccaatgctcctaccttcttcatgaacttaatgaacaaagtgttcatggaatatttggataagtttgttgtggttttcattgacgacattctggtgtactcacaatcagaggaagaccatcagcaccatctccgtctggtgttgggaaagttgcgggaacatcaattgtatgccaagcttagcaagtgtgagttctggttgtccgaagtcaaattcttagggcacgtgatatctgctaaaggagttgctgtggaccccgaaacagtgaccgccgtcactggttggaagcaatccaagacagtcactcaaattcgcagcttcttgggtttggcaggatactatcggaggttcatcgagaacttctccaaaatcgctcgacccatgacacagttgttgaagaaagaagagaaatttgtgtggagcccgcaatgcgagaaggcgttccaaactctcaaggaaaagctggtttcctcgccagttttaatcttaccggatactcgcaaggacttcatggtgtattgtgacgctttgcgccaaggattggggtgcgtgctcatgcaggaaggtcatgtggtagcctatgcctcacgccagctacggccccatgaaggcaactaccctacccatgatttggagttagccgctgtggttcatgctctaaagatctggcggcactatctcattgggaatcgctgtgaaatatatactgatcataagagtttgaaatacatcttcactcagtcggatctgaatcttcggcagaggagatggttagaactcatcaaggattatgatgtgggaattcactatcatcctggtaaggccaacgtggtcgctaacgctctaagtcgaaaaagccattgcaacactcttgacgtccgtggcattccacccgaacttaatcaacagatggaagccctgaacctaagcatagttggtcgtggattcttggctacgctggaagccaagcctaccttgctcgatcaaatccgcgaggctcagaagaatgatccggatatgcgtggactcctcaagaatatgaaacagggtaaagccgctggtttcacagaggatgaacacggaaccctatggaacggaaatcgggtatgcgttccagacgacagagaacttaaacagttgaaacttcaggaagctcacgaaagcccttattccatccaccctggcagtacgaagatgtacttagacttgaaagagaaatactggtgggttagtatgcagcgggaaattgcagagttcgtggccctttgtgatgtgtgccagcgtgtcaaggcagagcaccaacgaccggccggacttctccaacctctccaagtaccagaatggaaatgggatgaaattgggatggatttcatcaccggacttccaaaaacccaaggcggatataattctatatgggtagttgtggaccgactaaccaaggtagctcggtttattcctgtgaagaccacctatggagggaacaaactagccgagctctacttcgctaggatcgtgagtctccatggcgttcctaagaaaattgtatctgataggggaagccaattcacctctcacttttggaagaagctccaagaagagctgcgtacccgattaaatttcagcaccgcgtatcacccgcagacagatggacagaccgagcgtctaaatcagatcctagaagatatgcttcgcgcatgtgtcctagattttgggaagacctgggataagagtctcccctatgccgagttctcctacaataacagctatcaagccagcatacaaatggcaccctatgaagcgttgtatggacgcaaatgccggacaccactattgtgggaccaagttggggaaagccaagtgttcgggactgatatcctgagagaagctgaagctaaagtcagaaccattcgggataatctaaaggtggcacagtcccggcagaagagttatgcagataaccgacgctgtaatctggaattcgcagtggacgattttgtgtaccttcgggtcacgccattgcgaggtgtacacaggtttcagacgaaagggaagctcgcacctcggtttgtgggtcctttccgtatcattgctcgacgcggggaagtcgcttaccagttggagctgcccgcctccttgggcaacgtgcatgatgtgttccatgtgtcgcaactcaagaaatgtcttcgagtgccatccgagcaggccgattcagagcaaattgaagttcgcgaagacttgacctacgtggagaggccagtgaaaatcctggacaccatggagcgcaggaccaggaaccgggtaatccgtttttgcaaggtccaatggagcaaccacgctgaggaagaagctacttgggagcgtgaagacgagccccgcgaacttcgacggcgcatcaatggagcccgagatcgccgcgccgatttccttcccttcgggccgccctttctcactcccaaccttcggcttcgccgtgttctcgtcgacctcgtccactcctccgtttcgcccgccgaccgccggaacgccgctgtcctcgtcgacccgagccgcgccgccgccttcctccgcttcggccgccgtttccgttgtcaccgtcgacccggggtgagccgaggaccgccgtttcacttcccccttctctcctctctctcgggcgccgctccgcgcgccggtggtcgccggcgtcgaccatcggggcgcgggtgcgccgcctcccgtcggccgtgccggcgaggccgccttcgggcgcgcctcgcggctgccaggtggggcccggccgtcagccgcccacgcctcgggggcggctgacgcgtgggacccacggcgccggccagcgtcagccgcgtgcacccggtccaccgtggaccgtgaggctcggccatataaggaccggtcttcgggcctctgttgcaaagcactactgtacttccacat

SEQ ID NO: 23120 - DNA, 5262 bp, Oryza sativa; identical to SEQ ID NO: 14177
  Clone ID: TF_OsC359_7411

SEQ ID NO: 23121 - DNA, 6052 bp, Oryza sativa
  Clone ID: TF_OsC359_7419
atggcggccggatcttccgcgaccgattccccctcatccggccgctctctcctcctcccaacactacataaacactccccgtgcctccctccttcgtttccgccactcgccgctctctctccccgtcggaatcgagctcgcgccgtcgtcctctctctccgccgtcgccgccgagctccggtccgccgccgtcgtcgccccgggcctcctcccgtttcggcgtcgccttcttcgggttcgccgcgtcctcgccgatctcgtccaccccttcgtttcgcccgccgaccgccggaacgccgccgtcctcgtcgacccgagccgcgccgccgccttcctccgcttcggtcgccgttcccgtcgtcgccgtcgacccggggtgagccatggaccgcccatttcgtttcccccttccctctcctctctcgggcgccgctccgtcgcgccggaggtcgccgccggcgaccatcggggcgcgggtgcgccgcctcccgtcggctgtgccggcgaggccgccttcgggcgcgccccgcggctgccatgtggggcccggccgtcagccgcccgtgtcctcgggtgcggctgacgcgtgggacccacggcgccgggccggcgtaagccgcgtgcacccggtccaccgtggacccacctcggccatataaggaccggtcttcgggcctctgttgcaaagcactaccgtacttccacatgtctagtggggcaaatgaaggctacacgagctgcggcccggtagtcgagatgtcatggcacagggccggtgtcctgctgctaggggctcagtcctgcctgcctgtcccgggtgttccggccgtaggtgggattgggtcgatgtacacctctgatcagagtaaaatctattcgaatagccgcgccctcggttatgggcaagccgagcaatgtacccaaatggccggcagcgtcagccgtcgtggtttggacatgactggcttcgtcttggagctgcggggcatgtgcgtggtcctggggtatccacatggagtggactaccaggccaggccgcttccggagcaggagggtgacgatgcggagccccacgctgcttgggaggtcactgcagtgatcctcgctggctctcccgagcggatttcgctgacagtcaccgcgggtggggattccttccccgccgcttgccagagcgccgctctcctcgccatcggcactcttcaccagcgctacccggacgagttgcagcactcgccctaccgctaccaccctcgtcgcggaggagcccgcgactacgccaccttccgggacgctagctcggaggatgacgctaccatcgtgcacctggcgcgcatggtgaaggcgtacgacgcggctcgtatcgacttccatcagatggtgcgtcgtgggatggtcgagaacaacatgaagatcctggagctgcgtcaggagaacctgcagctcaaaaaggacctagacgcggtggaggcgcagctgcatcaactcaagatcgcccagggagaggtctgccgccccaagcgtcgccgcgtctgccgcagccagaagatcaccgcccgcaagagcacctccaggcccgagcttgttcgtcagtccctggcgtggacttgcttcgtggagacccctcgtgccgagcccacgcccgtggttccccagaagggggaagcctccggcgttggtagcacggaggatgcgctgttgctcaccttccatggtgatgaccaggagaaatgctgccaccagtgatggcaaccaacccgaaggcagcaaccacaacaaccatggcagcccacctccacctcctcctccacctccaccaccaccaccagataccaacgccattcttacccaaatcctcgcccagcaggccaacatgatgactgcttttctccaccacctccaaaatccgccacaacataatgctccaccaccacctccccaacactctaaactcgccgagttcctccgcatccgtccacctaccttctctagctccaacaaccccgtggatgcgttggattggttgcatgccgtggggaaaaagatagacactgtgcagtgcagcgatgaggagaaagtcatcttcgccgcccatcagctgcaggggcccgcatctctatggtgggaccatttccaggctacgcagccagagggacagcctattacttgggcccgtttcaccgccgctttccggagaacccatgtgcccgctggagtcgtggcccttaagaaaagggaattccgagagttgaagcaaggcaaccgctccgtgatggagtatttgcatgagttcaacaacctggcccgttacgccccggaggatgtgcgggaagatgaggagaagcaaaagaagttcttggcaggaatggaccctgagctgtccgtccgtctagtctccggcgactatccggatttccaacgtctggtggacaagagcatccgcttggaagtcaagcacaaggaactggagtcgcacaagcgccgcttggcgaatttccgcaatcaacagggagctaaccaaagggtccgctacaccaatccctatccagggggatcctcctcgcagcagcgacaacagcagcaacaacctcgctccgcgccccgccctcaattcgtggtgcgcgtcccacagccgcagcaacagcagagtcagcaagggacccgtgcgcctcgtcctcctacgccaactgtgcagcctggccaaggccgcagggacgcttcaggtccgcagcgtctgtgcttcaactgcttcgagcccgggcactttgcggataaatgcccgaagccaaggcgacagcaaggccaagcgcctccccgctccaacaacggtggtaaggacgtcattcggggtcgtgtgaaccacgtgacggccgaggacgtgctgacaactccagacgtcatcgttggtacgttcctcattcattccatccctgctaccattttgttcgactctggagcttcccactcgtttatatctgtgccattcgtggggagaaatcagttgggggtagaaaggcttagaaaccctctgctcatcaccacccctggaggggttatgacagcaaagtattatagccctgcggttcctatagaaattcaggggattccttttccctcggatctgattctgctagacaccaagaacttggatgtggtccttgggatgaattggttggctcaattccaaggagtagtggattgtgcgagacgcaccgtcactctgtaccgagggccgggacaaccggttgttttctttgcacccccaacctctgtcagtagttcagaactgcatcagatagggctgtcagaaatccccatagtcagagagttcggagacgtgtttccggaagaactacctggtatgccgcccaagcgagagattgagttccggatagatcttgctctaggaaccactcctctgtgcaagcgaccctaccgtatggcagcaaatgaactggccgaagtcaagaaacagctggaagagttgaaagaaaaggggtacatacgtccgagcacttccccctggggtgctcctgtgatttttgtggagaagaaagacaagacgaagaggatgtgcgttgactacagagctctcaatgaagtcaccatcaaaaacaagtaccctcttccccggatcgatgatctgttcgatcagcttaaaggtgccactgtattctccaagatcgatcttcgttccggatatcaccaattgcgtattcgggaagaagattttccgaagaccgcattcaccacgcgatacggactgtatgaattcacggtgatgtcattcggtttaaccaatgcacctgccttcttcatgaacttaatgaacaaagtgttcatggaatacttggataagtttgttgtggttttcattgatgacattctgatatactcacaatccgaggaagaccatcagcaccatctcctcctggtgttgggaaagttgcgggaacatcaattgtatgccaaacttagcaagtgtgagttctggttgtccgaagtcaaattcttagggcacgtgatatctgctaaaggagttgctgtggaccccgaaacagtgaccgccgtcactgattggaagcaacccaagacagtcactcaagtccgcagtttcttaggtttggcaggatactaccggaggttcatcgagaacttctccaaaatcgctcgacccatgacacagttgttgaagaaagaagagaaatttgtgtggagcccgcaatgtgagaaggcgttcagaactctcaaagaaaagctggttgcctcgccagtgttaatcttgccggatactcgcaaggacttcatagtgtattgtgacgcttcgcgccaaggattggggtgcgtgctcatgcaggacggtcatgtggtggcctatgcctcacgccagcttcgacctcatgaaggcaactaccctacccatgacttggaattagccgcggtggttcatgctctaaaaatctggcggcactatctcattgggaatcgctgtgaaatatatactgatcataggagtttgaaatacatcttcacccagtcggatctgaatcttcggcaaaggagatggttagaactcatcaaggattatgatgtgggaattcactatcatcctggtaaggccaacgtggtcgccgacgctctaagtcgaaagagccattgcaacactcttaacgtccgtggcattccaccggaacttaatcaacagatggaagccctgaacctaagcatagttagtcgtggattcttggctacgctggaagccaagcctaccttgctcgatcaaattcgcgaggctcagaagaatgacccggatatgcatgggctcctcaagaatatgaaacagggtaaagccgctggtttcacagaggatgaacacggaaccctatggaacggaaatcggcgtgtcaaggcagagcaccaacgaccggccggacttctccaacctctccaagtcccagaatggaaatgggatgaaattgggatggattttatcaccggacttccaaaaacccaaggcggatatgattctatatgggtagtcgtggatcgactaaccaaggtagcacggttcattcccgtaaagaccacctatggagggaacaaactagctgaactctacttcgctaggattgtaagtctgcatggcgtccccaagaaaattgtatctgataggggaagccagttcacctctcacttttggaagaagctccaagaagagctgggtacccgattaaatttcagcaccgcgtatcacccgcagatagatggacagaccgagcgtctaaatcagatcctagaggatatgcttcgcgcatgtgtcctagatttcgggaagacctgggataagagtctcccctatgccgagttctcctacaataacagttatcaagccagcatacaaatggcaccttatgaagcgttgtatgggcgcaaataccggacaccgctattgtgggaccaagttggagaaagccaagtgttcgggactgatatcctgagagaagctgaagctaaagtcagaaccattcgggataatctaaaggtggcacagtcccggcagaaaagttatgcagataaccgtcgccgtgatctggaattcgcagtggatgactttgtgtatcttcgggtcacgccattgcgaggtgtacacaggtttcggacaaaggggaagctcgcacctcggtatgtgggtcctttccgtatcactgctcggcgcggagaagtcgcctaccagttggagctgcccgcctccttgggcaacgtgcatgatgtgttccatgtgtcacaactcaagaaatgtctccgagtgccatccgagcaggccgactcagagcaaattgtagttcgcgaagacttgacctacgtggagaggccagtaaaaatcctggacaccatggagcgcaggaccaggaaccgggtaatccgtttttgcaaggtcgagtggagcaaccacgccgaagaagaagctacctgggagcgcgaagacgagctgaaggcagcccatcccgatctcttcgccagttcttccgaatctcggggtcgagattccgtt

SEQ ID NO: 23122 - DNA, 5418 bp, Oryza sativa; identical to SEQ ID NO: 14190
  Clone ID: TF_OsC359_7446

SEQ ID NO: 23123 - DNA, 5418 bp, Oryza sativa
  Clone ID: TF_OsC359_7451
atgtcatggcacagggccggtgtcctgctgctaggggctcagtcctgcctgcctgtcccgggggttacggccgtaggtgggattgggtcggtactcttgtctatagctagaatgggttggaaactatgtcacgtcttccgtctgtataccgtggtgatggccggcagcgtcagccgtcgtggtttggacatgactggcttcgtcttggagctgcggggcatgtgcgttgtcctggggtatccgcatggagtggactaccaggccaggccgcttccggagcaggagggtgacgatgcagagccccacgctgcttgggaggttactgcagtgatcctcactggctctcccgagcggacttcgttggcagtcaccgcgggtggagattccttccccgccgcttgccagagcgccgctctcctcgccatcggcactcttcaccagcgctacccggacgagttgcagcactcgccctaccgctaccaccctcgtcgcggaggagcccgcgactacgccaccttccgggatgctagctcggaggatgacgctaccatcgtgcacctagcgtgcatggtggaggcgtacgacgcggctcgtatcgacttccatcagatggtgcgccgtgggatggtcgagaacaacatgaagatcctggagctgcgtcaggagaatctgcagctgaagaaggacctagacgcggtggaggcgcagctgcatcagctcaagatcgcccagggagaggtctgtcgccccaagcgccgccgcgtctgccgcagccagaagatcaccgcccgcaagagcacctccaggcccgagcttgttcgtcagtccctggcgtggacctgcttcatggagacccctcgtgccgagcccgcgcccatggttccccaggagggggaagcctccggcgttggtagcacggaggatgcgctgttgctcaccttccgccctggcccgtcgcagcggagaagtgttaataccggtgatggcaaccaacccgagggcagcaaccacaacaaccatggcagcccacctccacctcctcctccgcctccaccaccaccaccagataccaacgccattctcacccaaatcctcgcccagcaggccaacatgatgactgctttcctccaccacctccaaaatccgctacaacagaatgctccaccaccacccccacaacactctaagctcgccgagttcctccgcatccgtccacccaccttctctagctccaacaaccccgtggatgcgttggattggttgcatgccgtggggaaaaagctagacactgtgcagtgcagcgatgaggagaaagtcatcttcgccgcccaccagctgcaggggcccgcatctctatggtggtaccatttccaggctacgcagccagaggggcagcctattacttgggctcgcttcaccgccgctttccggagaacccatgtgcccgctggagtcgtggcccttaagaaaagggaattccgagagttgaagcaaggcaacctctccgtgatggagatgtgcgggaagatgaggagaagcaagagaagttcaggaatggaccctgagctgtccgtccgtctagtctccggggactatccggatttccaacgtctggtggacaagagcatccgcttggaagccaagcacaaggaactggagtcgcacaagcgccgcttggcgaatttccgcaatcaacagggtgctaaccaaagggtccgctacaccaatccctatccagggggatcgtcctcgcagcagcaacagcagcaacaacctcgctccgcgccccgacctcaattcgtggtgcgcgtcccacagccccagcaacagcagagtcagcaagggactcgtgcgccccgtccttctacgccaactgtgcagcctggtcaaggccgcagggacgctcaaggcccgcagcgtctgtgcttcaactgcttcgagcccgggcactttgcggataaatgcccgaagccgaggcgccagcaaggccaagcgcctccccgctccaacaacggtggtaaggatgtcattcggggtcgtgtgaaccacgtgacggccgaggacgtgctgacaactccagacgtcatcgttggtacgttcctcattcattccatccctgctaccattttgttcgactctggagcttcccactcgtttatatctgtgccattcgtggggagaaatcagttgggggtagaacggcttaggaaccctctcctcatcaccacccctggaggggttatgacagcaaagtattatagtcctgccgtccctatagaaattcaggggattccttttccctcggatctgattctgctagacaccaagaacttggatgtgatccttgggatgaattggttggctcaattccaaggagtagtggattgcgcgagacgcactgtcactctgtaccgagggccggaacaaccggttgtattctttgcacccccaacctctgtcagtagttcagaacttcatcagataggactgtcagaaatccccatcgtcagggagttcggagacgtgtttccggaagaactacccggtatgccacccaaacgagagattgagttccggatagatcttgctccaggaaccactcctctgtacaagcgaccctaccgtatggcagcaaatgaactcgctgaagtcaagaaacagttggaagagttgaaagaaaaggggtatatacgtccgagtacttccccctggggtgctcctgtgatttttgtggagaagaaagacaagacgaagaggatgtgcgttgactacagagctctcaatgaagtcaccatcaaaaacaagtaccctcttcctcggatcgatgatctgtttgatcagcttaaaggtgccacggtattctccaagattgatcttcgttccggatatcaccagttacgtatccgcgaagaagatattccgaagaccgcattcaccacgcgatacggactgtatgaattcacggtgatgtcgttcggtttaaccaatgcacctgccttcttcatgaacttaatgaacaaagtgttcatggaatacttggataagtttgttgtggttttcattgatgacattctggtatactcacaaacagaggaagaccatcagcaccatctccgtctggtgttgggaaagttgcgggaacatcaattgtatgccaaacttagcaagtgtgagttctggttgtccgaagtcaaattcttagggcacgtgatatctgctaaaggagttgctgtggaccccgaaacagtgaccgccgtcactgattggaggcaacccaagaccgtcactcaaattcgcagtttcttaggtttggcaggatactaccggaggttcatcgagaacttctccaaaatcgctcgacccatgacacagttgttgaagaaagaagagaaatttgtgtggagcccgcaatgcgagaaggcgttccaaactctcaaagaaaagctggtttcctcgccagtgttaatcttgccagatactcgcaaggattttatggtgtattgtgatgctgcgcgccaaggattggggtgcgtgctcatgcaggacggtcatgtggtggcctatgcctcacgccagctacggcctcatgaaggcaattaccctacccatgatttggagttagccgctgtggttcatgctctaaaaatctggcggcactatctcattgggaattgctgtgaaatatatactgatcataagagtttgaaatacatcttcacccagtcggatctgaatcttcggcaaaggagatggttagaactcatcaaggattatgatgtgggaattcactatcatcctggtaaggccaacgtggtcgccgacgctctaagtcgaaagagccattgcaacactcttaacgtccgtggcattccactcgaacttaaccaacagatggaagccctgaatctaagcatagtgggtcgtggattcttggctgcgttggaagccaagcctaccttgctcgatcaaatccgcgaggctcagaagaatgatccggacatgcgtggactcctcaagaatatgaaacagggtaaagccactggtttcacagaggatgaacacggaaccctatggaacggaaatcgggtatgcgttccagataacagagaacttaaacagctgatacttcaggaagctcacgaaagtccttattccatccaccctggcagtacgaagatgtacttagacttgaagaagaaatactggtgggttagtatgaagcgggaaattgcagagttcgtggccctgtgtgatgtgtgccagcgtgtcaaggcagaacaccaacggccggccggacttctccaacctctccaagtaccagaatggaaatgggatgaaattgggatggatttcatcaccggacttccaaaaacccaaggtggatatgattctatatgggtagttgtggatcgattaaccaaggtggctcgatttattcctgtgaagaccacctatggagggaacaaactagccgagctctacttcgctaggatcgtgagtctccatggcgttcccaagaaaatcgtatctgataggggaagccaattcacctctcacttttggaagaagctccaagaagagctgggtacccgattaaatttcagcaccgcgtatcacccgcagacagatggacagaccgagcgtctaaatcagatcctagaagatatgcttcgcgcatgcgtcctagatttcgggaagacctgggataagagtctcccctatgccgagttctcctacaataacagctatcaagccagcatacaaatggcaccctatgaagcgttgtttcagacaaaagggaagctcgcacctcggttcgtgggtcctttccgtatcattgctcgacgcggagaagtcgcttaccagttggagctgcccgcctccttgggcaacgtgcatgatgtgttccatgtgtcgcaactcaagaaatgtcttcgagtgccatccgagcaggccgactcagagcaaattgaagttcgcgaagacttgacctacgtggagaggccagtgaaaatcctggacaccatggagcgcaggaccaggaaccgggtaatccgtttttgcaaggtccaatggagcaaccacgccgaagaagaagctacctgggagcgtgaagacgagcgccgagctccggtccgccgccgtcgtcgccccggaccttctcccgcttcggcgtcgcctccttcggcttcgccgcatccccgccgacctcgtccacctctccgtttcggtcgccgaccaccggaacgccgccgtccccgtcgacccgtgccgcaccgccgcctttctccgctccggtcgccgttcccgtcgtcgccgtcgacccggggtgagccgtggaccgccgtttcgtttcccccttccctcccctctctcggccgccgctccgccgtgcctatggccgccgccggcgaccat

SEQ ID NO: 23124 - DNA, 4966 bp, Oryza sativa
  Clone ID: TF_OsC359_7468
atggccggcagcgtcacccgtcgtggtttggacatgactggcttcgttttggagctgcggggcatgtgcgtggtcttgggatatccacatggagtggattaccaggccaggccgctcccggagcaggagggtgaggatgcagagccgcacgctggttgggaggtcactgcagtgatcctctccggctctcccgagcggacctcgctggcagtcaccgcgggtggagattccttccccgccgcttgccagaacgccgctctcctcgccatcggcacccttcaccagcgctacccggacgagttgcagcactcgccctaccgctaccaccctcgtcgcggaggagcccgcgactacgccaccttccgagatgctagctcggaggatgacgctaccgtcgtgcatctggcacgcatggtggaggcatacgacgcggctcgtatcgacttccatcagatggtgcgtcgtgggatggtcgagaacaacatgaagatcctggagctgcgtcaggagaacctgcagctcaaaaaggacctagatgcggtggaggcgcagctgcatcaactcaagatcgcccagggagaggtctgccgccccaagcgtcgccgcgtctgccgcagccagaagatcaccgcccgcaagagcacctccaggcccgagcttgttcgtcagtccctggcgtggacttgcttcgtggagacccctcgtgccgagcccacgcccgtggttccccagaagggggaagcctccggcgttgatggtgagaccaggagaaatgctgccaccagtgatggcaaccaacccgaaggcagcaaccacaacaaccatggcagcccacctccacctcctcctccgcctccaccaccaccaccagataccaacgccattctcacccaaatcctcgcccagcaggccaacatgatgactgcttttctccaccacctccaaaatccgccacaacataatgctccaccaccacctccccaacactctaaactcgccgagttcctccgcatctgtccacctaccttctctagctccaacaaccccgtggatgcgttggattggttgcatgccgtggggaaaaagctagacactgtgcagtgcagcgatgaggagaaagtcatcttcgccgcccatcagctgcagggacccgcatctctatggtgggaccatttccaggctacgcagccagagggacagcctattacatgggcccgcttcaccgccgctttccggagaacccatgtgcccgccggagtcgtggcccttaagaaaagggaattccgagagttgaagcaaggcaaccgctccgtgatggagtatttgcacgagttcaacaacctggcccgttacgctccggaggatgtgcgggaagatgaggagaagcaagagaagttcctggcaggaatggaccctgagctgtccgtctgtctagtctccggggattatccggatttccaacgtctggtggacaagagcatccgcttggaagccaagcacaaggaactggagtcgcacaagcgccgcttggcgaatttccacaaccaacagggtgctaaccaaagggtccgctacaccaatccctatccagggggatcctcctcgcagcagcaacagcagcagcagcaacctcgctccgcgcctcgacctcaattcgtggtgcgcgtcccacagccgcagcagcagacgaatcaacaagggactcgtgcgccccgtcctcctccaccgactgtgcagcctggtcaaggccgcagggacgctcaaggtccgcagcgtctgtgcttcaactgcttcgagcccgggcactttgcggataaatgcccgaagccaaggcatcagcaaggccaagcgcctccccgccccaacaacggtggtaaggacgtcattcggggtcgtgtgaaccatgtgacggccgaggacgtgctgacaactccagacgtcatcgttggtacgttcctcattcattccatccctgctaccattttgttcgactctggagcttcccactcgtttatatctgtgccattcgtggggagaaatcagttgggggtagaaaggcttaggaaccctctgctcatcaccacccctggaggggttatgacagcaaagtattatagccctgccgtccctatagaaattcaggggattccttttccctcggatctgattctgctagacaccaagaacttggatataggactgtcagaaattcccatcgtcagagagttcggagacgtgtttccggaagaactacctggtatgccgcctaagcgagaggttgagttccggatagatcttgctccaggaaccgctcctctgtacaagcgaccctaccgtatggcagcaaatgaactggccgaagtcaaggaacagttggaagagctgaaagaaaaggggtatatccgtccgagtacttccccctggggtgctcctgtgatttttgtggagaagaaagacaagacgaaaaggatgtgcgttgactacagagctctcaatgaagtcaccatcaaaaacaagtatcctcttccccgaatcgatgatctgttcgatcagcttaaaggtgccactgtattctccaagattgatcttcgttccggatatcaccaattgcgcattcgtgaagaagatattccgaagaccgcattcaccacgcgatacagactgtatgaattcacggtgaagtcattcggtttaaccaatgcacctgccttcttcatgaacttaatgaacaaagtgttcatggaatacttggataagtttgtggtggtttttattgatgacatcctgatatactcacaatcagaggaagaccatcagcaccatctccgtctggtgttgggaaagttgcgggaacatcaattgtatgccaaacttagcaagtgtgagttctggttgtccgaagtcaaattcttagggcacgtgatatctgctaaaggagttgctgtggaccccgaaacagtgaccgccgtcactgattggaagcaacccaagacagtcactcaagtccgcagtttcttaggtttggcaggatactaccggagattcatcgagaacttctccaaaatcgctcgacccatgacacagttgttgaagaaagaagagaaatttgtgtggagcccgcaatgcgagaagacgttcaaaactctcaaagaaaagctggtttcctcgccagtgttaatcttgccggatactcgcaaggatttcatggtgtattgtgacgcttcgcgccaaggattggggtgcgtgcttatgcaggacggtcatgtggtggcctatgcctcacgccagctacggcctcatgaaggcaattaccctacccatgatttggagttagccgcggtggttcatgctctaaaaatctggcggcactatctcattgggaatcgctgtgaaatatatactgatcataagagtttgaaatacatcttcactcagtcggacctgaatcttcggcaaaggagatggttagaactcatcaaggattatgatgtgggaattcactatcatcctggtaaggccaacgtggttgccgacgctctaagtcgaaaaagccattgcaacactcttaacgtccgtggcgttccacccgaacttaatcaacagatggaagccctgaacctaagcatagttagtcgcggattcttggctgcgctggaagccaagcccaccttgctcgatcaaatccgcgaggctcagaagaatgatccagacatgcatggactcctcaagaatatgaaacagggtaaagccgctggtttcacagaggatgaacacggaaccctatggaacggaaatcgagtatgcgttccagttaacagagaacttaaacagctgatacttcaggaagctcacgaaagtccttattccatccaccctggcagcacgaagatgtacttagacttgaaggagaaatactggtggattagtatgaagcgggaaattgcagagttcgtggccctttgtgatgtgtgccagtgtgtcaaggcagagcaccaacgaccggccggacttctccaacctctccaagtacctgaatggaaatgggatgaaattgggatggatttcatcaccggacttccaaaaacccaaggtggatatgattctatatgggtagttgtggatcgattaaccaaggtagctcgattcattcctgtgaagaccacctatggagggaacaaactagccgaactctacttcgctaggatcacagatgggcagaccgagcgtctaaatcagatcctagaagatatgctccgcgcatgtgttctagatttcgggaagacctgggataagagtctcccctatgccgagttctcctacaacaacagctatcaagccagcatacaaatggcaccttatgaagcgttgtatgggcgcaaatgccggacaccgctaatgtgggatcaagttggggaaagccaagtgttcgggactgatatcctgagagaagctgaagctaaagtcagaaccattcgggataatctaaaggtggcacagtcccggcagaaaagttatgcagataaccgtcgccgtgatctggaattcgcagtggacgattttgtatatcttcgggtcacgccattgcgaggtgtacacaggtttcggacaaaagggaagctcgcacctcggtatgtgggtcctttccgtatcgttgctcgacgcggagaagtcgcttaccaattggagctgcccgcctccttgggcaacgtgcatgatgtgttccatgtgtcgcaactcaagaaatgccttcgagtgccatccgagcaggccgactcagagcaaattgaagttcgcgaagacttgacctacgtggagaggccagtgaagatcctggacaccatggagcgcaggaccaggaaccgggtaatccgtttttgcaaggtccagtggagcaaccacgccgaagaagaagctacttgggagcgtgaagacgagctgaaggcagcccatcctgatctcttcgcca

SEQ ID NO: 23125 - DNA, 4149 bp, Oryza sativa
  Clone ID: TF_OsC359_7471
atgtcatggcacagggccggtgtcctgctgctaggggctcagtcctgcctgcctgtcccgagggttccagccgtaggtgggattgggtcggtactcttgtctatggctaggatgggttggaaactatgtcacgtcttccgtccgtataccgtggtgatggccggcagcatcagccgtcgtggtctggacctgactggtttcgtcttggagctgcggggcatgtgcgttgtcctggggtatccacatggagtggactaccagggcaggccgcttccggagcaggagggtgacgatgcagagccccacgctgcttgggaggttactgcagtgatcctcactggctctcccgagcggacttcgttggcagtcaccgcgggtggagattctttccccgccgcttgccagaacgccgctctcctcgccatcggcactcttcaccagcgctacccggacgagttgcagcactcgccctaccgctaccaccctcgccgcggaggagcccgcgacttcgccaccttccgggatgctagctcggaggatgacgctaccatcatgcacctggcgcgcatggtggaggcgtacgacgcggctcgtatcgacttccatcagatggtgcgccgtgggatggtcgagaacaacatgaagatcctggagctgcgtcaagagaatctgcagctgaagaaggaactagacgcagtggaggcgcagctgcatcagctcaagatcgcccagggagaggtctgtcgccccaagcgtcgccgcgtctgccgcagccagaagatcaccgcccgcaagagcacctccaggcccgagcttgttcgtcagtccctggcgtggacttgcttcgtcgagacccctcgtgccgagcccgcgcccgtggttcctcaggagggggaagcctccggcgttggtagcacggaggatgcgctgttgctcaccttccgtcctggcccgtcgcagcggagaagtgctaataccggtgatggcaaccaacccgaaggcagcaaccacaacaaccatggcagtccacctccacctcctcctccgcctccaccaccaccaccagacaccaacgctattctcacccaaatcctcgcccagcaggccaacatgatgactgctttcctccaccacctccaaaatccgccacaacagaatgctcctccaccacccccacaacactgtaaactcgccgagttcctccgcatccgtccaccaaccttctctagctccaataaccccgtggatgcgttggattggttgcatgccgtggggaaaaagctagacactgtgcagtgcagcgatgaggagaaagtcatcttcgccgcccaccagctgcaggggcccgcatctctatggtgggaccatttccaggctacgcagccagaggggcagcctattacttgggctcgcttcaccgccgctttccggagaacccatgtgcccgccggagtcgtggcccttaagaaaagggaattccgagagttgaagcaaggcaaccgctccgtgatggagtatttgcatgagttcaacaacctggcccgttacgccctggaggatgtgcgggaagatgaggaaaagcaggagaagttcttggcaggaatggaccctgagctgtccgtccgtctagtctccggtgactatccggatttccaacgtctggtggacaagagcatccgcttggaagccaagcacaaggaactggagtcgcacaagcgccgcttggcgaatgtccgcaatcaacagggtgctaaccaaagggtccgctacaccaatccctatccagggggatcgtcctcgcagcagcaacagcagcaacaacctcgctccgcgccccgacctcaattcgtggtgcgcgtcccacagccgcagcaacagcagagccagcaagggacccgtgtgccccgtcctcctacgccagctgcgcagtctggtcaaggccgcagggacgcttcaggtccgcagcgtctgtgcttcaactgcttcgagcccgggcactttgcggataaatgcccgaagccgaggcgccagcaaggccaagcgcctccccgctccaacaacggtggtaaggatgtcattcggggtcgtgtgaaccacgtgacggccgaggacgtgctgacaactccagacgtcatcgttggtacgttcctcattcattccatccctgctaccattttgttcgactctggagcttcccactcgtttatatctgtgccattcgtggggagaaatcagttgggggtagaaaggcttaggaaccctctgctcatcaccacccctggaggggttatgacagcaaagtattatagtcctgccgtccctatagaaattcaggggattccttttccctcggatctgattctgctagacaccaagaacttggatgtgatccttgggatgaattggatggctcaattccaaggagtagtggattgcgcgagacgcactgtcactctgtaccgagggccggaacaatcggttgttttctttgcacccccaacctctgtcagtagttcagaacttcatcagataggactgtcagaaatccccatcgtcagggagttcggagatgtgtttccggaagaactacccggtatgccgcccaagcgagagattgagttccggatagatcttgctccaggaaccactcctctgtacaaacgaccctaccgtatggcagcaaatgaattggccgaagtcaagaaacagttggaagagttgaaagaaaagggagctctcaatgaagtcaccatcaaaaacaagtaccctcttccccggatcgatgatctgttcgatcagcttaaaggtgccactgtattctccaagattgatcttcgttccggatatcaccaattacgtattcgtgaagaagatattcctaagaccgcattcaccacgcgatacggactgtatgaattcacggtgatgtcgttcggtttaaccaatgcacctgccttcttcatgaacttaatgaacaaagtgttcatggaatacttggataagtttgttgtggtgttcattgatgacattctggtgtactcacaatcagaggaagaccatcagcaccatctccgtctggtgttgggaaagttgcgggaacatcaattgtatgccaaacttagcaagtgtgagttctggttgtccgaagtcaaattcttagggcacgtgatatctgctaaaggagttgctgtggaccccgaaacagtgaccgccgtcaccgattggaagcaacccaagacagtcactcaagtccgcagtttcttaggttttgcaggatactaccggaggttcatcgagaacttctccaaaatcgctcgacccatgacacagttgttgaagaaagaagagaaatttgtgtggagcccgcaatgcgagaaggcgtttcaaactctcaaagaaaagctggtttcctcgccggtgttaaccttgccagatactcgcaaggatttcatggtgtattgtgatgcttcgcgccaaggattggggtgcgtgcttatgcaggatggtcatgtggtggcctatgcctcacgccagctacggcctcatgaaggcaactaccctacccatgatttggagttagccgcggtggttcatgctctaaaaatctggcggcactatctcattgggaatcgcagtgaaatatatactgatcataagagtttgaaatacatcttcacccagtcggatctgaatcttcggcagaggagatggttagaactcatcaaggattatgatgtgggaattcactaccatcctggtaaggccaacgtggtcgccgacgctctaagtcgaaagagccattgcaacactcttaacgtccgtggcattccacccgaacttaaccaacagatggaagccctgaatctaagcatagtgggtcgtggattcttggttgcgttggaagccaagcccaccttgctcgatcaaatccgcgaggctcagtgtcgcgaccgggaaaattgccttttcccgaacgccagtgtattaatccccgtcccaggaaaagccgggacgggcacaacggagacgaacggcgaggggacggcttcggcggcgatccttggacaaaggcgagacgcggccggcacgaggcttgacgacgcggagccgaggacggaggcgaggacggggctgcagcggctcgcttga

SEQ ID NO: 23126 - DNA, 5376 bp, Oryza sativa; identical to SEQ ID NO: 14231
  Clone ID: TF_OsC359_7495

SEQ ID NO: 23127 - DNA, 5094 bp, Oryza sativa
  Clone ID: TF_OsC359_7522
atggccggcagcgtcacccgtcgtggcttggacatgactggcttcatcttggagctgcggggcatgtgcgtggtcctggggtatccacatggagtggactaccaggccaggccgctcccggagcaggagggtgacgatgcagagccccacgctgcttgggaggttactgcagtgatcctctctggctctcccgagcggacttcgctggcagtcaccgcgggtggagattctttccccgccgcttgccagaacgccgctctcctcgccatcggcacccttcaccagcgctacccggacgagttgcagcactcgccctaccgctaccaccctcgtcgcggaggagcccgcgactacgccaccttccgggatgctagctcggaggatgacgctaccatcgtgcacctggcgcgcatggtggaggcgtacgacgcggctcgtatcgacttccatcagatggtgcgccgtgggatggtcgagaacaacttgaagatcctggagctgcgtcaggagaacctgcagctcaagaaggacctagacgcggtggaggcgcagctgcatcagctcaagatcgcccagggagaggtctgctgccccaagcgtcgccgcgtctgccgcagccagaagatcaccgcccgcaagagcacctccaggcccgagcttgttcgtcagtccctggcgtggacctgcttcgtcgagacccctcgtgccgagcccgcgcccgtggttccccaggagggggaagcctccggcgttggtagcacggaggatgcgctgttgctcaccttccgtcctggcccgtcgcagcggagaaatgctgccaccggtgatggcaaccaacctgaaggcagcaaccacaaccaccagggcaacccacctccacctcctcctccgcctccaccaccaccacccgataccaacgccattctcacccaaatcctcgcccagcaggccaacatgatgacggctttcctccaccacctccaaaatccgccacaacagaatgctccaccaccacccccacaacactctaaactcgccgagttcctccgcatccgcccacctaccttctctagctccaacaaccccgtggatgcgttggattggttgcatgccgtggggaaaaagctagacactgtgcagtgcagcgatgaggagaaagtcatcttcgccgcccaccagctgcaggggcccgcatctctatggtgggaccatttccaggctacgcagccagaggggcagcctattacttgggcccggttcaccgccgctttccggaggacccatgtgcccgccggagtcgtagcccttaagaaaagagaattccgagagttgaagcaaggcaaccgctccgtgatggagtatttgcatgagttcaacaacctggcccgttacgctccggaggatgtgcgggaagatgaggagaagcaagaaaagttcttggcgggaatggaccctgagctgtccgtccgtctagtctccggggactatccggatttccaacgtctggtggacaagagcatccgcttggaagccaagcacaaggaactggagtcgcacaagcgccgcttggcaaatttccgcaatcaacagggtgctaaccaaagggtccgctacaccaacccctatccagggggatcctcctcgcaacagcaacaacagcagcagcaacctcgctccgcgccgcgacctcaattcgtggtgcgcgtcccacagccgcagcagcagcagaatcagcaagggactcgtgcgccccgtcctcctacgccaaccgtgcagtctggtcaaggccgcagggacgctcaaggtcagcagcgtctgtgcttcaactgcttcgagcccgggcactttgcggataaatgcccgaagccaaggcgtcagcaaggccaagcgcctccccactccaacaacggtgggaaggatgtcattcggggtcgtgtgaatcacgtgacggccgaggacgtgctgacaactccagacgtcatcgttggtacgttcctcgttcattccatccctgctaccattttgttcgactctggagcttcccactggtttatatctgtgccattcgtggggagaaatcagttgggggtagaaaggcttaggaaccctctgctcatcaccacccctggaggggttatgacagcaaagtattatagccctgccgtccctatagaaattcaggggattccttttccctcggatctgattctgctagacaccaagaacttggatgtgatccttgggatgaattggttggctcaattccaaggagtagtggattgcgcgaggcgcactgtcactctgtaccgagggccggaacaaccggttgttttctttgcacccccaacctctgtcagtagttcagaactgcatcagataggactgtcagaaatccccatcgtcagggagttcggagatgtgtttccggaagaactacccggtatgccgcccaagcgagagattgagttccggatagatcttgctccaggaaccactcctctgcacaagcgaccctaccgtatggcagcaaatgaactggccgaagtaaagaaacagttggaagagttgaaagaaaaggggtatatacgtccgagtacttccccctggggtgctcctgtgatttttgtggagaagaaagacaagactaagaggatgtgcgttgactacagagctctcaatgaagtcaccatcaaaaacaagtaccctcttccccggatcgatgatctgttcgatcagcttaaaggtgccactgtattctccaagattgatcttcgttccggatatcaccaattacgtattcgtgaagaagatattccgaagaccgcattcaccacgcgatacgggctgtatgaattcacggtgatgtcattcggcctaaccaatgcacctgccttcttcatgaacttaatgaacaaagtgttcatggaatacttggataagtttgttgtggttttcattgatgacattctggtatactcacaatcagaggaagaccatcagcaccatctccgtctggtgttgggaaagctgcgggaacatcaattgtatgccaaacttagcaagtgtgagttctggctgtccgaagtcaaattcttaggacacgtgatatctgctaaaggagtttctgtggaccccgaaacagtgaccaccgtcaccgattggaagcaacccaagacagttactcaagtccgcagtttcttaggtttggcaggatactaccggagattcatcgagaacttctccaaaatcgctcgacccatgacacagttgttgaagaaagaagagaaatttgtgtggagcccgcaatgcgagaaggcgttccagactctcaaagaaaagctggtttcctcgccggtgttaatcttgccggatactcgcaaggatttcatggtgtactgtgatgcttcgcgccaaggattcgggtgcgtgctcatgcaggatggtcatgtggtggcctatgcctcacgccagctacggcctcatgaaggcaactatcctacccatgatttggagttagccgcggtggtgcatgctctaaaaatctggcggcactatctcattgggaatcgctgtgaaatatatactgatcataagagtttgaaatacatcttcactcagtcggacctgaatcttcggcaaaggagatggttagaactcatcaaggattatgatgtgggaattcactatcatcctgatatgagacagggtaaagccgctggtttcacggaggatgaacacggaaccctatggaacggaaagcgggtatgcgttccagatagcagagaacttaaacagttgatacttcaggaagctcacgaaagtccttattccattcacccgggcagtacgaagatgtacctagacttgaaggagaaatactggtgggttagcatgaagcgggaaattgcagagttcgtggctctatgtgatgtgtgccagcgtgtcaaggcagaacaccaacgaccggccggacttctccaacctctccaagtaccagaatggaaatgggatgaaattgggatggatttcatcaccggacttccaaaaacccaaggtggatatgattctatatgggtaattgtggatcgactaacaaaggtagctcgatttattcctgtgaagaccacctatggagggaacaaactagcggaactctacttcgctaggatcgtgagtctccatggtatccccaagaaaatcgtatctgataggggaagccaattcacctctcacttttggaagaagctccaagaagagctgggtacccgtttaaatttcagcaccgcctatcacccgcagacagatggacagaccgagcgtctaaatcagatcctagaagatatgcttcgcgcgtgtgtcctagattttgggaagacttgggataagagtctcccctatgccgagttctcctacaacaacagctatcaagccagcatacaaatggcaccttatgaagcgttgtacgggcgcaaatgccggacaccgctattgtgggaccaagtcggagaaagccaagtgttcggaactgatatcctgagggaagctgaagctaaagtcagaatcattcgggataatctaaaggtggcacagtcccggcagaaaagttatgcagataaccgacgccgtgacctggaattcgcagtggacgattttgtgtaccttcgggtcacgccattgcgaggggtacacaggtttcagacaaaagggaagctcgcacctcggtatgtgggtcccttccgtatcatcgctcgacgcggagaagtcgcttatcagctagagttgcccgcctccttgggtaacgtgcacgatgtgttccatgtgtcgcaactcaagagatgtcttcgagtgccatccgagcaggccgactcagagcaaattgaagttcgcgaagatttgacctacgtggagaggccagtgaaaatcctggacaccagggagcgcaggaccaggaaccgggtaatccgtttttgcaaggtccagtggagcaaccatgccgaagaagaagctacttgggagcgtgaagacgagctgaaggcagcccatcccgacctcttcgccagttcttccgaatctcggggtcgagattccgtttaa

SEQ ID NO: 23128 - DNA, 3374 bp, Oryza sativa
  Clone ID: TF_OsC359_7570
atggatgaagtcgggggtcgatggacattctccagggcaaatgaaggctacacgagctgcggcccggtagtcgagatgtcatggcacagggccggtgtcctgctgttaggagctcagtcctgcctgcctgtcccgggggttccggccgtaggtgggattgggtcgatgtacacctctgatcagagtataatctattcgaatagccgcgccctcggttatgggcaagccgagcaatgtacccaaatggccggcagcgtcacccgtcgtggtttgcacatgactggcttcgtcttggagctgcgaggcatgtgcgtggtcttggggtatccacatggagtggactaccaggccaggccgcttccggagcaggagggtgacgatgcagagccccacgctggttgggaggtcactgcagtgatcctctctggctctcccgagcggacttcgctggcagtcaccgcgggtggagattccttccccgccgcttgccagaacgtcgctctcctcgccatcggcactcttcaccagcgctacccggacgagttgcagcactcgccctaccgctaccaccctcgtcgcggaggagcccgcgactacgccaccttccgggatgctagctcggaggatgacgctaccatcgtgcacctggcgcgcatggtggaggcgtacgacgcggctcgcatcgacttccaccagatggtaccccgtgggatggtcgagaacaacatgaagatcctggagctgcgtcaggagaacctgcagctcaagaaggacctagacgcggtggaggcgcagctgcatcagctcaagatcgcccagggagaggtctgccgccccaagcgtcgccgcgtctgccgcagccagaagatcaccgcccgcaagagcacctccaggcccgagcttgttcgtcagtccctggcgtggacttgcttcgtcgagacccctcgtgccgagcccgcgcccgtggttccccaggagggggaagcctccggcgttggtagcacggaggatgcgctgttgctcaccttccgtcctggcccgtcgcagcggtagacgagcagttagtaggcttgcgcatggtgacgaccaggagaaatgctgccaccggtgatggcaaccaacctgaaggcagcaaccacaaccaccagggcaacccacctccaccttctccttcgccttctccaccaccaccagataccaatgccattctcacccaaatcctcgcccagcaggccaacatgatgactgctttcctccaccacctccaaaatccaccacaacagaatgctccaccaccacccccacaacactctaaactcgccgagttcctccgcatccgtccacccaccttctctagctccaacaaccccgtggatgcgttggattggttgcatgccgtggggaaaaagctagacacggcgcagtgcagcgatgaggagaaagtcatcttcgccgcccaccagctgcaggggcccgcatctctatggtgggaccatttccaagctacgcagccagaggggcaacctattacttgggcccgcttcaccgccgctttccggagaacccatgtgccagctggagtcgtggctcttaagaaaagggaattccgagagttgaagcaaggcaaccgctccgtgatggagtatttgcatgagttcaacaatctggcccgttacgccccggaggatgtgcgggaagatgaggagaagcaagagaagttcttggcaggaatggacctcgagctgtccgtccgtctagtctctggggactatccggatttccaacgtctggtggacaagagcatccgcttggaggccaagcacaaggaactggagtcgcacaagcgccgcttggcgaatttccgcaatcaacagtgtgctaaccaaagggtccgctacaccaatccctatccagggggatcctcttcgcagcagcaacaacagcagcagcaacctcgctccgcgcctcgacctcaattcgtggtgcgcgtcccacagccgcagcagcagcagaatcagcaagggactcgtgcgccccgtcctcctacgccaactgtgcagcccggtcaaggccgcagggacgctcaaggtcagcagcgtctgtgcttcaactgcttcgagcccgggcactttgcggataaatgcccgaagccaaggcgtcagcaaggtcaagcgcctccccgctccaacaacggtgggaaggatgtcattcggggtcgtgtgaatcacgtgacggccgaggacgtgctgacaactccagacgtcatcgttggtacgttcctcgttcatcccatccctgctaccattttgttcgactctggagcttcccactcgtttatatctgtgccattcgtggggagaaatcagttgggggtagaaaggcttaggaaccctctgctcatcaccacccctggaggggttatgacagcaaagtattatagccctgccgtccctatagaaattcaggggattccttttccctcggatctgattctgctagacaccaagaatttggatgtgattcttgggatgaattggttggctcaattccaaggagtagtggattgcgcgaggcgcactgtcactctgtaccgagggccggaacaaccggttgttttctttgcacccccaacctctgtcagtagttcagaactgcatcagataggactgtcagaaatccccatcgtcagggagttcggagatgtgtttccggaagaactacccggtatgccgcccaagcgagagattgagtttcggatagatcatgctccaggaaccactcctctgcacaagcgaccctaccgtatggcagcaaatgaactggccgaagtaaagaaacagttggaagagttgaaagaaaaggggtacatacgtccgagtacttccccctggggtgctcctgtgatttttgtggagaagaaagacaagactaagaggatgtgcgttgactacagagctctcaatgaagtcaccatcaaaaacaagtaccctcttccccggatcgatgatctgttcgatcagcttaaaggtgccactgtattctccaagattgatcttcgttccggatatcaccaattacgtattcgtgaagaagatattccgaagaccgcattcaccacgcgatacgggctgtatgaattcacggggatgtcgttcggtctaaccaatgcacctgccttcttcatgaacttaatgaacaaagtgttcatggaatacttggacaagtttgttgtggttttcatcgatgacattctgatatactcacaatcagagggagaccatcagcaccatctccgtctggtgttgggaaagctgcgggaacatcaattgtatacctgtttgtcgcgtcccaaaacgactctaaaatacatcctc

SEQ ID NO: 23129 - DNA, 5400 bp, Oryza sativa; identical to SEQ ID NO: 14193
  Clone ID: TF_OsC359_7601

SEQ ID NO: 23130 - DNA, 5770 bp, Oryza sativa
  Clone ID: TF_OsC359_7609
aatagccgcgccctcggttatgggcaagccgagcaataagaggagctccttggagatgaaggctttggtgtctagctcgtgcctgccgtcaagcgcctgtggtcgtcgccctagtcttccgttgtttcccatggccggcagcgtcacccgtcgtggtttggacatgactggtttcgtcttggagctgcgaggcatgtgcgtggccttggggtatccacatggagtggactaccaggccaggccgcttccggagcaggagggtgacgatgcagagccccacgctggttgggaggtcactgcagtgatcctcgctggctctcccgagcggacttcgctgacagtcaccgcgggtggagattccttccccgccgcttgccagagcgccgctctcctcgccatcggcactcttcaccagcgctacccagacgagttgcagcactcgccctaccgctaccaccctcgccacggaggagcccgcgactacgccaccttccgggatgctagctcggaggatgacgctaccatcgtgcacctggcgcgcatggtggaggcgtacgacgcggctcgtatcgacttccatcagatggtgcgtcgcgggatggttgagaacaacatgaagatcctggagctgcgtcaggagaacctgcagctcaagaaggacctagatgcggtggaggcgcagctgcatcagcttaagatcgcccagggagaggtctgccgccccaagcgtcgccgcgtctgccgcagccagaagatcaccgcccgcaagagcacctccaggcccgagcttgttcgtcagtccctggcgtggacctgcttcgtggagacccctcgtgccgagcccgcgcccgtggttccccaggagggggaagcctccggcgttggtagcacggaggctctttctctgtttgctggttctgtgtggggttttcagatggtgacgaccaggagaaatgctaacaccggtgatggcaaccaacccgaaagcagcaaccacaaccaccagggcaacccacctccacctcctcctccgcctccgccaccaccaccagacaccaacgccattctcacccaaatcctcgcccagcaagccaacatgatgactgctttcctccaccacctccaaaatccgccacaacataatgctccaccaccacccccacaacactctaaactcgccgagttcctccgcatccgcccacctaccttctcaagctccaacaaccccgtggatgcgttggattggttgcatgccgtggggaaaaagctagacacggtgcagtgcagcgatgaggagaaagtcatcttcgccgcccaccaactgcaggggcccgcatctctctggtgggaccacttccaggctacgcagccagagggacagccgattacttgggcccgcttcaccgccgctttccgaagaacccatgtgcccgccggagtcgtggcccttaagaaaagggaattccgagagttgaagcaaggcaaccgctccgtgatggagtatttgcatgagttcaacaacctggcccgttacgctccggaggatgtgcgggaagatgaggagaagcaagagaagttcttggcaggaatggaccctgagctgtccgtccgtctagtctctggggactatccggattttcaacgattggtggacaagagcatccgcttggaagccaagcacaaggagctggagtcgcacaagcgccgcttggcgaatttccgcaatcaacagggtgctaaccaaagggtccgctacaccaatccctatccagggggatcctcctcgcagcagcaacaacagcagcagcaacctcgctccgcgcctcgacctcaattcgtggtgcgcgtcccacagccgcagcaacagcagaatcagcaggggactcgtgcaccccatcctcctacgccaactgtgcagtctggtcaaggccgcagggacgctcaaggtcagcagcgtctgtgcttcaactgcttcgagcccgggcactttgcggataaatgcccgaaaccaaggcgtcagcaaggccaagcgcctccccgctccaagaacggcgggaaggatgtcattcggggtcgtgtgaatcacgtgacggccgaggacgtgctgacaactccagacgtcatcgttggtacgttcctcgttcattccatccctgctacaattttgttcgactctggagcttcccactcgtttatatttgtgccattcgtggggagaaatcagttgggggtagaaaggcttaggaaccctctgctcatcaccacccctggaggggttatgacagcaaagtattatagccctgccgtccctatagaaattcaggggattccttttccctcggatctgattttgctagacaccaagaatttggatgtgatccttgggatgaattggttggctcaattccaaggagtagtggattgcgcgagacgcactgttactctgtaccgagggccggcacaaccagttgttttctttgcaccctcaacctctatcagaagttcagaacttcatcagataggactgtcagaaatccccatcgtcagggagttcggagatgtgtttccggaagaactacccggtatgccgcccaaacgagagattgagttccggatagatcttgctccaggaaccactcctctgcacaagcgaccctaccgtatggcagcaaatgaactggccgaagtaaagaaacagttggaagagttgaaagaaaagggatacatacgtccgagtacttccccatggggtgctcctgtgatttttgtagagaagaaagacaagacgaagaggatgtgcgtcgactacagagctctcaatgaagtcaccatcaaaaacaagtaccctcttccccggatcgatgatctgttcgatcagcttaaaggtgccactgtattctccaagattgatcttcgttccggatatcaccaattacgtattcgtgaagaagatattccgaagaccgcattcaccacgcgatacgggctgtatgaattcacggtgatgtcattcggtctaaccaatgcacctgccttcttcatgaacttaatgaacaaagtgttcatggaatacttggataagtttgttgtggttttcattgatgacattctgatatactcacactcagaggaagaccatcagcaccatctccgtctggtgttgggaaagttgcgggaacatcaattgtatgccaagcttagcaagtgtgagttctggttgtccgaagtcaaattcttggggcacgtgatatctgctaaaggagttgctgtggaccccgaaacagtgaccgccgtcaccgattggaagcaacccaagacagttactcaagtccgcagtttcttaggtttggcaggatactaccggagattcatcgagaacttctccaaaatcgctcgacccatgacacagttgttgaagaaagaagagaaatttgtgtggagcccgcaatgcgagaaggcgtttcaaactctcaaggaaaagctggtttcctcgccggtgttaatcttgccggatactcgcaaggacttcatggtgtattgtgacgcttcgcgccaaggattggggtgcgtgctcatgcaggacggtcatgtagtagcctatgcctcacgtcagctacgacctcatgaaggcaactaccctacacatgacttggagttagccgcggtggttcatgctctaaaaatctggcggcactatctcattggaaatcgctgtgaaatatataccgaccataagagtttgaaatacatcttcacccagtcggatctgaatcttcggcaaaggagatggttagaacttatcaaagactatgatgtgggaattcactatcatcctggtaaggccaacgtggttgccgacgctctaagtcgaaagagccattgcaacactcttaacgtccgtggcattccacccgaacttagtcaacagatggaagccctgaatctaagcatagttagtcgtggattcttggctgcgttggaagccaagcctaccttgctcgatcaaatccgcgaggctcagaagaatgatccggacatgcatggactcctcaagaatatgaaacagggtaaagccgctggtttcacagaggatgaacacggaaccctatggaacggaaagcgggtatgcgttccagataacagagaacttaaacagttgatacttcaggaagctcacgagagcccttattccattcacccgggcagtacaaagatgtacttagacttgaaggagaaatactggtgggttagcatgaagcgggaaattgcagagtttgtggccctatgtgatgtgtgccaacgtgtcaaggcagagcaccaacgaccggccggacttctccaacctctccaagtaccagaatggaaatgggatgaaattgggatggatttcatcaccggacttccaaaaacccaaggtggatatgattctatatgggtagttgtggatcgattaaccaaggtagctcgatttattcctgtgaagaccacctatggagggaacaagctagccgagctctacttcgctaggatcgtgagtctccatggcgttcccaagaaattcgtatctgataggggaagccaattcacctctcacttttggaagaagctccaagaagacctgggtactcgattgaatttcagcaccgcctatcacccgcagacagatggacagaccgagtgtctaaatcagatcctagaagatatgctccgcgcatgtgtactagatttcgggaagacctgggataagagtctcccctatgccgagttctcctacaataacagctatcaagccagcatacaaatggcaccttatgaagcgttgtacgggcgcaaatgccggacaccgctattgtgggaccaagttggagaaagccaagtgttcgggactgatatcctgagagaagctgaagctaaagtcagaaccattcgggataacctaaaggtggcacagtcccggcagaaaagttatgcagataaccgtcgctgtgacctggaattcgcagtggatgattttgtgtaccttcgggtcacgccattgcgaggtgtacacaggtttcagacaaaagggaagctcgcacctcggtatgtgggtcctttccgtatcgttgctcgacgcggagaagtcgcttaccagttggagctgcccgcctccttgggcaacgtgcatgatgtgttccatgtgtcgcaactcaagaaatgccttcgagtgccatccgagcaggccgactcagagcagattgaagttcgcgaagatttgacctacgtggagaggccagtgaaaatcctggacaccatggagcgcaggaccaggaaccgggtaatccgtttttgcaaggtccagtggagcaaccatgccgaagaagaagctacctgggagcgtgaagacgagctcctccgtccgtttccgcctctcgccgcccttcctcctcgccggattcgagctcgcgacgtcgctctctctctccgccgtcgccgccgagctccggtccgccgctgtcgtcgccccggaccacctcccacctcggcgccgcctcattcgggttcgccgcatcctcgccaacctcgtccacctctccgtgtcggtcgccgaccgccggaacgccgtcgaccccgtcgacccgagccgcgccgctgcctccctccgctccggccgcctcctccgtcgccgccgtcgccccggggtgagccgtggaccgtcgcctcctttcccccttccctcccctctctcggccacctttccgccgcgccagtggttgccggcggcgaccat

SEQ ID NO: 23131 - DNA, 6302 bp, Oryza sativa
  Clone ID: TF_OsC359_7625
atggcggccggatcttccgcgcccgtttccccctcatccggccgccctctctcactcccaaccctatataaacactccccgtgcctccctccaccgtttccgccactcgccgctccctctctccgccggaatcgagctcgcgccgtcgctctctctctccgccgtcaccgccgagctccggtctgccgccgtcgtcgccccggaccttcttccgcttcggcgccgcctccttcggtttcaccgcaacctcgccgacctcgtccacccctccgtttcgcccgccgacagccggaacgccgccgtccccgtctacccgagccgcgccgccgccttcctccgctccggtcgccgttcccgtcgtcgccgtcgacccggggtgagctgtggaccgccgattcgtttcccccttccctcccctctctcgggcgccgctctaccgcgccggtggtcaccggcggcgaccatcgggggcgcgggtgcgccgcctcccgtcggctgtgccggcgtggccgccttcgggcgcgccccgcggctgccatgtggggcccggccgtcagccgcccgcgccctcgggtgcggctgacgcgtgggacccacggcgccggccggtgtgagccgggtgcacccggtccaccatggacccacctcggccatataaggaccggtcttcgggcctctgttgcaaagcactaccgtacttccacatgtctagtggggcaaatgaaggctacacgagctgcggcccggtagtcgagatgtcatggcacagggccggtgtcctgctgctaggggctcagtcctgcctacctgtcccgggggttccgggcgtaggtgggattgggtcgatgtacacctctgatcagagtataatctattcgaatagccgcgccctcggttatgggcaagccgagcaatgtacccaaatggccggcagcgtcagccgtcgtggtctggacctgactggtttcgtcttggagctgcggggcatgtgcgttgtcctggggtatccgcatggagtggactaccagggcaggccgctcccggagcaggagggtgacgatgcagagccccacgctgcttgggaggttactgcagtgatcctcactggctcacccgagaggacttcgttggcagtcaccgcaggtggagattctttctccgccgcttgccagagcgccgctctcctcgccatcagcactcttcaccagcgctacccggacgagctgcagcactcgccctaccgctaccaccctcgtcgcggaggagcccgcgactacgccaccttccgggatgctagctcggaggatgacgctaccatcatgcacctggcgcgcatggtggaggcgtacgacgcggctcgtatcgacttccatcagatggtgcgccatgggatggtcgagaacaacctgaagatcctgaagctgcgtcaggagaatctgcagctgaagaaggacctagacgcagtggaggcgcagctgcatcagctcaagatcgcccagagagaggtctgtcgcccccagcgtcgccgcgtctgccgcagccagaagatcaccgcccgcaagagcacctccaggcccgagcttgttcgtcagtccctggcgtggacttgcttcgtggagacccctcgtgccgagcccgcgcccgtggttcctcaggagggggaagcctccggcgtcggtagcatggaggatgcgctgttgctcaccttccatggtgacgaccaggagaaatgctgccaccagtgatagcaaccaacctgaaggcagcaaccacaacaaccatggcagcccacctccacctcctccaccgcctccaccaccaccaccagacaccaacgccattctcacccaaatcctcgcccagcaggccaacatgatggctgctttcctccaccacatccaaaatccgccacaacataatgctccaccaccacccccacaacactctaaactcgccgagttcctacgcatccgtccacctaccttctctagctccaacaaccccgtggatgcgttggattggttgcatgccgtggggaaaaagttagacaccgtgcagtgcagcgatgaggagaaagtcatcttcgccgcccaccaactgcaggggcccgcatctctatggtgggaccatttccaggctacgcaactagaggggcaacctattacttgggcccgcttcaccgccgccttccggaggacccatgtgcccgccggagtcatggcccttaagaaaagggagttccgagagttgaagcaaggcaaccgctccgtgatggagtatttgcatgagttcaacaacctggcccggtacgccccggaggatgtacgggaagatgaggaaaagcaggagaagttcttggcaggaatggatcctgagctgtccgtccgtctagtctccggggactatccggatttccaacgtctggtggacaagagcatccgcttggaagccaagcacaaggaactggagtcgcacaagcgtcgcttggcgaattttcgcaaccaacagggtgctaaccaaaggatccgctacaccaatccctatccagggggatcttcctcgcagcagcagcaacctcgctccgcgcctcgacctcaattcgtggtgcgcgtcccacagccgcagcaacagcagagccagcaagggacccgtgcgccccgtcctcctacgccagccgcgcagtctggacaaggccgcagggacgttcaaggtccgcagcgtctgtgcttcaactgcttcgagcccgggcactttgcggataaatgcccgaagccgaggcgccagcaaggccaagcgcctccccactccaacaacggtggtaaggatgtcatttggggtcgtgtgaaccacgtgacggccgaggacgtgctgacaactccagacgtcatcgttggtacgttcctcatccattccatccctgctaccattttgttcgactctggagcttcccactcgtttatatctgtgccattcgtggggagaaatcagttgggggtagaaaggcttaggaaccctctactcatcaccacccctggaggggttatgacagcaaagtattatagtcctgccgtccctatagaaattcaggggattccttttccctcggatctgattcttctagacaccaagaacttggatgtgatccttgggatgaattggttggctcaattccaaggagtagtggattgtgcaagacgcactgtcactctgtaccgagggccggaataaccggttgttttctttgcacccccaacctctgtcagtagttcagaacttcatcagataggactgtcagaaatccccattgtcagagagttcggagacgtgtttccggaagaactacccggtatgccgcccaagcgagagattgagttccggatagatcttgctccaggaaccactcctctgtacaagcgaccctaccgtatggcagcaaatgaactggccgaagttaagaaacagttggaagagttgaaagaaaaggggtatatacgtctgagtacttccccctggggtgctcctgtgatttttgtggagaagaaagacaagacaaagaggatgtgcgttgactacagagctctcaatgaagtcaccatcaaaaacaagtaccctcttccccggatcgatgatctgttcgatcagcttaaaggtgccacggtattctccaagattgatcttcgttctggatatcaccagttgcgcatccgtgaagaagatattccgaagaccgcattcaccattcgatacggactgtatgaattcacggtgatgtcgttcggtttaaccaatgctcctgccttcttcatgaacttaatgaacaaagtgttcatggaatacttggataagtttgttgtggttttcattgatgacattctggtatactcacaatcagaggaagaccatcagcaccatctccgtctggtgttgggaaagttgcgggaacatcaattgtatgccaaacttagcaagtgtgagttctggttgtccgaagtcaccgattggaagcaacccaagacagtcactcaaattcgcagtttcttaggtttggcaggatactaccggaggttcatcgagaacttctccaaaatcactcgacccatgacacagttgttgaagaaagaggagaaatttgtgtggagcccgcaatgcgagaaggcgttcaaaactctcaaagaaaagctggtttcctcgccagtgttaatcttgctggatactcgcaaggacttcatggtgtattgtgacgcttcgcgccaaggattgggcgcgtgctcatgcaggacggtcatgtggtggcctatgcctcacgccagctacggcctcatgaaggcaactaccctacccatgatttggagttagccgcggtggttcatgctctaaaaatctggcggcactatctcattgggaatcgctgtgaaatatatactgatcataagagtttgaaatacatcttcacccagtcggatctgaatcttcggcagaggagatggttagaactcatcaaggattatgatgtgggaattcactatcatcctggtaaggccaacgtggtcgccgacgctctaagtcgaaaaagccattgcaacactcttaacgtccgtggcattccacccgaacttaatcaacagatggaagccctgaatctaagcatagtgggtcgcggattcttggctgcgttggaagccaagcccaccttgctcgatcaaatccgcgaggctcagaagaacgatccggacatgcatggactcctcaagaatatgaaacagggtaaagccactggtttcacagaggatgaacacggaaccctatggaacggaaatcggcgtgtcaaggcagagcaccaacgactggccggacatctccaacctctccaagtaccagaatggaaatgggatgaaattgggatggatttcatcaccggacttccaaaaacccaaggtggatatgattctatatgggtagttgtggatcgattaaccaaggtagctcgatttattcttgtgaaggccacctatggagggaacaaactagccgagctctacttcgctaggatcgtgagtctccatggcgttcctaagaaaattgtatccgataggggaagccaattcacctctcacttttggaagaagctccaagaagagctgggtacccgattaaatttcagcaccgcgtatcacccgcagacagatggacagaccgagcgtctaaatcagatcctagaagatatgcttcgcgcatgtgtcctagatttcgggaagacctgggataagagtctcccctatgccgagttctcctacaataacagctaccaagccagcatacaaatggcaccttatgaagcattgtatgggcgcaaatgtcggacaccgctattgtgggaccaagttggggaaagccaagtgttcgggaccgatatcctgagagaagctgaagctaaagtcagaaccattcgggataatctaaaggttgcccagtctcggcagaagagttatgtagacaaccgacgccgtgacctagaattcgcagtggatgactttgtgtatcttcgggtcacgcccttgcgaggtgtacacaggtttcagacaaaggggaagctcgcacctcggtttgtgggtcctttccgtatcattgcacggcgcggagaagtcgcttaccagttggagctgcctgcctccttgggcaacgtgcatgatgtgttccatgtgtcgcaactcaagaaatgtcttcgagtgccatccgagaaggccgactcagagtaaattgaagttcgcgaagacttgacctacgtggagaggccagtgaaaatcctggacaccatggagcgaaggaccaggaaccgggtaatccgttttttcaaggtccactggagcaaccacgccgaggaagaagctacttgggagcgtgaagacgagcctccccgtgcctccctccaccgtttccgccactcgccgctctctctccccgccggaatcgagctcgcaccgtcgccctctctctccgtcgttgccgccgagctccggtccgccgccgttgtcgccccggaccacctctcccctcggcgccacctccttcggcttcgccgcatccccggcgacctcgtccacccctccgtttcgctcgccgaccgccggagcaccgtcgaccccgtccacccgagccgcgccgccgccttcctccgctccggtcgccgtttccgtcttcgccgtcgacccggggtgagccgtggaccgccgcttcttttcccccttcccttcccctccctcggccgccgctccgccgtgcctatggacgccgccggcgaccat

SEQ ID NO: 23132 - DNA, 5265 bp, Oryza sativa
  Clone ID: TF_OsC359_7654
atggacatctctaggacaaatgaaggctacacgagctgtggcccggtagtcgagatgtcatggcacagtgctggtgtcctgctgctaggggctcagtcctgcctacctatcctggaggttccggccgtaggtggggttgggtcggtactcttgtctatggctaggatgggttggaaattatgtcatgtcttccgtccatatgctgtggtgatggccggcagcgtcaaccgtcatggcctggacctgtgtggctttgtgttggagctgcggggcatgtgcattgtcctgggatacccgcatggagtggactaccagggcaagaagctcccagagcaggatggtgacgatgcagagccccacgctgcttgggaggtcactgcagtgatcctcactggctctcccgagaggacttcgttggcagtcaccgcgggtggagattccttctccgccgcatgccagaacgccgcactccttgccatcggcactcttcaccagcgctacccggacgagttgcagcactcgccctaccgctaccaccctcgtcgcggaggagcccgcgactacgccaccttttgggatgctagctcggaggatgacgctaccatcatgcacctggcgtgcatggtggaggcgtacgacgcggcccgtatcgacttccatcatatggtgcgccgtgggttggtcgagaacaacatgaagatcctggagctgcgtcaagagaatctgcagctgaagaaggaccttgacgcggtggaggcgcagctgtttcagctcaagatcgcccagggagaagtctgccatcccaagcgccgccgcgtctgccgcagcctgaagatcaccgcccgcaagagcaccttcaggcctgagcttgttcgtcagtccttggcgtggacctgcttcgtggagaccccttgcgccgagcccgcgcccgtggttcctcaggaggaggaagcctctggcgttggcagcacggaggatatggtgacaaccaggagaagtgctgttgccggcgatggcaaccaacccgaaggcagcaaccccaacacccaaggcggcccacctccacctcctcccccgccaccaccaccaccacctgacaccaaccccatcctcacccaaattctcgcccagcaggccaacatgatggctgctttcctccaccacatccagaatccgccgcaacataatgctccacctccaccacccccgcagcactctaagctcgccgagttcctccgcatccgcccacctaccttctctagctccaataaccccgtggatgccttggattggttgcatgccgtggggaaaaagttggacaccgtgcagtgcaacaatgaggagaaaatcatctttgccacccaccagctgcaagggcccgcatctctatggtgggaccacttccaggctacgcagcctgagggacatcctattacctgggcccgcttcaccgccgcttttcggaggacccatgtgcccgccggagtcatggcccttaagaagagggaatttcgggagttgaagcaaggcaaccgctctgtgatgaagtatttgcacgagtttaacaacttggcccggtacgccccagaggatgttcgggaagatgaggaaaagcaggagaagttcctggtaggaatggaccctgagctgtctgtgcgtctggtctccggggattatcctgatttccagcgtctgcagcagcagcagccgcaacctcgcttcgcgccccgacctcaattcgtggtgcgcgtcccacagccgcagcaacagcagagccagcaagggacccgtgcgcttcgccctcctgcaccagctgtgcagcttggtcaaggccgcatggacgctcaaggtcagcaacgtctgtgcttcaactgcttcgagcccgggcactttgcggacaaatgcccgaagccgcgacgccagcaaggccaagcgcctccctgccccaacaacggtggtaatgacgtcgctcggggtcgtgtgaaccacgtgaccgccgaggatgtgctgacgactccggacgtcatcgttggtacgttcctcattcattccattcctgctactattttgttcgactctggagcttcctactcgtttatatctgtgcctttcgtgggaagaaatcagctgggggtagaacggcctaggaaccctctgctcatcaccacccctggcggggatatgacagcaaagtattatagcccgacagttcctatagaaatccagggaatcccttttccctttgatttgattcttctggacaccaataacttggatgtgatcctcgggatgaattggttggctcaattccaaggagtagtggattgcgcaaggcgcactgtcattctgtaccaggggccaaaacaaccggttgttttctttgcacccccaacttctgtcggcagttcagaacttcatcagataggactgtcagaaatccccatcgtcagtgaattcggtgacgtgtttccggaagaactacccggtatgccgcccaagcgggagattgagttccggatagatcttgctccagggacaactcctctatacaagcggccctaccgtatggcagcaaataaactggccgaagtcaagaagcagttggaagagttgaagaaaaagggagctctcaatgaagtcactatcaaaaacaagtaccctcttccccggatcaatgatcttttcgaccagcttaaaggtgccattgtcttttctaaaattgatcttcgctccggatatcaccaattgcgtattcgtgaagaagatatcccaaagaccgcgttcaccacacgttatggactgtttgaattcacggtgatgtcattcggtctaaccaatgctcctgccttcttcatgaacttaatgaacaaagtgttcatggaatacttggataagtttgttgtggtcttcattgacgacattctgctcagcaagtgtgagttctggttgtccgaagtcaccgattggaagcaacccaagacagtcactcaaattcgcagtttcttaggtttggcaggatactaccggaggttcatcgagaacttctccaaaatcactcgacccatgacacagttgttgaagaaagaggagaaatttgtgtggagcccgcaatgcgagaaggcgttcaaaactctcaaagaaaagctggtttcctcgccagtgttaatcttgctggatactcgcaaggacttcatggacggtcatgtggtggcctatgcctcacgccagctacggcctcatgaaggcaactaccctacccatgatttggagttagccgcggtggttcatgctctaaaaatctggcggcactatctcattgggaatcgctgtgaaatatatactgatcataagagtttgaaatacatcttcacccagtcggatctgaatcttcggcagaggagatggttagaactcatcaaggattatgatgtgggaattcactatcatcctggtaaggccaacgtggtcgccgacgctctaagtcgaaaaagccattgcaacactcttaacgtccgtggcattccacccgaacttaatcaacagatggaagccctgaatctaagcatagtgggtcgcggattcttggctgcgttggaagccaagcccaccttgctcgatcaaatccgcgaggctcagaagaacgatccggacatgcatggactcctcaagaatatgaaacagggtaaagccactggtttcacagaggatgaacacggaaccctatggaacggaaatcgggtatgcgttccagataacagagaacttaaacagctgatacttcaggaagctcacgaaagcccttattccatccaccctggcagtacgaagatgtacttagacttgaaggagaaatactggtgggttagtatgaagcgggaaattgtagagttcgtggccctttatgatgtgtgccagcgtgtcaaggcagagcaccaacgaccggccggacttctccaacctctccaagtaccagaatggaaatgggatgaaattgggatggatttcatcaccggacttccaaaaacccaaggtggatatgattctatatgggtagttgtggatcgattaaccaaggtagctcgatttattcctgtgaaggccacctatggagggaacaaactagctgagctctactttgctaggatcgtgagtctccatggcgttcctaagaaaattgtatccgataggggaagccaattcacctctcacttttggaagaagctccaagaagagctgggcacccgattaaatttcagcaccgcgtatcacccgcagacagatggacagaccgagcgtctaaatcagatcctagaagatatgcttcgcgcatgtgtcctagatttcgggaagacctgggataagagtctcccctatgccgagttctcctacaataacagctaccaagccagcatacaaatggcaccttatgaagcattgtatgggcgcaaatgtcggacaccactattgtgggaccaagttggggaaagccaagtgttcgggaccgatatcctgagagaagctaaagctaaagtcagaaccattcgggataatctaaaggtggcccagtctcggcagaagagttatgcagacaaccgacgccgtgacctagaattcgcagtggatgactttgtgtatcttcgggtcacgcccctgcgaggtgtacacaggtttcagacaaaggggaagctcgcacctcggttcgtgggtcctttccgtatcattgctcggcgcggagaagtcgcttaccagttggagctgcccgcctccttgggcaacgtgcatgatgtgttccatgtgtcgcaactcaagaaatgtcttcgagtgccatccgagcaggccgactcagagcaaattgaagttcgcgaagacttgacctacgtggagaggccagtgaaaatcctggacaccatggagcgcaggaccaggaaccgggtaatccgtttttgcaaggtccagtggagcaaccacgccgaggaagaagctacttgggagcgtgaagacgagctcctcccgcttcggcatcgcctccttcggcttcgccacgtcctcgccgacctcgtccactcctccgtttcgcccgccgaccgccggaacaccgccgtcctcgtcaacccgagccgcgccgccgccttcctccgctccggtcgtcgtttccgccgtcctcgtcgacccggggtgagccgtggaccgaccctttcgcttcccccttccctcccctctctcgggcgccgctccgccgcgtcggtggtcgccggcggcgaccat

SEQ ID NO: 23133 - DNA, 5595 bp, Oryza sativa
  Clone ID: TF_OsC359_7656
atggatgaagtcgggggtcgatggacattctccagggcaaatgaaggctacacgagctgcggcccgatggccggcagcgtcacccgtcgtggtttggacatgactggcttcgtcctggagctgcggggcatgtgcgtggtcttggggtatccacatggagtggattaccaggccaggccgctcccggagcaggagggtgaggatgcagagcctcacgctgggtgggaggtcactgcagtgatcctctctggctctcccgagcggacttcgctggcagtcaccgcgggtggggattcttctcccgccgcttgccagaacgccgctctcctcgccatcggcaccctccaccagcgctacccggacgagttgcagcactcgccctatcgctaccaccctcgtcgcggaggagcccgcgacttcgccaccttccgagatgctagcttggaggatgacgctaccgtcgtgcatctggcacgcatggtggaggcatacgacgcggctcgtatcgacttccatcagatggtgcgtcgcgggatggttgagaacaacctgaagatcctggagctgcgtcaggagaacctgcagctcaagaaggacctcgacgcattggaggcgcagctgcaccagctcaagatcgcccagggagaggacagccgccccaagcgtcgccgcgtctgccgcagccagaagatcaccgcccggaagagcacctccaggcccgagcttgttcgtcagtccctggcgtggacttgcttcgtcgagacccctcgtgccgagcctgcgcccgtggttccccaggagggggaagcctccggcgttggtagcacggaggatgcgctgttgctcaccttccgccctggcccgtcgcagcggagaaatgttagcaccggtgaaggcaaccaacccgaaggcagcaaccccaacccccaaggcaatccacctccaccaccaccaccagacaccaacgccattctcacccaaatcctcgcccagcaagccaacatgatgaccgctttcctccaccacctccaaaatccgccacaacagaatgctccaccaccacctccacaacactctaagctcgccgagttcctccgcatccgcccacccaccttctctagctccaacaatcccgtggatgcgttggattggttgcatgccgtggggaagaagctggacactgtgcagtgcagtgatgaagagaaagtcatcttcgccgcccatcagctgcaggggcccgcatctctatggtgggaccatttccaggctacgcagccagaggggcaaccgattacttgggcccgcttcaccgccgctttccggagaacccatgtgcccgccggagtcgtggctcttaagaagagggagttccgggagttgaagcaaggcaaccgctccgtgatggagtatttgcacgagttcaacagtctggcccggtacgctccggaggatgtgcgggaagatgaggagaagcaagagaagttcttggcgggaatggaccctgagctgtccgttcgcctagtctctggggactatccggacttccaacgtctggtggacaagagcatccgcttggaggccaagcacaaggagctggagacgcacaagcgccgcttggcgaacttccgcaatcagcagggcgctaaccagagggtccgctacaccaatccctatccagggggatcctcctcgcagcagcaacaacagcagcagcaacctcgctccgcgcctcgacctcaattcgtggtgcgcgtcccacagccgcagcagcagcagagtcagcaagggactcgtgtagcccgtcctcctacgccagttgtgcagcccgttcaaggccgcagggacgctcaaggtcagcagcgtttgtgcttcaactgcttcgagcccgggcactttgcggataaatgcccaaagccaaggcgtcagcaaggccaagcgcctccccgctccaacaacggtggcaaggacgtcattcggggtcgtgtgaaccacgtgacggccgaggacgtgctgacaactccagacgtcatcgttggtacgttcctcgttcattccatcccagctactattttgttcgactctggagcttcccactcgtttatatctgtgccattcgtggggaaaaatcagttgggggtagaaaggcttaggaaccctctactcatcaccacccctggaggggttatgacagcaaagtactatagccctgccgttcctatagaaattcaagggattccttttccctcggatctgattctgctagacaccaagaatttggatgtgattcttgggatgaattggttggctcaattccagggagtagtggattgcgcgagacgcactgtcactctgtaccgaggaccggaacaaccggttgttttctttgcacccccaacctctgtcagaagttcaaaactgcatcaaatagaactatcagaaatccccattgtcagagagttcggagatgtgtttccggaagaactacctggtatgccgcctaagcgagagattgagttccggatagatcttgctcctggaaccactcctctgcacaagcgaccctaccgtatggcagcaaatgaactggccgaagttaagaaacagttggaagagttgaaagaaaaggggtacatacgtccgagtacttccccttggggtgctcctgtgatctttgtggagaagaaagacaagacgaagaggatgtgcgttgactaccgagctctcaatgaggtcaccatcaaaaacaagtaccctcttccccggatcgatgatctgttcgaccagcttaaaggtgccactgtattctccaagattgaccttcgttccggatatcaccaattacgtattcgtgaagaagatattccgaagaccgcattcaccacgcgatatgggctgtatgaattcacggtgatgtcgttcggtctaaccaatgcacctgcattcttcatgaacttgatgaacaaagtgttcatggaatacttggacaagtttgttgtggttttcattgatgacatcctgatatactcacagtcagaagaagaccatcagcaccatctccgtctggtgttgggaaagctgcgggaacatcaattatatgccaagcttagcaagtgtgagttctggttgtccgaagtaaaattcttggggcacgtgatatctgctaaaggagttgccgtggaccccgaaacagtgaccgccgtcactgaatggaagcaacccaagacagtcactcaaattcgcagtttcctgggtttggcaggatattaccggagattcatcgagaacttctccaaaatcgctcgacccatgacacagttgttgaagaaagaagagaaatttgtgtggagcccgcaatgcgagaaggcattccaaactctcaaagaaaagctggtctcctcgccagtgttaatcctgccagatactcgcaaggatttcatggtgtactgtgatgcttcgcgccaaggattggggtgcgtactcatgcaggacggtcatgtggtagcctatgcctcacgccagctacgacctcatgaaggcaactaccctacacatgacttggaattagcagcggtggttcatgctctaaaaatctggcggcactatctcattgggaatcgctgtgaaatatatacagatcataagagtctgaaatacatcttcacccagtcggatctgaaccttcggcaaaggagatggttagaactcatcaaggattacgatgtgggaattcactatcatcctggtaaggccaacgtggtcgccgacgctctaagtcgaaaaagccattgcaacactctcaacgtccgtggcattccacccgagcttaaccaacagatggaagccctgaacctaagcatagttggtcgtgggttcttggccgcgttggaagccaagcctaccttgctcgaccaaatccgcgaggctcagaagaatgatccggacatgcatggactcctcaagaatatgagacagggtaaagccgctggtttcacggaggatgaacacggaaccctatggaacggaaagcgggtatgcgttccagatagcagagaacttaaacagttgatacttcaggaagctcacgaaagtccttattccattcacccgggcagtacgaagatgtacctagacttgaaggagaaatactggtgggttagcatgaagcgggaaattgcagagttcgtggctctatgtgatgtgtgccagcgtgtcaaggcagaacaccaacgaccggccggacttctccaacctctccaagtaccagaatggaaatgggatgaaattgggatggatttcatcaccggacttccaaaaacccaaggtggatatgattctatatgggtaattgtggatcgactaacaaaggtagctcgatttattcctgtgaagaccacctatggagggaacaaactagcggaactctacttcgctaggatcgtgagtctccatggtatccccaagaaaatcgtatctgataggggaagccaattcacctctcacttttggaagaagctccaagaagagctgggtacccgtttaaatttcagcaccgcctatcacccgcagacagatggacagaccgagcgtctaaatcagatcctagaagatatgcttcgcgcgtgtgtcctagattttgggaagacttgggataagagtctcccctatgccgagttctcctacaacaacagctatcaagccagcatacaaatggcaccttatgaagcgttgtacgggcgcaaatgccggacaccgctattgtgggaccaagtcggagaaagccaagtgttcggaactgatatcctgagggaagctgaagctaaagtcagaatcattcgggataatctaaaggtggcacagtcccggcagaaaagttatgcagataaccgacgccgtgacctggaattcgcagtggacgattttgtgtaccttcgggtcacgccattgcgaggggtacacaggtttcagacaaaagggaagctcgcacctcggtatgtgggtcccttccgtatcatcgctcgacgcggagaagtcgcttatcagctagagttgcccgcctccttgggtaacgtgcacgatgtgttccatgtgtcgcaactcaagagatgtcttcgagtgccatccgagcaggccgactcagagcaaattgaagttcgcgaagatttgacctacgtggagaggccagtgaaaatcctggacaccagggagcgcaggaccaggaaccgggtaatccgtttttgcaaggtccagtggagcaaccatgccgaagaagaagctacttgggagcgtgaagacgagctgaaggcagcccatcccgacctcttcgccagttcttccgaatctcggggtcgagattccgtttaaggggggtaggtttgtcgcgtcccaaaacgacccgctcgctctcgccgtcggattcgtgctcgcgccgtgctccgccctctccgccatcgccgccgagttccgttccgccgccgtcgccactccgggcttcctcccggctcggcgccacctccctcggcatcgccgcatccccgtcgaccccgtccgccgctccgcttcgcccgccgaccgtcggagcgtcgtcgtcatcgtcat

SEQ ID NO: 23134 - DNA, 6442 bp, Oryza sativa
  Clone ID: TF_OsC359_7699
aagtggttttataaaaagaaaaatccctaaaagtcctttttcccccttcctctattgggccggctcggcccagctccctccctctctctcctctcccctgaggcccatcggccttcccccgcgcgcgcgtcgctgactagcgggcccgcccgccaccctcgctgacgggtggggcccacccgtcatcccctacctcgtgccgcgcccgccgcctcgcccgtgccctagcgccgccgccgccgcggattccgccgcatcccgccggccccgcgcgcaataaagaggggggaaatcactccccgtgattccctgcctctttccccccacttttccctctctctctctcggattcgtttggaaatcctcccgcaaacttcgccggcgtcattgatggagccgagatcgccgcgccggtttccttcccctccggccgccctctctcactcccaacactatttaagcactccccgtgcctccctcctccgtttccgacccttgccgctttctctccccgtcggaatcgagctcgcgccgtcgtcctctctctccgccgttgccgccgagcttcggttcgccgccgtcgtcgccccggacctcctcccgcttcggcatcgcctccttcggcttcgccgcgtcctcgtcgacctcgtccaccccttcgtttcgcccgccgaccgccggaacgccgccgtcctcgtcgacccgagccgcgccgccgcctctctccgcttcggtcgccgttcccgtcatcgccgtcgacccggggtgagccgaggactgccatctcgcttcccccttccctcccctctctcgggcgccgctccgtcgcgccggaggtcgccgccggtgaccatcggggcgcgggcgcgccgcctcccgtcggccgtgccggcgaggccgccatcgggcgcgccccgcggctgccatgtggggcccggctgtcagccgcccgcgccctcgggtgcggctgacgcgtgggacccacggcgccggccggcgcaagccgtgtgcacccggtccaccgtggacccacctcggccatataaggaccggtgttcgggcctctgttgcaaagcactaccgtacttccacatgtctagtggggcaaatgaaggctacacgagctgcggcccggtagtcgagatgtcatggcacagggccggtgtcctgctgctaggggctcagtcctgcctgcctgtcccgggggttccggccgtagatgggattgggtcgatgtacacctctgatcagagtaaaatctattcgaatagccgcgccctcggttatgggcaagccgagcaatgtacccaaatggccggcagcgtcagccgtcgtggtttggacatgactggcttcgtcttggagctgcggggcatgtgcgtggtcctggggtatccacatggagtggactaccaggccaggccatttccggagcaggagggtgacgatgcagagccccacgctgcttgggaggtcactgcagtgatcctcgctggctctcccgagcggacttcgctgacagtcaccgcgggtggggactccttccccgccgcttgccagagcgccgctctcctcgccatcggcactcttcaccagcgctacccggacgagttgcagcactcgccctaccgctaccaccctcgtcgcggaggagcccgcgactacgccaccttccgggacgctagctcggaggatgacgctaccatcgtgcacctggcgcgcatggtggaggcgtacgacgcggctcgtatcgacttccatcagatggtgcgccgtgggatggtcgagaacaacatgaagatcctggagctgcgtcaggagaacctgcagctcaagaaggacctagatgcggtggaggcgcagctgcatcagctcaagatcgcccagggagagatctgccgccccaagcatcgccgcgtctaccgcagccagaagatcaccgcccgcaagagcacctccaggcccgagcttgttcgtcagtccctggcgtggacttgcttcgtggagacccctcgtgccgagcccgcgcccgtggttccccaggagggggaagcctccggcgttggtagcacggaggatgcgctgttgctcaccttccatggtgatgaccaggagaaatgctgccaccagtgatggcaaccaacccgaagacagcaaccacaacaaccatggcagcccacctccacctcctcctccgcctccaccaccaccaccagataccaacgccattctcacccaaatcctcgcccagcaggccaacatgatgactgcttttctccaccacctccaaaatccgccacaacataatgctccaccaccacctccccaacactctaaactcgccgagttcctccgcatctgtccacctaccttctctagctccaacaaccccgtggatgcgttggattggttgcatgccgtggggaaaaagctagacactgtgcagtgcagcgatgaggagaaagtcatcttcgccgcccaccagctgcagggacccgcatctctatggtgggaccatttccaggctacgcagccagagggacagcctattacatgggctcgcttcaccgccgctttccgaagaacccatgtgcccgccggagtcgtggcccttaagaaaagggaattccgagagttgaagcaaggcaaccgctccgtgatggagtatttgcacgagttcaacaacctggcccgttacgctccggaggatgtgcgggaagatgaggagaagcaagagaagttcctggcaggaatggaccctgagctgtccgtctgtctagtctccggggattatccggatttccaacgtctggtggacaagagcatccgcttggaagccaagcacaaggaactggagtcgcacaagcgccgcttggcgaatttccacaaccaacagggtgctaaccaaagggtccgctacaccaatccctatccagggggatcctcctcgcagcagcaacagcagcagcagcaacctcgctccgcgcctcgacctcaattcgtggtgcgcgtcccacagccgcagcaggagcagaatcaacaagggactcgtgcgccccgtcctcctccaccgactgtgcagcctggtcaaggccgcagggacgctcaaggtccgcagcgtctgtgcttcaactgcttcgagcccgggcactttgcggataaatgcccgaagccaaggcgtcagcaaggccaagcgcctccccgccccaacaacggtggtaaggacgtcattcggggtcgtgtgaaccatgtgacggccgaggacgtgctgacaactccagacgtcatcgttggtacgttcctcattcattccatccctgctaccattttgttcgactctggagcttcccactcatttatatctgtgccattcgtggggagaaatcagttgggggtagaaaggcttagaaaccctctgctcatcaccacccctggaggggttatgacagcaaagtattatagccctgccgtccctatagaaattcaggggattccttttccctcggatctgattctgctaggcaccaagaacttggatgtgatccttgggatgaattggttggctcaattccaaggagtagtggattgcgcgagacgcactgtcactctgtaccgagggccggaacaaccggttgttttctttgcacccccaacctcagtcagaagttcagaacttcatcagatagaactgtcagaaattcccatcgtcagagagttcggagacgtgtttccggaagaactacctggtatgccgcctaagcgagagattgagttccggatagatcttgctccaggaaccgctcctctgtacaagcgaccctaccgtatggcagcaaatgaattggccgaagttaagaaacagttggaagagctgaaagaaaaggggtatatacgtccaagtacttccccctggggtgctcctgtgatttttgtggagaagaaagacaagacgaagaggatgtgcgttgactacagagctctcaatgaagtcaccatcaaaaacaagtaccctcttccccggatcgatgatctgttcaatcagcttaaaggtgccactgtattctccaagattgatcttcgttccggatatcaccaattacgtattcgcgaagaagatattccgaagaccgcattcaccacgcgatacggactgtatgaattcacggtgatgtcgttcggtttaaccaatgctcctgccttcttcatgaacttaatgaacaaagtgttcatggaatacttggataagtttgtggtggttttcattgatgacattctgatatactcacaatcagaggaagaccatcagcaccatctccgtctggtattgggaaagctgcgggaacatcaattgtatgccaaacttagcaagtgtgagttctggttgtccgaagtcaaattcttagggcacgtgatatctgctaaaggagttgctgtggaccccgaaacagtgatcgccgtcaccgattggaagcaacccaagacagtcactcaagttcgcagtttcttaggtttggcaggatactaccgaaggttcatcgagaacttctccaaaatcgctcgacccatgacacagttgttgaagaaagaagagaaatttgtgtggagcccgcaatgcgagaaggcgtttcaaactctcaaagaaaagctggtttcctcgccggtgttaatcttgccagatactcacaaggacttcatggtgtattgtgacgcttcgcgccaaggataggggtgcgtgctcatgcaggatggttatgtggtggcctatgcctcacgccagcttcggcctcatgaaggcaactaccctactcatgatttggagttagccgcggtggttcatgccctaaaaatctggtggcactatctcattgggaatcgctgtgaaatatatactgatcataagagtttgaaatacatcttcactcagtcggatctgaatcttcggcaaaggagatggttagaactcatcaaggattatgatgtgggaattcactatcatcctggtaaggccaacgtggttgccgacgctctaagtcgaaaaggccattgcaacactcttaacgtccgtggcattccacccgaacttaatcaacagatggaagccctgaacctaagcatagttagtcgcggattcttggctgcgctggaagccaagcccaccttgctcgatcaaatccgcgaggctcagaagaatgctccagacatgcatggactcctcaagaatatgaaacagggtaaagccgctggtttcacagaggatgaacacggaaccctatggaacggaaatcgacgtgtcaaggcagagcaccaacgaccggccggacttctccaacctctccaagtacctgaatggaaatgggatgaaattgggatggatttcatcaccggacttccaaaaacccaaggtggatatgattctatatgggtagttgtggatcgattaaccaaggtagctcgattcattcctgtgaagaccacctatagagggaacaaactagccgaactctacttcgctaggatcgtaagtctccatggcgttcctaagaaaatcgtatctgataggggaagccaattcacctctcacttttggaagaagctccaagaagagctgggtacccgattaaacttcagcacagcgtatcacctgcagacagatgggcagaccgagcgtctaaatcagatcctagaagatatgcttcgcgcatgtgtcctggatttcgagaagacctgggataagagtctcccctatgccgagttctcctacaacaacagctatcaagccagcatacaaatggcaccttatgaagcgttgtatgggcgcaaatgccggacaccgctaatgtgggatcaagttggggaaagccaagtgttcgggactgatatcctgagagaagctgaagctaaagtcagaaccattcgggataatctaaaggtggcacggtcccggcagaaaagttatgcagataaccgtcgccgtgacctggaattcgcagtggacgattttgtatatcttcgggtcacgccattgcgaggtgtacacaggtttcggacaaaagggaagctcgcacctcggtatgtgggtcctttccgtatcgttgctcgacgcggagaagtcgcttaccaattggagctgcccgcctccttgggcaacgtgcataatgtgttccatgtgtcgcaactcaagaaatgccttcgagtgccatccgagcaggccgactcagagcaaattgaagttcgcgaagacttgacctacgtggagaggccagtgaagatcctggacaccatggagcgcaggaccaggaaccgggtaatccgtttttgcaaggaccagtggagcaaccacgccgaagaagaagctacctgggagcgcgaagacgagctgaaggcagcccatccagatctcttcgccagttcttccgaatctcggggtcgagattccgtttaa

SEQ ID NO: 23135 - DNA, 6058 bp, Oryza sativa
  Clone ID: TF_OsC359_7713
atggcggccgagatctccgcgccggtttccatctcctccggccgctttccctctctcccgacgctatttaaacgtctcccgtgctctcctcctccgtttccgccgctcgccgctcgctctccccgtcggaatcgtgctcgcgccgtcttcctctctctccgccgtcgccgacaagctccggttcgccgccgccgtcgctccggacttcctcccctctcggcgtcgtctccatcggcttcgccgcgttcccgtcgacctcgtccgcgcctccgtttcgctcgccgaccgccggagcaccgtcgccctcgccgtcccgaaccgcgccgccgccttcctccgtttcggctgccgttcccgtcgtcgccgtcgaccggggtgagccgaagaccgctccattcgcttcccccttccctcctctctctcgggtgccgctccgccgcgccggtggtcgccggcggtgaccatcggggcgcgggcgcgtccccctcccgtcggccgtgccggcgaggccgccttcgggcgcgccccgcggctgccaggtggggcccggccgtcagccgcccgcgcccgcgggtgcggctgacgcgtgggacccacggcgccggccgccgccagccgcgtgctcccggtccaccgtggacccacctcggccatataaggaccggtcttcgggcctctgttgcaaagcactaccgtacttccacatgtctagtggggcaaatgaaggctacacgagctgcggcccggtagtcgagatgtcatggcagagggttggtgccctgctgctagggggctcagtcctgcctgcctgtcccgggtgtcccggccgtagggggattgggtcggatgtacacctctgatcagagtaaaacctattcgaatagccgcgccctcggttatgggcaagccgagcaatgtacccaaatggccggcagcgtcacccgtcgtggtttggacatgactggcttcgtcttggagctgcgaggcatgtgcgtggtcctggggtatccacatggagtggactaccaggccaggccgcttccggatcaggagggtgatgatgcggagccccccgctgcttgggaggtcactgcagtgatcctctctggctctcccgagcggacttcgctggcagtcaccgcgggtggagattccttccccgccgcttgccagaacgccgccctcctcgccatcggcactcttcaccagcgctacccggacgagttgcagcactcgccctaccgctaccaccctcgtcgcggaggagcccgcgactacgccaccttccgggatgctagctcggaggatgacgctaccatcgtgcacctggcgcgcatggtggaggcgtacgacgcggctcgtatcgacttccaccagatggtacgccgcggcatggtcgagaacaacctgaagatcctggagctgcgtcaggagaacctgcagctcaagaaggacctggacgcagtggagacgcagctgcaccagctcaagatcgcccagggagagatctgccgccccaagcgtcgccgtgtctgccgcagccagaagatcaccgcccgcaagagcacctccaggcccgagcttgttcgtcagtccctggcgtggacttgtttcgtcgagacccctcgtgccgagcctgcgcccgtggttccccaggagggggaagcctccggcgttggaagcacggaggatgcgctgttgctcaccttccatggtgatgaccaggagaaatgctgctaccggtgatggcaaccaacccgaaggcagtaaccacaaccaccagggcaacccacctccacctcctcctccgcctccaccaccaccaccagacaccaacgccattctcacccaaatcctcgcccagcaagccaacatgatgactgctttcctccaccacctccaaaatccgccacaacttaatgctccaccaccacccccacaacactctaaactcgccgagttcctccgcatccgtccacccaccttctttagctccaacaaccccgtggatgcgttggattggttgcatgccgtggggaaaaagttagacactgtgcagtgcagcgatgaggagaaagtcatcttcgccgcccaccagctgcagggacccgcatctctatggtgggaccatttccaggctacgcagccagaggggcaacctatcacttgggctcgcttcaccgccgcttttcggagaacccatgtgcccgccggagtcgtggcccttaagaaaagggaattccgagagttgaagcaaggcaaccgctccgtgatggagtatttgcatgagttcaacaatctggcccgttatgccccggaggatgtgcgggaagatgaggagaagcaagagaaattcctggcaggaatggacccagagctgtccgtccgtctagtctctggggactatccggatttccaacgtctggtggacaagagcatccgcttggaagccaagcacaaggaactggagtcgcacaagcgccgcttggcgaatttccgcaatcaacagggtgctaaccaaagggtccgctacaccaatccctatccagggggatcctcctcgcagcagcagccgcagcagcagcagcaacctcgctccgcgcctcgacctcaattcgtggtgcgcatcccacagccgcagcagcagcagaatcaacaagggactcgtgcgccccgtcctcctacgccaactgtgcagcctggtcaaggccgcagggacgctcaaggtcagcagcgtctgtgcttcaactgcttcgagcccgggcactttgcggataaatgcccaaagccaaggcgtcagcaaggccaagcgcctccccgctccaacaacggcgggaaggatgtcattcggggtcgtgtgaaccacgtgacggccgaggacgtgctgacaactccagacgtcatcgttggtacgttcctcgttcattccatccctgctacaattttgttcgactctggagcttcccactcgtttatatctgtgccattcgtggggagaaatcagttgggggtagaaaggcttaggaaccctctgctcatcaccacccctggaggggttatgacagcaaagtactatagccctgccgtccctatagaaattcaggggattccttttccctcggatctgattctgctagacaccaagaacttggatgtgatccttgggatgaattggttggctcaattccaaggagtagtggattgcgcgagacgcactgtcactctgtaccgagggccagaacaaccggttgttttctttgcacccccaacctctgtcagaagttcagaactgcatcagataggactgtcagaaatccccatcgtcagggagttcggagatgtgtttccggaagaactacctggtatgccgcccaagcgagagattgagttccggatagatcttgctccaggaaccactcctctgcataagcgaccctaccgtatggcagcaaatgaactggccgaagtaaagaaacagttggaagagttgaaagaaaaggggtacatacgtccgagtacttccccatggggtgctcctgtgatttttgtagagaagaaagacaagacgaagaggatgtgcgtcgactacagagctctcaatgaagtcaccatcaaaaacaagtaccctcttccccggatcgatgatctgttcgatcaacttaaaggtgccactgtattctccaagattgatcttcgttccggatatcaccaattacgtattcgtgaagaagatattccgaagaccgcattcaccacgcgatacgggctgtatgaattcacggtgatgtcgttcggtttaaccaatgcacctgccttcttcatgaacttaatgaacaaagtgttcatggaatacttggataagtttgttgtggttttcattgatgacattctgatatactcacaatcagaggaagaccatcagcaccatctccgtctggtgttgggaaagttgcgggaacatcaattgtatgccaagcttagcaagtgtgagttctggttgtccgaagtcaaattcttagggcacgtgatatcagctaaaggagttgctgtggaccccgaaacagtgaccgccgtcaccgattggaaacaacccaagacagttactcaagtccgcagtttcttaggtttggcaggatactaccggagattcatcgagaacttctccaagatcgctcgacccatgacacagttgttgaagaaagaagagaaatttgtgtggagcccgcaatgcgagaaggcgtttcaaactctcaaggaaaagctggtttcctcgccggtgttaatcttgccggatactcgcaaggacttcatggtgtattgtgacgcttcgcgccaaggattggggtgcgtcctcatgcaggacggtcatgtggtagcctatgcctcacgtcagctacgacctcatgaaggcaactaccctacccatgatttggaggtagcagcggtggttcatgctctaaaaatctggcggcactatctcattgggaatcgctgtgaaatatatactgatcataagagtttgaaatacatcttcacccagtcggatctgaatcttcggcaaaggagatggttagaactcatcaaagactatgatgtgggaattcactatcatcctggtaaggccaacgtggttgccgacgctctaagtcgaaagagccattgcaacactcttaacgtccgtggcattccacccgagcttaaccaacagatggaagccctgaacctaagcatagttagtcgtggattcttggccgcgttggaagccaagcccaccttgctcgatcaaatccgcgaggctcagaagaacgacccggacatgcatggactcctcaagaatatgaaacagggtaaagccgctggtttcacagaggatgaacacggaaccctatggaacggaaagcggcgtgtcaaggcagagcaccagcgaccggccggacttctccaacctctccaagtaccagaatggaaatgggatgaaattgggatggatttcatcaccggactcccaaaaacccaaggcggatatgattctatatgggtagttgtggatcgattaaccaaggtagctcgatttattcctgtgaagaccacctatggagggaacaagctagcggagctctacttcgctaggatcgtgagtctccatggcgttcccaagaagatcgtatctgataggggaagccaattcacctctcacttttggaagaagctccaagaagagctgggtactcgattgaatttcagcaccgcctatcacccgcagacagatggacagaccgagcgtctaaatcagatcctagaagatatgctccgcgcatgtgtcctatattttgggaagacctgggataagagtctcccctatgccgagttctcctacaataacagttatcaagccagcatacaaatggcaccttatgaagcgttgtacgggcgcaaatgccggacaccactattgtgggaccaagttggagaaagccaagtgttcgggactgatatcctgagagaagctgaagctaaagtcagaatcattcgggataatctaaaggtggcacagtcccggcagaagagttatgcagataaccgtcgccgtgacctggaattcgcagtggatgattttgtgtaccttcgggtcacgccattgcgaggtatacacaggtttcagacgaaagggaagctcgcacctcggtatgtgggtcctttccgtatcattgctcggcgcggagaagtcgcttatcagttggagctgcccgcctccttgggcaacgtgcatgatgtgttccatgtgtcgcaactcaagaaatgtctccgagtgccatccgagcaggccgactcagggcaaattgaagttcgcgaagatttgacctacgtggagaggccagtgaaaatcctggacaccatggagcgcaggaccaggaaccgagtaatccgtttttgcaaggtccaatggagcaaccatgccgaagaagaagctacctgggagcgtgaagacgagctgaaggcagcccatcccgatctcttcgccagttcttccgaatctcggggtcgagattccgtttaa

SEQ ID NO: 23136 - DNA, 5989 bp, Oryza sativa
  Clone ID: TF_OsC359_7732
tcagagcaaattgacgttcgcgaagacttgacctatgtagagagaccagtaaaaatcctggacaccatggagcgcaggaccaagaaccgggtaatccgtttttgcaaggtctaatggagcaaccacgctgaggaagaaggtacttgggaacgtgaagacgagcgcctcccacctcggcgccgcctcctttggcttcaccgcatcctcgccgacctcgtccacctctccgtttcggtcgccaaccgccggagcgccgtcgtccccgtcgacccgatccgcgccaccgcctccctccgctccggccgcctcccccgtcgccgccgtcgccccgggatgagctgtggaccgtcgcctcctttccccttcccttccctctctcggccgccgctccgccgcgccggtggtcgccggctccgaccatcggagcgtgggcgcgccgcctcccgccgaccgcgcaagcatggccgccctcgggcgtgccgagtggctaccgcgtggggcctggctgtcagccgcccgcgcccttgggtgcggctgacgtgtggggcccacagcgccgaccggtgtgagccccggggtgcatggttttgatggtagcacctcggccatatatggaccggtcttcgggcctctgttgcaaagcactaccgtacttccacatgtctagtggggcaaatgaaggctacacgagctgcggcccggtagtcgagatgtcatggcacagggccggtgtcctgctgctaggggctcagtcctgcctgcctgtcccgggggttccggccgtaggtgggattgggtcgatgtacacctctgatcagagtataatttattcgaatagccgcgccctcggttatgggcaagccgagcaatgtacccaaatggccggcagcgtcagccgtcgtggtctggacatgactggtttcgtcttggagctgcggggcatgtgcgttgtcctggggtatccgcatggagtggactaccagggcaggccgcttccggagcaggagggtgacgatgcagagccccacgctgcttgggaggttactgcagtgatcctcactggctctcccgagcggacttcgctggcagtcaccgcgggtggagattctttctccgccgcttgccagagcgccgctctcctcgccatctgcactcttcaccagcgctacccggacgagttgcagcactcgccctaccgctaccaccctcgccgcggaggagcccgcgactacgccaccttccgggatgctagctcggaggatgacgctaccatcatgcacctggcgcgcatggtggaggcgtacgacgcggctcgtatcgacttccatcagatggtgcgccgtgggatggtcgagaacaatctgaagatcctggagctgcgtcaagagaacctgcagctcaagaaagacctagacgcagtggaggcgcagctgcatcagctcaagatcgcccagggagaggtctgccgccccaagcgtcgccgcgtctgccgcagccagaagatcaccgcccgcaagagcacctccaggcccgagcttgttcgtcagtccctggcatggacttgcttcgtcgagaaccctcgtgccgagcccgcgcccgtggttccccaggagggggaagcctccggcgttggcagcacggaagatgcgctgttgctcaccttccatggtgatgaccaggagaagtgctagtaccggtgatggcaaccaacctgaaggcagcaaccacaaccaccagggcagcccacctccacctcctcctccgcctccaccaccaccaccagataccaacgccattctcacccaaatcctcgcccagcaggccaacatgatgattgctttcctccaccacctccaaaatccgccacaacataatgctccaccaccacccccacaacactctaaactcgccgagttcctccgcatccgtccacccaccttctttagctccaacaaccccgtggatgcgttggattggttgcatgccgtggggaaaaagctagacactgtgcagtgcagcgatgaggagaaagtcatcttcgccgcccaccagctgcaggggcccgcatctctatggtgggaccatttccaggctacgcagccagaggggcagcctattacttgggctcgcttcactgccgctttccggagaacccatgtgcccgccggagtcgtggcccttaagaaaagggaattccgagagttgaagcaaggcaaccgctccgtgatggagtatttgcatgagttcaacaacctggcccgttacgccccggaggatgtgcggagatgaggagaagcaagagaagttcttggcaggaatggaccctgagctgtccgtccgtctagtttccggggactatccggatttccaacgtctggtggacaagagcatccgcttggaagccaagcacaaggaactggagtcgcacaagcgccgcttggcgaatttccgcaatcaacagggtgctaaccaaagggtccgctacaccaatccctatccagggggatcgtcctcgcagcagcaacctcgctccgcgccccgacctcaattcgtggtgcgcgtcccacagccgcagcaacagcagagtcagcaagggactcgtgcgccccgtcctcctacaccaactgtgcagcctggtcaaggccgcagggacgctcaaggtccgcagcgtctgtgcttcaactgcttcgagcctgggcactttgcggataaatgcccgaagccgaggcgccagcaaggccaagcgcctccccgctccaacaacggtggtaaggatgtcattcggggtcgtgtgaaccacgtgacggccgaggacgtgctgacaactccagacgtcatcgttggtacgttcctcattcattccatccctgctaccattttgttcgactctggagcatcccactcgttcatatctgtgccattcgtggggagaaatcagttgggggtagaaaggcttaggaaccctctgctcatcaccacccctggaggggttatgacagcaaagtattatagtcctgccgtccctatagaaattcaggggattccttttccctcggatctgattcttctagacaccaagaacttggatgtgatccttgggatgaattggttggctcaattccaaggagtagtggattgcgcgagacgcactgttactctgtaccgagggccggaacaaccggttgttttctttgcacccccaacctctgtcagaagttcagaacttcatcagatagtactgtcagaaatccccatcgtcagggagttcggagatgtgtttccggaagaactacccggtatgccgcccaagcgagagattgagttccggatagatcttgctccaggaaccactcctctgtacaagcgaccctaccgtatggcagcaaatgaactggccgaatttaagaaacagttggaagagttaaaagaaaaggggtatatacgtccgagtacttccccctggggtgctcctgtgatttttgtggagaagaaagacaagacgaagaggatgtgcgttgactacagagctctcaatgaagtcaccatcaaaaacaagtaccctcttccccggatcgatgatctgttcgattagcttaaaagtgccacggtattctccaagatcgatcttcgttccggaaatcaccagttgcgcattagggaagaagatattccgaagaccgcattcaccacgcgatacggactgtatgaattcacggtgatgtcattcggtctaaccaatgctcctgccttcttcatgaacttaatgaacaaagtgttcatggaatacttggataagtttgttgtggtgttcattgatgacattctgatatactcacaatcagaggaagaccatcagcaccatctccgtctggtgttgggaaagttgcgggaacatcaattgtatgccaaacttagcaagtgtgagttctggttgtccgaagtcaaattcttagggcacgtgatatctgctaaaggagttgctatggaccccgaaacagtgaccgccgtcactgattggaagcaacccaagacagtcactcaagtccgcagtttcttaggtttggcgggatactaccggaggttcatcgagaacttctccaaaatcgctcgacccatgacacagttgttgaagaaagaagagaaatttgtgtggagcccgcaatgcgagaaggcgtttcaaactctcaaagaaaagctggtttcctcgctagtgttagtcttgccagatactcgcaaggatttcatggtgtattgtgacgcttcgcgccaaggattggggtgcgtgctcatgcaggacggtcatgtggtggcctatgcctcacgccagctacggcctcatgaaggcaactaccctacccatgatttggagttagccgcggtggttcatgctctaaaaatctggcggcactatctcattgggaatcgctgtgaaatatatactgatcataagagtttgaaatacatcttcacccagtcggatctgaatcttcggcaaaggagatggttagaactcatcaaggattatgatgtgggaattcactatcatcctggtaaggccaacgtggtcgccgacgctctaagtcgaaagagccattgcaacactcttaacgtccgtggcattccacccgaacttaaccaacagatggaagccctgaatctgagcatagtgggtcgtggattcttggctacgctggaagccaagcccaccttgctcgatcaaatccgcgaggctcagaagaacgacccggacatgcgtggactcctcaaaaatatgaaacagggtaaagccgcgggtttcacagaggatgaacacggagccctatggaacggaaatcggcgtgtcaaggcagagcaccaacgaccggccggacttctccaacctctccaagtaccagaatggaaatgggatgaaattgggatggacttcatcaccggacttccaaaaacccaaggtggatatgattctatatgggtagttgtggaccggttaaccaaggtagctcgatttattcctgtgaagaccacctatggagggaacaaactagccgagctctacttcgctaggatcgtgagtctccatggcgttcccaagaaaatcgtatctgataggggaagccaattcacctctcacttttggaagaagctccaagaagagctgggtacccgattaaatttcagcaccgcgtatcacccgcagacagatggacagaccgagcgtctaaatcagatcctagaagatatgcttcgcgcatgtgtcctagatttcgggaagacctgggataagagtctcccctatgccgagttctcctacaataacagctaccaagccagcatacaaatggcaccttatgaagcgttgtatgggcgcaaatgccggacaccgctcttgtgggaccaagttggggaaagtcaagtgttcgggactgatatcctgagagaagctgaagcgaaggtcagaaccattcgggataatttaaaggtggcacagccacggcagaaaagttatgcagataaccgtcgccgtaacctggaattcgcggtggacgattttgtgtaccttcgaatcacgccattgcggggtgtacacaggtttcggacaaaagggaagctcgcacctcggttcgtgggtcctttccgtatcattgctcggcgcggagaagtcgcttaccagttggagctgcccgcctccttgggcaacgtgcatgatgtgttccatgtgtcgcaactcaagaaatgtctccgagtgccatccgagcaggccgactcagagcaaattgaagttcgcgaagacttgacctacgtggagaggccagtgaaaatcctggacaccatggagcgcaggaccaggaaccgggtaatccgtttttgcaaggtccagtggagcaaccacgccgaagaagaagctacctgggagcgtgaagacgagctgaaggcagcccatcccgatctcttcgccagttcttccgaatctcggggtcgagattccgtt

SEQ ID NO: 23137 - DNA, 1669 bp, Oryza sativa
  unsure (1)..(1669): unsure at all n locations
  Clone ID: TF_OsC359_7733
atgcaagaggagtcagatcttaggaagcacgtggacgtcttcaatcagttggttgtggatctaagtaagttagatgtgaaactggatgatgaagacaaggccataattcttctgtgctcgcttccaccgtcgtatgaacatgtggtgactaccctgatgcacggcaaggatactatcaaaactgaggagataatttcgtcgttgcttgcacgagacttgagaagatcaaagaaaaacgaggcaatggaggcttctcaggctgagagtttgctggtcaaggcaaagcatgatcatgaagcgggggtgttgaagagcaaggagaagggggcacggtgctataagtgtcatgagtttggacatataaggaggaattgtccgttactgaagaagaggaaagatggcattgcaagtttagcagctcgtggtgatgattcagatagcagtagtcatgagattcttacagtgtctaacgagaagtctggagaagcgtggatgttggactcagctagttcctatcacgtggattctgataggaagaccatgaatatcatgaaggacggcaagactgttatgattggtgagaggacaagctcatgtttgtacaagttacaagggagtgctgttgcaggtggagtcatggaagatgggtatgctggtgttgctgtgcacgatcctgaaggcggcgagcctggccatagcgagagggagcggctgccggcggcgaccggccgtaagtngttgtaantttgatacgctgtaatatgctggatcgggaggagcgcccataatcagtgccccggagatgtaggcttnggctgaactccgttatcaaatatcgtgcctcggtgttgtaatcatgtttggatntcctatggcgttttttccgcgtttggtttccgatgtcgatttcggggctggttttataacaagtggtatcagagcctacgggagatccatggtagaggaagtcgtggaggcgtacatgaagcttggagatggtcagggccgcggcgtagcggatgcggactcggagtccggtcacagcgcgtgcggcacaattgtagaagacgaagccaagtcgaacacgagaagaggcggcgatgcggactctgatttgaagaaatcggaagcaattggcctcatgaagtcagcaaaggagttccatgggattgctttgcaatcgaacaaatcaccaaggcaaaaggagatcggattgggacctcttggcggcggtgatttgggacgacgagcgtcgagtgccgagtcagtgtctgtgatggatgccgaggccgtggaaaagcaacaacacctagacattagcacttcggggagcccttcgatcaattgtggccaagctatcagtgcaaaaggtgcagctcgggaattcagtctacggatgcgaaaaagtgtggatgttggatttattagctcggttcataagatgataaggaagaaagggttttctccatgtctgctaggaagaattcaattcgcttggcaagatgactgtggtgatatgagagaaggtggagcattgttgcgggtggagtcagaaggaagaaattacagggatactggagtatcttgttacgatgagcctggtggaggcttgtcagggcggctcggtgtgagcggcgaaaaaggatcaactcaagtcctggtacactga

SEQ ID NO: 23138 - DNA, 3783 bp, Oryza sativa
  Clone ID: TF_OsC359_7737
ttaaacggaatctcgaccccgagattcggaagaactggcgaagagatcgggatgggctgccttcagctcgtcttcacgctcccaagtagcttcttcttctgcgtggttgctccactggaccttgcaaaaacggattacccggttcctggtcctgcgttccatggtgtccaggattttcactggcctctccacgtaggtcaaatcttcgcgaacttcaatctgctctgagtcggcctgctcggatggcactcgaagacatttcttgagttgcgacacatgaaacacatcatgcacgttgcccaaggaggcgggcagctccaactggtaagcgacttctccgcgccgagcattgatacggaaaggacccacataccgaggtgcaagcttccctttcgtctgaaacctgtgtacacctcgcaatggcgtgacccgaaggtatacaaaatcgcccactgcgaattccaggtcacggcgacggttatctgcataacttttctgccgggactgtgccacctttagattatcccgaatgattctgactttagcttcagcttctctcaggatatcagtcccgaacacttggctttctccaacttggtcccacaagagcggtgtccggcatttgcgcccgtacaacgcttcataaggtgccatttgtatgctggcttgatagctgttattgtaggagaactcggcataggggagactcttatcccaggtcttcccgaaatctaggacacatgcgcggagcatatcttctaggatctgatttagacgctcggtctgtccatctgtctgcgggtgataggcggtgctgaaattcaatcgagtacccagctcttcttggagcttcttccaaaagtgagaggtgaattggcttcccctatcagatacgattttcttgggaacgccatggagactcacgatcctagcgaagtagagctccgctagcttgttccctccataggtggtcttcacaggaatgaatcgagccaccttggttaatcgatccacaactacccatatagaatcatatccgccttgggtttttggaagtccggtgatgaaatccatcccaatttcatcccatttccattctggcacttggagaggttggaggagtccggccggtcgttggtgttctgccttgacacgctggcacacatcacacagagccacgaactctgcaatttcccgcttcatgctaacccaccagtatttctccttcaagtctaagtacatcttcgtactgccagggtggattgaataaggactttcgtgagcttccagtagtatcaactgtttaagttctctgctatctggaacgcatacccgatttccgttccatagggttccgtgttcatcctccgtgaaaccagcggctttaccctgtttcatattcttgaggagtccatgcatgtccggatcattcttctgagcctcgcggatttgatcgagcaagataggcttggcttctaacgcagccacgaatccacgaccaactatgcttaggttcagggcttccatctgttgattaagttcgggtggaatgccacggacgttaagagtgttgcaatggctctttcgacttagagcgtcggcaaccacgttggccttaccaggatgatagtgaattcccacatcatagtctttgatgagttctaaccatctcctttgccgaagattcagatccgactgggtgaagatgtatttcaaactcttatgatcggtatatatttcacagcgattcccaatgagatagtgccgccagatttttagagcatgaaccaccgcggctaactccaagtcatgtgtagggtagttgccttcatgaggtcgtagctgacgtgaggcataggcccaatccttggcgtgaagcgtcacaatacaccatgaagtcttgcgagtatccggcaagattaacactggcgaggaaaccagcttttccttgagagtttgaaacgcattctcgcattgcgggctccacacaaatttctcttctttcttcaacaactgtgtcatgggtcgagcgattttggagaagttctcgatgaatctccgatagtatccttccaaacctaagaaactgcggacttgagtgactgtcttgggtggcttccaatcagtgacggcggtcaccgtttcggggtccacagcaactcctttagcagatatcacgtgccctaagaatttgacttcggacaaccagaactcacacttgctaagtttggcatacaattgatgttcccgcaactttcccaacaccagacggagatggtgctgatggtcttcctctgattgggagtatatcagaatgtcatcaatgaaaaccacaacaaacttatccaagtattccatgaacactttgttcattaagttcatgaagaaggcaggtgcattggttaaaccgaacgacatcaccgtgaattcatacagtccgtatcgcgtggtgaatgcggtcttcggaatatcttcttcacgaatacgtaattggtgatatccggaacgaagatcgatcttggagaatacagtggcacctttaagctgatcgaacagatcatcgatccggggaagagggtacttgtttttgatggtaacttcattgagagctctgtagtcgacgcacatcctcttcgtcttgtctttcttctctacaaaaatcacaggagcaccccatggggaagtactcggacgtatataccctttttctttcaactcttccaactgtttcttgacttcggccagttcattggctgccatacggtagggtcgcttgtgcagaggagtggttcctggagcaagatctattcggaactcaatctctcgcttgggcggcataccgggtagttcttccggaaacacctctccgaactcccaattcatcccaagaatcacatccaagttcttggtgtctagtagaatcagatccgagggaaaaggaatcccctgaatttctataggaacggcagggctataatactttgctatcataacccctccaggggtggtgatgagcagagggtttctaagcctttctacccccaactgatttttccccacgaatggcacagatataaacgagtgggaagctccagagtcgaacaaaatagtagcagggatggaatgaatgaggaacgtaccaacgatgacgtccggagttgtcagcacgtcctcggccgtcacgtggttcacacgaccccgaatgacatccttcccgccgttgttggggcggggaggcgcttgaccttgctgacgccttggcttcgggcatttatccgcaaagtgcccgggctcgaagcagttgaagcacagacgctgctgaccttgagcgtccctgcggccttgaccaggctgcacagttggcgtaggaggacggggcgcacgagtcccttgctgattctgctgctgctgcgcctgtggtcgtcgccctagtcttccgctgtttctcgtttgtctctgtgtgtgctgggccttgcctcctgggacaaggattaatgcacgcacgtcaggaacgcccgttgggttatttccggtcgtgacaatcttcctcacgtgtaaccacgtgtcgcataccaccacggtatatggacggaagacgtgacatagtttccaacccatcctagccatagacaagagtaccgacccaaccccacctacggccggaacctccgggacaggtaggcaggactgaggccctagcagcaggacaccggccctgtgccatgacatctcgactactgggccgcagcttgtgtagccttcatttgtcctagagatgtccat

SEQ ID NO: 23139 - DNA, 5516 bp, Oryza sativa
  unsure (1)..(5516): unsure at all n locations
  Clone ID: TF_OsC359_7743
atgccctccctaggccaaataaggcttacacancttcggcccggtattcaagttgtcatggcacaagggcgggtgtcttgtgctaggggctcagtcctgcctgcctgtccggggggttccggccgtaggtggaattgagtcggtactcttgtctatggctaggatgggttggaaactatgtcacgtcttccgtctgtacaccgtggtgatggccggcagcgtcagccgtcgtggtctggacatgactggtttcgtcttggagctgcggggcatgtgcgttgtcctggggtatccacatggagtggactaccagggcaggccgcttccggagcaggagggtgacgatgcagagccccacgctgcttgggaggttactgcagtgatcctcactggctctcccgagcggacttcgttggcagtcaccgcgggtggagattctttccccgccgcttgccagaacgccgctctcctcgccatcggcactcttcaccagcgctacccggacgagttgcagcactcgccctaccgctaccaccctcgccgcggaggagcccgcgactacgccatcttccgggatgctagctcggaggatgacgctaccatcatgcacctggcgcgcatggtggaggcgtacgacgcggctcgtatcgacttccatcagatggtgcgccgtgggatggtcgggaacaacatgaagatcctggagctgcgtcaggagaatctgcagctgaagaaggacctagacgcagtagaggcgcagctgcatcagctcaagatcgcccagggagagatggtgaagaccaggagaaatgctgccaccggtgatggcaaccaacccgaaggcagcaaccacaaccaccagggcagcccacctccacctccttctccgcctccaccaccaccaccagacaccaacgccattctcacccaaatcctcgcccagcaggccaacatgatgactgctttcctccaccacctccaaaatccgccacaacagaatgcaccaccaccacccccacaacactctaaactcgccgagttcctccgcatccgtccacctaccttctctagctccaacaaccccgtggatgcgttggattggttgcatgccgtggggaaaaagctagacactgtgcagtgcagcgatgaggagaaagtcatcttcgccgcccaccagctgcaggggcccgcatctttatggacccatgtgcccgccggagtcgtggcccttaagaaaagggaattccgagagttgaagcaaggcaaccgctctgtgatggagtatttgcatgagttgaacaacctggcccggtacgccccggaggatgtacgggaagatgaggaaaagcaggagaagttcttggcaggaatggaccctgagctgtccgtgcgcctagtctccggggactatccggatttccaacgtctgatggacaagagcatccgcttggaagccaagcacaaggaactggagtcgcacaagcgccgcttggcgaatttccgcaatcaacagggtgctaaccaaagggtccgctacaccaatccctatccagggggatcctcctcgcagcagcaacaacagcagcagcaacctcgctccgcgccccgacctcaattcgtgcctggtcaaggccgcagggacgctcaaggtccgcagcgtctgtgcttcaactgcttcgagcccgggcactttgcggataaatgcccaaagccgaggcgccagcaaggccaagcgcctccccgctccaacaacggtggtaaggatgtcattcggggtcgtgtgaaccacgtgacggccgaggacgtgctgacaactccagacgtcatcgttggtacgttcctcattcattccatccctgctaccattttgttcgactctggagcttcccactcgtttatatttgtgccattcgtggggagaaaacagttgggggtagaaaggcttaggaaccctctgctcatcaccacccctggaggggttatgacagcaaagtattatagccatgccgtccctatagaaattcaggggattccttttccctcggatctgattcttctagacaccaagaacttggatgtgatccttaggatgaattggttggctcaattccaaggagtagtggattgcgcgagacgcactgtcactctgtaccgagggccggaacaaccggttgttttctttgcacccccaacctctgtcagtagttcagaacttcatcagataggactgtcagaaatccccatcgtcagagagttcggagacgtgtttccggaagaactacccggtatgccgcccaagcgagagattgagttccggatagatcttgctccaggaaccactcctttgtacaagcgaccctaccgtatggcagcaaatgaactggccgaaaagaaagacaagatgaagaggatgtgcgttgactacagagctctcaatgaagtcaccatcaaaaacaagtaccctcttccccgtatcgatgatatgttcgatcagcttaaaggtgccactgtattctccaagattgatcttcgttccggatatcaccaattacgtattcgtgaagaagacattcctaagaccgcattcaccacgcgatacggactgtatgaattcacagtgatgtcgttcggtttaaccaatgcacctgccttcttcatgaacttaatgaacaaagtgttcatggaatacttggataagtttgtggtggttttcattgatgacattctgatatactcacaatccgaggaagaccatcagcaccatctccgtctggtgttgggaaagttgcgggaacatcaattgtatgccaaacttagcaagtgtgagttctggttgtccgaagtcaaattcttaggacacgtgatatctgctaaaggagttgcggtggaccccgaaacagtgaccgccgtcactgattggaagcaacccaagacagtcactcaagttcgcagtttcttaggtttggcaggatactaccggaggtttatcgagaacttctccaaaatcgctcgacccatgacacagttgttgaagaaagaagagaaatttgtgtggagcccgcaatgcgagaaggcgttccaaactctcaaagaaaagctggtttcctcgccggtgttaatcttgccggatactcgcaaggacttcatggtgtattgtgacgcttcgcgccaaggattggggtgcgtgctcatgcaggacggtcatgtggtggcctatgcctcacgccagctacggcctcatgaaggcaactaccctacccatgatctggaattagccgcggtggttcatgctctaaaaatctggcggcactatctcattgggaatcgctgtgaaatatatactgatcataagagtttgaaatacatcttcacccagtcggatctgaatcttcggcagaggagatggttagaactcatcaaggattatgacgtgggaattcactatcatcctggtaaggccaacgtggttgccgacgctctaagtcgaaaaagccattgcaacactcttgacgtccgtggcattccacccgaacttaaccaacagatggaagccctgaacctaagcatagttggtcgtggattcttggctacgctggaagccaagcccaccttgctcgatcaaatccgcgaggctcagaagaacgacccggacatgcgtggactcctcaagaatatgaaacagggtaaagccgctggtttcacagaggatgaacacggaaccctatggaacggaaatcgggtatgcgttccagatgacagagaacttaaacagctgatacttcaggaagctcacgaaagtccttattccatccaccctggcagtacgaagatgtacttagacttgaaggagaaatactggtgggttagtatgaagcgggaaattgcagagttcgtggccctttgtgatgtgtgccagcgtgtcaaggcagagcaccaacgaccggccggacttctccaacctctccaagtaccagaatggaaatgggatgaaattgggatggatttcatcaccggacttccaaaaacccaaggtggatatgattctatatgggtagttgtggatcgattaaccaaggtagctcggtttattcctgtgaagaccacctatggagggaacaaactagccgagctttacttcgctaggatcgtgagtctccatggcgttcccaagaaaatcgtatctgataggggaagccaattcacctctcacttttggaagaagctccaagaagagttgggtacccgattaaatttcagcaccgcgtatcacccgcagacagatggacagaccgagcgtctaaatcagatcctagaagatatgcttcgcgcatgtgtcctagatttcgggaagacctgggataagagtctcccctatgccgagttctcctacaataacagctaccaacccagtatacaaatggcaccttatgaagcgttgtatgggcgcaaatgccggacaccgctattgtgggaccgagttggggaaagccaagtgttcgggactgatatcctgagagaagctgaagcgaaggtcagaaccattcgggataatctaaaggtggcacagtcccggcagaaaagttatgcagataaccgtcgccgtaacctggaattcgcagtggacgattttgtgtaccttcgggtcacgccattgcggggtgtgcacaggtttcagacaaaggggaagctcgcacctcggtatgtgggtcctttccgtatcattgctcggtgcggagaagtcgcttaccagttggagctgcccgcctccttgggcaacgtgcacgatgtgttccatgtgtcgcaactcaagaaatgtcttcgagtgccatccgagcaggccgactcagagcaaattgaagttcgcgaagacttgacctacgtggagaggccagtgaaaatcctggacacaatggaacgcaggaccaggaaccgggtaatccatttttgcaaggtccagtggagcaaccacgccgaggaagaagctacttgggagcgtgaagacgagcttctcccgtttcggcgtcgccttcttcgggttcgccgcgacctcgccgacctcgtccacctctccgtttcggtcgccgatcgccggaacactgccgtccccgtcggcggcgaccatcggggtgcgggtgcgccgcctcccgtcggctgtgccggcgtggccgccttcgggcgcgtcccgcggccggtccaccgtggaccgtggggctgccgcgtgggccccactcccgtggacccggtccgcgcgccctctcccctcggctcggccatataaggaccggtcttcgggcctctattgcaaagcactaccgtacttccacatgtctagtgggtaaggcttagtttgtggctcagtctggttatcacgctgacgtggccgcctccgggcgcgccgtgtggccgccgggtggggcccggccgtcagccgcccgtgccctcgggtgcagctgacgcgtggggcccacggcgccggaccctcggtcagaccggcctcggaggaatttttctgaaaa

SEQ ID NO: 23140 - DNA, 5142 bp, Oryza sativa; identical to SEQ ID NO: 14238
  Clone ID: TF_OsC359_7797

SEQ ID NO: 23141 - DNA, 5469 bp, Oryza sativa
  Clone ID: TF_OsC359_7801
atgtcatggcacagggccggtgtcctgctgctaggggctcagtcctgcctgcctgtcccggaggttccggccgtaggtgggattgggtcggtactcttgtctatggctaggatgggttggaaactatgtcacgtcttccgtctgtataccgtggtgatggccggcagcgtcacccgtcgtggtttggacatgactggcttcgtcttggagctgcggggcatgtgcgtggtcctggggtatccacatggagtggactaccaggccaggccgcttccggagcaggagggtgacgatgcagagccccacgctggttgggaggtcactgcagtgatcctctctggctctcccgagcggacttcgctggcagtcaccgcgggtggagattccttccccgccgcttgccagagcgccgctctcctcgccatcggcactcttcaccagcgctacccggacgagttgcagcactcgccctaccgctaccaccctcgccgcggaggagcccgcgactacgccaccttccgggatgctagctcagaggatgacgctaccatcgtgcacctggcgcgcatggtggaggcgtacgacgcggctcgtatcgacttccatcagatggtgcgccgtgggatggtcgagaacaacatgaagatcctggagctgcgtcaagagaacctgcagctcaagaaggacctagacgcggtggaggcgcagctgcatcagctcaagatcgcccagggagaggtctgccgccccaagcgccgccgtgtctgccgcagccagaagatcaccgcccgcaagagcacctccaggcccgagcttgttcgtcagtccctggcgtggacttgcttcgtcgagatccctcgtgccgagcccgcgcccgtggttccccaggagggggaagcctccggcgttggtagcacggaggatgcgctgttgctcaccttccgtcctggcccgtcgcagcggagaagtgctaacaccggtgatggcaaccaacctgaaggcagcaaccaccaccaccagggcagcccacctccacctcctcctccgcctccaccaccaccaccagacaccaacgccattctcacccaaatcctcgcccagcaggccaacatgatgactgctttcctccaccacctccaaaatccgccacaacataatgctccaccaccacccccacaacactctaaactcgccgagttcctccgcatccgcccacctaccttctctagctccaacaaccccgtggacgcgttggattggttgcatgccgtggggaaaaagctagacactgtgcagtgcagcgatgaggagaaagtcatcttcgccgcccaccagctgcagggacccgcatctctatggtgggaccatttccaggctacgcagccagaagggcaacctattacttgggcccgtttcaccgccgctttccggagaacccatgtgcccgccggagtcgtggcccttaagaaaagagaattccgagagttgaagcaaggcaaccgctccgtgatggagtatttgcatgagttcaacaacttggcccgttacgccccggaggatgtgcgggaagatgaggagaagcaagagaagttcttggcaggaatggaccctgagctgtccgtccgtctagtctccggggactatccggatttccaacgtctagtggacaagagcatccgcttggaagccaagcacaaggaactggagtcgcacaagcgccgcttggcgaatttccgcaatcaacagggtgctaaccaaagggtccgctacaccaatccctatccagggggatcctcctcgcaacagcaacaacagcagcagcaacctcgctccgcgcctcgacctcaattcgtggtgcgcgtcccacagccgcagcagcagcagaatcaacaagggactcgtgcgccccgtcctcctacgccaactgtgcagcctggtcaaggccgcagggacgctcaaggtccgcagcgtctgtgcttcaactgcttcgagcccgggcactttgcggataaatgcccaaagccgaggcgtcagcaaggccaagcgcctccccgctccaacaacggtgggaaggatgtcattcggggtcgggtgaaccacgtgacggccgaggacgtgctgacaactccagacgtcatcgttggtacgttcctcattcattccatccctgctaccattctgttcgactctggagcatcccactcgtttatatctgtgccattcgtggggagaaatcagttgggggtagaaaggcttaggaaccctctgctcatcaccacccctggaggggttatgacagcaaagtattatagtcctgccgtccctatagaaattcaggggattcctttttcctcggatctgattctgctagacaccaagaacttggatgtgatccttgggatgaattggttggctcaattccaaggagtagtggattgtgcgagacgcactgtcactctgtaccgagggccggaacaaccggttgttttctttgcacccccaacctctgtcagtagttcagaacttcatcagataggactgtcagaaatccccatcgtcagagagttcggagacgtgtttccggaagaactacccggtatgccgcccaaacgagagattgagttccggatagatcttgctccaggaaccactcctctgtacaagcgaccctaccgtatggcagcaaatgaactggccgaagtcaagaaacagttggaagagttgaaagaaaaggggtatatacgtccgagtacttccccctggggtgctcctgtgatttttgtggagaagaaagacaagacgaagaggatgtgcgttgactacagagctctcaatgaagtcaccatcaaaaacaagtaccctcttccccggatcgatgatctgttcgatcagcttaaaggtgccactgtattctccaagattgatcttcgttccggatatcaccaattacgtattcgtgaagaagatattccgaagaccgcattcaccacgcgatacggactgtatgaattcacagtgatgtcattcggtttaaccaacgcacctgccttcttcatgaacttaatgaacaaagtgttcatggaatacttggataagtttgttgtggttttcattgatgacattctgatatactcacaatccgaggaagaccatcagtaccatctccgtctggtgttgggaaagttgcgggaacatcaattgtatgccaaacttagcaagtgtgagttctggttgtccgaagtcaaattcttagggcacgtgatatctgctaaaggagttgctgtggaccccgaaacagtgaccgccgtcactgattggaagcaacccaagacagtcactcaagtccgcagtttcttaggtttggcaggatactaccggaggttcatcgagaacttctccaaaatcgctcgacccatgacacagttgttgaagaaagaagagaaatttgtgtggagcccgcaatgcgagaaggcgttcaaaactctcaaagaaaagctggtttcctcgccagtgttaatcttgccggatacttgcaaggatttcatggtgtattgtgatgcttcgcgccaaggattggggtgcgtgctcatgcaggatggtcatgtggtggcctatgcctcacgccagctacggcctcatgaaggcaactaccctacccatgatttggagttagatgcggtggttcatgctctaaaaatctggcggcactatctcattgggaatcgctgtgaaatatatactgatcataagagtttgaaatacatcttcactcagtccgacctgaatcttcggcaaaggagatggttagaactcatcaaggattatgatgtgggaattcactatcatcctggtaaggccaacgtggtcgccgacgctctaagtcgaaaaagccattgcaacactcttaacgtccgtggcattccactcgaacttagtcaacagatggaagccctgaacctaagcatagttggtcgcggattcttggctgcgttggaagccaagcctaccttgctcgatcaaatccgcgaggctcagaagaatgatccggacatgcatggactcctcaagaatatgaaacaaggtaaagccgctggtttcacagaggatgaacacggaaccctatggaacggaaatcgagtatgcgttccagataacagagaacttaaacagctgatactacaggaagctcacgaaagtccttattccatccaccctggcagtacgaagatgtacttagacttgaaggagaaatactggtgggttagtatgaagcgggaaattgcagagttcgtggccctttgtgatgtgtgccagcgtgtcaaggcagagcaccaacgaccggccggacttctccaacctctccaagtacctgaatggaaatgggatgaaattgggatggatttcatcaccggacttcgaaagacccaaggtggatatgattctatatgggtagttgtggatcgattaaccaaggtagctcgatttattcctgtgaagaccacctatggagggaacaaactagccgagctctacttcgctaggatcgtgagtctccatggcgttcccaagaaaatcgtatctgataggggaagccaattcacctctcacttttggaagaagcttcaagaagagctgggtacccggttaaacttcagcaccgcataccacccgcagacagatgggcagaccgagcgtctaaatcagatcctagaagatatgcttcgcgcgtgtgtcctggatttcgggaagacctgggataagagtctcccctatgccgagttctcctacaataacagctatcaagccagcatacaaatggcaccttatgaagcgttgtatgggcgcaaatgccggacaccgctcttgtgggatcaagttggggaaagccaagtgttcgggactgatatcctgagagaagctgaagctaaagtcagaaccattcgggataatctaaaggtggcacagtcccggcagaaaagttatgcagataaccgtcgccgtgacctggaattcgcagtggacgattttgtataccttcgggtcacgccattgcggggtgtacacaggtttcggacaaaagggaagctcgcacctcggtatgtgggtcctttccgtatcgttgcccgacgcggagaagtcgcttaccaattggagctgcccgcctccttgggcaacgtgcacgatgtgttccatgtgtcgcaactcaagaaatgccttcgagtgccatccgagcaggccgactcagagcaaattgaagttcgcgaagacttgacctacgtggagaggccagtgaaaatcctggacaccatggagcgcaggaccaggaaccgggtaatccgtttttgcaaggtccagtggagcaaccacgtcgaagaagaagctacctgggagcgtgaagacgagctgaaggcagcccatcccgatctcttcgccagttcttccgaatctcggggtcgagattccgtttaa

SEQ ID NO: 23142 - DNA, 7187 bp, Oryza sativa
  Clone ID: TF_OsC359_7868
cgaggatctggagttccagatacctcagggaaccgtcgccacgctcgacctggggggagggggggcttgcgctcacacctcccgccgaggcttcaagccataaggcgagagcttctagccaccgtcccaacccacgaagcggctcggaaggcgcactggtcggaggtgaagctcacctttgaccagagcgaccatttgacagtgctcgctcgaggtgggaagttggccctcgtggtctccccgaccattcacaacgttaggatgaagcgagtcctggttgacgggggggccagcttgagcatcatctccccagccgccttcaatgcgctcaaggccccggggatgaagctccagccgtcgctgccgatcatcggcgtgactccgggacacacgtggcccctcggccacgtcgagctcccgataaccttcggcgactccaccaacttccgtaccgagcggatcgacttcgatgtggcggacctcaatctgccctacaacgcggtcctgggcagacctgcgttggtgaagttcatggccgccacccactacgcctacctccagatgaagataccgggccctagtggtcccatcaccgtctttggcgatgtcaaagtcaccctcgcctgcgcggagcagcgcgccgacaacctggcagtggccacggagccacaggccccggaggcctccgcgtcccacgcctccaagaagcgcctcacctcggctgacgaggaaagcgcgctcgtctccttcctgcgggcaaactccgacgtcttcgaatggaagccgtcggacatgcccggggtccctagggaggtgatcgagcaccgcctcgccatgcggctggatgcgcgacccgtccggcaaaaagtgcggtgtcaagccccggagcggcaggccttcatccgagaggaagtggcgcggctcctggaggctgactttatccgcgaggttatccatccggagtggttggcgaacccggtggtcgtcccgaaggccaacggtaagctccggatgtgcattgactacacggacctcaacaaggcatgccctaaagatcccttccctttaccacgcatagatcagatagtcgactccactgcgggatttactctcccgaaatcttcgccggcgcatcaatggagcccgagatcgccgcgccgatttccttcccctccggccgccctctctcactcccaaccctatttaaacgctccccgtgcctccctcctccgtttccgccgtccgccgctcgctctccccgtcggattcgagctcgcgccgtcgtcctctctctccgccgtcgccgccgagctccggttcgccgccgtcgtcgccccggacctcctcccgcttcggcgtcgcctccttcggcttcgccgcgttctcgtcgacctcgtccactcctccgtttcgcccgccgaccgccggagcaccatcgtcctcgtcgacccgagccgcgccgccgcctctctccgcttcggtcgccgttcccgtcgtcgccgtcaacccggggtgagccgaggaccgccatttcgtttcccccttccctcccctctctcggccgccgctccgccgtgcctatggccgcctatttatttaaattcccgcgttatcactgttttatttagccatgcctatttacctttgttacgaccttattattgttattgttattattaccttgttcaccctagaaccaacaaaaccccaactagtgaacactctactcatggtactggttttaggctgggctcggggtgcatggttttgatagtagcacctcggccatataaggaccggtcttcgggcctctgttgcaaagcactaccgtacttccacatgtctagtggggcaaatgaaggatacacgagctgcggcccggtagtcgagatgtcatggcacagggccggtgtcctgctgctaggggctcagtcctgcctgcctgtcccgggtgttccggccgtaggtgggattgggtcgatgtacacctctgatcagagtataatctattcgaatagccgcgccctcggttatgggcaagccgagcaatgtacccaaatggccggcagcgtcacccgtcgtggtttggacatgactggtttcgtcttggagctgcggggcatgtgcgtggtcctggggtatccacatggagtggactaccaggccaggccgcttccggagcaggagggggacgatgcagagccccacgctgcttgggaggtcactgcagtgatcctcgctggctctcccgagcggacttcgctgacagtcaccgcgggtggagactctttccccgccgcctgccagagcgccgctctcctcgccatcggcactcttcaccagcgctacccggacgagttgcagcactcgccctaccgctaccaccctcgtcgcggaggagcccgcgaccacgccaccttccgggatgctagctcggaggatgacgctaccatcgtgcacttggcgcgcatggtggaggcgtacgacgcggctcgtatcgacttccatcagatggtgcgccgtgggatggtcgagaacaacttgaagatcctggagctgcgtcaggagaacctgcagctcaagaaggacctagacgcggtggaggcgcagctgcatcagctcaagatcgcccagggagagatctgccgccccaagcgtcgccgcgtctgccgcagccagaagatcaccgcccgcaagagcacctccaggcctgagcttgttcgttagtccctggcgtggacttgcttcgtcgagacccctcgtgccgagcccgcgcccgtggttccccaggagggggaagcctccggcgttggtagcacggaggatgcgctgttgctcaccttccatggtgatgaccaggagaaatgctaacaccggtgatggcaaccaacctgaaggcagcaaccacaaccatcagggcaacccacctccacctcctcccccgcctccacccccaccaccagataccaacgccattctcacccaaatcctcgcccagcaggccaacatgatgactgctttcctccaccacctccaaaatccgccacaacttaatcctccaccaccacccccacaacactctaaactcgccgagtttctccgtatccgcccacctaccttctctagctccaacaaccccgtggatgcgttggattggttgcatgccgtggggaaaaagctagacactgtgcagtgcagcgatgaggagaaagtcatcttcgccgcccaccagctgcatggacccgcatctctatggtgggaccatttccaggctatgcagccggagggacagcctgttacttgggcccgcttcaccgccgctttccggagaacccatgtgcccgccggagtcgtggcccttaagaaaagagaattccgagagttgaagcaaggcaaccgctccgtgatggagtatttgcacgagttcaacaacctggcccgttacactccggaggatgtgcggaaagatgaggagaagcaagaaaagttcctggcaggaatggaccctgagctgtccgtccgtctagtctctggggactatccggatttccaacgtctggtggacaagagcatccgcttggaagccaagcacaaggaactggagtcgcacaagcgccgcttggcgaatttccgcaaccaacagggtgctaaccaaagggtccgctacaccaatccctatccagggggatcctcctcgcagcagcaacaacagcagcagcaacctcgctccgcgcctcgacctcaattcgtggtgcgcgtcccacagccgcagcagcaacagaatcaacaagggactcgagcgccccgtcctcctacgccaactgtgcagcctggtcaaggccgcagggacgcttcaggtccgcagcgtctgtgcttcaactgcttcgagcccgggcactttgcggataaatgcccgaagccaaggcgtcagcaaggccaagcgcctccccgccccaacaacggtggtaaggacgtcagtcggggtcgtgtgaaccatgtgacggccgaggacgtgctgacaactccagacgtcatcgttggtacgttcctcattcattccatccctgctaccattttgttcgtctctggagcttcccactcgtttatatctgtgccattcgtggggagaaatcagttgggggtacaatgtcttagaaaccctctgctcatctaccacccgtggaggggttatgccagcaaagtattatagccctgccgtccctatagaaattcaggggattccttttccctcggatctgatcctgctagacaccaagattttggatgtgatccttgggatgaattggttggctcaattccaaggagtagtggattgcgcgagacgcactgtcactctgtaccgagggccggaacaaccggttgttttctttgcacccccaacctcagtcagaagttcagaacttcatcagataggactgtcagaaatccccatcgtcagagagttcggagacgtgtttccggaagaactacctggtatgccgcctaaacgagagattgagttccggatagatcttgctccaggaaccactcctctgtacaagcgaccctaccgtatggcagcaaatgaactggccggagttaagaaacagttggaagagctgaaagaaaaggggtatatacgtccgagtacttccccctggggtgctcctgtgatttttgtggagaagaaagacaagacgaagaggatgtgcgttgactacagagctctcaatgaagtcaccatcaaaaacaagtaccctcttccccggatcgacgatctgttcgatcagcttaaaggtgccactgtattctccaagattgatcttcgttccggatatcaccaattacgtattcgcgaagaagatattccgaagaccgcattcaccacgcgatacggactgtttgaattcacggtgatgtcgttcggtttaaccaatgcccctgccttcttcatgaacttaatgaacaaagtgttcatggaatacttggataagtttgtggtggttttcattgatgacattctgatatactcacaatcagaggaagaccatcagcaccatctccgtctggtattgggaaagttgcgggaacatcaattatatgccaaacttagcaagtgtgagttctggttgtccgaagtcaaattcttagggcacgtgatatctgctaaaggagttgctgtggaccccgaaacagtgaccgccgtcaccgattggaagcaacccaagacagtcactcaagttcgcagtttcttaggtttggcaggatactaccggaggttcatcgagaacttctccaaaatcgctcgacccatgacacagttgttgaagaaagaagagaaatttgtgtggagcccgcaatgcgagaaggcgtttcaaactctcaaagaaaagttggtttcctcgccagtgttaatcttgccggatactcgcaaggacttcatggtgtattgtgacgcttcgcgccaaggattggggtgcgtactcatgcaggatggtcatgtggtggcctatgcctcacgccagctacggcctcatgaaggcaactaccctacccatgatttggagttagcagcggtggttcatgctctaaaaatctggcggcattatctcattgggaatcgctgtgaaatatatactgatcataagagtttgaaatacatcttcacccagtcggatctgaatcttcggcaaaggagatggttagaactcatcaaagattatgatgtgggaattcactatcatcctggtaaggccaacgtggttgccgacgctctaagtcggaaaagccactgcaacactcttaacgtccgtggcattccactcgaacttaatcaacagatggaagccctgaacctaagcatagttggtcgcggattcttgactacgttggaagccaagcccaccttgctcgatcaaatccgcgaggctcagaagaatgatccagacatgcatggactcctcaagaatatgaaacagggtaaagccgctggtttcacagaggatgaacacggaaccctatggaacggaaatcgacgtgtcaaggcagagcaccaacgaccggccggacttctccaacctctccaagtacctgaatggaaatgggatgaaattgggatggatttcatcaccggacttccaaaaacccaaggtggatatgattctatatgggtagttgtggatcgattaaccaaggtagctcgattcattcctgtgaagaccacctatggagggaacaaactagccgagctctacttcgctaggatcgtaagtctccatggcgttcccaagaaaatcgtatctgataggggaagccaattcacctctcacttttggaagaagctccaagaagagctgggtacccgattaaacttcagcaccgcgtatcacccgcagacagatgggcagaccgagcgtctaaatcagatcctagaagatatgcttcgcgcatgtgtcctagatttcgggaagacctgggataagagtctcccctatgccgagttctcctacaataacagctaccaagccagcatacaaatggcgccttatgaagcgttgtatgggcgcaaatgccggacaccgctcctgtgggaccaagttggggaaagccaagtgttcgggactgatatcctgagagaagctgaagcgaaagtcagaaccattagggataatctaaaggtggcacagtcccagcagaaaagttatgcagataaccgtcgccgtgacctggaattcgcagtggatgattttgtgtaccttcgggtcacgccattgcggggtgtacacaggtttcagacaaaggggaagctcgcacctcggtatgtgggtcctttccgtatcgttgctcgacgcggagaagtcgcttaccagttggagctgcccgcctccttgggcaacgtgcatgatgtgttccatgtgtcgcaactcaagaaatgccttctagtgccatccgagcaggccgactcagagcaaattgaagttcgcgaagacttgacctacgtggagaggccagtgaagatcctggacaccatggagcgcaggaccaggaaccgggtaatccgtttttgcaaggtccagtggagcaaccacgccgaagaagaagctacctgggagcgcgaagacgagctgaaggcagcccatcccgacctcttcgacagttcttccgaatctcggggtcgagattccgtt

SEQ ID NO: 23143 - DNA, 5466 bp, Oryza sativa; identical to SEQ ID NO: 14199
  Clone ID: TF_OsC359_7872

SEQ ID NO: 23144 - DNA, 3631 bp, Oryza sativa
  Clone ID: TF_OsC359_7881
atggggaaaaagttagacaccgtgcagtgcaacgatgaggagaaagtcatctttgccgctcaccaactgcaggggcccgcatctctatggtgggaccactaccaggctacgcagccagaaggacagcctattacttgggcccgtttcaccgccgctttccggaggacccatgtgcccgccggagtcatggcccttaagaaaagggaattccgagagttgaagcaaggcaaccgctctgtgatggagtatttgcatgagtttaacaacctggccaggtacgccccggaggatgttcgtgaagatgaggagaagcaagagaagttcttggcaggaatggaccctgagctgtccgtgcgtctggtctccggggactatctggatttccagcgtttggtggacaagagcatccgcttggaagccaagcacaaggaactggagtcgcacaagcgtcgcctgacgaatttccgcaaccaacagggggctaaccaaaggatccgctacaccaatccctatccagggggatcctcctcgcagcagcagcaacagcagcagcaacctcgctccgtgccccaacctcaattcgtggatccccgagctctcctctacccgccacctccctcgccttcgtctctcgccgtcggaagcgccctagcgtcgtgtgacctagcgccgccgtcgtcgccgctccagctgtgcgccgccgccgttccggtcgtcgtcgtcgctcgggaagatcgccattgtgatcgccaagtcgccgccgtcctcgtccaccgcttcgccaccgccggagaccgccggagcaccgtcgccgccgtcgacccgatctccgccgccgcttcttcctcgtcgccggcgccgtccgttgcttttctgccgccgttttggtcaccggtaagttcgccgcaccgcgctctacgtcctggtgccctccgttctcgtcgtcgcgccgtcgttcgccggcgagcttgcgctcccgagctgccgccggtgctgacgtcatcgctgccgtcatcgctgacgtcatcgttgccgttccccagcaccagactgagaagtggcggagataagcccacgggggtcgctggggagtccatgcctctggtttttgaggggggtgattatgatccaggaatggtgcactgtggtggattagtcagcaagggacccgtgcgccccatcctcctacgccagccgtgcagcctggacaaggccgcagagacgttcaatgtcagcagcgtctgtgcttcaactgcttcgagcccgggcactttgcggataaatgcccaaagccgaggcgccagcaaggccaagcgcctccccgccccaacaacggtgataggactgtcggaaaccctcatcgtcagtgagttcggagatgtgtttccggaagaactacctggtatgccgcccaagcgagagattgagttccggatagatcttgctcgaggaaccactcctctgtacaagcgaccctaccgcatggcagcaaatgaactagtcgaagtcaagaaacagttggaagagttgaaagaaaagggagctctcaatgaagttactatcaaaaataagtaccctcttccccggatcgatgatctgttcgatcagcttaaaggtgccactgtcttttcaaaaatcgatcttcgctccggatatcaccagttgcgtattcgtgaagaagatatcccgaagaccgcgttcaccacgcgatacgggctgtatgaattcacggtgatgtcgttcggtctgactaatgctcctgccttcttcatgaacttaatgaacaaagtgttcatggaatacttggataagtttgttgtggtcttcatcgacgacatcctgttgtccgaagtcaagttcttagggcacgtgatctctgctaaaggagttgccgtggatcctgaaacagtgaccgccgtcactgattggaagcaacccaagacagtcactcaggttcgcagctttttgggtttggccgggtactaccgaagattcatcgagaatttctccaaaattgccagacccatgacgcagttgctgaagaaggaagaaaaaattgtgtggagcccgcaatgcgagaaggcgttccaaactctcaaagagaagctggaaggtcatgtggtagcctatgcctcccggcagcttcggcctcatgaaggcaactaccctaccaatgatttggtgttggccgctgtgagaagatggttagagctcatcaaggattatgatgtgggaatccactatcaccctggtaaggccaacgtggtcgccgacgctctaagtcgaaaaagccattgcaacactcttggcgtccgtgacattccatcggaacttaatcaacagatggaagccctgaacctaaacatcgttagccatggattcttggctacgctggaagccaagcctaccttgctcgatcaaatccgcgaggctcagaagaatgatccagatatgcatgggatcctcaagaatatgaaacaagagttcgtggccctttgtgatgtgtgccagcgtgtcaaggcggagcaccagcgaccggccggacttctccaacctctacaagtaccagaatggaaatgggatgaaattgggatggatttcatcaccggacttccaaaaacccaaggcggttatgactctatatgggtagtcgtggatcgactaaccaaggtagcacggtttattcctgtgaagaccacctatggagggagcaaactagccgaactctacttcgctaggatcgtgagtctccatggcgttcctaagaaaattgtatctgatagaggaagccaattcacctctcacttctggaagaagctccaagaagagttgggtacccgcttaaatttcagcaccgcgtatcacccacagacagatggacagaccgagcgtctaaatcagatcctagaagatatgctccgtgcctgtgttctagattttgggaagacctgggataagagtctcccctatgccgagttctcctacaataacagctaccaagccagcatacaaatggcaccctatgaagcgttgtatggacgcaaatgccggacaccgctattgtgggaccaagttggggaaagccaagtgttcgggaccgatatcttgagagaagctgaagcgaaagtcagaaccattcgggagaatctaaaggtggcccagtctcggcagaagagttatgcagataaccgacgccgtaacctggaattcgcagtggatgactttgtgtatctccgggtcacgccgctgcgaggcgtacgctggtttcagacgaaagggaagctcgcacctcggtttgtgggtcctttccgtatcattgctcgacgcggagaagtcgcttaccagttggagctgcccgcctccttgggcaacgtgcatgatgtgttccatgtgtcgcaactcaagaaatgccttcgagtgccgtccgagcaggccgactcagagcagattgaagttcgcgaagacttgacctacgtagagagactagtgaaaatcctggacaacatggagcgcaggaccaggaaccgggtaatccgtttttgcaaggtccaatggagcaaccacgccgaggaagaagctacttgggagcgtgaagacgagctgaaggcagcccatcccgatctcttcgcca

SEQ ID NO: 23145 - DNA, 5954 bp, Oryza sativa
  Clone ID: TF_OsC359_7928
atggcggccggatcccccgcgccggtttccttccccgccgaccgccctctctccctcccgaccctatttaaaccctccccgctccttcctcgtccgtttctgccacttgccgcaccgtttccccgccagaatcgagctcgcgccgtcgtcctctctctcctccgtcaccgacgacctccggctggccctctccgctcgccgggaccgcctcccgcctcggcgtcgtctcctcaagcttcgccgtgccgtcgctgaccctgtccaccacctcgccgagctcgccgaccgccgaagcgccatagtccccgtccacccgagccgcgccaccgccttcctccgctccggacgcctcctttgccgtcgccgtcgacccggggtgagacgtggaccaccgcctctttcccccttcccttcccctctcttggccgccgctccgctgtgcctatggccgccgccggcgaccataggggcgcaggcgccgcctcccgccggccgcgccgacgtggccgcctccgggcgcgccgtgtggccgtcgcgtggggcccggccgttagccgcccgtgccctcgggtgcggctgatgcgtggggcctacggcgccggccggtgtgagcccgggtgcgcccggtccaccgtggacccacctcggccacataaggaccggtctttgggcctctgttgcaaagcactaccgtacttccacatgtctagtgggaggtaggagaagggcccgacatgtgggccccacatgtcggtgacccgcgtgagaggaggggcggcggcggcttgggccgaatttatgcttccgcttgttaaactctatattgtatcaacttttggtgtaccttgcctcctgggacaaggaataatacacgcacgtaaggaacgcccgttgggttatttccggtcgtgacaatgtttgtagatggccggcaacatcaaccgtcatggcctggatctgactggctttgttttggagctgcggggcatgtttgttgtcctgggatatccgcatggagtggactaccagggcaagaagcttccggagcaggatggtgacgatgcagagccccgcgccgcttgggaggtcactgcggtgatcctcaccggctctcccgagaggacttcgttggcagtcaccgcgggtggagattctttccccgccgcttgccagaacgccgcgctcctcgtcatcggcactcttcaccagcgctatttggacgagttgcggcactcgccctacagctaccaccctcgttgaggagcctgcgactacgccaccttcagggatgctagctcggaggatgacgctaccatcatgcacctggcgcgcatggtggaggcgtacgatgcggcccgtatcgacttccatcatatagtgcgccgtgggttggtcgagaacaacatgaagatcctggagctgcgtcaggagaatttgcagctgaagaaggacttggacgcagtggaggcgcagctgtgtcagctcaagattgctaagggagaggtctgccgccccaagcgccgccgcgtttgccgcaacctgaagatcaccgcccgcaagagtacctccaggcctgagcttgttcgtcagtccctagcgtggacttgctttgtggagatcccttgcgccgagtccgcgcccttggttcctcaggaggagggagcctctggcgttggtagcacggaggatgtgctgttgctcaccttccatggtgacaaccaggagaagcgctgttactggcgaaggcagtcatcccgaaggcagcaaccccaacaaccatgacagcccacctccacctcctccccaccaccaccaccgccacctgacaccaaccccatcctcacccaaatcctcgcccagcaggccaacgtgatggctgctttcctccaccacatccagaatccgccgcaacacaatgctccgcccccaccaccacccctgcagcattctaagcttgccgagttcctccgcatccgcccgcctaccttctctagcttcaacaaccctgttgatgccttggattggttgcatgccgttgggaaaaagttagacaccgtccagtgcaatgatgaggagaaagtcatcttcgccacccaccaactgcaggggcccgcatctctatggtgggaccacttccaggctacgcagccggaaggatagcctatcacctgggcccgcttcaccgccgctttccggaggacccatgtgcccgccggagtcatggcccttaagaagagggaatttcgggagttgaagcaaggcaaccgctctgtgatggagtatttgcatgagttcaataacttggcccggtacgctccagaggatgttcgtgaagatgaggaaaagcaacagaaattcctggcaggaatggaccctgaactgtctgtgcatctggtctccagggactatcctgatttccagcgcctggtggacaagagcatccacctggaagccaagcacaaggaactggagtcgcacaagcgtcgcttggcgaatttttccaatcaacagggagctaaccaaagggtccgctacacaaatccctatcctggaggatcctcctcacagcagcagcagcagcagcaacctcgccccgcgccccgacctccatacgtggtgcgcgtcccacagccgcagcagcagcagaatcagcaagggacccgtgcaccccgccctcctgcaccggccgtgcagcctggtcaaggccgcagggacgctcaaggtcaacaacgtctgtgcttcaactgcttcgagcccggacactttgcggataaatgcccgaagccaaggcgccagcaaggccaagcgcctccccgccccaacaacggtggtaaggatgtcactgggggttgtgtgaaccacgtgactgccgaggatgtgctgacaactccagacgtcatcgttggtacgttcctcattcattccatccctgctaccattttgttcgactctggagcttcccactcgtttatatctgtgccattcgtggggagaaatcagctgggggtagaaaggcttaggaaccctctactcatcaccacccctggagtggttatgacaacgaagtattatagcccggccgttcctatagaaatccagggaattcctttccctcggatctgattcttctggacaccaagaacttggatgtgatccttgggatgaattggttggctcaattccaaggagtagtggattgcgcaaggcgcactgtcactctgtaccgggggcccgatcaaccagttgttttctttgcactccaactcccgccggcacttcagtacttcatcaactaggattatccgtaatctccatcgtcagtgagttcggtgatgtgtttccggaagagctacccggtatgccgcccaagcgggagattgagttccggatagatcttgctccaggagccactcctttatacaagcgaccctaccgtatggcagcaaatgaattggccgaagtcaagaaacagttggaagagttgaaagaaaatgggtatatacggccgagcacttccccctggagtgctcccgtgatttttgtggagaagaaagacaagacaaagaggatgtgcgttgactacagagctctcaacgaggtcactatcaaaaacatgtacccccttccccagatcgatgatctgttcgatcagcttaaaggtgccactgtcttttccaagattgatcttcgttccggatatcaccagttgcgtattcgtgaagaagatatcccgaagaccgcattaaccacgcggtacggactgtatgaattcacggtgatgttgttcggtctgaccaattctcctgccttcttcatgaatttaatgaacaaagtgttcatggaatacctggataagttcgttgtggtctttattgacgacatactggtgtactcggagtcagaggaagaccatcagcagcatctccgtttagtgttggggaagctgcgggaacactaactgtatgccaagctcagcaagtgtgagtttttgttgtccgaagttaagttcttagggcatgtgatttctgctaaaggagttgctgtggatcccaaaacggtgaccgccgtcactgattggaagcaacccaagacagtcactcaggtccgcagctttttgggtttggcaggatactaccgaagattcatcgagaatttctccaaaattgccaggcccatgacgcagttgctgaagaaggaagaaaaatttgtgtggagtccgcagtgtgagaaagcattccaaactctcaaagaaaagctggtttcctcgcccgtgttaatcttactggatactcgcaaggacttcttggtgtactgtgacgcttcgcgccaaggattggggtgtgtattaatgcaggaaggtcatgtggtagcctatgcctcacgccagctacggccccatgaaggcaactatcctactcatgatttggagttggccgctgtggttcatgatttgaaaatctggcggcattatctcattggaaatcgctgcgaaatatataccgatcataagagtttgaaatacatcttcactcagtcagatctgaatcttcagcagagaagatggttagagctcatcaaagattatgatgtgggaatccactatcaccctagtaaggccaacgtggtcgccgacgcgctaagtcgaaaaagccattgcagcactcttggcgtccgtggcattccaccagaacttaatcaacagttggaagccctgaacctaagcatcgttagctatggattcttggctatgctggaagccaagcctaccttgctcgatcaaatccgcgaggctcagaagaatgatccagatattcatgggatcctcaagaatatgaaacagggtaaagccgctggtttcacagaagatgaacacggaaccctatggaacggaaatcatcgtgtcaaggcagagcaccaacgaccggccagacttctccaacctctccaagtaccagaatggaaatgggatgaaattgggatggatttcatcaccggagttccaaaaacccaaggcggatatgattctatatgggtaatcgtggatcgactaaccaaggtagcttggttcattcctgtgaagaccacctatggagggaacaaattagctgaactctacttcgctaggatcgtgagtctccatggcgttcctaagaaaattgtatctgataggggaagccaattcacctatcacccgcagacagatggacagaccgatcatccgaatcaggtcctagaagacctgggataagagtctcccctatgccgagttctcctacaataatagctaccaagccagcatacaaatggcaccctatgaagcgttgtatggccgcaaatgccggacaccactattgtgggaccaagttggggaaagccaagtgttcgggactgatatcctgagagaagctgaagctaaagtcagaaccatttgagataatctaaaggtggcatagtctcggcagaagagttatgcagacaaccgacgccgtaacctggaattcgcagtggacgattttgtgtatcttcgggtcacgctattgcggggcgtacataggtttcagacaaaagggaagctcccacctaggtttgtggggcctttccgcatcattgctcgacgcggagaagttgcttaccagttagagctgcccgcatccttgggcaacgtgcacgatgtgttccatgtgtcgcaactcaagaaatgccttcgagtgccgtccgagcaggctgattcagagcaaattgaagttcgcgaagacttgacctacgtggagaagccagtgaagattctggacaccatagagcgcaggaccaggaatcgggtaatccgtttttgcaaggtccaatggagcaaccatgccgaggaagaagctacttgggaacgtgaagacgagctgaaggcagcccatcccgatctcttcgccagttcttccgaatctcggggtcgagattccgtt

SEQ ID NO: 23146 - DNA, 6610 bp, Oryza sativa
  Clone ID: TF_OsC359_7996
tataacctaaagaaccctgtgctttgtttttatgtattggtattgcttctttataggcttgtagctttgcttgtgtgcttcgcgtagcttctgtcgttccggaggttcccgaagcgtggttcgcggtcgtcgccgaaggatcggaagtccgttctctctctcttcctctttcaaaacccctaaaacctgttttcggtggggtttgggtgcatgccagttatgggaagtagcaccccggccactataaggattaagctcgggcctctgttgcaaagcactaccgtacttccacatgtctaatgggtaaggcttagtttgtggctcagtctagtcataaacaaaagtacacggattggagatggatgaagtcgggcgtcgatggacattctccagggcaaatgaaggctacacgagctgcggcccggtagtcgagatgtcatacggcggagggttggtgcccaatgctaggggctcagttctgcctgcctgtcccgggtatcccggccgtaggcaggattgggtcggtactcttgtttatggctaggatgggttggaaactatgtcacgtcttccgtctgtataccgtggtggtatgtggcgcgtggtaacacgtgaggaagatgtgtcttgtggcatttgtgggtgtgtcttgttgagtacggtggttgtactcagtcttgctcaatttttcccaagtccagaagaggagctccttgaagatgaaggctttggtgtctagctcgtgcctgccgtcaagtgcctgtggtcgtcgccctagtcttccgctgtttctcgtttgtctttgtgtgttctgggccttgcctcctgggacaaggattaatgcacgcacgtaaggaatgcccgttgggttatttccggtcgtgacaacttctccgcgccgagcagtgatacggaaaggacccacataccgaggtgcgagcttcccctttgtccgaaacctgtgtacacctcgcaatggcgtgacccgaacatacacaaagtcatccgctgcgaattccaggtcacggcgacggttatctgcataacttttctgccgggactgtgccatctttagattatcccgaatggttctgaccttcgcttcagcttctctcaggatatcagtcccgaacacttggctttctccaacttggtcccacaatagcggtgtccggcatttgcgcccatacaacgcttcataaggtgccatttgtatgctggcttgataactgttattgtaggagaactcggcataggggagactcttatcccaggtcttcccgaaatctaggacacatgcgcgaagcatatcctctaggatctgatttagacgctcggtctgtccatctgtctgcgggtgatacgcggtgctgaaatttaatcgggtacccagctcttcttggagcttcttccaaaagtgagaggtgaactggcttccccgatcagatacaattttcttggggacgccatgcagactgacgatcctagcgaagtagagttcagctagtttgttccctccataggtggtctttacgggaatgaaccgtgctaccttggttagtcgatccacgactacccatatagaatcatatccgccttgggtttttggaagtccggtgataaaatccatcccaatttcatcccatttccattctggtacttggagaggttggagaagtccggccggtcgttggtgctctgccttgacacgccgatttccgttccatagggttccatgttcatcctctgtgaaaccagcggctttaccctgtttcatattcttgaggagcccatgcatatccgggtcattcttctgagccttgcagatttgatcgagcaaggtaggcttggcttccagcgtagccaagaatccacgactaactatgcttaggttcagggcttccatctgttgattaagttccggtggaatgccacggacgttaagagtgttgcaatggctctttcgacttagagcgtcggcgaccacgttggccttaccaggatgatagtgaattcccacatcataatccttgatgagttctaaccatctcctttgccgaagattcagatccgactgagtgaagatgtatttcaaactcttatgatcagtatatatttcacagcgattcccaatgagatagtgccaccagatttttagggcatgaaccaccgcggctaactccaaatcatgagtagggtagttgccttcatgaggccgaagctggcgtgaggcataggccaccacataaccatcctgcatgagcacgcacccctatccttggcgcgaagcgtcacaatacaccatgaagtccttgtgagtatctggcaagattaacaccggcgaggaaaccagcttttctttgagagtttgaaacgccttctcgcattgcgggctccacacaaatttctcttctttcttcaacaactgtgtcatgggtcgagcgattttggagaagttctcgatgaaccttcggtagtatcctgccaaacctaagaaactgcgaacttgagtgactgtcttgggttgcttccaatcggtgacggcgatcactgtttcggggtccacagcaactcctttagcagatatcacgtgccctaagaatttgacttcggacaaccagaactcacacttgctaagtttggcatacaattgatgttcccgcagctttcccaataccagacggagatggtgctgatggtcttcctctgattgtgagtatatcagaatgtcatcaatgaaaaccaccacaaacttatccaagtattccatgaacactttgttcattaagttcatgaagaaggcaggagcattggttaaaccgaacgacatcaccgtgaattcatacagtccgtatcgcgtggtgaatgcggtcttcggaatatcttcttcgcgaatacgtaattggtgatatccggaacgaagatcaatcttggagaatacagtggcacctttaagctgattgaacagatcatcgatccggggaagagggtacttgtttttgatggtgacttcattgagagctctgtagtcaacgcacatcctcttcgtcttgtctttcttctccacaaaaatcacaggagcaccccagggggaagtacttggacgtatataccccttttctttcagctcttccaactgtttcttaacttcggccaattcatttgctgccatacggtagggtcgcttgtacagaggagcggttcctggagcaagatctatccggaactcaatctctcgcttaggcggcataccaggtagttcttccggaaacacgtctccgaactctctgacgatgggaatttctgacagttctatctgatgaagttctgaacttctgactgaggttgggggtgcaaagaaaacaaccggttgttccggccctcggtacagagtgacagtgcgtctcgcgcaatccactactccttggaattgagccaaccaattcatcccaaggatcacatccaagttcttggtgcctagcagaatcagatccgagggaaaaggaatcccctgaatttctatagggacggcagggctataatactttgctgtcataacccctccaggggtggtgatgagcagagggtttctaagcctttctacccccaactgatttctccccacgaatggcacagatataaatgagtgggaagctccagagtcgaacaaaatggtagcagggatggaatgaatgaggaacgtaccaacgatgacgtctggagttgtcagcacgtcctcggccgtcacatggttcacacgaccccgaatgacgtccttaccaccgttgttggggcggggaggcgcttggccttgctgacgccttggcttcgggcatttatccgcaaagtgcccgggctcgaagcagttgaagcacagacgctgcggaccttgagcgtccctgcggccttgaccaggctgcacagtcggtggaggaggacggggcgcacgagtcccttgttgattctgctcctgctgcggctgtgggacgcgcaccacgaattgaggtcgaggcgcggagcgaggttgctgctgctgctgttgctgctgcgaggaggatccccctggatagggattggtgtagcggaccctttggttagcaccctgttggttgtggaaattcgccaagcggcgcttgtgcgactccagttccttgtgcttggcttccaagcggatgctcttgtccaccagacgttggaaatccggataatccccggagactagacagacggacagctcagggtccattcctgccaggaacttctcttgcttctcctcatcttcccgcacatcctccggagcgtaacgggccaggttgttgaactcgtgcaaatactccatcacggagcggttgccttgcttcaactctcggaattcccttttcttaagggccacgactccggcgggcacatgggttcttcggaaagcggcggtgaagcgagcccatgtaataggctgtccctctggctgcgtagcctggaaatggtcccaccatagagatgcgggtccctgcagctggtgggcggcgaagatgactttctcctcatcgctgcactgcacagtgtctagctttttccccacggcatgcaaccaatccaacgcatccacggggttgttggagctagagaaggtaggtggacagatgcggaggaactcggcgagtttagagtgttggggaggtggtggtggagcattatgttgtggcggattttggaggtggtggagaaaagcagtcatcatgttggcctgctgggcgaggatttgggtgagaatggcgttggtatctggtggtggtggtggaggcggaggaggaggtggaggtgggctgccatggttgttgtggttgctgtcttcgggttggttgccatcactggtggcagcatttctcctggtcatcaccatggaaggtgagcaacagcgcatcctccgtgctaccaacgccggaggcttccccctcctggggaaccacgggcgcgggctcggcacgaggggtctccacgaagcaagtccacgccagggactgacgaacaagctcgggcctggaggtgctcttgcgggcggtgatcttctggctgcggtagacgcggcgatgcttggggcggcagatctctccctgggcgatcttgagctgatgcagctgcgcctccaccgcatctaggtccttcttgagctgcaggttctcctgacgcagctccaggatcttcatgttgttctcgaccatcccacgacgcaccatctgatggaagtcgatacgagccgcgtcgtacgcctccaccatgcgcgccaggtgcacgatggtagcgtcatcctccgagctagcatcccggaaggtggcgtagtcgcgggctcctccgcgacgagggtggtagcggtagggcgagtgctgcaactcgtccgggtagcgctggtgaagagtgccgatggcgaggagagcggcgctctggcaagcggcggggaaggaatccccacccgcggtgactgtcagcgaagtccgctcgggagagccagcgaggatcactgcagtgacctcccaagcagcgtggggctccgcatcgtcaccctcctgctccggaagcggcctggcctggtagtccactccatgtggatgccccaggaccacgcacatgccccgcagctccaagacgaagccagtcatgtccaaaccacgacggctgacgctgccggccatttgggtacattgctcggcttgcccataaccgagggcgcggctattcgaatagattttactctgatcagaggtgtacatcgacccaatcccacctacggccggaacccccgggacaggcaggcaggactgagcccctagcagcaggacaccggccctgtgccatgacatctcgactaccgggccgcagctcgtgtagccttcatttgccccactagacatgtggaagtacggtagtgctttgcaacagaggcccgaacaccggtccttatatggccgaggtgggtccacggtggaccgggtgcacgcggcttgcgccggccggcgccgtgggtcccacgcgtcagccgcacccgaggacgcgggcggctgacgaccgggccccacatggcagccgcggggcgcgcccgaaggcggcctcgccggcacagccgacgggaggcggcgcgcccgcgccccgatggtcgccggcggcgacctccggcgcgacggagcggcgcccgagagaggggagggaagggggaagcgaaatgggcggtccatggctcaccccgggtcgacggcgacgacgggaacggcgaccgaagcggagaaagggggcggcgcggctcgggtcgacgaggacggcggcgttccggcggtcggcgggcgaaacgaaggggtggacgagattggcgaggacgcggcgaacccgaagaaggcgatgccgaaacgggaggaggcccggtgcgacgacggcggcggaccggagctcggcggcgacggcggagagagaggacgacgttgcgagctcgattccgacggggagagagagcggcgagtggcggaaacgaaggagggaggcatggggagtgtttatgtagtgttgggaggaggagagagcggccggatgagggggaatcggtcgtggaagatccggccgccat

SEQ ID NO: 23147 - DNA, 5910 bp, Oryza sativa
  Clone ID: TF_OsC359_8144
agaagccaagaacccatttttgtgctttatttcggtttgttatatggagtttagtagagtaaaagccttttcttttccgttggtcgtgtagacgctgcagcttcggaagatctgctcttcgtggaagttgaagccggcgtttgggaaagcgagcaaggcaagtcacatcatcgctccttctattcaaaatccccaaaatggttttaggctgggctcggggtgcatggttttgatagtagcacctcggccatataaggaccggtcttcgggcctctgttgcaaagcactaccgtacttccacatgtctagtgggtaaggcttagtttgtggctcagtctggttataaacaaaagtacacggatggaggtggatgaagtcgggggtcgatggacattctccagggcaaatgaaggctacaygagctgcggcccggtagtcgagatgtcatggcacagggccggtgtcctgctgctaggggctcagtcctgtctgcctgtcccggggrttccgrccgtaggcgggattgggtcggtactcttgtctatggctaggatgggttggaaactatgtcacgtcttccgtctgtataccgtggtgatggccggcagcgtcacccgtcgtggtttggacatgactggcttcgtcttggagctgcgaggcatgtgcgtggtcttggggtatccacatggagtggactaccaggccaggccgcttccggatcaggagggtgatgacgcggagccccacgctggttgggaggtcactgcagtgatcctctctggctctcccgagcggacttcgctggcagtcaccgcgggtggagattccttccccgccgcttgccagaacgccgctctcctcgccatcggcactcttcaccagcgctacccggacgagttgcagcactcgccctaccgctaccaccctcgtcgcggaggagcctgcgaccacgccaccttccgggatgctagctcggaggatgacgctaccatcgtgcacctggcgcgcatggtggaggcgtacgacgcggctcgtatcgacttccaccagatggtgcgccgcgggatggttgagaacaacatgaagatcctggagctgcgtcaggagaacctgcagctcaagaaggacctagacacggtggaggcgcagctgcatcagcttaagatcgcccagggagaggtctgccgccccaagcgtcgccgcatctgccgcagccagaagatcaccgcccgcaagagcacctccaggcccgagcttgttcgtcagtccctggcgtggacctgcttcgtcgagacccctcgtgccgagcccgcgcccgtggttccccaggagggggaagcctccggcgttggtagcacggagggtgcgctgttgctcaccttccgccctggcccgtcgcagcggagaaatgctaacaccggtgatggcaaccaacctgaaggcagcaaccacaaccaccaaggcaacccacctccacctcctcctccgcctccgccaccaccaccagacaccaacgccattctcacccaaatcctcgcccagcaagccaacatgatgactgctttcctccaccacctccaaaatccgccacaacagaatgctccaccaccacctccccaacactctaaactcgccgagttcctccgcatccgtccacctaccttctctagctccaacaaccccgtggatgcgttggattggttgcatgccgtggggaaaaagctagacacggtgcagtgcagcgacgaggagaaagtcatcttcgccgcccaccaactgcaggggcccgcatctctctggtgggaccacttccaggctacgcagccagagggacagcctattacttgggcccgcttcaccgccgctttccggagaacccatgtgcccgccggagtcgtggccctcaagaaaagggaattccgagagttgaagcaaggcaaccgctccgtgatggagtatttgcatgagttcaacaatctggcccgttacgctccggaggatgtgcgggaagatgaggagaagcaagagaagttcctggcaggaatggaccccgagctgtccgtccgtctagtctcgggggactatccggattttcaacgactggtggacaagagcatccgcttggaagccaagcacaaggagctggagtcgcacaagcgccgcttggcgaatttccgcaatcaacagggtgctaaccaaagggtccgctacaccaatccctatccggggggatcctcctcgcagcagcaacaacagcagcagcaacctcgctccgcgcctcgacctcaattcgtggtgcgcgtcccacagccgcagcagcagcagaatcaacaagggactcgtgcgccccgtcctcccacgccaactgtgcagcctggtcaaggccgcagggacgctcaaggtcagcagcgtctgtgcttcaactgcttcgagcccgggcactttgcggataaatgcccgaagccaaggcgtcagcaaggccaagcgcctccccgctccaacaacggcgggaaggatgtcattcggggtcgtgtgaatcacgtgacggccgaggacgtgctgacaactccagacgtcatcgttggtacgttcctcgttcattccatccctgctaccattttgttcgactctggagcttcccactcgtttatatctgtgccattcgtggggagaaatcagttgggggtagaaaggcttaggaaccctctgctcatcaccacccctggaggggttatgacagcaaagtattatagtcctgccgtcccgatagaaattcaggggattccttttccctcggatctgattctgctagacaccaagaatttggatgtgattcttgggatgaattggttggctcaattccaaggagtagtggattgcgcgagacgcactgtcactctgtaccgagggccggaacaaccggttgttttctttgcacccccaacctctgtcagaagttcagaactgcatcagatagaactgtcagaaatccccatcgtcagggagttcggagatgtgtttccggaagaactacccggtatgccgcccaagcgagagattgagttccggatagatcttgctccaggaaccactcctctgcacaagcgaccctaccgtatggcagcaaatgaactggccgaagtaaagaaacagttggaagtgttgaaagaaaaggggtatatacgtccgagtacttccccatggggtgctcctgtgatttttgtagagaagaaagacaagacgaagaggatgtgcgtcgactacagagctctcaatgaagtcaccatcaaaaacaagtaccctcttccccggatcgatgatctgttcgatcagcttaaaggtgccactgtattctccaagattgatcttcgttccggatatcaccaattacgtattcgtaaagaagatattccgaagaccgcattcaccacgcgatacgggctgtatgaattcacggtgatgtcattcggtctaaccaatgcacctgctttcttcatgaacttaatgaacaaagtgttcatggaatacttggataagtttgttgtggttttcattgatgacattctgatatactcacaatcagaggaagaccatcagcaccatctccgtctggtgttgggaaagttgcgggaacatcaattgtatgccaagcttagcaagtgtgagttctggttgtccgaagtcaaattcttggggcacgtgatatctgctaaaggagttgctgtggaccccgaaacagtgaccgccgtcaccgattggaagcaacccaagacagttactcaagtccgtagtttcttaggtttggcaggatactaccggagattcatcgagaacttctccaaaatcgctcgacccatgacacagttgttgaagaaagaagagaaatttgtgtggagcccgcaatgcgagaaggcgtttcaaactctcaaggaaaagctggtttcctcgccagtgttaatcttgccggatactcgcaaggacttcatggtgtattgtgacgcgtcgcgccaaggactggggtgcgtgctcatgcaggacggtcatgtggtagcctatgcctcatgtcagctacgacctcatgaaggcaactaccctacccatgatttggagttagccgcggtggttcatgctctaaaaatctggcggcactatcacattgggaatcgctgtgaaatatataccgaccataagagtttgaagtacatcttcacccagtcggatctgaatcttcggcaaaggagatggttagaactcatcaaggactatgatgtgggaattcactatcatcctggtaaggccaacgtggttgctgacgctctaagtcgaaagagccattgcaacactcttaacgtccgtggcattccacctgaacttagtcaacagatggaagccctgaacctaagcatagttggtcgtgggttcttggctgcgttagaagccaagcctaccttgctcgatcaaatccgcgaggctcagaagaatgatccggacatgcatggactcctcaagaatatgaaacagggtaaagccactggtttcacagaggatgaacacggaaccctatggaacggaaagcgggtatgcgttccagataacagagaacttaaacagctgatacttcaggaagctcacgaaagtccttattccattcacccgggcagtacaaagatgtacttagacttgaaggagaaatactggtgggttagcatgaagcgggaaattgcagagtttgtggccctatgtgatgtgtgccagcgtgtcaaggcagagcaccaacgaccggccggacttctccaacctctccaagtaccagaatggaaatgggatgaaattgggatggatttcatcaccggacttccaaaaacccaaggcggatatgattctatatgggtagttgtggatcgattaaccaaggtagctcgatttattcctgtaaagaccacctatggagggaacaagctagccgagctctacttcgctaggatcgtgagtctccatggcgttcccaagaaaatcgtatctgataggggaagccaattcacctcgcacttttggaagaagctccaagaagagctgggtactcgattgaatttcagcaccgcctatcacccgcagacagatggacagaccgaacgtctaaatcagatcctagaagatatgctccgcgcatgtgtactagatttcgggaagacctgggataagagtctcccctatgccgagttctcctacaataacagttatcaagccagcatacaaatggcaccttatgaagcgttgtacgggcgcaaatgccggacaccgctcttgtgggaccaagttggagaaagccaagtgttcgggactgatatcctgagagaagctgaagctaaagtcagaatcattcgggataatctaaaggtggcacagtcccggcagaaaagttatgcagataaccgtcgccgtgacctggaattcgcagtgggtgattttgtataccttcgggtcacgctattgcgaggtgtacacaggtttcagacaaaagggaagctcgcacctcggtatgtgggtcctttccgtatcaatgctcggcgcggagaagtcgcttaccagttggagctgcccgcctccttgggcaacgtgcatgatgtgttccatgtgtcgcaactcaagaaatgccttcgagtgccatccgagcaggccgactcagagcagattgaagttcgcgaagatttgacctacgtggagaggccaatgaaaatcctggacaccatggagcgcaggaccaggaaccgggtaatccgtttttgcaaggtccagtggagcaaccacgcagaagaagaagctacttgggagcgtgaagacgagctgaaggcagcccatcccgatctcttcgccagttcttccgaatctcggggtcgagattccgtttaa

SEQ ID NO: 23148 - DNA, 5436 bp, Oryza sativa
  Clone ID: TF_OsC359_8156
gtgaagacgacgacggacaccggcggtgttcggtcggaggggaggcgaggccgaggacgacgtcgcggctgcgatgccgaagatggtagtggtgcagcaagccgacgagccggggaggaggaaggggcggccgaaaggacgctggcgacgaagaggatggagaggccggcgcggcgacggcgttccggcgaaaccgaggagcagccggggtggagggcgatgcggcgacgccgagggaggtggtggcgactgtcgcgaccgggaaaattgccttttcccgaacgctagtgtattaatccccgtcccaggaaaagccggggaatgtccatcaacccccgacttcatccatctccaatccgtgtacttttgtttataaccagactgagccacaaactaagccttacccactagacatgtggaagtacggtagtgctttgcaacagaggcccgagcttaatccttatagtggccggggtgctacttcccacaactggcatgcacccaaaccccaccgaaaaacatgttttaggggctttgaaagaggaagagagggagaacggccttccgaaccttcggcgacgaccgcgaaccacgcttcgagaacctccggaacgacgaagactacgcgaagcacacaagcaaagctacaagcctataaagaagcaataacaatacataaaaagaaaaccgggtacacagagacggtccacgggtcgacggaagcggaccccgtgtgtcaaccgaggcgagtggccgacaaacggactccactagacaccacacgggctgcacacgtggaaaccacgcggctaccgagcgggcacactaacacggtcaccacacgcacaagcgaacgactaccgacaccggtacacgggcgagacgcggccggcacgaggcttgatgacgcggagccgaggacgaagacgacgacgggggctgcagcgaccttgacgaagcgaggacgacgaacgagaacggcttgacggagggacgaacgccacgacgatcgggaacaacgagagggcgaggacgacgacgaccggggccggcgaggagacgacgagggcagccggcagcggctgcacggagacgaggacggcgtggaacacgccgctgcgatgacgatgacggtggcggcgcagcgagacgacgagccgggcgaccgatgggacgtcgatcggcgaggacgaacggtgacgaggaagcgacgatggcagccagcagcggctgcgcggaggaggggtggtggtgcagcggggcgacgagccgacgaggaggaatgggtggttggcgcggcggcggcgttccggcaaacttcgggcgacgccgcagccgggccggagaagaggatggcgctgcagcaccgacagaggtggtagcgacgtcggccggcgctcaggcgaggcggcagggatggctggagccggtggagtggtggcgacaccactaggcgacggcgggaacgcgcctccggcggtcaccgcgcgaaacggagggtaggccgtgggagaggaggcggctgcgatgctataggaggcgacggcgcgaccggacggcgctccggcgaggagggagaggcggctggaggcggccggcggcacgggagagagaggaggacggcggggagatgtccgaatgatttttaattcgggatgaatttatcacgacgtgacaggcaaccacgttagccttacccggatgataatgaattcccacatcataatccttgatgagttctaaccatctcctttgtcgaagattcaggtccgactgagtgaagatgtatttcaagctcttatgatcggtatatatttcacagcggttcccaatgagatagtgccgccagatttttagagcatgaaccaccgctgctaactccaagtcatgcgtagggtagttgccttcatgaggtcgtagttggcgtgaggcataggctaccacatgaccgtcctgcatgagcacgcaccccaatccttggcgcgaagcatcacagtacaccatgaaatccttgcgagtatccggcaagattaacactggcgaggaaaccagcttctccttgagagtttggaacgccttctcgcattgcgggctccacacaaatttctcttctttcttcaacaactgtgtcatgggtcgagcgattttggagaagttctcgatgaatctccggtaatatcctgccaaacccaagaaactgcggatttgggtgactgtcttgggttgcttccattcagtgacggcggtcactgtttcggggtccacagcaactcctttagcagatatcacgtgccccaagaatttgacttcggacaaccagaactcacacttgctaagcttggcatacaattgatgttcccgcaactttcccaacaccagacggagatggtgttgatggtcttcctctgattgtgagtatatcagaatgtcatcaatgaaaaccacaacaaacttatccaagtattccatgaacactttgttcattaagttcatgaagaaggcaggtgcattggttagaccgaatgacatcaccgtgaattcatacagcccgtatcgcgtggtgaatgcggtcttcggaatatcttcctcgcggatacgtaattggtggtacccggaacgaagatcaatcttggagaatacagtggcacctttaagctgatcgaacagatcatcgatccgaggaagagggtacttgtttttgatggtgacttcattgagagctctgtagtcaacgcacatcctcttcgtcttgtctttcttctctacaaaaatcacagaagcaccccagggggaagtactcggacgtatatacccctttcctttcaactcttccaactgtttctttacttcggccagttcatttgctgccatacggtagggtcgcttgtgcagaggagtggttcctggagcaagatctatccggaactcaatctctcgcttgggcggcataccaggtagttcttccggaaacacatctccgaactccctgacgatggggatttctgacagtcctatctgatgcagttctgaacttctgacagaggttgggggtgcaaagaagacaaccggttgttccggtcctcggtacagagtgaccgtgcgtctcgcgcaatccactactccttggaattgagccaaccaattcatcccaaggatcacatccaagttcttggtgtctagcagaatcagatccgagggaaaaggaatcccctgaatttctataggaacggcagggctataatactttgctgtcataaccccgccaggggtggtgatgagcagagggttcctaagcctttctacccccaactgatttctccccacgaatggcacagatataaacgagtgggaagctccagagtcgaacaaaatggtagcagggatggaatgaacgaggaacgtaccaacgatgacgtctggagttgtcagcacgtcctcggccgtcacgtgattcacacggccccgaatgacatccttccctccgttgttggagcggggaggcgcttggccttgctgacgccttggcttcgggcatttatccgcaaagtgcccgggctcgaagcagttgaagcatagacgctgctgaccttgagcgtccctgcggccttgaacgggctgcacagctggcgtaggaggacggggcgcacgagtcccttgttgattctgttgctgctgcggctgtgggacgcgcaccacgaattgaggtcgaggcgcggaacgaggttgctgctgctgttgttgctgctgcgaggaggatccccctggatagggattggtgtagcggaccctctggttagcaccctgctgattgcggaagttcgccaagcggcgcttgtgcgactccagctccttgtgcttggcctccaagcggatgctcttgtccaccagacgttggaaatccggatagtccccagagactagacggacggacagctcggggtccattcctgccaggaacttctcttgcttctcctcatcttcccgcacatcctccggagcgtaacgggccagattgttgaactcatgcaaatactccatcacggagcggttgccttgcttcaactctcggaattccctcttcttgagagccacgactccggcgggcacatgggttctccggaaagcggcggtgaagcgagcccaagtaatcggctgtccctctggctgcgtagcctggaagtggtcccaccatagagatgcgggtccctgcagctgatgggcggcgaagatgactttctcttcatcactgcactgcacagtgtccagcttcttccccacggcatgcaaccaatccaacgcatccacgggattgttggagctagagaaggtgggtgggcggatgcggaggaactcggcgagtttagagtgttggggaggtggtggtggagcattctgttgtggcggattttggaggtggtggaggaaagcggtcatcatgttggcctgctgagcgaggatttgggtgagaatggcattggtgtctggtggtggtggtggaggtggattgccttggtggttggggttgctgccttcgggttggttgccttcaccggtgttaacatttctcctggtcgtcaccatcctccgtgctaccaacgccggaggtttccccctcctgagtgtcacgtcccccgtgattccctctcccgtttccccctcttttccctctctctctccctcggattcgttcgaatcgcgcccgcaatcctcgccggcgtcatcaatggagcccgagaactccgcggccggtttccttcctccccggccgccctctctccctctcggcgctataaaatcgtcccccgtgcttcgctcttccgtttccgccgctcgccgctcgctctcgccgtcggattcgtgctcgcgtcgtgcacctctctctccgccgtcgccgccgagctccgtttcgccaccgtcgtcgctccggtcctcctcccgactcggcgtcacctccttccgcgtcgccgcgtcgccgtcgaccccgtccgccgctccgcttcgcccgccgaccgccggagcaccgtcgccctcggcatcccgaaccgcgccgccgcctttctccactccggccgtcgtttccgccgtcctcgttgtcccggggtgagccgtggaccgtccctctcgcttccctctcctctccgctctctcgggcgccgctccgccgcgccggtggtcgccggcggtgaccatcggggcgcgggcgcgccgctcccgtcggccgtgccggcgaggccgccttcgggcgcgccccgcggctgccaggtgggcccggccgtcagccgcccgcgcccgcgggtgcggctgacgcgtgggacccacggcgccgaccgccgccagccgcgtgctcccgacgctgcagcttcggaagatccgctcttcgtggaagttgaagccggcgtttgggaaagcgagcaaggcaagtcacatcatccttga

SEQ ID NO: 23149 - DNA, 6822 bp, Oryza sativa
  Clone ID: TF_OsC359_8161
atgactggcttcgtcttggagctgcggggcatgtgcgtggtcctggggtatccacacggagtggactaccaggccaggccgcttccggagcaggagggtgacgatgcagagccccacgctgcttgggaagtcactgcagtgatcctcgctggttctcccgagcggacctcgctgacagtcaccgcgggtggagactctttccccgccgcttgccagaacgccgctctcctcgccatcggcactcttcaccagcgctacccggacgagttgcagcactcgccctaccgctaccaccctcgtcgcggaggagcccgcgaccacgccaccttccgggatgctagttcggaggatgacgctaccatcgtgcacttggcgcgcatggtggaggcatacgacgcggctcgtatcgacttccatcagatggtgcgccgtgggatggtcgagaacaacatgaagatcctggagctgcgtcaggagaacctgcagctcaagaaggacctagacgcggtggaggcgcagctgcatcagctcaagatcgcccagggagaggtctgccgccccaagcgtcgccgcgtctgccgcagccagaagatcaccgcccgcaagagcacctccaggcccgagcttgttcgtcagtccctagcgtggacctgcttcgtcgagaccccccgtgccgagcccgcgcccgtggttccccaggagggggaagcctccggcattggtagcacggaggatgcgctgttgctcaccttccgtcctggcccgtcgcagcggagaaatgctgttaccggtgatggcaaccaacccgaaggcagcaaccacaaccaccaaggcaacccacctccacctcctcctcctcctccgccaccaccaccagacaccaacgccattctcacccaaatcctcgcccagcaagctaatatgatgactgctttcctccaccacctccaaaatccgccacaacttaatgctccaccaccacccccacaacactctagactcgccgagtttctccgcatctgcccacctaccttctctagctccaacaaccccgtggatgtgttggattggttgcatgccgtggggaaaaagctagacactgtgcagtgcagcgatgaggagaaagtcatcttcgccgcccaccagctgcagggacccgcatctctatggtgggaccatttccaggctacacagccagagggacagcctattacttgggcccgcttcaccgccgctttccggagaacccatgtgcccgccggagtcgtggcccttaagaaaagggaattccgagagttgaagcaaggcaaccgctccgtgatggagtatttgcacgagttcaacaatctagcccgttacgctccggaggatgtgcgggaagatgaggagaagcaagagaagttcctggcaggaatggaccctgagctgtccgtccgtctagtctccggggattatccggatttccaacgtctggtggacaagagcatccgcttggaagccaagcacaaggaactggagtcgcacaagcgccgcttggcgaatttccgcaaccaacagggtgctaaccaaagggtccgctacaccaatccctatccagggggatcctcctcgcagcagcagcaacctcgctccgcgcctcgacctcaattcgtggtgcgcgtcccacagccgcagcagcagcagaatcagcaagggactcgtgcaccccgtcctcctacgccagccgtgcagcccgttcaaggccgcagggacgctcaaggtcagcagcgtctgtgcttcaactgtttcgagcccgggcactttgcggataaatgcccgaagccaaggcgtcagcaaggccaagcgcctccccgctccaacaacggcgggaaggatgtcattcgaggtcgtgtgaatcacgtgacggccgaggacgtgctgacaactccagacgtcatcgttggtacgttcctcgtccaatccatccctgctactattttgttcgactctggagcttcccactcgttcatatctgtgccattcgtggggagaaatcagttgggggtagaaaggcttagaaaccctctgctcatcaccacccctggcggggttatgacagcaaagtattatagccctgccgttcctatagaaatccaggggattccttttccctcggatctgattctgctagacacaaagaacttggatgtgatccttgggatgaattggttggctcaattccaaggagtagtggactgcgcgagacgcactgttactctgtaccgaggaccagaacaaccggttgttttctttgcacccccaacctctgtcagaagttcagaactgcatcagatagaactgtcagaaatccccatagtcagagagttcggagacgtgtttccggaagaactacctggtatgccgcccaagcgagagattgagttccggatagatcttgctccaggaaccactcctctgtacaagcgaccctaccgtatggcagcaaatgaactggccgaagtaaagaaacagttggaagagttgaaagaaaaggggtacatacgtccgagtacttccccatggggtgctcctgtgatttttgtggagaagaaagacaagacgaaaaggatgtgcgtcgactacagagctctcaatgaagtcaccatcaaaaacaagtaccctcttccccggatcgatgatctgttcgatcagcttaaaggtgccaccgtattctccaagattgatctccgttccggatatcaccaattacgtattcgtgaagaagatattccgaagaccgcattcactacgcgatatggactgtatgaattcacggtgatgtcgttcggcttaaccaatgctcctgccttcttcatgaacttgatgaacaaagtgttcatggaatacttggataaattcgttgtggttttcatcgatgacattctgatatactcacaatcagaggaagaccatcagcaccatctccgtctggtgttgggaaagttgcgggaacatcaattgtatgccaagcttagcaagtgtgagttctggttgtccgaagtcaaattcttggggcacgtgatatctgctaaaggagttgctgtggaccccgaaacagtgaccgccgtcaccgattggaagcaacccaagacagtcactcagattcgcagtttcttaggtttggcaggatactatcggagattcatcgagaacttctccaaaatcgctcgacccatgacacagttgttgaagaaagaagagaagtttgtgtggagcccgcaatgcgagaaggcgttccaaactctcaaagaaaagctggacggtcatgtggtagcctatgcttcacgtcagctacgacctcatgagggcaactaccctacgcatgacttggaattagccgcagtggttcatgctctaaaaatctggcggcactatctcattgggaaccgctgtgaaatatatactgatcataaaagtttgaaatacatcttcactcagtcagatctgaatcttcggcaaaggagatggttagaactcatcaaggactatgatgtgggaattcactatcaccctggtaaggccaacgtggttgccgacgctctaagtcgaaagagccattgcaacactcttaacgtccgtggcattccacccgaacttagtcaacagatggaagccctgaacctaagcatagttggtcgcggattcttggctgcgttagaagccaagcccaccttgctcgatcaaatccgcgaggctcagaagaatgatccggacatgcatggactcctcaagaatatgaaacagggtaaggccgctggtttcacagaggatgaacacggaaccttatggaacggaaagcgggtatgcgttccagatagcagagaacttaaacagctgatacttcaggaagctcacgaaagtccttactccattcacccgggcagtaccaagatgtacttagacttgaaggagaaatactggtgggtcagcatgaagcgggaaattgcagagtttgtggccctatgtgatgtgtgccagcgtgtcaaggcagaacaccaacgaccggccggacttctccaacctctccaagtgccggaatggaaatgggatgaaattgggatggatttcatcaccggcctcccaaaaacccaaggtggatatgactctatatgggtaatagtggatcgattaaccaaggtagctcgattcattcctgtgaagaccacctatggagggaacaaactagcggagctctacttcgctaggatcgtgagtctccatggcgttcccaagaaaatcgtatctgataggggaagccaattcacctctcacttttggaagaagctccaagaagagcttggtacccgactaaatttcagcaccgcgtatcacccgcagacagatggacagaccgagcgtctaaatcagatcttagaagatatgctccgcgcatgtgtcctagatttcgggaagacttgggataagagtctcccctatgccgagttctcctacaataacagctaccaagccagcatacaaatggcaccctatgaagcgttgtacgggcgcaaatgccggacaccgctattgtgggaccaagttggagaaagccaagtgttcgggactgatatcctgagagaagctgaagctaaagtcagaatcattcgggataatctaaaggtggcacagtctcggcagaaaagttatgcagataaccgtcgccgtgatctggaattcgcagtggatgattttgtgtaccttcgggtcacgccattgcgaggtgtgcacaggtttcagacaaaagggaagctcgcacctcggtatgtgggtcccttccgtatcatcgctcgacgtggagaagttgcttaccagctggagttgcccgcctccttgggcaacgtgcatgatgtgttccatgtgtcgcaactcaagaaatgtcttcgagtgccatccgagcaggccgactcagagcaaattgaagttcgcgaagacctgacgtatgtggagaagccagtgaaaatcctggacaccatggagcgcaggaccaggaaccgtgtaatccgtttttgcaaggtccagtggagcaaccacgccgaagaagaagctacttgggagcgcgaagacgagctgaaggcagcccatcccgatctcttcgccaccgcccgggctgaggaagccgctaaggaggaggccgcccgggctcgccaggctgaggcaacagctgctgctggcgcgtcaactgggcccactccctcgggcaaccctcaggcgacagcctccggggaggcacgcgacgtggccgcgggcacatcgcctgggcccacctccccgggcgacgcccaggatcaaacgggtccgggggacatccctgagcccagcacgtcctccggggggccgagccgcatcgccttctctccaaggcggctcttctcctcatcttccgtcgccccgctgagcgccgagcccattctgcaggccttggccgccgcaaacaccgcggtgctggatgggtttagcgcccaagtggaggccctgcgcgcggaacgagcggagctcgaggccgcatgggcacgcgttgaggaggggcggcgctcggtggacgccatggtggaggtgggccgtaaggctcaccgccgccacatctcggagcttgaagcccgcaaggcggcgctggcggagatcgcccgagaggtggaggaggagcgagaggccgccctcatcaccaccaccgcgatgatcgaggcgcaagacaccctccgccttcagcacgcaagctgggaggcggagctgaagaaaaagctcgacgccgcccaaggggtccttgactccgccgctgcccgagagcggcgggtaacggagactgaagcggcgtctcggcggcgcgaggaggcccttgaggcccgtgccatggcgctggaagaacacgccggcgccgtggagaggggcttgacggaccgcgaggccgccgctgttctccgggaggcgacgctggcggcgcacgaggccgcctgcgccgaggaggagtgcgcgctccgcctccgcgaggacgcactcgctgagcgggagcgagctctcgaggaggctgaggccacgaccaaacggctggcggacagcctgtcccttcgcgaggcggcgcaggaggagcaggcgcgccgcaatcttgaatgcgtccgcgccgagagagccgcactggagcagcgggctgccgacctcgaggcgcgggaaaaagagctggacgcaagggcgcgcgtcggtggggcggctgcgggcgaaagcgacttagccgctcgcctcgcggctgccgaacacaccgtcgctgacatgcagcgcgcactagattcctccatcggggaggccgaggccctccgcttggcgggcgagatggggcccgacatgctttgggactcggtctcccgcatggatcgcgccggtcggcaagcgggcctctggaaaggccagacgaggatgcgccccgccaacctggaaggcctcgctccgcacctcaacaggatggcctgggtcctcgaacaactccccgaggagctcgagaagaccatcaagtcatcctcgagggacctcgcccggggggcggtcgaactcgtgctagcgagttaccaggcccgggaccccaacttctccccatggatggcgctggaggagttccctcccgggaccgaggacgatgcgcgcgcgcgcgtccgggatgccgccgaccacatcgtcaacggcttcgagggctcggcccctcggctcgcgttcgcccccagctccgacgaggagggcgatgccagcggtgaggacgacggtggcgacgaggccggcgacccgggcgcgtcagaatga

SEQ ID NO: 23150 - DNA, 4674 bp, Oryza sativa
  Clone ID: TF_OsC359_8190
attcttcgcatgattttgaggatgtattttagaggcgatttgggacgcgacagtttattagagtagaagcctttcttttccgttggtcgtgtagacgctgcagcttcggaagatccgctcttcgtggaagttgaagccgacgtttgggaaagcgagcaaggcaagtcacatcatctccccctctattcaaaatcctcaaaatggttttaggctgggctcggggtgcatggttttgatagtagcacctcggccatataaggaccggtcttcgggcctctgttgcaaagcactaccgtacttccacatgtctagtgggtaaggcttagtttgtgactcagtctagttataaacaaaagtacacggatggagatggaagaagtcgggggtcgatggacatctgtcccgggggttccggccgtaggtgggattgggtcggtactcttgtctatggctaggatggattggaaactatgtcacgtcttccgtctgtataccgtggtgatggccggcagcgtcacccgtcgtggtttggacatgactggcttcgtcttggagctgcggggcatgtgcgtggtcttggggtatccacatggagtggactaccaggcccggccgcttccggagcaggagggtgacgatgcagagccccacgctggttgggaggtcactgcagtgatcctctctggctctcccgagcggacttcgctggcagtcaccgcgggtggagattctttccccgccgcttgccagaacgccgctctcctcgccatcggcactcttcaccagcgctacccggacgagttgcagcactcgccctaccgctaccaccctcgtcgcggaggagcccgcgactacgccaccttccgggatgctagctcggaggatgacgctaccatcgtgcacctggcgcgcatggtggaggcatacgacgcggctcgtatcgacttccatcagatggtgcgccgtgggatggtcgagaacaacttgaagatcctggagctgcgtcaggagaacctgcagctcaagaaggacctagacgcggtggaggcgcagctgcatcagctcaagatcgcccagggagaggactgccgccccaagcgtcgctgcgtctgccgcagccagaagatcaccgcccgcaagagcacctccaggcccgagcttgttcgtcagtccctggcgtggacctgcttcgtggagacccctcgtgccgagcccgcgcccgtggttccccaggagggggaagcctccggcgttggtagcacggaggatgcgctgttgctcaccttccgccctggcccgtcgcagcggagaaatgctaataccggtgatggcaaccaacctgaaggcagcaaccacaaccaccaaggcaacccacctccacctcctcctccgcctccacctccaccaccagataccaacgccattctcacccaaatcctcgcccagcaagccaacatgatgactgctttcctccaccacctccaaaatccgccacaacataatgctcccccaccacctccccaacactctaaactcgccgagttcctccgcatccgtccacccaccttctctagctccaacaaccctgtggatgcgttggattggttgcatgccgtggggaagaagctagacacggtgcggtgcagtgatgaggagaaagtcgtcttcgccgcccaccagctgcagggacccgcatctctatggtgggaccacttccaggctacgcagcccgaggggcaaccgattacttgggcccgcttcaccgccgctttccggagaacccatgtgcccgctggagtcgtggctcttaagaaaagagaattccgagagttgaagcaaggcaaccgctccgtgatggagtatttgcacgagttcaacaacttggcccgttatgctccggaggatgtgcgggaagatgaggagaagcaagagaagttcttggcaggaatggaccccgaactgtctgttcgtctagtctctggggactatcctgatttccaacgtctggtggacaagagcatccgcttggaggccaagcacaaggagctggagtcgcacaagcgccgcttggcgaacttccgcaatcagcagggtgctaaccagagggtccgctacaccaatccctacccagggggaacctcctcgcagcagcagcagcagcagcaacctcgcccagcgccccgacctcaattcgtggtgcgcgtcccacagccgcagcagcagcagaatcagcaagggactcgtgcgccccgtcctcctacgccaactgtgcagcccgttcaaggccgcagggacgctcaaggtccgcagcggctgtgcttcaactgcttcgagcccggacactttgcggataaatgtccaaagccaaggcgtcagcaaggccaagcgcctccccgctccaacaacggcgggaaggatgtcattcggggtcgtgtgaatcacgtgacggccgaggacgtgctgacaactccagacgtcatcgttggtacgttcctcgttcattccatccccgctacaattttgttcgactctggagcttcccactcgtttatatctgtgccattcgtggggagaaatcagttgggggtagaaaggcttagaaaccctctgctcatcaccacccctggaggggttatgacagcaaagtattatagccctgccgtccctatagaaattcaggggattccttttccctcggatctgattctgctagacaccaagaacttggatgtgattcttgggatgaattggttggctcaattccaaggagtagtggattgcgcgcggcgcactgtcactctgtaccgagggccagaacaaccggttgttttctttgcacctccaacctctgtcagaagttcagaactgcatcagataggtctgtcagaaatccccatagtcagagagttcggagacgtgtttccggaagaactacccggaatgccgcccaagcgagagattgagttccggatagatcttgctccaggaaccactcctctgtacaagcgaccctaccgtatggcagcaaatgaactggccgaagttaagaaacagttggaagagttgaaagaaaaggggtatatacgtccgagtacttccccctggggtgctcctgtgatttttgtggagaagaaagacaagacgaagaggatgtgcgttgactacagagctctcaatgaagtcaccatcaaaaacaagtatcctcttccccggatcgatgacctgttcgatcagcttaaaggtgccactgtattctccaagatcgatcttcgttccggatatcaccaattacgtattcgtgaagaagatattccgaagaccgcattcaccacgcgatacggactgtatgaattcacggtgatgtcgttcggtttaaccaatgcacctgccttcttcatgaacttaatgaacaaagtgttcatggaatacttggacaagtttgttgtgccgcgccgcgccgccgttgcagccgccgtcgtcagtcgccgtcgccaccatcgggttcgcaaggtcgccgccgtccccgtccaccgcttcgccgccgccgaagaccgccggagcaccgtcgccgccgtcgacccgatcttctccgccgccttttcctcgacgccgccgccgtccgttggtcttccgccgacgttttggtcatcggtgagttcgccgcgccgtgatctacgtcttggtgccctccgtttgtgccgtagagccgccgttcgccggcgagcatgcgccgtccgagccgtccgagccgccgagccgccgccggtgctgacgtcgtcgctgaccccctttccgaggtaccgtggtggtactgaggcacatggtgacatgatgtggggctgtgtcttgtgggtacagtggtacacctctggccagagatactaccggaggttcatcgagaacttctccaaaatcgctcgacccatgacacagttgttgaagaaagaagagaaatttgtgtggagcccgcaatgcgagaaggcgttccagactctcaaagaaaagctggtttcctcgccggtgttaatcttgccggatactcgcaaggatttcatggtgtactgtgatgcttcgcgccaaggattgggcctctcggtccacggcggaccgggagcacgcggctggcggcggccggcgccgtgggtcccacgcgtcagccgcacccgcgggcgcgggcggctgacggccgggccccacctggcagccgcggggcgcgcccgaaggcggcctcgccggcacggccgacgggagaacggcgcacccgcgccccgatggtcgccgccggcgaccaacggcgcggcggagtggcacccgagagagaggagggaagggggaagcgaacggagcggtccacggctcaccccggtcgacggcgacgacgggaacggcggccgaaaacggagaaaggcggcggcgcggttcgggacgacgaggacgacggcgttccggcggtcggcgagcgaagcggaggggcggacgaggtcgacgacgacgcggcgaagccgaaggagacgacgccgagaggggaggaagtccggagcgacggcggcggcgaaccggagctcggcggcgacggcggagagaaggtgcgacggcgcgagcacgattccgacggggagagcgagcggcgagcggcggaaacggaggaggagagcacgggggacgtttaaatag

SEQ ID NO: 23151 - DNA, 6446 bp, Oryza sativa
  Clone ID: TF_OsC359_8241
accgccaccccacccagcgcgccacccccgccgcaccacagcgcccccaacccccccccccacccgaaaccccaccccggcctcgcccccgcccgccccgcccgcccccccaacccggccccgcccccccctcgccccgacccccgccacacgcccgcccacccccctcccgccgccccccctcaccccccccccccccaccggccccgccgcgccccgccccccccaccccccgcgccgccccccatcccgcccgccccgccccccgccgccccgcccggaccccaccccccgacgcgcacaaccccactccccccccccgccccccccccggccccccccccgccccccccccgccgaacgccccgcaccccaagaggccagcccccgttaagccatccgtgcccccgggcgtcggcgacagggcggggcaacaccagaccgggctgacggcgaaccaggcgggaaaagcaccgcccggcgccctcagatgcagatgacgggtgggaacccacggcgccggccggtgtgagcccgggtgcgcccgggtccaccgtggacccacctcggccatataaggaccggtcttcgggcctctgttgcaaagcactaccgtacttccacatgtctagtggggcaaatgaaggctacacgagctgcggcccggtagtcgagatgtcatggcacagggccggtgtcctgctgctaggggctcagtcctgcctacctgtcccgggggttccggccgtaggtgggattgggtcgatgtacacctctgatcagagtataatctattcgaatagccgcgccctcggttatgggcaagccgagcaatgtacccaaatggccggcagcatcagccgtcgtggtctggacctgactggtttcgtcttggagctgcggggcatgtgcgttgtcctggggtatccgcatggagtggactaccagggcaggccgctcccggagcaggagggtgacgatgcagagccccacgctgcttgggaggttactgcagtgatcctcaccggctcacccgagaggacttcgttggcagtcaccgcgggtggagattctttctccgtcacttgccagaacgccgctctcctcgccatcggcactcttcaccagcgctacccggacgagttgcagcactcgccctaccgctaccaccctcgtcgcggaggagcccgcgactacgccaccttccgggatgctagctcggaggatgacgctaccatcatgcacctggcgcgcatggtggaggcgtacgacgcggctcgtatcgacttccatcagatggtgcgccgtgggatggtcgggaacaacatgaagatcctggagctgcgtcaggagaatctgcagctgaaaaaggacctagacgcagtggaggcgcagctgcatcagctcaagatcgcccagggagaggtctgtcgccccaagcgccgccgcgtctgccgcagccagaagatcaccgcccgcaagagcacctccaggcccgagcttgttagtcagtccctggcgtggacttgcttcgttgagatcccccgtggttcctcaggagggggaagcctccggcgttggtagcacggaggatgcgctgttgctcaccttccatggtgacgaccaggagaagtgctgtcaccggtgatggcaaccaacccgaaggcagcaaccacaacaaccatggcagcccacctccacctcctcctccgcctccaccaccaccaccagacaccaacgccattctcacccaaatcctcgcccagcaggccaacatgatggctgctttcctccaccacatccaaaatccgccacaacataatgctccaccaccacccccacaacactctaaactcgccgagttcctccgcatccgtccacctaccttctctagctccaacaaccccgtggatgcgttggattggttgcatgccgtggggaaaaagctagacaccgtgcagtgcagcgatgaggagaaagtcgtcttcgccgcccaccaattgcaggggcccgcatctctatggtgggaccatttccaggctacgcagccagaggggcagcctattacttgggcccgcttcaccgccgccttccggaggacccatgtgcccgccggagtcatggcccttaagaaaagggaattccgagagttgaagcaaggcaaccgctccgtgatggagtatttgcatgagttcaacaacctggcccggtacgccccggaggatgtacgggaaaatgaggaaaagcaggagaagttcttggcaggaatggaccctgagctgtccgtgcgtctagtctccggggactatccggatttccaacgtctggtggacaagagcatccgcttggaagccaagcacaaggaactggagtcgcacaagcgtcgcttggcgaatttccgcaatcaacagggagctaaccaaaggatccgctacaccaatccctatccagggggatcctcctcgcagcagcaacaacagcagcagcaaccatgctccgcgccccgacctcaattcgtggtgcgcgtcccacagccgcagcagcagcagagtcagcaagggacccgtgcgccccgtcctcctacgcccgccgtgcagtctggtcaaggccgcagggacgttcaaggtccgcagcgtctgtgcttcaactgcttcgagcccgggcactttgcggacaaatgcccaaaaccgcggcgccagcaaggccaagcgcctccccgctccaacaacggtggtaaggatgtcattcggggtcaggtgaaccacgtgacggccgaggacgtgctgacaactccagacgtcatcgttggtacgttcctcattcattccatccctgctaccattttgttcgactctggagcttcccactcgtttatatctgtgccattcgtggggagaaatcagttgggggtagaaaggcttaggaaccctctcctcatcaccacccctggaggggttatgacagcaaagtattatagtcctgccgtccctatagaaattcaggggattccttttccctcggatctgattcttttagacaccaagaacttggatgtgatccttgggatgaattggttggctcaattccaaggagtagtggattgtgcaagacgcactgtcactctgtaccgagggccggaacaaccggttgttttctttgcacccccaacctctgtcagtagttcagaacttcatcagataggactgtcagaaatccccatcgtcagagagttcggagacgtgtttccggaagaactacccggtatgccgcccaagcgagagattgagttccggatagatcttgctccaggaaccactcctctgtacaagcgaccctaccgtatggcagcaaatgaactggctgaagttaagaaacagttggaagagttgaaagaaaaggggtatatacgtccgagtacttccccctggggttctcctgtgatttttgtggagaagaaagacaagacgaagaggatgtgcgttgactacagagctctcaatgaagtcaccatcaaaaacaagtaccctcttccctggatcgatgatctgttcgatcagcttaaaggtgccacggtattctccaagattgatcttcgttccagatatcactagttgcgcatccgtgaagaagatattccgaagaccgcattcaccacgtgatacggactgtatgaattcacggtgatgtcattcggtttaaccaatgctcctgccttcttcatgaacttaatgaacaaagtgttcatggaatacttggataagtttgttgtggttttcattgatgacattctggtatactcacaatcagaggaagaccatcagcaccatctccgtctggtgttggggaagttgcgggaacatcaattgtatgccaaacttagcaagtgtgagttctggttgtccgaagtcaaattcttagggcacgtgatatctgctaaaggagttgctgtggaccccgaaacagtgaccgccgtcactgattggaagcaacccaagacagtcactcaaattcgcagtttcttaggtttggcaggatactaccggaggttcatcgagaacttctccaaaatcgctcgacccatgacacagttgttgaagaaagaagagaaatttgtgtggagcccgcaatgcgagaaggcgttccaaactctcaaagaaaagctggtttcctcgccagtgttaatcttgccggatactcgcaaggacttcatggtgtattgtgacgcttcgcgccaaggattggggtgcgtgctcatgcaggacggtcatgtggtggcctatgcctcacgccagctacggcctcatgaaggcaactttccaacggagagaagcatcaaggcaacacaaatccccgccaagattaccgtttcagcctaactccagtgccaggacagaggaatcgaaatgagaaaagaaaatgccgagtccgggaagacatctgttgcttcaattgtcaaggaatgggtcatttcgccgacaagtgcccaaaaccgagaaacatagctgccggcacgtcagtccacgcaactccctgcaatcagaagcttgctcctcagcaaattgtcatccatgcatcccgaagcagtcctatagcccgcgttgcaacagctctaactccagcgagtgcattactgtcgcgaccgggaaaattgccttttcccgaacgcaccacggtatacagacggaagacgtgacatagtttccaacccatcctagccatagacaagagtaccgacctaatcccgcctacggccggaacccccgggacaggcaggcgagactgagcccctagcagcagggcaccaaccctctgccatgacatctcgactaccgggccgcagctcgtgtagccttcatttgccctggagaatgtccatcgacccccgacttcatccatctccaatccgtgtacttttgtttataaccagactgagccacaaactaagccttacccactagacatgtggaagtacggtagtgctttgcaacagaggcccgagcttaatccttatagtggccggggtgctacttcccacaactggcatgcacccaaaccccaccagaaaacaggttttaggggttttgaaagaggaagagagagagaacggccttccgaaccttcagcgacgaccgcgaaccacgcttcgggaacctccggaacgacgaaagctacgcgaagcacacaagcaaagctacaagcctataaagaagcaataacaacacataaaaagaaaaccgagtacacagagacggtccacgggtcgacggaagcggaccccgtgtgtcaaccgaggcgagtggccaacaaacggactccactagacaccacacgggctgcacacgtagaaaccacgcggctaccgagcgggcacactaacacggtcaccacacgcacaagcgaacgactaccgacaccggtacacggcggcggcgatccttggacaaggcttgacgacgcggagccgaggacgaagacgaggacggggctgccgcggcttgcttgacggacgcggacgacggacgagaacggctcgacggagggacgaacgccacgacgaccgggaacgacgagaggacgacgacgacgacgacgaccgggaccggcgagtaggcgacaaggacagccggcagcggctgcacggagacgaggacggtgtggaacacgccgcagcgatgatgatgacggaggcggtgccgcgagacgacgagccgggcgaccgacgggacgtcgatccagcggctgagcggaggaggggacggcgtggaacgcgctgctgcgatgttggagaaggtggtggtgcagcggggcgacgagccgacgaggaggaatgggtggttggcgcggcggcggcgttccggcgaacttcgggcgaggaggaggtgatgctggggaaggagacgatgccacggtgtcgaaggaggagacagcggcgtcgatcggcgcaccggcgacgaacagcagccggctggagggagtgggtggcggcaatgccaccggttgccggcggggacgcgcctccggtggtctccgcgcgaaacggaggcgacgccggtggaggggaagtgtcacgcccagaaattcccgaatagaattccaagcagaatgtgtattaaaacccccgtccaggaccagccggggtacacaaacgacaatgttgacatacagatccacgtcttacaaacattataaaggtcttacagaaatgcagcggaaaacaaaagataaccggagctaatccttgacttgaactgcagcgggaacaccactccacaggcatcctcgacggcacggacaaagcctactcctcggagaacccgccatcggacacatactcgagctctgggattggggaaaatagagcaaggctgagtactacccactgtactcagcaagtcataccggaacgggggtatgatgcagggattccacaagggatagctaagcag

SEQ ID NO: 23152 - DNA, 6573 bp, Oryza sativa
  Clone ID: TF_OsC359_8245
ttagtatggtgacatgccgatgggtgtgttataagcagtcctatattcccaaagtgcatcaggtagccttttcttccatgccttccccatctcattgacagtcttctgcagaatattcttgatttgtctgttgctcgtttctacctgtctacttgtctggggatgatatagagtggcaatattgtgttgagccccaagtttttgcaaaaagtttcggaaggtcttattgatgaaatgggaccctccgtcacttatcaccatccccagagttccaaaacgagggaagataatctcatggaacatctgacgggcgtgcttggcgtctgcggccctgcatggcattgcctctacccacttggacacatagtcaacggccaccagaatatactcgcagtcataggactttgggaaaggtcccatgaagtcgatgcagatctttgcgtatgtcctaaatgctccatagtgacctccatatggggcagcatgacacttctcaatgatcttcatgccttcatctaccggaacgcatctccgtagtagaccatctgaacaaactctgtacaagtaaggtgcatcccacaagtgcctgcggctctcgtagatcaacctcttcttattttctcccggtggtacatgcctcacaaggataaagttgacgatggctgcataccacgggtcaaagtctgtgactttcaacagcatgtcgtctcgcagatagtcatttatcagtagctctcctctctctccgccgtcgccgccgagctccgttccgccgccgccgccgctccggacttcctcccgactcggcgacacctccgtccgcttcgccgtgttgccgtcgaccccgtccgccgctccgcttcgcccgtcgactgccggagcgccgtcgccatcgtcatcccgagccgcgccgccgtcttcctccgctccgtccgccgtttccaccgccttcgccgtcttggggtgagccgaagaccgccgttcgccttccccctttcctcctctctctcgggtgccactccgccgcgccattggtcgccggcggcgaccatcggggcgcgggtgcgcgccactcccgtcggccgcgccggcgaggccgccctcgggtgcgccctcgcggctgccaagtggggcccggccgtcagccgcccgcgcccgggggggtgcggctgacgcgcgggacccacggcgccgaccgccgccagccgcgtgcgccccggtccaccgtggaccgagcggctgacgcgtgggccccacttcccgtggacccgggcaaatgaaggctacacgagctgcggcccggtagtcgagatgtcatggcacagggccggtgtcctgctgctaggggctcagtcctgcctacctgtcccgggggtttcggccgtaggtggggttgggtcggtactcttgtctatggctaggatgggttggaaactatgtcacgtcttccgtccgtataccgtggtgatggccggcagcatcaaccgtcgtggtctggacctgactggcttcgctttggagctgcggggcatgtgcgttgtcctggggtatccgcatggggtggactaccagggcaagcagctcccggagcaggagggtgacgatgcagagccccacgctacttgggaggttactgtagtgatcctcactggctcacccgagaggacttcgttggcagtcaccgcggatggtgcgtcgtgggttggtcgagaacaacaagcagatcctggagctgcattaggagaatctgcagctgaagaaggacctagacgcagtggaggcgcagctgcgtcagctcaagatcgcccagggagaggtctgtcgccccaagcgtcgccgcgtctgccgcagcctgaagatcaccgcccgcaagagtacctccaggcccgagcttgttcgtcagtccctggcgtggacctgcttcgtcgagacccctcgtgccgagcccgcgcccatggttcctcaggaggatggagcctccggcgttggcagcacggaggatgcgctgctgctcaccttccgccctggcccgtcgcagcagtagacgagcagttagtaggattgcgtatggtgacaaccaggagaagtgctgttaccggtgaaggcagtcaccccgaaggcagcaaccacaacaaccatggcagcccacatccacctcctcctccgcctccaccaccaccaccagacaccaacgccattctcactcaaatcctcgcccagcaggccaacatgatggctgctttcctccaccacatccaaaatctgccacaacataatgctccaccaccacccccacaacactctaaactcgccgagttcctccgcatccgtccacctaccttcgctagctccaataaccccgtggatgcgttggattggttgcatgccgtggggaaaaagttagacaccgtgcagtgcagcgatgaggagaaagtcatcttcgccgctcaccaactgcaggggcccgcatctctatggtgggaccatttccaggctacgcagccagaagggcagcctattacttgggcccgcttcaccgccgctttccggagaacccatgtgcctgccggagtcatggcccttaagaaaagggaattccgagagctgaagcaaggcaaccgctccgtgatggagtatttgcatgagtttaacaacctggcccggtatgccccggaggatgtacgggaagatgaggagaagcaagagaagtttttggcaggaatggaccctgagctgtccgtgcgcctggtcttcggggactattcggatttccaacgtctggtggacaagagcatccgcttggaagtcaagcacaaggaactggagtcgcacaagcgtcgcttggcgactttccgcaatcaacagggggctaaccaaagggtccgctacaccaatccctatccagggggatcgtccttgcagcagcaacctcgctccgcgccccgacctcaattcgtggtgcgcgtcccacagccgcagcaacagcagagtcagcaagggactcgtgcgccccgtcctcctacgccagccatgcagcctggtcaaggccgcggggacgttcaaggtcagcagcgtctgtgcttcaactgcttcgagcctgggcactttgcggataaatgcccaaagccgcggcgccagcaaggccaagcgcctccccgccccaacaacggtggtaaggatgtcattcggggtcgggtgaaccacgtgacggccgaggacgtgctgacaactccagacatcatcgttggtacgttcctcattcattccatccctgctaccattttgttcgactctggagcttcccactcgtttatatctgtgccattcgtggggagaaatcagttgggggtagaaaggcttaggaaccctctgctcatcaccacccctggaggggttatgacagcaaagtattatagccctgccgttcctatagaagttcagggaattccttttccctcggatctgattcttctagacaccaagaacttggatgtgatccttgggatgaattggttggctcaattccaaggagtagtggattgtgcaagacgcaccgtcactctgtaccgagggccggaacaaccagttgttttctttgcacccccaacctctgtcggtagttcagaacttcatcagataagactgtcgaaaatccccatcgtcagagagttcggagacgtgtttccggaagaactacctggtatgccgccgaagcgagagattgagttccggatagatcttgctccaggaaccactccccagtacaagcgaccctaccgtatggcatcaaatgaactggccgaagtcaagaaacagttggaagagttgaaagaaaaggggtatatacggccgagtacttccccctggggtgctcctgtgatttttgtggagaagaaagacaagacaaagaggatgtgcgttgactacagagctctcaatgaagttaccatcaaaaacaagtaccctcttccccggatcgatgatctgttcgatcagcttaaaggtgccactgtattctccaagattgatcttcattccggatatcaccaattacgtattcgtgaagaagatatccctaagaccgcattcaccacgcgatacggactgtatgaattcacggtgatgtcgttcggtttaaccaatgctcctgccttcttcatgaacttaatgaacaaagtgttcatggaatacttggataagtttgttgtggtttttattgacgacattctggtgtactcacaatcagaggaagaccatcagcaccatctccgtctggtgttgggaaagttgcgggaacatcaattgtatgacaaacttagcaagtgtgagttttggttgtccgaagtcaaattcttagggcacatgatatctgctaaaggagtcgctgtggaccccgaaacagtgaccgccgtcactgattggaagcaacccaagacagtcactcaaattcgcagcttcttgggtttggcaggatactaccggaggttcatcgagaacttctccaaaatcgctcgacccatgacacagttgttgaagaaagaagagaaatttgtgtggagcccgcaatgcgagaaagcgttccaaactctcaaagaaaagctggtttcctcgccagtgttaatcttaccggatactcgcaaggacttcattgtgtattgtgacgcttcgcgccaaggattggggtgcgtgctcatgcaggaaggtcaggtggtagcctatgcctcacgccaactacggccccatgaaggcaattaccctacccatgatttggagttagccgctgtggttcatgctctaaagatctggcagcactatctcattgggaatcgctgtgaaatatatactgatcataagagtttgaaatacatcttcactcagtcggatctgaatcttcggcagaggagatggttagaactcatcaaggattatgatgtgggaattcactatcatcctggtaaggccaacgtggtcgccgacgctctaattcgaaaaagccattacaacactcttgacgtccgtggcattccacccgaacttaatcaacagatggaagccctgaacctaagcatagttggtcgtggattcttggctacgctggaagccaagcttaccttgctcgatcaaatccgcgaggctcagaagaatgatccggatatgcgtggactcctcaagaatatgaaacagggtaaagccgctggtttcacagaggatgaacacggaaccctatggaacggaaatcgggtatgtgttccagacgacagagaacttaaacagctgatacttcaggaagctcacgaaagtccttattccatccaccctggcagtacgaagatgtacttagacttgaaagagaaatactggtgggttagtatgaagcgggaaattgcagagttcgtggccctttgtgatgtgtgccagcgtgtcaaggcagagcaccaacgaccggccggacttctccaacctctccaagtaccagaatggaaatgggatgaaattgggatggatttcatcaccggacttccaaaaacccaaggtggatatgattctatatgggtagttgttgaccgattaaccaaggtagctcggttgattcctgtgaagaccacctatggagggaacaaactagccgagctctacttcgctaggatcgtgagtctccatggcgttcctaagaaaattgtatctgataggggaagccaattcacctctcacttttggaagaagctccaagaagagctgggtacccgattaaatttcagcaccgcgtatcacccgcagacagatggacagaccgagcgtctaaatcagatcctagaagatatgcttcgtgcatgtgtcctagatttcgggaagacctgggataagagtctcccctatgccgagttctcttacaataacagctaccaagccagcatacaaatggcaccctatgaagcgttgtatggacgcaaatgccggacaccgctattgtgggaccaagttggggaaagccaagtgttcaggactgatatcctgagagaagctgaagctaaagtcagaaccattcgggataatctaaaggtggcacagttccggcagaagagttatgcagataaccgacgccgtaatctgaaatttgcagtggacgattttgtgtaccttcgggtcacgccattgcgaggtgtacacaggtttcagacgaaagggaagctcacacctcggtttgtaggtcctttccgtatcattgctcgacgcggggaagtcgcttaccagttggagctgcccacctccttgggcaacgtgcatgatgtgttccatgtgtcgcaactcaagaaatgtcttcgagtgccatccgagcaggccgattcagagcaaattgaagttcgcgaagacttgacctacgtggagaggccagtgaaaatcctggacaccatggaacgcaggaccaggaaccgggtaatccctttttgcaaggtccaatggagcaaccacgctgaggaagaagctacttgggagcgtgaagacgagatgaaagcagcccatcccgatcttttcgccagttcttccgaatctcggggtcgagattccgtttaa

SEQ ID NO: 23153 - DNA, 6849 bp, Oryza sativa
  Clone ID: TF_OsC359_8260
aatcctcttcctcctttgggccaagcccagcccaaagtctccctctcctccctctctttccctcctctcccgggcctctcctccccctcccggcccagctccctcccctcccctctctctcccgggcctcccctccctccactcctcctgggccggccgcccggcccaagccgcgcccaagccaggccgagccgagccagccgcgtgcgcacgcgcgacgcgcgtgcgctgaccgcgcgccctcccgcgctctcccgtggccgccccgcctctccccgccttctccttctctctctccggcgccggccggcctccagccgcacctcccgcctcgcccgtgcaccgtccggctgcaccgtcacctctcccggcgtcgcagctgcctcctcttccccagcttcgcctccgtttcatggggaaatcaccggagacgcgtcctcgccgacgactagtggtgtcgccaccactccaccgtctccagccatccctgccgcctcgcctgagcgccggccgacgtcgctgccacctctgtcggtgctgcagcgccatcctcttctccggcccggctgcggcgtcgcccgaagttcgccggaacgccgccgccgcgccaaccacccattcctcctcgtcggctcgtcgccccgctgcaccaccaccttcttcgtcaccgttcgtcctcgccgatcgacgtcccatcgttcgcccggctcgtcgtctcacggcgccgcctccgtcgtcggattcacagcagcgtgttccacgccgtcctcgcctctgtgcagctgctgccggctgccatcgtcgtctcctcatcggccccggtcatcgtcgtcgtcgtcgtcctctcgtcgttcccggtcgtcgtggcgttcgtccctccgtcgagccgttctcgtccgtcgtccgcgttcgtcaagtgtgccgctgcagcccccgtcctcgtcttcgtcctcggctccgcgtcgtcaagcctcgtgccggccgcgtctcgcccatgtaccggtgtcggtagtcgttcacgcgtgcgggtggtgaccgtgtagtgtccgtgttagtgtgcccgctcggtagccgcgtggtttccacgtgtgcaggccgtgtggtgtttagtggagtccgtttgtcggccactcgcctcggttgacacacggggtctgcttccgtcgacccggggaccgcctctgtgtactcggttttctttttatgtattgttattgcttctttataggcttgtagctttgcttgtgtgcttcgcgtagcttctgtcgttccggaggttcccgaagcgtggttcgtggtcgtcgccgaaggttcggaaggccgttctctctctcttcctctttcaaaacccctaaaacctgttttcggtggggtttgggtgcatgccagtcgtgggaagtagcaccccggccactataaggattaagctcgggcctctgttgcaaagcactaccgtacttccacatgtctagtggggcaaatgaaggctacacgagctgcggcccgatggccggcagcgttacccgtcgtggtttggacatgaccggcttcgtcttggagctgcgaggcatgtgcgtggtcttgggatatccacatggagtggattaccaggccaggccgctcccggagcaggagggtgaggatgcagagcctcacgctggatgggaggtcactgcagtgatcctctccggctctcccgagcggacttcgctggcagtcaccgcgggcggagactccttccccgccgcttgccagaacgccgctctcctcgccatcggcactcttcaccagcgctacccggacgagttgcagcactcgccctaccgctaccaccctcgtcgcggaggagcccgcgaccacgccaccttccgagacgccagctcggaggatgacgctaccgtcgtgcacctggcacgcatggtggaggcgtacgacgcggctcgtatcgacttccatcagatggtgcgtcgtggcatggtggagaacaacatgaagatcctggagctgcgtcaggagaatctgcagctcaagaaggacctcgatgcgttggaggcgcagctgcatcagctcaagatcgcccagggagagggcagccgccccaagcgtcgccgcgtctgccgcagccagaagatcaccgcccgcaagagcacctccaggcctgagcttgtccgtcagtccttggcgtggacttgcttcgtcgagacccctcgtgccgagcctgcgcccgtggttccccaggagggggaagcctccggcgttggtagctcggagggtgcgctgttgctcaccttccgtcctggcccgtcgcagcgctctccttctctgtttgctggttctgtgtggggttttcagatggtgacgaccaggagaaatgttaacaccggtgaaggcaaccaacccgagggcagcaaccccaacccccaaggcaacccacctccaccaccaccaccagacaccaacgccattctcacccaaatcctcgcccaacaagccaacatgatgaatgctttcctccaccacctccaaaacccgccacaacagaatgctccaccaccacctccccaacactctaaactcgccgagttcctccgcatccgcccacctaccttctctagctccaacaaccctgtggatgctttggattggttgcatgccgtggggaagaagttagacacggtgcagtgcagcgacgaagagaaagtcgtcttcgccgcccatcagctgcagggacccgcgtctctctggtgggaccacttccaagctacgcagcccgaggggcaaccgattacttggactcgcttcaccgccgctttccggagaacccatgtgcccgccggagtcgtggccctcaagaaaagagaattccgggagctgaagcaaggcaaccgctccgtgatggagtatttgcatgagttcaacaatctagcccgttacgccccagaggatgtgcgggaagatgaggagaagcaggagaagttcttggcaggaatggaccctgagctgtctgttcgtctagtctctggagactatccggatttccaacgactggtggacaagagcatccgcttggaggccaagcacaaggaactggaatcgcacaagcgccgcctggcgaatttccgcaatcaacagggtgctaaccagagggtccgctacaccaatccctacccagggggatcctcctcgcagcagcagcagcagcaacctcgcccagcgccccgacctcaattcgtggtgcgcgtcccacagcagcaacagcagcagaatcaacaagggactcgtgcaccccgtcctcctacgccagcggtgcagcccgttcaaggccgcagggacgcttcaggtccgcagcggctgtgcttcaactgcttcgagcccgggcactttgcggataaatgcccgaagccaaggcgtcagcaaggccaagcgcctccccgctccaacaacggcgggaaggatgtcattcggggtcgtgtgaatcacgtgacggccgaggacgtgctgacaactccagacgtcatcgttggtacgttcctcgttcattccatccctgctacaattttgttcgactctggagcttcccactcgtttatatctgtgccattcgtggggaaaaatcagttgggggtagaaaggcttagaaaccctctgctcatcaccacccctggcggggttatgacagcaaagtattatagccctgccgtccctatagaaattcaggggattccttttccttcggacctgattcttctagacacaaagaacttggatgtgattcttgggatgaattggttggcacaattccaaggagtagtggactgcgcgagacgcactgttactctgtaccgagggccagaacaaccagttgttttctttgcacctccaacctctgtcagaagttcagaactgcatcagataagtctgtcagaaatccccatagtcagagagttcggagacgtgtttccggaagaactacctggtatgccgcccaagcgagagattgagttccggatagatcttgctccaggaaccactcctctgcacaagcgaccctaccgtatggcagcaaatgaactggccgaagtaaagaaacagttggaagagttgaaagaaaaggggtatatacgtccgagtacttccccatggggtgctcctgtgatttttgtagaaaagaaagacaagacgaagaggatgtgcgtcgactacagagctctcaatgaggtcaccatcaaaaacaagtaccctcttccccggatcgatgatctgttcgatcagcttaaaggtgccactgtattctccaagattgatcttcgttccggatatcaccaattacgtattcgtgaagaagatattccgaagaccgcattcactacgcgatatggactgtatgaattcacggtgatgtcgttcggcttaaccaatgctcctgccttcttcatgaacttgatgaacaaagtgttcatggaatacttggataagttcgttgtggttttcattgatgacattctgatatactcacaaacagaggaagaccatcagcaccatctccgtctggtgttgggaaagttgcgggaacatcaattgtatgccaagcttagcaagtgtgagttctggttgtccgaagtcaaattcttggggcacgtgatatctgctaaaggagttgctgtggaccccgaaacagtgaccgccgtcaccgaatggaagcaacccaagacagttactcagattcgcagtttcttgggtttggcaggatactatcggagattcatcgagaacttctccaaaatcgctcgacccatgacacagttgttgaagaaagaagagaagtttgtgtggagcccgcaatgcgagaaggcgttccaaactctcaaagaaaagctggtttcctcgcccgtgttaatcttgccggatactcgcaaggatttcatggtgtactgtgatgcttcgcgccaaggattggggtgcgtgctcatgcaggacggtcatgtggtagcctatgcctcacgccagctacgtcctcatgaaggcaactaccctacacatgacttggagttagcagcggtggttcatgctctaaaaatctggcggcactatctcattgggaaccgctgtgaaatatatactgatcataagagtttgaaatacatcttcacccagtcggatctgaatcttcggcaaaggagatggttagaactcatcaaggattatgatgtgggaattcactatcaccctggtaaggccaatgtggttgccgacgctctaagtcgaaagagccactgcaacactctcaatgtccgaggcattccacccgagcttaatcaacagatggaagccctgaacctaagcatagttggtcgcggatttttggccgcgttggaagccaagcccaccttgctcgatcaaatccgcgaggctcagaagaatgatccggacatgcatggactcctcaagaatatgaaacagggtaaagccgctggtttcacagaggatgaacacggaaccttatggaacggaaagcgggtatgcgttccagaaagcagagagcttaaacagctgatacttcaggaagctcatgaaagtccttattccattcacccgggtagtacaaagatgtacttagacttgaaggagaaatactggtgggttagcatgaagcgggaaattgcagagtttgtggctctatgtgatgtgtgccagcgtgtcaaggcagagcaccagcgaccggctggacttctccagcctctccaagtgccggaatggaaatgggatgaaattgggatggatttcatcaccggccttccaaaaacccaaggtggatatgattctatatgggtagtcgtggatcgattaaccaaggtagctcgattcattcctgtgaagaccacttatggagggaacaaactagcggagctctacttcgctaggatcgtgagtctccatggtattcccaagaaaatcgtatctgataggggaagccaattcacctctcacttttggaagaagctccaagaagagctgggtactcgattgaattttagcaccgcctatcacccgcagacagatggacagaccgagcgtctaaatcagatcctagaagatctgctccgcgcatgtgtactagatttcgggaagacttgggataagagtctcccctatgccgagttctcctacaataacagctatcaagccagcatacaaatggcaccttatgaagcgttgtacgggcgcaaatgccgaacaccgctattgtgggaccaagttggagaaagccaagtgttcgggactgatatcctgagagaagctgaagctaaagtcagaatcattcgggataatctaaaggtggcacagtctcggcagaaaagttatgcagataaccgtcgccgtgatctggaattcgcagtggatgattttgtgtaccttcgggtcacgccattgcgaggtgtgcacaggtttcagacaaaagggaagctcgcacctcggtatgtgggtcccttccgtatcatcgctcgacgtggagaagttgcttaccagctggagctgcccgcctccttgggtaacgtgcatgatgtgttccatgtgtcgcaactcaagaaatgtcttcgagtgccatccgagcaggccgactcagagcaaattgaagttcgcgaagacttgacctacgtggagaggccagtgaaaatcctggacaccatggagcgcaggaccaggaaccgggtaatccgtttttgcaaggtccagtggagcaaccacgccgaagaagaagctacttgggagcgcgaagacgagctgaaggcagcccatcccgatctcttcgccagttcttccgaatctcggggtcgagattccgtttaa

SEQ ID NO: 23154 - DNA, 7443 bp, Oryza sativa
  unsure (1)..(7443): unsure at all n locations
  Clone ID: TF_OsC359_8276
atgactggcttcgtcttggagctgcgaggcatgtgcgtggtcttggggtatccacatggagtggactaccaggccaggccgctcccagagcaggagggtgaggacgcggagccccgcgctgggtgggaggtcaccgcagtgatcctctctggctcccccgagcggacttcgctggcagtcaccgcgggtggggactccttccccgccgcttgccagaacgccgctctcctcgccatcggcactcttcaccagcgctacccggacgagttgcagcactcgccctaccactaccaccctcgtcgcggaggagcccgcgacttcgccaccttccgggatgctagcccggaggatgacgctaccatcgtgcacctggcacgcatggtggaggcgtacgacgcggctcgtatcgacttccatcagatggagaacctgcagctcaagaaggacctcgacgcggtggaggcgcagctgcaccagctcaagattgcccagggagagatctgccgccccaagcgtcgccgcgtctgccgcagccagaagatcaccgcccgcaagagcacctccaggcctgagcttgtccgtcagtccctggcgtggacttgcttcgtcgagacccctcgtgccgagcctgcgcccgtggttccccaggagggggaagcctccggcgttggtagctcggaggctctctctctgtttgctggttctgtgtggggttttcagatggtgacgaccaggagaaatgctgtcaccggtgatggcaaccaacccgaaggcagcaaccacaaccaccagggcaacccacctccacctcctcctccgcctccaccaccaccaccagacaccaacgccattctcacccaaatcctcgcccagcaagccaacatgatgaccgctttcctccaccacctccaaaacccgccacaacagaatgctccaccaccacctccccaacactctaaactcgccgagttcctccgcatccgcccacctaccttctccagctccaacaaccccgtggatgctttggattggttgcatgccgtggggaaaaagctagacacggtgcagtgcagcgatgaggagaaagtcgtcttcgccgcccatcagctgcagggacccgcatctctatggtgggaccatttccaggctacgcagccagaggggcaacctattacttgggctcgctttaccgccgccttccgaagaacccatgtgcccgccggagtcgtggcccttaagaaaaaggaattccgagagttgaagcaaggcaaccgctccgtgatggagtatttgcatgagttcaacaacctggcccgttacgccccagaggatgtgcgggaagatgaggagaagcaggagaagttcctggcaggaatggaccccgagctgtccgtccgtctagtctctggggactatccggattttcaacgactggtggacaagagcatccgcttggaagccaagcacaacaacaacagcagcagcaacctcgcccagcgccccgacctcaattcgtggtgcgcgtcccacagccgcagcagcagcagaatcagcaagggactcgtgcgccccgtcctcctacgccagctgtgcagcccgttcaaggccgcagggacgctcaaggtcagcagcgtctgtgcttcaactgcttcgagcccgggcactttgcggataaatgcccaaagccaaggcgtcagcaaggccaagcgcctccccgctccaacaacggcgggaaggatgtcattcggggtcatagaactgtcagaaatccccatcgtcagagagttcggagacgtgtttccggaagaactgcccggtatgccacccaagcgagagattgagttccgaatagatcttgctccaggaaccactcctctgcacaagcgaccctaccgtatggcagcaaatgaactagccgaagtaaagaaacagttggaagagttgaaagaaaaggggtacatacgtccgagtacttccccatggggtgctccggtgatttttgtagagaagaaagacaagacgaagaggatgtgcgttgactacagagctctcaatgaagtcaccatcaaaaacaagtaccctcttccccggatagatgatctgttcgatcagcttaaaggtgccactgtattctccaagattgatcttcgttccggatatcaccaattacgtattcgtgaagaagatattccgaagaccgcattcaccacgcgatacgggctgtatgaattcacggtgatgtcgttcggtttgaccaatgcacctgccttcttcatgaacttgatgaacaaagtgttcatggaatacttggataagtttgttgtggttttcattgatgacattctgatatactcacaatccgaggaagaccatcagcaccatctccgtctggtgttgggaaagttgcgggaacatcaattgtatgccaagcttagcaagtgtgagttctggttgtccgaagtcaaattcttggggcacgtgatatctgctaaaggagttgctgtggaccccgaaacagtgaccgccgtcaccgattggaagcaacccaagacagtcactcaaattcgcagcttcttaggtttggcaaggtactaccggagattcatcgagaacttctccaaaatcgctcgtcccatgacacagttgttgaagaaagaagagaaatttgtgtggagcccgcaatgcgagaaggcgtttcaaactctcaaggaaaagctggtttcctcgccagtgttaatcctgccggatactcgcaaggacttcatggtgtattgtgatgcttcgcgccaaggattggggtgcgtgctcatgcaggacggtcatgtggtagcctatgcctcacgccagctacgtcctcatgaaggcaactaccctacacatgatttggagttagccgcagtggttcatgctctaaaaatctggcggcactatctcattgggaatcgctgtgaaatctatatcgaccataagagtctgaaatacatcttcactcagtcggacctgaatcttcggcaaagaagatggttagaactcatcaaggactatgatgtgggaattcactatcatcctggtaaggccaacgtggttgccgacgctctaagtcgaaagggccattgcaacactcttaacgtccgtggcattccacccgaacttaatcaacagatggaagccctgaacctaagcatagttggtcgtggatttttggccgcgttagaagccaagcccaccttgctcgatcaaatccgcgaggctcagaagaatgatccggacatgcatggactcctcaagaatatgaaacagggtaaagccgctggtttcacagaggatgaacacggaaccctatggagcggaaagcgggagaaatactggtgggtttgcatgaagcgggaaattgcagagtatgtggccctatgtgatgtgtgccagcgtgtcaaggcagaacaccaacgaccggccggacttctccaacctctccaagtacctgaatggaaatgggatgaaattgggatggatttcatcaccggacttccaaagacccaaggtggatatgattctatatgggtagttgtggatcgattaaccaaggtagctcgatttattcctgtgaagaccacctatggagggaacaaactagcggagctctacttcgctaggatcgtgagtctccatggcgttcccaagaaaatcgtatctgataggggaagccaattcacctctcacttttggaagaagctccaagaagagctgggtactcgattgaatttcagcaccgcctatcacccacagacagatagacagaccgagcgtctaaatcaaatcctagaagatatgctccgcgcatgtgtactagatttcgggaagacctgggataagagtctcccctatgctgagttctcttacaataacagctatcaagccagcatacaaatggcaccttatgaagcgttgtacgggcgcaaatgccggacaccgctcctgtgggaccaagttggagaaagccaagtgttcaggaccgatatcctgagagaagccgaagctaaagtcagaatcattcgggataatctaaaggtggcacagtcccggcagaaaagttatgcagataaccgtcgccgtgatctggaattcgcagtggatgactttgtgtatcttcgggtcacgccattgcgaggtgtacacaggtttcagacgaaagggaaactcgcacctcggtatgtgggtcctttccgtatcgttgctcgacgcggagaagtcgcttaccaattggagctgcccgcctccttgggcaacgtgcatgatgtgttccatgtgtcgcaactcaagaagtgtctccgagtgccatccgagcaggccgactcagagcaaattgaagttcgcgaagatttgacctacgtggagaggccagtgaaaatcctggacaccatggagcgcaggaccaggaaccggcacatcccgatctcttcgccagttcttccgaatctcggggtcgagattccgtttaaggaggcgggcccgcccgccactctcgctgacgggtggggcccacctgtcatcgccttcctcccgccgcagccgccgctcgcccgtgccctaacgccgccgccgccgcggattccgccgcatcccgccgtccccgcgcgccataatgaggggggaatcattccccgcgattccctctcccaattcccccactttcccctctctctctccctcggattcgtccgatttccatcccgcaaacctcgccggcgcaatcaatggcggccgagatctccgcgcccgtttcctccctttccgggcacgctctccttctcccggtgctatttaaacgtctcccgtgctctcctcctccgtttccgccgctcgccgctcgctctccccgtgggaatcgagcccgcaccgttgcaccttntctccgccgtcgccgccgtgctccggttcgccgccgccgtcgctccggacttccttcccactcggcgtgaccttcatcggcttcgccgcggtcccgtcgacctcgtccgcgccctcggtttgctcgccgaccggcggagcaccgtcgtcctcgccgtcccgaaccgcgccgccgccttcttccgcttcggccgccgttcccgtcgtcgccgtcgaccgggccgtgcgccgccgtcgtttcagccgtcgccgtcgctcgggaagaccaccgtcgtgctcgccaagtcgtcgccgtcctcgtccgacccttcgccgtcgccggagatcaccggagcagcttcgccgtcgtcgacccgaaggttcccgccgcttcctcctcgtcgccgtcgccgtctgttggtcttccgccgccgtttaggtcaccggaaccagcatcctcaccggcttggcaccgccggatatgccggtaaggaagaggaatggcagcgtgaggatgaagaagcggaggaatcgtgcacaccgctcgtgtttggcgatatcccacacccttgggctaggaactgggccagggccaggtaccagaagaatgatgatggcacaatcttcatgccaaatgcagaagatcaacgagtatacgaagctataaaggagttggttgccgagcaacaagcctcgcaagaggcctgctctcaaagacgcgaggacgacctcctcacgaaagcgttgggcaacaaggaacaccgtggacggacacggggcgttgggtcttctgttccctggaagaatggatttccagactacaagtggcagtacaagaagcggacttccaacaaggcggagaaagatgcacgccttggagccaaaatccgggcgtcgataagagctgagctgacatctgaattcgacgaaaagctcgagtcgatgagggccaagattaggcaagagatccgagaagagcaacagaacccccaggccgccgctgctgctgcgcacgaagagttaggaagtcccacccaaaaacgcagcagttgcgcatcaactgagttggcggaaaattcaacatcggtcgacagcgccgtcgaccacataacagtaaccgaaccaacgatttgcaccctcacagttagggtgatgccgaccttcacggttccagcagccgagggacttgcgtacaagtcaaccctagagacaagagtgcatggagcgcaactcagggccgactgtgcaaatgttcaagtcgactcggtgaagcccgaatacgagctgttccctctgaagtatccaccgaacgacgaggtcctctcactaggaaatgcccgtggtaccttcatccaatggcccaaggacctcattgagatcagggttacaacgaggccaaccactgcagcaggcggtcgtccaccaaagagacccgcctctactccttcagcccctcctgctcaagatcgtcatgcacaatcttacgatgtgcagttgcagtacgacacggattttggggaggaccgaatggaggccgacagcaaggcgattcatgaacccccaccgatgaagaagagcaggaaggcacactcttcccctcagagaattactctcgataaacccgaagcaaatgggagaggaaggggaggaaaggtgcaggcctcgcttctagctccaaggaagctagatctgggcaagggccaggaagagactaagggcaaagaggtcaagaagaaatacgttgctccacaggagttcaaactaggcatgccattggttggagatgacgtgcttgccacaatgggcaccgcttggaaggaccttcacttatactacatggagaaatctaacgccaggaagccgagtaaagctaccgatatccttggagagcacgatggaaagccattccttggtccaacaaattatgtcgtggtcgacttcaaggatcttttcgacctctacaggctccgaacggtggacacaagcctccttaagtgctactccttgttaagttggcaatggtgtcagaagcatgcaccggaagttgccttccttgatccacaagtggtcactgtcacaaatctccagaatgaccgtcaaggaatggtcaactacatctacgacaccttgtggtcctgccgagacaaggagtacattattgcccattggatccttctggtcataacacctaagctgagtacatgtcactacctgaactccagaattgataagaacgcatatgattggaccccaattcaactagcgatagatgaagtgtgggcccaatacgtgcaaagaggaggcctcaggaagacaggacatgacaccgtcatcctcaaaaaagacttcccggtgaagcaacaaatagaccccctgagggtttggcgccacgtgtgtggcatagcgcaggcttatccggtccgcgacaggtcgcagcactcgtccctagtcggagccggcgtgaggactcctggagttggcacgtcagctccggccagatacattccaagcttcatcgcaatcattgcaaggaagccattgtatgaagaagggtag

SEQ ID NO: 23155 - DNA, 6253 bp, Oryza sativa
  Clone ID: TF_OsC359_8285
cggctcggcccatctccctccccctccctctcttctccccgcagcccatccggcctcttcccgcgcgcgcgcctcatacgggcgggcccgcccgccaccctcgctgacgggtggggcccacccgtcatccccttcctcccgccgctcccgccgcctcgcccgcgccctagcgccgccgccgccgcgaatcccgctgcctcccgccgtctccgcgtgcaataaagagggggaaatcactccccgtgatcccctctccctttccccccatttttccctctctctctcgcgtttaaacgggcggatttgcccccgcaaatctcgccggcgccactgatggcagccggacctcccgcgccggtttccccccttccccggccaccctctctcgacccggctctatttaaaccctccccgcacctcctccatctgtttccgcctctcgccgcccttcctcctcgccggaatcgagctcgcgccgtcgctctctctctgccgtcgccgtcgagctccggtccacctcccacctcggcgccgcctccttcggcttcgccgcatcctcgccgacctcgtccacccctccgtttcgctcaccgaccgccggaacgccgtcgaccccgtcgacccgagccgcgccgccgccttcctccgctccggccgcctttttcgtcgtcgccgtcgacctagggtgagccgtggaccgccgcttcttttcccccttcccttcccctctctcggccgccgctccgccgtgcctatggccaccgccggcgaccataggggcgcgggcgccgcctcccgccggctgcgccggcttggccgccctcgggcgcgccgagtggctgccgcgtggggcccggctcggccatataaggaccggtcttcgggcctctgttgcaaagcactaccgtacttccacatgtctagtggggcaaatgaaggctacacgagctgcggcccgatggccggcagcgttacccgtcgtggtttggacatgtctggcttcgtcttggagctgcgaggcatgtgcgtggtcttggggtatccacatggagtggattaccaggccaggccgctcccggagcaggagggtgaggatgcagagcctcacgctggttgggaggtcactgcagtgatcctctccggctctcccaagcggacttcgctggcagtcaccgcgggcggagactccttccccgccgcttgccagaacgccgctctcctcgccatcggcaccctgcaccagcgctacccggacgagttgcagcactcgccctaccgctaccaccctcgtcgcggaggagcccgcgacttcgccaccttccgagacgccagctcggaggatgatgccaccgtcgtgcatctggcacgcatggtggaggcatacgacgcagctcgtattgacttccaccagatggtgcgtcgcggcatggtggagaacaacatgaagatcctggagctgcgtcaggagaacctgcagctcaagaaggacctcgacgcgttggaggcgcagctgcatcagctcaagatcgcccagggagaggacagccgtcccaagcgtcgccgcgtctgccgcagccagaagatcaccgcccgcaagagcacctccaggcccgagcttgttcgtcagtccctggcgtggacttgcttcgtcgagacccctcgtgccgagcctgcgcccgtggttccccaggagggggaagcctccggcgttggtagctcggagggcgcgctgttgctcaccttccgccctggcccgtcgcagcggagaaatgttaacaccggtgaaggcaaccaacccgagggcagcaaccccaacccccaaggcaatccacctccaccaccaccaccagacaccaacgccattctcacccagatcctcgcccaacaagccaacatgatgaatgctttcctccaccacctccaaaacccgccacaacagaatgctccaccaccacctccccaacactccaaactcaccgaattcctccgcatccgcccacccaccttctccagctccaacaatcccgtggatgcgttggattggttgcatgccgtggggaagaagctagacacggtgcagtgcagcgatgaggagaaagtcgtcttcgccgcccatcagctgcaggggcccgcatctctatggtgggaccacttccaggctacgcagcccgaggggcaaccgattacttgggctcgcttcaccgccgctttccggagaacccatgtgcccgccggagtcgtggctctcaagaagagggaattccgagagttgaagcaaggcaaccgctccgtgatggagtatttgcacgagttcaacaatctggcccgttacgctccggaggatgtgcgggaagatgaggagaagcaagagaagttcttggcaggaatggaccctgagctgtctgttcgtctagtctctggggactatccggattttcaacgattggtggacaagagcatccgcttggaagccaagcacaaggagctggagtcgcacaagcgccgcttggcgaacttccgcaatcaacagggtgctaaccagagggtccgctacaccaatccctacccagggggatcctcctcgcagcagcaacaacagcagcagcaacctcgcccagcgcctcgacctcaattcgtggtgcgcgtcccacagcagcaacagcagcagaatcagcaagggactcgtgcgccccgtcctcctacgccagctgggcagcccgttcaaggccgcagggacgcttcaggtccgcagcggctgtgcttcaactgcttcgagcccgggcactttgcggataaatgcccgaagccaaggcgtcagcaaggccaagcgcctccccgccccaacaacggtgggaaggacgtcatccgtggccgtgtgaatcacgtgacggccgaggacgtgctgacaactcccgacgtcatcgttggtacgttcctcgttcattccatccctgctacaattttgttcgactctggagcttcccactcgtttatatctgtgccattcgtggggaaaaatcagttgggggtagaaaggcttagaaaccctctgctcatcaccacccctggaggggttatgacagcaaagtattatagccctgccgtccctatagaaattcaggggattccttttccctcggacctgattcttctagacactaagaacttggatgtgatccttgggatgaattggctggcacaattccaaggagtagtggattgcgcgaggcgcactgtcactctataccgaggaccagaacaaccggttgttttctttgcacctccaacctctgtcagaagctcagaacttcatcagatagaactgtcggaaatccccatagtcagagagttcggagacgtgtttccggaagaactacctggtatgccgcccaagcgagagattgagttccggatagatcttgctccaggaaccactcctctgcacaagcgaccctaccgtatggcagcaaatgaactggccgaagttaagaaacagttggaagagttgaaagaaaaggggtatatacgtccgagtacttccccttggggtgctcctgtgatttttgtggagaagaaagacaaaacgaagaggatgtgcgttgactacagagctctcaatgaagtcaccatcaaaaacaagtaccctcttccccggatcgatgatctgttcgatcagcttaaaggtgccactgtattctccaagattgatcttcgttccggatatcaccaattacgtattcgggaagaagatattccgaagaccgcattcactacgcgatatggactgtatgaattcacggtgatgtcgttcggcttaaccaatgctcctgccttcttcatgaacttgatgaacaaagtgttcatggaatacttggataagttcgttgtggttttcatcgatgacattctgatatactcacaatcagaggaagaccatcagcaccatctccgtctggtattgggaaagttgcgggaacatcaattgtatgccaagcttagcaagtgtgagttctggttgtccgaagtcaaattcttggggcacgtgatatctgctaaaggagttgctgtggaccccgaaacagtgaccgccgtcaccgattggaagcaacccaagacagtcactcagattcgcagtttcttgggtttggcaggatactaccggaggttcatcgagaacttctccaaaatcgctcgacccatgacacagttgttgaagaaagaagagaagtttgtgtggagcccgcaatgcgagaaggcgttccaaactctcaaagaaaagctggtttcctcgccagtgttaatcttgccggatactcgcaaggatttcatggtgtactgtgatgcttcgcgccaaggattggggtgcgtgctcatgcaggacggtcatgtggtagcctatgcttcacgccagctacgacctcatgaaggcaactaccctacacatgacttggagttagcagcggtggttcatgctctaaaaatctggcggcactatctcattgggaaccgctgtgaaatatatactgatcataagagtttgaaatacatcttcacccagtcggatctgaatcttcggcaaaggagatggttagaactcatcaaggattatgatgtgggaatacactatcatcctggtaaggccaacgtggttgccgacgctctaagtcgaaagagccactgcaacactctcaacgtccgaggcattccacccgagcttaatcaacagatggaagcactgaacctaagcatggttggtcgcggattcttggctgcgttggaagctaagcccaccttgctcgatcaaatccgcgaggctcagaagaatgatccggacatgcatggactcctcaagaatatgaaacagggcaaagccgctggtttcacagaggatgaacacggaaccttatggaacggaaagcgggtatgcgttccagatagcagagaacttaaacagctgatacttcaggaagctcacgaaagtccttattccattcacccgggcagtaccaagatgtacttagacttgaaggagaaatactggtgggtcagcatgaagcgggaaattgcagagtttgtggcactatgtgatgtgtgccagcgtgtcaaggcagagcaccagcgaccggccggacttctccagcctctccaagtgccggaatggaaatgggatgaaattgggatggatttcatcaccggccttccaaaaacccaaggtggatatgattctatatgggtaattgtggatcgactaacaaaggtagctcgatttattcctgtgaagaccacttatggagggaacaaactagcggagctctacttcgctaggatcgtgagtctccatggtattcccaagaaaatcgtatctgataggggaagccaattcacctctcacttttggaagaagctccaagaagagctgggtactcgattgaatttcagcaccgcctatcacccgcagacagatggacagaccgagcgtctaaatcagatcctagaagatatgctccgcgcatgtgtcctagacttcgggaagacttgggataagagtctcccctatgccgagttctcctacaacaacagctatcaagccagcatacaaatggcaccctatgaagcgttgtacgggcgcaaatgccggacaccgctattgtgggaccaagttggagaaagccaagtgttcgggactgatatcctgagagaagctgaagctaaagtcagaatcattcgggataatctaaaggtggcacagtcccggcagaaaagttatgccgataaccgacgccgtgatctggaattcgcagtggatgattttgtgtaccttcgggtcacgccattgcgaggggtgcacaggtttcggacaaaagggaagctcgcacctcggtatgtgggacctttccgtatcgtcgctcgacgcggagaagtcgcttaccagctggagttgcccgcctccttgggcaatgtgcatgatgtgttccatgtgtcgcaactcaagaaatgtcttcgagtgccatccgagcaggccaactcagagcaaattgaagttcgcgaagacttgacgtatgtggagaagccagtgaaaatcctggacaccatggagcgcaggaccaggaaccgggtaatccgtttttgcaaggtccagtggagcaatcacgccgaagaagaagctacttgggagcgcgaagacgagctgaaggcagcccatcccgatctcttcgccagttcttccgaatctcggggtcgagattccgtttaa

SEQ ID NO: 23156 - DNA, 5577 bp, Oryza sativa; identical to SEQ ID NO: 14179
  Clone ID: TF_OsC359_8301

SEQ ID NO: 23157 - DNA, 3813 bp, Oryza sativa
  Clone ID: TF_OsC359_8310
ctatttaaacgtcccccgtgctctcctcctccgtttccgccgctcgccgctcgctctccccgtcggaatcgtgctcgcgccgtcgcaccttctctccgccgtcgccgccgagctccggttcgccgccgccgtcgctccggacttcctcccctctcggcgtcgtctccttcggcttcgccgcgtcgtcgtcgacctcgtccgcccctccgcttcgctcgccgaccgccggaacgccgtcgtcctcgtcgtcccgaacgcgccgccggcttcctccgtttcggccgccgttcccgtcgtcgcccgccacccgggggagccccagaagccatcacacagacatccaaccaccgccacacacccacccagtagtcctagaacgtcgaacaaagccagacgataatttatgaaagcggccataggcacatgagcactcctcaacctcaccgacctgagcgccccggcaaaaccaaccctgagccacgcgcccccgtcatcccacactccccccacccccccgcgtccccgccacccccccgacccgccggcaaccccggcgcgccccacaccactctcccatgatgggacattcagaccacccacacaatagccagacccccaaccggcgcccgcgacgcacacagtcagcggccccacgaaagggggagcaagccttaggggaggcccccacgcctcccagtagggggcgggacgtaacccgaccgcgcccgcgggtacggctgacgcgtgggacccacggcgccggccgccgccagccgcgtgctcccggtccgccgtggaccgagaggctgacgcgtgggccccactcccgtggacccggtccgcgcgccctctcccccggcggtcttcgggcctctgttgcaaagcactaccgtacttccacatgtctagtgggtaaggcttagtttgtggctcagtcttgcctcctgggacaaggattaatgcacgcacgtgaggaatgcccgttgggttatttccggtcgtgacagctgctaactccaaatcatgggtagggtagttgccttcatgaggccgtagctggcgtgaggcataggccaccacatgaccatcctgcatgagcacgcaccccaatccttggcgcgaagcatcacagtacaccatgaaatccttgcgagtatccggcaagattaacaccggcgaggaaaccagcttttctttgagagtctggaacgccttctcgcattgcgggctccacacaaatttctcttctttcttcaacaactgtgtcatgggtcgagcgattttggagaagttctcgatgaacctccggtagtatctctggccagaggtgtaccactgtacccacaagacacagccccacatcatgtcaccatgtgcctcagtaccaccacggtacctcggaaagggggtcagcgacgacgtcagcaccggcggcggctcggcggctcggacggctcggacggcgcatgctcgccggcgaacggcggctctacggcacaaacggagggcaccaagacgtagatcacggcgcggcgaactcaccgatgaccaaaacgtcggcggaagaccaacggacggcggcggcgtcgaggaaaaggcggcggagaagatcgggtcgacggcgtcgccggtgcgccggcggtcttcggcggcggcgaagcggtggacggggacggcggcgaccttgcgaacccgatggtggcgacggcgactgacgacggcggctgcaacggcggcgcggcgcggcacaacaaacttgtccaagtattccatgaacactttgttcattaagttcatgaagaaggcaggtgcattggttaaaccgaacgacatcaccgtgaattcatacagtccgtatcgcgtggtgaatgcggtcttcggaatatcttcttcacgaatacgtaattggtgatatccggaacgaagatcgatcttggagaatacagtggcacctttaagctgatcgaacaggtcatcgatccggggaagaggatacttgtttttgatggtgacttcattgagagctctgtagtcaacgcacatcctcttcgtcttgtctttcttctccacaaaaatcacaggagcaccccagggggaagtactcggacgtatataccccttttctttcaactcttccaactgtttcttaacttcggccagttcatttgctgccatacggtagggtcgcttgtacagaggagtggttcctggagcaagatctatccggaactcaatctctcgcttgggcggcattccgggtagttcttccggaaacacgtctccgaactctctgactatggggatttctgacagccctatcccttggaattgagccaaccaattcatcccaaggatcacatccaagttcttggtgtctagcagaatcagatccgagggaaaaggtatcccctgaatttctatagggacggcagggctataatactttgctgtcataacccctccaggggtggtgatgagcagagggttcctaagcctttctacccccaactgatttctccccacgaatggcacagatataaacgagtgggaagctccagagtcgaacaaaatggtagcagggatggagtgaatgaggaacgtaccaacgatgacgtctggagttgtcagcacgtcctcggccgtcacgtggttcacacgaccccgaatgacatccttcccaccgttgttggagcggggaggcgcttggccttgctggcgccttggcttcgggcatttatccgcaaagtgcccaggctcgaagcagttgaagcacagacgcttgtcgcgaccgggaaaattgccttgtgtgtccctgcggccttgaccaggctgcacagttggcgtaggaggacggggcgcacgagtcccttgttgattctgctgctgctgcggctgtgggacgcgcaccacgaattgaggtcgaggcgcggagcgaggttgctgctgctgttgttgctgctgcgaggaggatccccctggatagggattggtgtagcggaccctttggttagcaccctgttgattgcggaaattcgccaagcggcgcttgtgcgactccagctccttgtgcttggcttccaagcggatgctcttgtccaccagacgttggaagtccgggtagtccctggagactagacaaacggacagctcagggtccattcccgccaagaacttctcttgcttctcctcatcttcccgcacatcctccggggcgtaacgggcaaggttgttgaactcatgcaaatactccatcacggagcggttgccttgcttcaactctcggaactccctcttcttaagagccacgactccggcgggcacatgggttctccggaaagcggcggtgaagcgagcccaagtaataggttgccccgctggctgcgtagcctggaaatggtcccaccatagagatgcgggcccttgcagctggtgggcggcgaagatgactttctcctcatcgctgcactgcacagtgtctagctttttccccacggcatgcaaccaatccaacgcatccacggggttgttggagctagagaaggtgggtggacggatgcggaggaactcggcgagtttagagtgttggggaggtggtgggggagcattatgttgtggcggattttggaggtggtggaggaaagcagtcatcatgttggcttgctgggcgaggatttgggtgagaatggcgttggtatctggtggtggaggtggaggcggaggaggaggtggaggtgggttgccttggtggttgtggttgctgccttcaggttggttgccatcaccggtattagcatttctcctggtcgtcaccat

SEQ ID NO: 23158 - DNA, 5490 bp, Oryza sativa
  Clone ID: TF_OsC359_8331
atggcggccggatcttccgcgccgtttccccctcgtccggccgctctgtccccctcccgaccctatataaaccctccccgtgcctccctccaccgttttcgccactcgccgctctctctccccgccggaatcgagctcgcgccgtcgccctctctctccgtcgtcgccgccgagctccggtccgccgccgttgtcgccccggaccacctctcccctcggcgccgcctccttcggcttcgccgcatccccggcgaccttgtccacccctccgtttcgctcgccgaccgccggagcaccgtcgaccccatccacccgagccgcgccaccgccttcctccgcaccggtcgccgtttccgtcgttgccgtcgacccggggtgagtcgtggaccgccgcttcttttcccccttcccttcccctctctcggccgccgctccgccgtgcctatggccgccgccggcgaccataggggcgcgggcgtgccgcctcccgccgctgcgccggcgtggccgccttcgggcgcaccgtgcggctaccgcgtggggcccggctatcagccgcccgcgccctcggcacctcggccatataaggaccggtcttcgggcctctgttgcaaagcactaccgtacttccacatgtctagtgggacaaatgaaggctacacgagctgcggcccggtagtcgagatgtcatggcacagggctggtgtcctgctgctaggggctcaatcctgcctacctgtcccggaggttccggccgtaggtgggattgggtcgatggccggcagcgtcagtcgtcgtggtctggacatgactggtttcgtcttggagctgcggggtatgtgcgttgtcctggggtatccgcatggactggactaccagggcaggccgctcccggagcaggaggtcaccgcgggtggagattctttctccgccgcttgccagagcgccgctctcctcgccatcagcactcttcaccagcgctacccggacgagctgcagcactcgccctaccgctaccaccctcgtcgcggaggagcccgcgactacgccaccttccgggatgctagctcggaggatgacgctaccatcatgcacctggcgcgcatggtggaggcgtacgacgcggctcgtatcgacttccatcagatggtgcgccgtgggatggtcgagaacaacctgaagatcctagagctgcgtcaggagaatctgcagctgaagaaggacctagacgcagtggaggcacagctgcatcagctcaagatcgcccagggagaggtctgtcaccccaagcgtcgccgcgtctgccgcagccagaagatcaccgcccgaaagagcacctccaggcccgagcttgttcgtcagtccctggcgtggacttgcttcgtggagacccctcgtgccgagcccgcgcccgtggttcctcaggagggggaagcctccggcgtcggtagcacggaggatgcgctgttgctcaccttccgtcctggcccgtcgcagcgctccaacaaccccgtggatgtgttggattggttgcatgccgtggggaaaaagctagacactgtgcagtgcagcgatgaggagaaagtcgtcttcgccgcccaccaactgcagggacccgcatctctatggtgggatcatttccaggctacgcagccagaggggcagcctattacttgggcccgcttcaccgccgccttccggaggacccatgtgcccgccggagtcatggcccttaagaaaagggagttccgagagttgaagcaaggcaaccgctccgtgatggagtatttgcatgagtttaacaacttggcccggtacgccccggaggatgtgcgggaagatgaggagaagcaagagaagttcttggcaggaatggacccggagctgtctgtccgtctagtctccggtgactatccggatttccaacgtctggtggacaagagcatccgcttggaagccaagcacaaggaacttgagtcgcacaagcgtcgcttggcgaatttccgcaaccaacagggtgctaaccaaaggatccgctacaccaatccctatccagggggatcttcctcgcagcagcagcaacctcgctccgcgcctcgacctcaattcgtggtgcgcgtcccacagccgcagcaacagcagagccagcaagggacccatgcgccccgtcctcctacgccagccgcgcagtctggtcaaggccgcagggacgttcaaggtccgcagcgtctgtgcttcaactgcttcgagcccgggcactttgcggataaatgcccgaagtcgaggcgccagcaaggccaagcgcctccagacgtcatcgttggtacgttcctcatccattccatccctgctaccattttgttcgactctggagcttcccactcgtttatatctgtgccattcgtggggagaaatcagttgggggtagaaaggcttaggaaccctctactcatcaccacccctggaggggttatgacagcaaagtattatagtcctgccgtccctatagaaattcaggggattccttttccctcggatctgattcttctagacaccaagaacttggatataggactgtcagaaatccccattgtcagagagttcggagacgtgtttccggaagaactacccggtatgccgcccaagcgagagattgagttccggatagatcttgctccaggaaccactcctctgtacaagcgaccctaccgtatggcagcaaatgaactggccgaagttaagaaacagttggaagagttgaaagaaaaggggtatatacgtccgagtacttccccctggggtgctcctgtgatttttgtggagaagaaagacaagacgaagaggatgtgcgttgactacagagctctcaatgaagtcaccatcaaaaacaagtaccctcttccccggatcgatgatctgttcgatcagcttaaaggtgccacggtattctccaagattgatcttcgttctggatatcaccagttgcgcatccgtgaagaagatattccgaagaccgcattcaccacgcgatacggactgtatgaattcacggtgatgtcgttcggtttaaccaatgctcctgccttcttcatgaacttaatgaacaaagtgttcatgaaatacttggataagtttgttgtggttttcattgatgacattctggtatactcacaatcagaggaagaccatcagcaccatctccgtctggtgttgggaaagttgcggaaacatcaattgtatgccaaacttagcaagtatgagttctggttgtccgaagtcaaattcttagggcacgtgatatccgctaaaggagttgctgtggatcccgaaacagtgaccgccgtcaccgattggaagcaacccaagacagtcactcaaattcgcagtttcttaggtttggcaggatactaccggaggttcatcgagaacttctccaaaatcgctcgacccatgacacagttgttgaagaaagaggagaaatttgtgtggagtccgcaatgcgagaaggcgttcaaaactctcaaagaaaagctggtttcctcgccagtgttaatcttgccggatactcgcaaggacttcatggtgtattgtgacgcttcgcgccaaggattggggtgcgtgctcatgcaggacggtcatgtggtggcctatgcctcacgccagctacagcctcatgaaggcaactaccctacccatgatttggagttagccgcggtggttcatgctctaaaaatctggcggcactatctcattgggaatcgctgtgaaatatatactgatcataagagtttgaaatacatcttcacccagtcggatctgaatcttcggcagaggagatggttagaactcatcaaggattatgatgtgggaattcactatcatcctggtaaggccaacgtggtcgccgatgctcaaagtcgaaaaagccattgcaacactcttaacgtccgtggcattccacccgaacttaatcaacagatggaagccctgaatctaagcatagtgggtcgcggattcttggctgcgttggaagccaagcccaccttgctcgatcaaatccgcgaggctcagaagaacgatccggacatgcatggactcctcaagaatatgaaacaaggtaaagccgctggtttcacagaggatgaacacggaaccctatggaacggaaatcggagttcgtggccctttgtgatgtgtgccagcgtgtcaaggcagagcaccaacgaccggccggacttctccaacctctccaagtaccagaatggaaatgggatgaaattgggatggatttcatcaccggacttccaaaaacccaaggtggatatgattctatatggcaccgcgtatcacccgcagacagatggacagaccgagcgtctaaatcagatcctagaagatatgcttcgcgcatgtgtcctagatttcgggaagacctgggataagagtctcccctatgccgagttctcctacaataacagctaccaagccagcatacaaatggcaccttatgaagcgttgtatgggcgtaaatgccggacaccgctattgtgggaccaagttggggaaagccaagtgttcgggaccgatatcctgagagaagctgaagctaaagtcagaaccattcgggataatctaaaggtggcccagtctcggcagaagagttatgcagacaaccgacgccgtgacctggaattcgcagtggatgactttgtgtatcttcgggtcacgcccttgcgaggtgtacacaggtttcagacaaaggggaagctcgcacctcggtttgtgggtcctttccgtatgattgctcggcgcggagaagtcgcttaccagttggagctgcccgcctccttgggcaacgtgcatgatgtgttccatgtgtcgcaactcaagaaatgtcttcgagtgccatcccagcaggccgactcagagcaaattgaagttcgcgaagacttgacctacgtggagaggccagtgaaaatcctggacaccatggagcgaaggaccaggaaccggtccgccgccgtcgtcgccccggaccttctcccgcttcggcgccgcctcctttggtttcgccgcaaccttgccgacctcgtccacccctccgtttcgcccgccgaccgccggaacgccgccgtccccgtctacccgagccgcgccgccgccttcctccgctccggtcgccgttcccgtcgtcgccgtcgacccggggtgagctgtggaccgccgattcgtttcccccttccctcccctctctcgggcgccgctccgccgcgccggtggtcgccggcggcgaccatcggggcgcgggtgcgccgcctcccgtcggctgtgccggcgtggccgccttcgggcgcgccccgcggctgccatgtggggcccggccgtcagccgcccgcgccctcggacgctgcagcttcggaagatccgctcttcgtggaggttgaagccgacgtttgggaaagcgagcaaggcaagtcacatcatctttga

SEQ ID NO: 23159 - DNA, 8512 bp, Oryza sativa
  Clone ID: TF_OsC359_8385
ctagaatctctcaacgacgtcagcagctattttatcagcagctatttgtgcatcattgatgaggtcaagagcagcctctttgcttgtcccgtctgcaaagccatcaatggcattaatatcaatcttcgggtacaaggacttggtcatcgccaacgccaggcttgctcccatgcttccagcttccttgatattcttaaaatatgtatccggagcaattctcagcttgtcgaagatctcggcaatgtcaaatgaactcggaccattgttattgaagaacatggcttggacgagtggtgtagcggcgttggcgacttcatctctagctccttcaagcctcttgattttgttgaccaagacgtcgaattgagcattcacatcagcaagagggcatgaagataagagtgattttttgaagttccagctgcaagtaccttcgacatctttcaaggccgagtccctctgctttgtcaattcatccttatccttttccagagccttgatccgcttttccagatcggatatctttgcggcttgcacttttgatgagccgcttatcgagaaattggagtcttgaagcttggtgatacggtctctcagatcatgctcagtcttcctggcaagctccttggcttcgtgcagctggtctctggtggcttcaagggttccaaggtgtggaactaacttctcgagggttgctgtcttcgcttcattcctaagatggattctatttacaagacgagtagcttggcccagtgtctttttcagtagacatacttcctcatcttccctctgcttatttattacaattccttgtggccgcatttcatcatccctccacttgactaatattggtgggcgggaatcttcagccgattgtacccggaggacctcttcttcatcaccaatcattggccctgtgataatttccggtctgggacgagcaggtccttgcaccctaacaggagaactagttccagagtcagcaccagtgtccgtcttgggagggctgttagtttgagcttctacttccgggatgtcattattttgttgagagtcagactggttagtcgactttgaagtgtcaggttgatcaatagaccggattttcggccctccactggcttggcttgtcttccaacggggtgagcggcgttgagcaatcggagggtcagatttcatcaaagcaaattccggtgggggaggattgaaggcgttgtatggtatgactggcaacgtgtgtgaatagatcctctcctgcataattttgaactcaagagattctgggttctctcggttggggtcatgcttgccgtcaaattcaaaggctgttctagatctttccttgattggtgccaacaaggtcttgatgaagtgccgagtgatttgttccccttgtagaccctgttcgttcagcttcagcatgcgatcaaacaagtcgagcgcttgggcggcttcttctcccatcggcagtgagttccaggtatcgcgatagactgggggaagacaggagtatccgggaagcgctggcttggggttttgcacatagaaccagttcgcgtgccaacctttgttcgaggttttgaatggcatggagaagtatttttggctcaaggtccccctcagttgaaatccggctcccccaactacgcatggtttgcttttgtttgcctggggcttgaggaagaagatgcagcggaataaagcgaaatgtggcctaatccccagaaaagcttcgcaagcatggatgaaattggcgatatggactatggaattggggtttaggtggtgtaggctgattccatagaaatccaaaattcctctgaagaaacttgaggtcggaagagaaaatccgccgtagaagaaatgagaaaataccacgaccacatgtgtgtcaggagttgggaatgcttcgccgtatgctggacgccacccaatgatctcctttgccggaagaacaccgtgcgccaccatctccttcaggttctcctccgttacatcggagggcgcccactgactctcaaagctctctctctctctctcttccgccatggatgcgatctgaatgatgcgatttgctttggaaatggctgagaatggatggggaatcggagcggtggatgcggggagaaatttcgtgaagtttttgagggtggattggagcggattgatgaaccctaccgcctgtgccgcctcgaccgtgcgccggccggccgcgccgtcgcctcctccaacgtcgccgccacctcctccaccccggcctgccctccgtttcgcgcggtgaccgccggaggcgcgttcccgccgtcgcccttctctttcctccgcgccggccgcctccagccgcctctccctcctcgccggagcgccgtccggccgcgccgtcttctccctcggcctcgcagccacctcctctccctcggtcagccctccgtttcgcggggaaagcaccggagacgcgtcctcgccggcaaaacagtggcgttgccgccactgttccacctccggccgccactgtcgcgtttcccgtgcgccggccgacgtcgccaccacctccctcggctccgcgacgccgccctcatccccggcatcacctcctcctcgcccgaagctcgccggagtggcctcctcgtcggcgtccagtacctccccgcctccggccggctccttgttcaccctaggataaacaaaaccccaactagtgggtattctattcatggttccactctcttcctctttcaaaacccctaaaacctgttttcggtggggtttgggtgcatgccagttgtgggaagtagcaccccggccactataaggattaagctcgggcctctgttgcgaagcactaccgtacttccacatgtctagtgggtaaggcttagtttgtggctcagtctggttataaacaaaagtacacggatggagatggacgaagtcgggggtcgatggacatctctaggacaaatgaaggctacacgagctgcggcccggtagtcgagatgtcatggcacagggccggtgtcctgctgctaggggcttagttctgcctacctgtcccgggggttccggccgtaggtggagttgggtcgatgtacacctctgatcagagtataatctattcgaatagccgcgcccccggttatgggcaagccgagcaatgtacccaaatggccagcagcatcaaccgtcgtggtctggacctgactggcttcgttttggagctgcggggcatgtgcgttgtcctggggtatccgcatggagtggactaccaaggcaagcagctcctggagcaggagggtgacgatgcagagccccacgctgcttgggaggttactgcagtgatcctcactggctcacccgagaggacttcgttggcagtcaccgcgggtggagattccttctccgttgcttgccagaacgccgcactcctcgccatcggcactcttcaccagcgctacccggacgagttgcagcactcgccctaccgctaccaccctcgtcgcggaggagcccgtgactacgccaccttccgggatgctagcttggaggatgacgctaccatcgtgcacctggcgcgcatggtggaggcgtacgacgcggcccgtatcgacttccatcagatggtgcgtcgcgggttggtcgagaacaacatgaagatcctggagctgcgtcaggagaatctgcagctaaagatggacctagacacagtggatgcgcagctgcgtcagctcaagatcgcccagggagaggtctgtcgccccaagcgtcgccgcgtctgccgcagcctgaagatcaccgcccgcaagagtacctccaggcccgagcttgttcgtcagtccctggcgtggacctgcttcgtcgagacccctcgtgccgagtccgcccccgtggttcctcaggaggagggagcctccggcgttggcagcacggaggatgcgctgctgctcaccttccgtcctggctcgttgcagctgtagacgagcagttagtaggcttgcgtatggtgacaaccaggagaagtgctgctaccggtgaatgcagtcaccccgaaggcagcaaccacaacaaccatggcagcccacctccacctccttctccgcctccaccaccaccaccagacaccaacgccattctcacccaaatcctcgcctagcaggccaacatgatggctgctttcctccaccacatccaaaatccgccacaacataatgctccaccaccgcccccacaacactctaaactcgccgagttcctccgcatccgtccgcctaccttctctagctccaataaccccgtggatgcgttggattggttgcatgccgtggggaaaaagttagacaccgtgcagtgcagcgacgaggagaaagtcatcttcggcgcccaccaactgcaggggccagcatctctatggtgggaccatttccaggctacgcagccagaggggcagcctattacttgggcccgcttcaccgccgctttccggagaacccatgtgcctgccggagtcatggcccttaagaaaagggaattccgagagttgaagcaaggcaaccgctccgtgatggagtatttgcatgagtttaacaacctggcccggtacgccccggaggatgtacgggaagatgaggagaagcaagagaagttcttggcaggaatggaccctgagctgtccgtgcgtctggtctccggggactatccggatttccagcgtttggttgacaagagcatccgcttggaagccaagcacaaggaactggagtcgcacaagcgtcgcctggcgaatttccgcaatcaacagggggctaaccaaagggtccgctacaccaatccctatccagggtgatcgtcctcgcagcagcaacagcagcagcaacctcgctccgtgccccgacctcaattcgtggtgcgcgtcccacagccgcagcaacagcagagtcagcaagggactcgtgcgccccgtcctcctacgctagccgtgcagcctggtcaagtccgcagggacgttcaaggtcagcagcgtctgtgcttcaactgcttcgagcctgggcactttgcggataaatgcccaaagccgcggcgccagcaaggccaagcgcctccccgctccaacaacggtggtaaggatgtcattcggggtcgggtgaaccacgtgactgccgaggatgtgctgacgactccagacgtcatcgtgggtacgttcctcattcattccatccctgctaccattttgttcgactctggagcttcccactcgtttatatctatgccattcgtggggagaaatcagttgggggtagaaaggcttaggaaccctctgctcatcaccacccctggaggggttatgacagcaaagtaatatagccctgccgttcctatagaaattcagggaattccttttccctcggatctgattcttctagacaccaagaacttggatgtgatccttgggatgaattggttggctcaattccaaggagtagtggattgtgcaagacgcactgtcactctgtaccgagggccggaacaaccggttgttttctttgcacccccaacctctgtcggtagttcagaacttcatcagataggaatgtcagaaatccccatcgtcagagagttcggagacatgtttccggaagaactaccaggtatgccgccgaaacgagagattgagttccggatagatcttgctccaggaaccactccccagtacaagcgaccctaccgtatggcgtcaaatgaactggccgaagtcaagaaacagttgggagagttgaaagaaaaggggtatatacggccgagtacttccccctggggtgctcctgtgatttttgtggagaagaaagacatgacgaagaggatgtgcgttgacaacagagctctcaatgaagttactatcaaaaacaagtacccacttccccggatcgatgatctgttcgatcagcttaaaggtgccactgtattctccaagattgatcttcgttccggatatcaccaattgcgtattcgtgaagaagatatcccgaagaccgcattcaccacgcgatacggactgtatgaattcacggtgatgtcattcggtttaaccaatgctcctgccttcttcatgaacttaatgaacaaagtgttcatggaatacttggataagtttgttgtggttttcattgacgacattctggtgtactcacaatcagaggaagaccatcagcagcatctccgtctggtgttgggaaagttgcgggaacaccaattgtatgccaagctcagcaagtgtgagttctggttgtccgaagtcaagttcttagggcacatgatatctgctaaaggagttgctgtggatcccgaaacggtgaccgccgtcactgattggaagcaacccaagacagtcactcaggttcgcagctttttgggtttggcagaatactaccgaagattcatcaagaacttctccaaaatcgctcgacccatgacacagttgctgaagaaagaagaaaaatttgtgtggagcccgcaatgcgagaaggcattccaaactctcaaggaaaagctggtttcctcgccagtgttaatcttaccggatactcgcaaggacttcctggtgtactgtgacgcttcgcgccaaggattggggtgtgtgctcatgcaggaaggccacatggtagcctatgcctcccagcagcttcggccccatgaaggcaactaccctacccatgatttggagttggccgctgtggttcatgctctaaagatctggcgacactatctcattgggaatcgctgtgaaatatatactgatcataagagtttgaaatacatcttcactcagtcggatctgaatcttcggcagaggagatggttagaactcatcaaggattaggatgtgggaattcactatcatcctggtaagacaaacgtggtcgccgacgctctaagtcgaaaaagccgttgcaacactcttggcgtccgtggcattccaccaaaacttcatcaacagatggaagccctgaacctaagcatagttggtcgtggattcttggctacgctggaagccaagcctaccttgctcgatcaaatccgcgaggctcagaagaatgatccagatatgcatgggatcctcaagaatatgaaacagggtaaagccgctggtttcacagaggatgaacacggaaccctatggaacggaaatcgggtatgcgttccagacgacagggaacttaaacagttgatacttcaggaagctcacgaaagtccctattccatccatcctggcagcacgaagatgtacttggacttgaaagaaaaatattggtgggttagtatgaagcgggaaattgcagagttcgtggccctttatgatgtgtgccagcgtgtcaaggcagagcaccaacgaccggccggacttctccaacctctccaagtactagaatggaaatgggatgaaattgggatggatttcatcaccggacttccaaaaacccagggcggttatgattctatatgggtagtcgtggaccgactaaccaaggtagctcggttcattcccgtgaagaccacctatggagggaacaaactagctgaactttacttcgctaggatcgtgagtctccatggcgttcctaagaaaattgtatctgataggggaagccaattcacctctcacttctggaagaagctccaagaagagttgggtacccgattaaatttcagcaccgcgtatcacccgcagacagatggacagaccgagtgtctaaatcagatcctagaagatatgctccgtgcctgtattctagattttgggaagacctgggataagagtctcccctatgccgagttctcctacaataacagctaccaagccagcatacaaatggcaccctatgaagcgttgtatggccgcaaatgccggacaccgctattgtaggaccaagttggggaaagccaagtgttcgggactgatatcctgagagaagctgaagcgaaggtcagaaccattcgggataatctaaaggtggcacagtcccgacaggagagctatgcagataaccgacgccgtaacctggaatttgcagtggatgactttgtgtaccttagggtcacaccattgcggggtgtacacaggttccagacgaaagggaagctcgcatctcggtttgtgggtcctttccgtatcattgctcgacgcggagaagtcgcttaccagttggagctgcccgcctccttgggcaacgtgcatgatgtgttccatgtgtcgcaactcaagaaatgtcttcgagtgctatccgagcaggccgattcagagcaaattgaagttcgcgaaaacttgacctacatggagaggccagtgaaaatcctggacaccatggagcgcaggaccaggaaccgggtaatccgtttttgcaaggtccaatggagcaaccacgccgaggaagaagctacttgggagcgtgaaaacgagttgaaggcagcccatcccgatctcttcgccagttcttccgaatctcggggtcgagattccgtt

SEQ ID NO: 23160 - DNA, 6921 bp, Oryza sativa
  Clone ID: TF_OsC359_8402
aggtttcactgaaaggcagcaagccaaaggacctcatcgtccccagaagcatccccggcttttcctgggacggggattaatacactagcgttcgggaaaaggcaattttcccggtcgcgacaatatgggtagttgtggatcgattaaccaaggtagctcgatttattcctgtgaagaccacctatggagggaacaagctagctgaactctacttcgccaggatcgtgagtctccatggcgttcccaagaaaatcgtatctgatcggggaagccaattcacctctcacttttggaagaagctccaagaagagttgggtacccgattaaatttcagcaccgcctatcacccgcagacagatggacagaccgagcgtctaaatcagatcctagaagatatgcttcgcgcatgtgtactagatttcgggaagacctgggataagagtctcccctatgccgagttctcctacaataacagctatcaagccagcatacaaatggcaccatatgaagcgttgtatgggcgcaaatgtcggacaccgctattgtgggaccaagttggagaaagtcaagtgttcgggactgatatcctgagagaagctgaagctaaagtcagaatcattcgggataatctaaaggtggcacagtcccggcagaaaagttatgcagataaccgtcgccgtgacctggaattcgcagtggatgattttgtgtatcttcgagtcacgccattgcgaggtgtacacaggtttcagacgaaagggaagcttgcacctcggtatgtgggtcctttccgtatcgttgctcgacgcggagaagtcgcttaccagttggagctacccgcctccttgggcaacgtgcatgatgtgttccatgtgtcgcaactcaagaaatgccttcgagtgccatccgagcaggccgactcagagcaaattgaagttcgtgaagatttgacctacgtggagaggccagtgaaaatcctggacatcatggagcgcaggaccaggaaccgggtaatccgtttttgcaaggtccagtggagtaatcacgccgaagaagaagctacttgggagcgtgaagacgagcgtcggaatcgcgctcgcgccgctttcctctctctccgccgtcgccgacgagttccggttcgccgccgccgtcgctccggacttcctcccccctcggcgtcgcctccttcggcttcgccgcgtcgtcgtcgaccccgtccgctcctccgtttcgctcgccgaccgtcggagcgccgtcgtcctcgtcgtcccgaaccgcgccgccgccttcctccgcttcggccgccgttcccgtcgtcgccgtcgaccggggctgggctcggggtgcatggttttgatggtagcacctcggccatataaggaccggtcttcgggcctctgttgcaaagcactaccgtacttccacatgtctagtggggcaaatgaaggctacacgagctgcggcccgatggccggtagcgttacccgtcgtggtttggacatgactggcttcgtcttggagctgcgaggcatgtgcgtggtcttggggtatccacatggagtggattaccaggccaggccgctcccggagcaggagggtgaggatgcagagcctcacgctggttgggaggtcactgcagtgatcctctccggctctcccgagcggacttcgctggcagtcaccgcgggtggagattccttccccgccgcttgccagaacgccgctctcctcgccatcggcacccttcaccagcgctacccggacgagttgcagcactcgccctaccgctaccacgctcgtcgcggaggagcccgcgactacgccaccttccgagacgccagttcggaggatgacgctaccgtcgtgcatctggcacgcatggtggaggcgtacgacgcggctcgtatcgacttccatcagatggtgcgccgtggcatggtggagaacaacatgaagatcctggagctgcgccaagagaatctgcagctcaagaaggacctcgacgcagtggaggcgcagctgcatcagctcaagatcgcccagggagaggacagccgtcccaagcgtcgccgcgtctgccgcagccagaagatcaccgcccgcaagagcacctccaggcccgagcttgttcgtcagtccctggcgtggacctgcttcgtcgagacccctcgtgccgagcctgcgcccgtggttccccaggagggggaagcctccggcgttggtagctcggagggtgcgctgttgctcaccttccgtcctggcccgtcgcagcgctctccttctctgtttgctggttctgtgaggggttttcagatggtgacgaccaggagaaatgttaacaccggtgaaggtaaccaacccgaaggcagcaaccccaaccaccaaggcaatccacctccgccaccaccaccagacaccaacgccattctcacccagatcctcgcccaacaggccaacatgatgaatgctttcctccaccaccttcaaaacccgccacaacagaatgctcccccaccacctccccaacactctaaactcgccgagttcctccgcatccgcccacctaccttctctagctccaacaaccccgtggatgcgttggattggttgcatgccgtggggaagaagttagacactgtgcagtgcagtgatgaggagaaagtcatcttcgccgcccatcagctgcaggggcccgcatctctctggtgggaccacttccaggctacgcagccagagggacagccgatcacttgggcccgcttcaccgccgctttccggagaacccatgtgcccgctggagtcgtggctcttaagaaaagggaatttcgggagttgaagcaaggcaaccgctccgtgatggagtatttgcatgagttcaacaatctagcccgttatgccccggaggatgtgcgggaagatgaggagaagcaagagaagttcttggcaggaatggaccctgagctgtccgttcgtctagtctctggggactatcctgattctcaacgtctggtggacaagagcatccgcttggaagccaagcacaaggagctggagtcgcacaagcgccgcttggcgaatttccgcaatcaacagggtgctaaccagagggtccgctacaccaatccctacccagggggatcctcctcgcagcagcagcagcagcagcagcaacctcgctccgcgccccgacctcaattcgtggtgcgcgtcccacagcagcaacagcagcagaatcagcaggggactcgtgcgccccgtcctcctacgccaactgtgcagcctgttcaaggtcgcagggacgctcaaggtcagcagcgtctgtgcttcaactgcttcgagcccgggcactttgcggataaatgcccaaagccaaggcgtcagcaaggccaagcgcctccccgctccaacaacggcgggaaggatgtcattcggggtcgtgtgaatcacgtgacggccgaggacgtgctgacaactccagacgtcatcgttggtacgttcctcgttcattccatccctgctacaattttgttcgactctggagcttcccactcgtttatatctgtgccattcgtggggagaaatcagttgggggtagaaaggcttagaaaccctctgctcatcaccacccctggaggggttatgacagcaaagtactatagccctgccgtccctatagaaattcaggggattccttttccctcggatctgattctgctagacaccaagaacttggacgtgattcttgggatgaattggttggcccaattccaaggggtagtggattgcgcgaggcgcactgtcactctgtaccgagggccagaacagccggttgttttctttgcacctccaacctctgtcagaagttcagaactgcatcagataggtctgtcagaaatccccatagtcagagagttcggagacgtgtttccggaagaactacctggtatgccgcccaagcgagagattgagttccggatagatcttgctccaggaaccactcctctgcacaagcgaccctaccgtatggcagcaaatgaactagccgaagtaaagacacagttggaagaattgaaagaaaaggggtacatacgtccgagtacttccccatggggtgctcctgtgatctttgtagagaagaaagacaagacgaagaggatgtgcgttgactacagagctctcaatgaagtcaccatcaaaaacaagtaccctcttccccggatcgatgatctgttcgaccaactcaaaggtgccactgtattctccaagattgatcttcgttccggatatcaccaattacgtattcgtgaagaagatattccgaagaccgcattcactacgcgatacgggctgtatgaattcacggtgatgtcgttcggcttaaccaatgctcctgccttcttcatgaacttgatgaacaaagtgttcatggaatacttggataagttcgttgtggttttcatcgatgacattctgatatactcacaatcagaggaagaccatcagcaccatctccgtctggtattgggaaagctgcgggaacatcaattgtatgccaagctcagcaagtgtgagttctggttgtccgaagtcaaatttttggggcacgtgatatctgctaaaggagttgctgtggatcccgaaacagtgaccgccgtcaccgattggaagcaacccaagacagtcactcagattcgcagtttcttgggtttggcaggatactaccggaggttcatcgagaacttctccaaaatcgctcgacccatgacacagttgttgaagaaagaagagaagtttgtgtggagcccgcaatgcgagaaggcgttccaaactctcaaagaaaagctggtttcctcgccagtgttaatcttgccggatactcgcaaggatttcatggtgtactgtgatgcttcgcgccaaggattggggtgcgtgctcatgcaggacggtcatgtggtagcctatgcctcacgccagctacgacctcatgaaggcaactaccctacacatgacttggagttagcagcggtggttcatgctttaaaaatctggcggcactatctcattgggaaccgctgtgaaatatatactgatcataagagtttgaaatacatcttcacccagtcggatctgaatcttcggcaaaggagatggttagaactcatcaaggattatgatgtgggaattcactatcaccctggtaaggctaacgtggttgccgatgctctaagtcggaagagccattgcaatactctcaacgtccgaggcattccacccgagcttaatcaacagatggaagccctgaacctaaacatagttggtcgtggatttttggccgcgctagaagcccagcccaccttgctcgatcaaatccgcgaggctcagaagaatgatccggacatgcatggactcctcaagaatatgaaacagggtaaagccgctggtttcacagaggatgaacacggaaccttatggaacggaaagcgggtatgcgttccggatagcagagaacttaaacagctgatacttcaggaagctcacgaaagtccttattccattcacccgggcagtaccaagatgtacttagatttgaaggagaaatactggtgggttagcatgaagcgggaaattgcagagtttgtggctctatgtgatgtgtgccagcgtgtcaaggcagaacaccaacgaccggccggacttctccaacctctccaagtgccagaatggaaatgggatgaaattgggatggatttcatcaccggccttccaaaaacccaaggtgggtatgattctatatgggtaatagtggatcgattaaccaaggtagctcgattcattcctgtgaagaccacctatggagggaataaactagcggagctctacttcgctaggatcgtgagtctccatggcgttcccaagaaaatcgtatctgataggggaagccaattcacctctcacttttggaagaagctccaagaagagcttggtacccgactaaatttcagcaccgcatatcacccgcagacagatggacagaccgagcgtctaaatcagatcctagaagatatgctccgcgcatgtgtcctagatttcgggaagacttgggataagagtctcccctatgccgagttctcctacaataacagctaccaagccagcatacaaatggcaccatatgaagcgttgtacgggcgcaaatgccggacaccgctcctgtgggaccaagttggggaaagccaagtgttcgggactgatatcctgagagaagctgaagctaaagtcagaatcattcgggataatctaaaggtggcacagtctcggcagaaaagttatgcagataaccgtcgccgtgatctggaattcgcagtggatgactttgtgtatcttcgggtcacgccattgcgaggtgtgcacaggtttcagacaaaagggaagctcgcacctcggtatgtgggtcccttccgtatcactgctcgccgcggagaagtcgcctaccagctggagttgcccgcctccttgggcaacgtgcatgatgtgtttcatgtgtctcaactcaagaaatgtcttcgagtgccatccgagcaggccgactcagagcaaattgaagttcgcgaagacttgacctatgtggagaagccagtgaaaatcctggacgccatggagcgcaggaccaggaaccgagtaatccgtttttgcaaggtccagtggagcaaccacgccgaagaagaagctacttgggagcgtgaagacgagcttcgtcatcgtcatcccgaaccgcgccgccgcttccctccactccggccgccgttctcgtcgtcgtcgttgtcccggggtgagccgaagaccgccgttcgccttcccccttccctcctctctctcgggcgccgctccgccgcgccggtggtcgccggcggtgaccat

SEQ ID NO: 23161 - DNA, 4911 bp, Oryza sativa; identical to SEQ ID NO: 14310
  Clone ID: TF_OsC359_7886

SEQ ID NO: 23162 - DNA, 5029 bp, Oryza sativa
  Clone ID: TF_OsC359_5737
ttaaacggaatctcgaccccgagattcggaagaactggcgaagagatcgggatgggctgccttcagctcttcttcacgctcccaagtagcttcttcctcggcatggttgctccattggaccttgcaaaaacggattacccgattcctggtcctgcgctccatggtgtccaggattttcactggtctctccacgtaggtcaagtcttcgcgaacttcaatctgctctgagtcagcctgctcggacggcactcgaagacatttcttgagttgcgacacatggaacacatcatgcacgttgcccaaggaagcaggcagctccaattggtaagctacttctccgcgtcgagcagtgatgcggaaaggacccacgaatcgaggtgcgagcttcccttttgtctgaaacctgtgtacccctcgcaatggcgttacccggagatacacaaagtcatccactgcgaattccaggtcatggcgtcggttgtctgcataactcttctgccgagactgtgccacctttaggttttcccgaatggttctgaccgtagcttcggcttctctcaggatatcggtcccgaacacttggctttccccaacttggtcccacaatagcggtgtccgacatttgcgtccatacaacgcttcatagggtgccatttgtatgctggcttggtagctgttattgtaggagaactcggcataggggagactcttatcccaggttttcccgaaatctaggacacatgcgtgaagcatatcctcgaggatctggtttagacgctcggtttgaccatctgtctgcggatgatacgcggtgctgaaatttaatcgggtacccaactcttcttggagtttcttccaaaagtgagaggtgaactgacttccccgatcagatacgattttcttgggaacgccacgcagacttacgatcctggcgaaatagagttcagctagtttgtttcctccatatgtggtctttacaggaataaagcgagctactttggttagtcggtccacaactacccatatagaatcatatccaccttgggtttttggaagtccagtgataaaatccatcccaatttcatcccatttccattctggtatttggagaggttggagaagtccggccggtcgttgatgctctgctttgacacgctggcacacatcacaaagggccacgaactctgcaatttcccgcttcatactaacccaccagtatttctccttcaagtctaagtacatcctcgtactgccagggtggatggaataaggactttcgtgagcttcccgatttccgttccatagggtgccgtgttcatcctctgtgaaaccagcggctttaccatgtttcatattcttgaggagtccacgcatgtccggatcattcttctgagcctcgcggatttgatcgagcaaggtaggcttggcttccaacgcagccaagaatccgcgaccaactatgcttaggttcagggcttccatctgttgattaagttcgggtggaatgccacggacgttaagagtgttgcaatggctttttcgacttagagcgtcggcgaccacattggccttaccgggatgatagtggattcccacatcataatccttgatgagctctaaccatcttctcaccgcggctaactccaaatcatgggtagggtagttgccttcatgaggccgtaactggcgggaggcataggctaccacatgaccttcctgcatgagcacgcaccccagtccttggcgcgaagcgtcacaatacaccatgaagtctttgtgagtatccggcaagattaacactggcgaggaaaccagcttttctttgagtgttttgaacgccttctcgcattgcgggctccacacaaatttctcttctttcttcaacaactgtgtcataggtcgagcgattttggagaagttctcgatgaacctccggtagtatcctgccaaacctaagaaactgcgaatttgagtgactgtcttgggttgcttccaatcggtgacggcggtcactgtttcggggtccacagcgactcctttagcagatatcatgtgccctaagaatttgacttcggacaaccagaactcacacttgctaagcttggcatacaattgatgttcccgcaactttcccaacaccagacagagatgttgttgatggtcttcctctgattgcgagtacactagaatgtcgtcgatgaagaccacaacaaacttatctaagtactccatgaacactttgttcatcaagttcatgaagaaagcaggagcattagtcagaccgaacgacatcaccgtgaattcatacagcccgtatcgcatggtgaatgcagtcttcgggatatcttcttcacggatgcgcaactggtgatatccggagcgaagatcaattttggagaataccgtggcacctttaagctgatcgaacagatcatcgatccggggaagagggtacttgtttttgatagtaacttcattgagagctctgtagtcgacacacatcctctttgtcttgtctttcttctccacaaaaattacgggagcaccccagggggaagtgctcggacgtatatacccctttcctttcaactcttccaactgtttcttaacttcggccagttcatttgctgccatacggtagggtcgcttgtacagaggagtggttcctggagcaagatctatccggaactcaatctctcgcttgggcggcataccgggtagttcttccggaaacacgtctccgaactctctgacgatggggatttctgacagtcctatctgatgaagttctgaactactgacagaggttgggggtgcaaagaaaacaaccggttgttctggccctcggtacagagtgacagtgcgtcttgcacaatccactactccttggaattgagccaaccaattcatcccaaggatcacatccaagttcttggtgtctagaagaatcagatccgagggaaacggaattccctgaatttctatgggaatggcagggctataatacttcgctgtcataacccctccaggggtggtgatgagcatagggttcctaagcctttctacacccaactgatttctccccacgaatgtcacagatataaacgagtgggaagctccagagtcgaacaaaatggtagcagggatggaatggatgaggagcgtaccaacgatgacgtctggagttgtcagcacatcctcggcagtcacgtggttcacatgaccccgagcgacgtccttaccaccgttgttggggcggggaggcgcttggccttgctggcgtcgtggcttcgggcatttttccgcaaagtgcccgggttcgaagcagttgaagcacagacgctgctgaccttgtacgtctctgtggccttgaccaggctgcacagctggcgcaggaggacggggtgcacggggcccttgctggccctgaggttgctgcggctggggaacgcgcaccacaaattgaggtcggggcgcggagcgaggttgctgctgttgctgctgcgaggaggatccccctagatagggattggtgtagcggaccctttggttagccccctgttgattgcggaaattcgccaagcgacgcttgtgcgactccaattctttgtgcttggcctccaagaggatgctcttgtccactagacgttggaaatccggatagtccccggacaccagacgtacggacagctcagagtccattcccgccaagaacttctcttgcttttcctcatcttcccgaacgtcctccggggcgtaccgggccaggttgttaaactcatgcaaatactccatcacggagcggttgccttgcttcaactcccggaattcccttttcttaagggccatgactccggcaggcacatgggttctccggaaagcggcggtgaaacgggcccaggtgataggctgcccctcgggctgcgtagcctggaagtggtcccaccatagagatgcgggcccctgcagctggtgggtggcaaagatgactttctcctcatcgttgcactgcacagtgtctaacttcttccccactgcatgcaaccaatccaaggcatccacggggttattggagctggagaaggtaggcgggcgaatgcgaaggaactcggcgagcttagagtgttgcgggggtggtggtggaggtggagcattatgctgtggtggattttggatgtggtggaggaaagcagccgtcatgttggcttgctgggcgaggatttgggtgaggatggcgttggtgtctggtggtggtggtggaggcggaggaggaggtggaggcaacacccacgggggaaatcaaggccgacaacaccatcaaattcattaaagggatattttgcagatatgaattgcctcaccgcatcataacagataacggttcccagttcatcagcgccgatttccaggattactgcactggactgggactcaagatctgcttcgcctcggtttctcaccctcagagcaacggacaagtcgagagagcaaacggcatagtactacacgggatcaagacccgtgtctacgacaagctcatgtcacatgacaagaagtgggtcgaagaactcccctcggtactctgggccgtgcgcaccacaccgataacgtccaacaaggagacacccttctttcttgtgtacggctcagaagccatgctccctaccgagctacaacaccagagtacacgagtacagaagtactccggcgaggatcagaaggaacagcaaaacgacgacgtgaacctactcgaggaacctcgagaacgagttgccgtcagggcagctagttaccaacaagcccttcgccggtatcacgagaagcgcatccgagcacgcatactttcgatcggcgactacgtcctccggcgagttcaaagccaagcagggcgaaacaactctcacccaaatgggaaggaccgtacacgatcacacaagtcttgtggccaggcgcattcaagattgcagacggtgatggtcgcgagttagaaaattcttggaacattgaccaattgcgtaaattctatgta

SEQ ID NO: 23163 - DNA, 4497 bp, Oryza sativa
  Clone ID: TF_OsC1528_1659
atggctgctcttactgatgatgccaatggtgagggagcgagtcagcctcgcactggcccatattcttctggacgtgccgggggtagtcgccgtgctgccactgcagaacagcatgatgatgaaccatctcttgctcaactcctggctaatcagaaccgactttttgaaaggatggtagcgaactctgaaaacatgggggctgccatggcacagcaggccaatcaagcaccctccaagctagcagatgttcaacgaacacatccacctcatttctcctctgcggctgatccactcgcagcagatgattggcttcgtgatattgaaatcaagctgaacctttgccggtgtgatcctgtagagaaggctacctttgctgcttactacctgcaaggtgcagcagctgcttggtgggagacatacaagactctcattcctcctgacgagccaatcacttggactgttttccgtgagggattcaggtctgctcacatccctgctggtctcatggaaatcaaaaagaaagaatttcttaacttgaagcaaggaaacatgcccttcatggagttcatggaacgcttcaattatctgggtagatatgccgcttctgacttgaacactgaaacaaagaaggttgagctatgcagagatcgtcttgcacctgaactcaagcatgctcttgctgctcatgaaatcaccagcatgaagacactggttgcccttcgtgttgaatcaagtgaaaaggaagtggttgaagaccgtaagcgtaagtgggctgcaaagaaatttgctggcagcagcagttccactcggcctcgtcttgctccatctcctgcggttcgtcctatggcacctcagccacctcggcagatgtatgtgcctccacgtccgcaaactcagttagttcgtcaagttcctcgcgcagttcaagctgcgggagatgcatctcgtaatgccaatgtcacctgctacaattgcggcaagaaggggcattattctcctagctgtccttatccgaagactggaacatccggaccgtactcgcagggagcaccgcagcagcctcgtggtcctcctcaagttcagcctggacagcgtggagctcctgctgttcccaagccagctccaacttttggaaggggccggctcaaccatgtcactgcagaagaagcaaccgacgcacctggtgtcgtacttggtacatttcttgtgcactccattcccttaacagttctttttgattccggtgcaactcattcattcatgtcaaccttgaaagcaaaacaacttgacttgaaaacagaatttcttagcgatgctatgcgcatccaatctcctggatccaccatggtcaccaaacttctatgcaaaggtgtagaacttataatagacggggtaaagtttaaagctaacctcatattattagacaccttgggcctagatgtcattcttgggatggattggttaactaaacatgagggaaccattgattgtgctcatagaactgtaactcttcgtagcaccgatggtcaatttgttaggtttacctttgaacaaacctccacttcaaatcaaccctctatacaatctctctctataccggagttaaaatcagtacccatcgtgaatgaatattccgatgtgtttcctgacgaattaccagggatgcctccagatcgtgacattgaatttgtgatagatttaatccctgggacagcacctatagccaaaaggccatatcgaatgacttctgaaaatttgatggaattaaagaagaaactcaatgagcaattggctaaaggtttcattcgtcctagttcatctccttggggctgtccagtgttgtttgtaccaaagaaagatggaaccatgcgaatgtgcgtggattatcgacctctgaatgaagtcaccatcaaaaataaatatcctcttcctaggatcgatgatttatttgatcagttaaccggagctcgtgtcttctcaaaaattgatcttagattgggatattttcagcttaaaatcagaccggaggacattcctaaaaccgcattcacaactcgctacggtttatttgaatacaccgtagtctcttttggattaaccaatgctcctgcttctttcatgaatatgatgaataaaatcttcatggaatatcttgataaatttgtggtggtattcattgatgatatactcatctactccaagagtgaagaggaacatgcgcaacatttacgtatggtactcgataaactccgtgagcatcaactttatgccaaattctcaaaatgtgaattttggttaaaagaagttgaatttcttggtcatgtactttctgaaggtggtattgctgtgaatccaagaaatgtacagaacgtacttaattggaagcaaccacaaaatgttcctgaaattagaagttttcttggactagctggttactaccgtcgtttcattgaaaatttctccaaaattgctagacccttgactcaacttcttaaaaaagaaaataaattcatatggtctgaggcatgtgaaacaagttttcatgaacttaaaagaaggctcacaacagccccagtgctagtgatgcctgatgttcttaaaccttttcatgtttactgcgatgcctcacatcatggtctcggttgtgtactgatgcaagaaggaaaagtagtggcttatgcttctcgtcagttacgaccacacgagatcaattatccaactcatgacttacagctagcagctgtggtgcatgctctaaagatttggcgccattatttggtcagtaatcggtgcgaaatctttaccgatcataagagtttgaaatatttctttacccaaccagatctgaacctaaggcaaagaagatggttagaactcattaaagattatgatctcggtattcattatcatcccggtaaagcaaatgtagtagctgatactttaagccggaagctacatcaccttgccgttattgagacaataaatcagccatcgttgtcctctgaatttcagaaattgaatttgggattggtagaggatggttatgttgctgcactagcattacaacctactctctattctcaaattaaagctgctcagtccattgatgaggaagtagctgaaattatgaaagaaatcaattcaaagccacaatctatatacactcttaattctgatggtatggttatgcttggcaaacgaatctttgttcccaataatcaacaccttcgagaaaccattcttgatgaagcacatcaaacacctttgtctatccatccgggttgcactaagatgtaccaggatattcgcactcaatattggtggcctagcctgaggcgtgacatagcagcatatgttgcaatttgcgacgtgtgccaacgtgtcaaagctgaacatcaacgacccgctgggctactccaacctttgcaagtacctgaatggaaatttgatgaagttggaatggattttattaccggtcttcctaaaacacccaatggacatgattctatatgggttattatggatcgactgactaaagtggctcacttcattccggtgcatgtgacttatggtggagccaagctagcagagttatatttgactcatattgtaaggcttcatggcgtaccaaaagtcatagtatccgatcgaggaacacaatttacatccagattttggaaaaatttacatgaacttctcggaaccaaattgttcctcagcaccgcctttcatccacaaacaggaggtcaagtggaaagaacaaaccaaatacttgaagacatgctccgagcttgtgtgcttgaacataacactaactgggagaaatgtctatcttttgctgaattctcctacaacaatagctttcaatcaagtatccaaatgtcaccatttgaagctctttatgggagaaaatgtaggactcctctttattggtccgaagtaggagaaagacaattctttggacctgctatcattaatgaagctgaaaagaatgtcactcttattcgggaccgattaaaagaagctcaaactcgtcaaaagagctactctgatcgtcgtcgacgagagctaagttttgatgttggtgaccatgtctatcttaaagtatcacccatgagaggtactcaacgattccaaattcatggcaagcttgctccacgatatattgggccataccaaataatatctaagcgtggacaagtagcctatcaattggaattgccatttcagttgtctaatatacatgatgtattccatgtttctcaacttaagaaatgtcttcgaactccgattgagcacacctcacttgaagacattaatctaaagccaaatctctcctatcaagaatacccaattcgtattctcgaagaaagtgaacggcgtacccgcaaaagctccatcaagatacttcgagtacaatggagcaatcatactgcggatgaagccacatgggaacgagaggaccgacttaaggccgaattccctagtttcttctag

SEQ ID NO: 23164 - DNA, 4485 bp, Oryza sativa; identical to SEQ ID NO: 14320
  Clone ID: TF_OsC359_6268

SEQ ID NO: 23165 - DNA, 3749 bp, Oryza sativa
  Clone ID: TF_OsC65158_1
atataattaagagatataagaaggtagtaatgaagaaaaaagtagaaatggaaacctctaatatggcggccccccttaatcaggggccaagtttttttttttttttttttttttttttttttttttttttttagagggaaaaccacaattccattataaataagaaaagaatacaagattttgacatatatccaccaaaactgaaatttaacctagaacattattatcttaaaaatacaaaacttgttaaacatattcccaaccttagggggctaaaataatgagtgccacaaatgaaaaacggcagtcagccaccagtatctgatgaactgacaattctattgtacaacacatgcctcttagaacctttgatgctataacagcttgtcgatcacgagactatgcaaattgctctatatatatctctaagctgaggttctctgttttactaggctgaggttctctattttagtacgcaggttttctaacaacaaaaccacaggtacaacaaacagaggttgggcttagtgtcgcccatgacctggtggaggtctcctgttagaattcctatctaaggtattgtaacggttctgcgactgctgtggtcgtgaattaggccttgcaggaggtgccccacccccataaggccctgacccagcataggagccataaggttgttgctgctgctgctgccactgctgaccacctccatacggtgcaggctggtagctcctaccataccccccagcatatggtgggggttgcgcataccgtccaggacctgctgatggagcagaatgtgattgatacgagtttccaccgctctgatggtatggtggaacccttcctcttgaatcatggtggttgtctcttgcatatgggtaccttccatggttatctcgtccatactgagaaggcccagacctatcgttctgataatgacctgatgatgatgcataagctggtggtacctgaccatttggtagatcaccaggaacatgccagccaggagcaggctgctccatccttggtggaatcccatttggataaggcatgccattcattatggtttgatatggcatcgatggggtattgtattgtccgccactccgagcattcaagctgttcaccacaagtcggtgggcagcttccccaagttggcggccagatattgctccagctgggttttgcctgttgctgttttcataaggcctcctgttgttattatcatgaggcctcctaccactgtcttcatgccatagcacaggtggtggtttcaggtcagtagcttcaacagtcttcttgggtatgattacaccaacaggtggacgagcgatgtgcttatgagaatccggaagcttgtagattgtacatatcacttgattgtccatgatatcctccaacccatcaacaggagacctgaagacaggagggcacggatccccactacaaagtgagatgtaaccattcattcctccactgcacaaaacaaggcagctagaagaaggatcaatcttttctttaatttcatttcgctctctgtcaggtaggtgtccaaatttgctgttgagggagtagatataaggcgaaagtggatgggagccattcacaaaaagcatattgaacatgatactgtttctccttgcttcttcaggcgtcaaagtatgctcaacttttttaatttcagctagcaaccgggcttcatcaatgaagggcagttttgctatcccctgccatgaatacctcttcccattcatatctacttcaaaatcagttggataaaaatcaattattggtgaatttgcatctgtcatcaattgccgatactgtacagggagtgcatgggagctcgcagctgggaaaactcccataagttgatcaaacggtttgaatggtgacccaagttcaaaagttatattgagttgacctagaccactcaaatccgaagcaaaaggagcataatggtaagggtaaaaccattgccacgagcagacaccttcataatagtagtgcattacccaacacaaaccttcagtatatttcagaacgacatctctgcgtatttcttcaatctgcccgggtgttcttgctccaaacttctcttcatagtacctttccctccatcctggttctccaagttttatcttgtcctcctctggattttcagaattaaaaacatcagatttctcacgaagtgcatctttaagcattgtcttcaaatcttccttgttttcgcgttcctgtgcttcaaggtcattttcagcttcaacaatagcagccgcaatgcttgaacctgacgatgatacccgtgcagctttccgagcacgactattttttcccccattgtttttgtcagatccattttgttcatatggtgaaggcacaggtccagatgcaaggcgagacccttggaagcgtgcaacaggtacaataagatcatccctgacatggggatccaggtcatcccctcgttttgcttgggccttttctcgttttatcctttcagcttgacgctgatgcaaacgagctcttttctgaaatattttatcctcgtaggagccaactgcttgaataaagtgttcaactttattcagatccggcgtgcaagcatcagttagatagccacccatggaaggaaattccttcttgtatacagccattagcaagttaatagctccctcacgaatctctaatgttggcatatgtggaagaaaatcattgccaacaaaaaaacacatgaagatgaaatcatcaacgatgcgttcaaagtcaatcgggaaaggtggattctgcattctgaactcatattctaagtactcccggagggtccatatattcaagaactggtaaggtttctttggaacaatagcttcacctttttcatcaaactccccagcttttctcttaacctttccttcacagtttgctgctagatgtccaacctgaccacacaagaagcatttgtcctgctgtccaggtgtataaactacctctctcagtatagagaaatgtacttcgtgtgttgcaagagctaacatgatcaggtctgcatccaggccatacaaacaatggcgagtatttgggttaaatccagggagattccgttgaccgcgaatgtaggacataattttatgttccccttcaccaggaacattggcatcagaaagaataactttaacttgtttccatccaggatcataattcaacctgagatggatgtagtactgcaaagcaatcgataaaacagccataaactctgttcctggagtaataacgttagaatcacatgtttgagattgctgttttggtggaagttttctgccttccctctcaaactcttcacgcaacctctcttcttctgcggccgcatcagcagcatcttttgcagctctgaatcgtctagagcgttgctggttcatcttggcacgaggagcaacaccatcaatggccatatacataagcttccgagggcgaaccatgacaaatagcctatcgatataatcaaacatgcactggaaaacctcagcgaatgttgtcggagagggcctatcctcggggtggaagcaggggtgaatgatcccgttcatgtcgaggtagaggttgtcgaactcgaggccgttggggttgggcttggaggtgtcgacgggcaccttgacgccctcgatctccaccgcctcctcctccaccacgtccaccaccaccatcgggtacttctccgccagccaccggtagaacgccggcacacccat

SEQ ID NO: 23166 - DNA, 5376 bp, Oryza sativa; identical to SEQ ID NO: 14325
  Clone ID: TF_OsC359_6599

SEQ ID NO: 23167 - DNA, 1766 bp, Oryza sativa
  Clone ID: TF_OsC1528_2334
tcaccgcaagccgcccgacgagtctgcgccagacccgccgccaccaaaagcaattgctatcccagcaaccgcttcctcctggactacacctgcaacagtgcaccctcgcagcttgtaaagatgcgactccaccttctctccagtcatcatagtcatcttgcccttcatgatctcaatggtcttcctattccgattaccgcggaatattaacccttcttcatgcaaggttccaagcgaaatcagattcctctttagccctggtacatgcctgactccttgaagaacatgttcacctccatcttctagcttgattttgacttcacctactcccacggccggataacttgtgtcatcgcctaagtagacaaaaccaaactcaccagacttatatgaagagaaccactccttccttggcgtcacatgaaacgagctagctgaatccaatatccacgcttctgcatccttagactgtgcacttgacatcgtgagaagatcacaaccatcgctatccgagtcatttgaagaagtcgctacattagccttagcttttcccttcagtgttggacactcccttcttatatgcccccactcatcacatctgaagcacttcaccatcttcttctttttgttcttctttaccttatgcccagcatgatcttctttgactagcaaaccctctgcttgagatgtttcaccctctttgttctttctcatcacatgctcatacgattcaggtaatgaacacaaaagaactatggccttgtcttcatcgtcaacttccacatccatcttcacaagatcagtgactagttgattgaaaacgttcacatgtgctgtcagatccgccccttcctgcatctttagcccatacaacttctgcttcagataccgtttattggtcagagtcttggacataaactgagcttccaacttttcccaaattatctttggtgaggtctcctccatcacatggtacatgatctgatctgaaagacatcgccttattgtcgcagccgcctgcaactgcatctcctcacaatcgtcatcctccatcttggccggtttgacacccttcaaagcctttgaaacttcttgttgagctaacaaatctttgaccctagtttgccacaagccaaaatttccgaagccgtcaaacttcaccaaatcaaatttcatacatgtcggcgccaacttgccaacccgcgacctgactggtctatcgccaccagaatactcgcctttctcagtaccgtctgtattcgtcttcacaatctcgtcttgtgatccgatcgtgtcagcctggcttggtccacccgcacccgtgcgccttcttcccaagaactcgtgcaatttgcgtcgtcgccatacgcgctgtccgtacaccgtacgcaccgcagtcgcaaccctcgtgttcaccgtccacgacctcatcgtcatcggccctccacgtccgccgcgccgtgccaggctcgctggcttcgcccttccgtcagtagcctccctgccgccgcggatccacattcaccgcgtgcgtcgggtgcgccgtccatggcgctacccctccaatctctccggtcgccttcggccacgcccggccccgtcttccggtcacgttccgccatcgccggtctgatcgcgagcgaggtcgccgcctccgcaacatcctcgttgtcgccatcgatctcatcgccacggctgacgatctcctgtcgatgcgcgatccccacctcgtgtttcctcctccacatgtcttcttgatccaatgc

SEQ ID NO: 23168 - DNA, 1389 bp, Oryza sativa; identical to SEQ ID NO: 14333
  Clone ID: TF_OsC359_5686

SEQ ID NO: 23169 - DNA, 6339 bp, Oryza sativa; identical to SEQ ID NO: 14334
  Clone ID: TF_OsC91_1942

SEQ ID NO: 23170 - DNA, 672 bp, Oryza sativa
  Clone ID: TF_OsC547_335
gcttgcagaaggtaatccagtgagcccacatgagatcaaaatgattggttacaccgagagtctggataagcttggctttccccttagccgagagttggctactgatttgattctccagtcgctccctcctagctttgagccgttcataatgaatttcaacatgaacaacctgaacagaaccttggctgaagtgcatgggatgctaaagactgccgaggaaagcattaagaaaaactccaaccatgtgatggttatgcataagcgcaaacccaacaacaagaagagtggtcaaaagagaaagctaaactctgatgagatcacgagtactggcaactctaagaccaaggttcaaaagacagggcccgctaaggatacagagtgcttcttttgcaaggagacaggtcactggaagaggaactgtaggaaatacctagagcacctcaagcagatgcagcaggatggaaagagttccaccttaggtattaatgttatagaaattaatcttgctacttcctctactgattcttgggtatttgatagcagtttttcaatgaaggacttaggggaagcagtatatattctgggcataaggatctatagagatagatcaaataggctaattggattaagccagagtacatacattgacaaggtgttgaagaggctcaacat

SEQ ID NO: 23171 - DNA, 1382 bp, Oryza sativa
  Clone ID: TF_OsC93807_1
atgctgctgcgtcttccgtgcgcgcgcggccccgcgccggcggccgccgcccggtggagacccccggggcgggcggcgcggacggcaccacgtctcggccgagggcacgccgccgcttcgtccgccgacggcagcggcgctccgagctctccgctttttgttctctgccattcccaagctctgaccctggcgttgccgccgcagtccctccactacgactacgatcctttggccgacctccttggaccagacgtcgacccgacctcatcccaaagatctttcaatgccggcgtcatcttggtgacttggctaatttggaaagagcacaatgagtctttgaggggcgtgcagtctctccggaatactgctccagttgcagagaaggggaagctgaggtcctgggttggtccaaatgggcaatactatcgtgagctgccttgccctagctgtcgaggtagaggatacactccttgcaaacagtgtgggatagacagatccagtttggactgccctatgtgcaatggcaagggcattagggagtgtgtgcaatgtgctggagagtgtgttatatggcaagaatctattgatgagcaaccatgggagaaagttcgttccagttctcccttgaaagtaaaagaggatgatgaagtcgacaaactggagataaagattaacacatcaaaaagatcaaggcgtacttacccatctccatcccctgaagttgccctgaagattagcagatctttaagaagtctgaatgctaaaacaggactgtttactaagcatatgaagattatacaccaagaccccaaattgcatgcacaaagggttgctgcaatcaaaaaaacaaaaggtactgctgctgcaagaaagcatgcatctgaaactcaaaaggcattcttcagcaatcccgagaatcggcttaagagaagcattgccatgaaaggggtgaaattcttctgcagcaaatgtgggcaagaaggtcataggagcttctattgcccaacagtgagagaaatttcaggcagagcgcatttcagatgccgattatgtgggggaaagggtcataatagccgaacatgtggaaagccaaagtcagagaatgagtgtcaacgacaacctcggcactgcagccaatgtggtgaaagggggcacaaccgtcgtaactgtcccagatccaccaccgttgaggttgaggatgtcaagatttactcagagtaaaaacaagataatgttcatagttcagggatttattcatgtagtttctgctcggcaaaggggcacaataggcgtacatgcccgaaaagaaaggctagcatagggcagcagaaagattgaaatatacatgttaatccacatagcaatcttatggtgtttgctgg

SEQ ID NO: 23172 - DNA, 456 bp, Oryza sativa
  Clone ID: TF_jC-osroLIB3475021f01a1
aagttaccatataagtaagtatatattgatacatctttataggcgacataaataccatacatgatccataaacagaaggttccaattacgacctaacttaatcctggggttacttcatgtaagaagtgattaacaaagcagatgatggacaaacaccgtaggagcccacctcttgctgccacagacaccacaagtagtatcaggtgcccaatactatagcatattgcataaaccctaaaccctaaacctatttacatggcagccatgggagagtcaatcattaagcagaagtaggccattactcattaagcctagcttctgatggtcctgtcacattgccaaaatgataccgatcatatgcttcttaacacccctcttgtgtcatcaagttccagggcaattacctctccagtgcccaagcttgccgcagttgtagcaaggagagttaagtgggct

SEQ ID NO: 23173 - DNA, 5112 bp, Oryza sativa
  Clone ID: TF_OsC359_7398
atggtgaagacaaggaatgatccccgtgactccagcgacgccaggggcagcgaagagcagaccgatggagctcatgtcagtggtgcatctgacagcagttcatctccaccgctcgggaacccaacggtcactcaaatgatgacaatgatgatgcaacagatgcagcaacatcaccatcaggtgttgcaacaggtgcagcagaaccagcggtttgctcctccaccatcacacctgtccaaactgttagactttcttcgtatccagccacccactttctcaagcaccaccaacccaatggaggccaacgactggctccgtgttgttgagaagaagctgaaccttttgcaatgcaacgaccgagagaaggttgcttttgctacacatcaattgcaaggtcctgcttctgcctggtgggataactacgtggtgacccgtccagatgcaacgaaggttacttgggtagagttttgtcaaaactttaggaaggcacagattcctgaagggattatggcacaacagaagagggagttccgtgcattgcaacaaggaaccagaacggttacagagtacctgcacgagttcaaccgcctcgcgcactacgctcctgaggacgtgcgcaccgatgctgagaagcaggagaagtttttgtttgggctcgacgatgaattgaccaaccagctaatctccggagtctatgaggactttgagaagcttgtggacaaggctatccaccaggaagagcaacgcaacaaaatggaccgaaaaagaaaggcagctcagatcagctttcctcaggggaacaatcagaagcctcgcttcatgacgggacagctaggtgggccttccaccctgatcgtctgtcagcaccgtccctatcacccgagtaacttcaacaacgattacaacggtggcagtcacaacaacagtaagcagcacaaccacaactcgactccacccccactaatggcaccagctcagtcagatccgccagctgtgtcagctcagtcagaacaacccaagaagggggctgtaggaaagccaggaccctgcttcaactgtggcaagcacggccactttgctagcaagtgttcgaagctgaatcgcactagacccaggttcatccaggcccgcgccaatcatgtgtctgcagaggaagcacaggcagcatcagatgtcgtgctgggcacgtttccagtgaactcatatccagcaacagttctttttgattcgggtgcctcgcattctttcatttccaagagatttgctgggacacatggattatcggtaatggaacttaaaataccgatgcaggttcatacctctggaaatgacatgaagacatcacactattgcccctcagtgactatagagatcaagaggtcacaatttctatccaacctcatccttctcgaatccaaagacctggatgtcattctcggaatggattggttgaccagacacaagggggtgattgactgcgcaggccgcaccatcaccctaaccaacgacaaaggggagaagatcaccttccgttctccagtgtcacagaagtccgtagcgagtctgaatcaggctgctattgagggtcagacagaaacagtggagaaaagtcccaggaagttggaggatattcctatagtacaagaatatcctgaggtatttcctgaagacctcactacaatgccaccgaagagagaaatcgagttccgaattgatctggcacccggaactgctccaatttacaagaggccgtacagaatggcagctaatgagctagcagaggtcaaaaagcaagttgatgaacagctgcagaaagggtacattcgaccgagtacttcaccttggggtgctccggttatctttgtggagaagaaagacaagactaagaggatgtgcgttgattatcgggcccttaatgaggtcacaatcaagaacaaatatccgttgccaagaattgatgacctgtttgatcagctaaaaggagctaaggtgttttccaagatagacctgcgattaggctatcatcagttgagaattcgggaagaggatattcccaagacagccttcatcactcggtatgggttgtttgagtgcacggttatgtcatttggactcaccaatgcaccggctttcttcatgaacttgatgaacaaagtgtttatggagtttcttgacaagtttgtcgtggtattcattgacgacatacttgtgtattcaaaatcagaagaggaacatgagcatcatcttcgtctggtactcgagaaattgaaggagcaccagttatatgccaagtttagcaagtgtgacttctggttatcggaggtcaaatttctgggtcacgtcatttctgctcaaggcgtggcagtggatccatcaaatgtggaatcagttacaaagtggaccccaccaaagacagtttctcaaatccggagttttcttggacttgcgggctattaccgtcggttcatcgaaaatttctccaagattgccaggcccatgacacagttgctaaagaaagatgaaaaattcaagtggtcagctgagtgcaaccaaagttttgaagaactcaagaagaggttagtctctgcaccagttctaattttgccagatcagacaaaagacttccaagtctactgtgatgcatctcgccaagggttgggatgtgtgttgatgcaagaaggcagagtggtcgcatacgcttcgcgacagttgcgtccacaagagaccaattaccccactcatgaccttgagttggcagcagtggttcatgctctgaaaatctggcggcactatcttattggcaaccgctgtgaagtatacactgatcacaagagtctgaagtacatcttcactcagcctgacttgaatctccgacagcgaagatggctggagttaattaaagattatgacatggggatacattatcatccaggcaaagcaaatgtggtagcagatgctttgagcaggaaaagctattgcaatgccttatgcactgaagacatgtgtggcaaattgcagcaagatcttgagcacctaaatttgggcatcgtggaacacgggtacgtagctgccctagaggcacggcctacgctcgtggatcaagtcagagcagctcaagtaaatgatcctgaaatagctgagctgaaaaagaatatgagggttggaaaagctcgagatttccatgaggatgagcatggcacaatctggttgggagaaagattgtgtgtgcctgacgacaaagaactgaaggatctcatactcacagaagctcatcaaactcagtattcaattcatcccggcagtactaaaatgtaccaggacctcaaagagaaattctggtgggtcagcatgagaagagagatagccgaattcgtcgcactttgcgatgtttgtcagcgagtcaaagcagaacatcagaggcccgcaggactgctacaaccccttcagatcccggaatggaaatgggaagaaatcggaatggatttcataacaggtttgcccaggacatcgtcggggcacgattcaatctgggtggtcgtggatcgactcaccaaagttgctcatttcattccagtacacactacctatactggaaaaaggttggcagagctttatctttcaagaatcatgtgtttgcatggggtacctaagaagattgtatctgatcgaggaagtcaattcacttcaaagttctggcagaaactgcaagaagaattggggactcgtttgaatttcagcacggcttatcatccgcaaacagatggtcagaccgagcgagtaaatcaaatcttggaagatatgttgagagcttgtgcacttgactttggtggagcctgggataaaagtctaccgtatgcggaattctcttacaacaacagctatcagtccagtttgcaaatggcaccgtttgaagcattgtacggacgaaagtgctgcacaccacttttctgggatcaaacaggtgagcgccaactgtttgggacagaagtgttaaccgaagcagaggagaaagtcaggaccgtcagggaaagactgcgaatcgcccagtctcggcagaagagttatgctgataaccgccgaagagagcttactttcgaagcaggggattatgtgtaccttcgtgtcactccgctccggggagtacaccggttccagacgaaaggcaaattggcaccacgctttgtgggaccatacaggattttggaacgcagaggtgaagtcgcttaccagctagagcttccatctaatatggttggtatccacgatgtgtttcatgtatctcaattgaagaagtgtttgagggtacctaaggaacaagctagctcagagcacattgacatccaggaagatctgacttatgtggagaagccgattcgtatcctcgagaccagtgagagaaggaccagaaacaaggtgatcaggttttgcaaagttcagtggagccaccactcggaagaagaggccacctgggaaagagccgctcatccgcacctctttgccaactcttccgaatctcggggtcgagattccgtttaaggggggtaggtttgtctcgccctgaagttcccctcccttgctctcccctccccgaagtccatcccacctcccctctcctcccgggtgccgacaggtggggcccacctgtcggtcgtccctaacctccggcagccgccaccatccgccgccgaaaccgccgcccacgccgccgcttcctccgcatccgcgccctactccgcgcccacacgtccccacgtcgccgccccacgccctgccctctcccgtccgcgcgcgcgtccgcacggacgggattcgatttgaatcctctccccctctctctcctcctccacctctccacgtcgtcgccgcggaaccgccgctcccggccacgtccggcctccccacctctatataaccgaccaccgcgcctctctccacctttttccctctttcgccgtccgcccccgagctccctatcgcccccgccatcggcgccgccgcgtccgccatcccgaggtccacctcgtccgccgttctcccgtccaattccatcgccggagctcgcatctcctcgcactccggtgagcttccaccatagctgccgccgtcggccat

SEQ ID NO: 23174 - DNA, 4428 bp, Oryza sativa
  Clone ID: TF_OsC1713_4193
tcactcttgtggaggagaaggaggacgcaccaaagtggaaggataaggagcatcatgactacgatgatacacaaatgcttgggagctctccaacatttggactcgagaatctaatgtacccactctagtgtgcaatctccccacggaagcattcaagtctccaacatcggtgcgcaagccacgaacatcctcatgcaaagcttcatgcccggtagacaagcgttgaatgctttcacttagggtattaatagctccaagtaccgggttgaagtactcgttgggttgcattccaaaataagcatactgtggatggaagaaagtatttggatcatacccaggaggaggaggaggaagaggtgctgagcttgagctagctccaggatgagaggagggcgccgccctaggagcacagggagctccaagctgaaggcggggcttgtactgcttgtgcttcttcaaattttgcccagcagccccaagcttgtcttgaatcaacctcatgatgtaaggggcataatagattccctgagtgaaggtccccttggagatggcaatctcttgcatcatgagagacacaatgtcgaactgacggccctgaatgattgcatcgatgacgtgccaagccacccccctaatgtcatcattgttgccaaggcgagggaggatggtagctctcacaatcctgttaaccacactggggatagtcctcaagccggcaaccttcccatgtgtgtaccgcactccatcttcataaaactgagagagatagtctatggagagcagattatgggtgtgcttctcatgcaagtcatctccaaagtccaagcgaatattgaggagccgccggaattgcctcctagagatagaacagtggagggtgtcggacatccacttcatctcactatagtccccagccacccacactgtaacataaaactgccggatcaaatcttcattgtagtcttgcttgagggtcacaatccagtcaatgccaacagtcttgaagagatcctgctcatacacagacttctggaaagcggtgtgaaaacggggatccggggtgtcccgaggcctcaaaaactgatcatggtgcctcaagatggtatactgcgatggattcctcatgttcacaacaaactggatggagggatcaatgtgcatattatcacttccttcatcctcatcctctccacttccactgttatcatctccactagcctcctcactagccccctcaacatttgcctcaacctcttcatcactttgagcataatcatctccgctcgattcctcaggctcactcacggcatccggagtgggtgcacgacgaccatggcaagtgcggggaggcatcactccctcattaaggtcgagatgcccgttggttgccataggtgtcttgatgggcttcgcatcctccaagccagacctcttgagtagatccttgatgtacttggtttggctcacgaacgtcccatccttgagttgcttgatttgaagtccaaggaagaagctcaactctccaatcgtggacatctcaaattccctagatatcatatcaccaaattccttgcaaaatacctcattagtagaaccgaatatgatgtcatcaacataaatttgacacacaaagaaatcatcaccaatgatttttgtgaaaagggtggtgtcaacttttccaattttgaaatcctttgacaaaagaaaatctctcaatctttcataccaagcccaaggagcttgttttaaaccataaagagcttttgagagtttataaacatggttaggatttttaggatcttcaaaaccgggaggttgttcaacaaagacaagttcggcaattttaccatttagaaaagcacttttcacatccatttgaaatagttttatatcaaagcatgatgcaaatgcaagaaggatgcgaataacctcaagtcttgccacgggggcaaaagtttcaccaaagtccaaaccttcaacttgtgtaaaaccttgtgccaccaatcttgccttgtttctcaccaccaacccgttctcatcttgtttgttcctaaagacccactttgtccctatgacattgtggtttctaggtctttcaaccaaagtccacaccttgtttcttgcaaaattgttgagctcttcatgcatagcattcatccaatccggatcacaaagagcttcatctatatgttttggctcaagacaagaaacaaacgagtaatgttcacaaatcgaagcgacacgagatcgagtttgaacacccttactaatgtcgcccaacacttggtcaattgggtgatccttggaaagagcggtgtgtatcctcggtggcataggtggatcttgtgccttctcctcctccacttcaacttgagcttgacttggcgtagcggaagtagatggctcatcttgagtggaggtggatggcttgtcttccacttcaataggcttgacatctccaattgacatgttcttcatagctctcatcaagccttcatcacctttgttcttgttgtagacccggtatgccttgctatttgaagcataacctataagaaacccttcatcacaccgactttcaaatttggttaatctaacaccctttcctttactattgtctccaaatgtcactttttcttgttctttccctccttcttcaaatgtggtgaacatagctctatcaccggtcatgtgttgagtgcatccactatcaagcacccaatggcttccaccagtgcggtagttcaccactgagtataggggaacccacatatctagcaacaatgctaccattatgagccgtcccttgaagcacctctccaaactcttgttgagcttggccacttgctccttaagctcattgttctcaacaacaagtgaggcatcataaatagaaatacaagagctagagctagagctaggcatatccacaggatcatcacaagaggtagaaatgctagatgatgcaacatgagcaatatggcaagtagcactatcatcaagcaaatcacaagatatgccaacatcaatgagagctccatgttgagtagtgaaaaggaggttttcatgagctttcttaagcttctcatgagaaatggtgagtctctcatgagaggtctttagctcctcatacaagatctctaaagaagcatgatccttctttagggccttgaagttgacaatctccttttcactataagcatggaactcctcaaacatactcacaagctcatcataggaaacatcatcacaatcatcatcactctcactatcactaagagatgttaccttagaggagccctttgccatgagacaaattggagcgaacaatgatggagcctccttgatggcaacaacggccatcttcttcttcttggagcttgcatcatcaccaccttcttcctcggacccggatgaagcggagctctcctcatttgagtcccattccccgatgaatgcctcaatcttcttgccttccttcttgagcttcttcatgagcttgtagcctccactctttttcttggatgacttgtctccatcatcatccttggaagagcacttggaagcaaagtgtcccttctcaccacactcaaagcacttcaagttggagagagtcttgttgggtcttttatttcttctcctatttgagttggagccccttcctctctcctttctccttcccaagagatcattgaaccttctatcaagaagggctatctcttcctccaagtcctcattgacttcattcaccttgcccttgcccttatcttcaacttcggcttggagagcaatgcacttcttggaaggtgaggcttcctccatctccttcttcttcaacttgtacatgtcattggtgttgatcttccccaagaggcttgcgggtgtcatccttgacatgtcggagttgatgagcatggtgacaagggtctcatacttctccggtagagccctaagcatcttttgggcaacctcaagatcagtgtagtttgccccaagccccttgagatcattcacaatgacattgagcctcccatacatgtcattcacactctcatgaggcaacatggagaatgtctcatattggatcttgaggaaatgaagcttggcatccttgtactcgcttgtgccctcatggatctccgccaacttgttccaaatctcatatgcggtctcaaggttgctcactctatcgaactcctcttgactcaaagagttgaacaaagcattcatggcttgggcattgagttggaggttgcggtgatcaatctccgtcaagggcgtgccggtgatagcaaagtctacatccacaatactccaaatatggaagctcatagctttgaggtgagtagacattttaattttccaagtagagtagtttgtgccattaaacatgggagccttccctacatggttcacctcgttcgacat

SEQ ID NO: 23175 - DNA, 3601 bp, Oryza sativa
  Clone ID: TF_OsC359_6606
agcgtgccccgccgaagccgtccgttccgccgagccgccgccgccgcggtgacgtcatcgctgacgtcatcggggtcgtccgccgtgagccggtcgtggacccgatcgatctcggccgtccatcttggatcgattccgtcgtttccggagagtccgttttcgccggagaagagtttgaagagttccaaggccagcaaggcaactcctggtttggaatggtatattcctggtttggagatagaactgtgcagccgggatggttgttcagaatggttgggcctatgcaacaggatgccgcgctacaagcctgagtacttgtttggtgttgagggttttgtccaggagttgcgtacaatgtcctttgtcattggatttgggactgcccctttttatgctcagattcctcatgatcgtcatgaagagaggtgccgagtcaaagtcaccttgaacagtaatagtgaagacattctatcagtgatgttcgaagctggaggaagaaactacatccatgcatgtcaggaagtggcaaggatcgccataggagagctccgcgatcgctacagtgatcaattggccgacactgagtatcgttaccatcctcgtcaaccacagggaagtgaccgtggcagttaccttgagactgaaggaattgagaatgatgctaccacaagacatttggttgagatgctatgggctatggatgaaagtcatgcagagactgtgttagcagcccaagatcgtgaagattggaatcgtggtaagatttgcaagctagaagacaaggtggatcgtttggagaaggaactagctgcgttgaagggagaagcaccgccgcagaaggccaggattcgtcttaccgcaaggaagagagctctatttgtccctcgttatcaattggcgccaaagatggtgaacactcgcagcaacgggaatggtcccaacctcaacaaccccaacaacaacaataacaatgaagggaacccaacccttgctcaagttcttgctcaacagactcagctaatgcacatgatgatgcaacaacttcagaatcagcagaaccaaggaaataaccatgcacctcctcagaataagttagcagaatttcttcgtgtgaggccgcctattttctctagtaccactaaccctgttgaagctggtgattggctgcatgccatagagaagaagttggatttgcttcagtgcactgatcaggagaaggtctcatttgcatcacaccagttgcttggccctgcctctgaatggtgggatcacttccgcctgaataggactactgctgaacctatcacttggcttgaattgaccgctgctttccggaagacgcatataccatcgggagtggtgtctctcaagaagaaggagttcaggtcgctcacccagggatctcgctctgttacggagtatctacacgagttcaatcgtctagctcgttatgctccagaagatgtgcgcaatgatgaagagcgtcaggagaagttcttggaaggacttaatgatgagctttcttacccactcatgactggagattattctaatttccagaaattagtggataaggctattcgtcaggaggacaagtataatcgcatggagcagaagaaacgccggattgctcaattcaagatacaacaggggaataatcagaagccgcgtcttacttttgtaccccagtccatgccacatggaggttcttcatctgttgttcgtccgcagcgtcagttcttcaacaacaatgctggcaacaacatccgtaatcaagctccacgtcctgttgcagctccaacacaacaaccgcctgccaagagggagcaaggcagcaagcccgtggtgtgtttcaactatggagacccaggacattatgctgacaagtgtccaaagccccgacgcgtgaaggttgtccctgcctagagcaactctactataccagcatcaaaggcccgtgtcaatcatgttgcagctgcagaagctcaagacgctccagatgtgattttgggtacgttccctgttaactcagttcatgcaacagtgcttttcgattctggtgctacacattcatttctatctatgagttttgcgggaaatcatgggatggaagtagaagatcttagacgtcctttgatggttagtaccccaagtaatcaagcactctctttgcaacgtagcccctctgtcagaatagaaattaagggagtaccatttctggccaatcttatcttgttagaatccaaagaccttgatgtcatcctagggatggactggttaaccagacataaaggtgttatagactgtgctaacagaaaagtaactctcaccagtagtgatggtcgagttgtaactgttcatgcattatcttctgagtctttaaggtcaagactgaaccagataactttggaagagattcctatagtccgggagtatcccgatgtgttcccagatgatttacctggtatgccgcccaaaagggatatagagttcagaatagatttggtacctggaacaactccgattcataagaggccttatagaatggcagccaatgagttggcagaagtcaagaggcaagtggatgatttgcttcagaagggatacatcagaccgagttcatctccatggggagctccggttatttttgtggaaaagaaagatcatacccagaggatgtgtgtggactatcgtgcattaaatgatgtgactatcaagaataagtatccactacccagaattgatgatttgtttgatcagcttaaaggtgccactgttttctctaagatcgatcttcgatcagggtatcaccagttgagaatcaaagaggaagatatacctaagacagcttttaccactaggtatggattgttcgaatgtactgttatgtcttttggacttaccaatgcccctgctttcttcatgaacttgatgaataaggtgtttatggaatacctagataagtttgtggtggtctttattgatgacattcttatctactctcgaacaagagaagagcatgaagaacatcttcgccttgcactagagaagctacgagaacatcaactgtatgctaagtttagcaagtgtgaattttggttgtctgaagtgaagttccttggtcacgtcatctcagcaggaggagttgccgttgatcccagtaatgtggaatccgtaaccaactgcaaacaactaaagacagtttcagagattcgcagtttcttaggcctcgcaggatattaccggaggtttatagagaatttttccaagattactaagcccatgacacgactgctacagaaagatgtgaagtataagtggtcggaagaatgtgagcagagttttcaagagttgaagaatcgcttaatatcagctcctatcttgattttacctgatccaaaaaagggtttccaggtgtattgtgatgcatccaaacttgggttaggttgtgttctgatgcaagatgggaaggtggttacctatgcatctcgtcagttacgtccgcatgagaagaactaccctactcatgatattgagttagctgcagtagttcatgcgttgaaaatttggcgtcattattatttagacactcggtctgtcc

SEQ ID NO: 23176 - DNA, 7836 bp, Oryza sativa
  Clone ID: TF_OsC359_7671
atggagtataaggcgggcccgcccgccaccctcgctgacgggtggggcccacctgtcatcgcctacctcgcgccgcgcccgccgcccgcccgtgccctagggccgccgccgccgccgccgaatccgccgcatcccgccgtccccgcgcgccataaagagggggaaatcactccccgtgattccctctcccttttcccccgtttttccctctctctctccctcggattcgtttggaatctctcccgcaatcctcgccggcgcaatcaatggcggccggatcctccgcgccggtttccatctcctccggccgccctctctcactcccgacgctatataatcgctcctcgtgcttcgctcctccgtttccgccactcgccgcacactctccccgtcggattcgtgcccgcgccgtcttcctctctctccgccgtcgccgccgagctccggttcgccgccgtcgtcgctccggacctcctcccgactcggcgtcacctccttcggcttcgccgcgttcccgtcgacctcgtccaccccttcgtttcgcccgccgactgtcggagcgccgccgtcctcgtcgatccgaaccgcgccgccgccttcctccgctccggttgtcgtttccgccgtcctcgtcgtcccggggtgagccatggaccgcctccttcgcttcccccttccctcccctctctcggccgccgctccgccgcgccgttggtcgccggcggcgaccatcggggcgcgggtgcgccgcctcccgtcggccgtgccggcgaggccgccttcgggcgcgccccgcggctgccaggtgggcccggccgtcagccgcccgcgcccgcgggtgcggctgacgcgtgggacccacggcgccggtcggcgtcagccgcgtgcacccggtccaccgtggaccgagaggctgacgcgtgggccccactcccgtggacccggctgggctcggggtgcatggttttgatggtagcacctcggccatataaggaccggtcttcgggcctctgttgcaaagcactaccgtacttccacatgtctagtggggcaaatgaaggctacacgagctgcggcccggtagtcgagatgtcatggcacagggccggtgtcctgctgctaggggctcagtcctgcctgcctgtcccgggtgttccggccgtaggcgggattgggtcgatggccggcagcgtcacccgtcgtggtttgggcatgactggcttcgtcttggagttgcggggcatgtgcgtggccctggggtatccacacggagtggactaccaggccaggccgcttccggagcaggagggtgacgatgcggagccccgcgctgcttgggaggtcactgcagtgatcctcgctggctcttctgagcggacttcgctgacagtcaccgcgggtggcgattccttccccgccgcttgccagagcgccgctctcctcgccatcggcactctccaccagcgctacccggacgagttgcagcactcgccctaccgctaccacccccgccgcggaggagcccgcgactacgccaccttccgggatgctagctcggaggatgacgctaccatcgtgcacctggcgcgcatggtggaggcgtacgacgcggctcgtatcgacttccatcagatggtgcgccgtgggatggtcgagaacaacatgaagatcctggagctgcgtcaggagaacctgcagctcaagaaggacctggacgcggtggaggcgcagctgcatcagctcaagatcgcccagggagaggtctgccgccccaagcgtcgccgcgtctgccgcagccagaagatcaccgcccgcaagagcacctccaggcccgagcttgttcgtcagtccctggcgtggacttgcttcgtcgagacccctcgtgccgagcccgcgcccgtggttccccaggagggggaagcctccggcgttggtagcacggaggctctctctgttgctggttctgtgtggggttttcagatggtgacgaccaggagaaatgctgttaccggtgatggcaaccaacccgaaggcagcaaccacaaccaccagggcaacccacctccacctccacctccgcctccaccaccaccaccagacaccaacgccattctcacccaaatcctcgcccagcaagccaacatgatgactgctttcctccaccacctccaaaatccgccacaacataatgctccaccaccacccccacaacactctaaactcgctgagttcctccgcatccgcccacctaccttctctagctccaacaaccccgtggatgcgttggattggttgcatgccgtgggaaaaaagttagacactgtgcagtgcagcgatgaggagaaagtcatcttcgccgcccaccaactgcagggacccgcatctctctggtgggaccacttccaggctacgcagccagaggggcaacctatcacttgggcccgcttcaccgccgcttttcggagaacccatgtgcccgccggagtcgtggcccttaagaaaagggaattccgagagttgaagcaaggcaaccgctccgtgatggagtatttgcatgagttcaacaatctggcccgttacgccccggaggatgtgcgggaagatgaggagaagcaagaaaagttcttggcaggaatggaccccgagttgtccgtccgtctagtctctggggactatccggattttcaacgactggtggacaagagcatccgcttggaagctaagcacaaggagctggagtcgcacaagcgccgcttggcgaatttccgcaatcaacagggtgctaaccaaagggtccgctacaccaatccctatccagggggatcctcctcgcagcagcaacaacagcagcagcaacctcgctccgcgcctcgacctcaattcgtggtgcgcgtcccacagccgcagcagcagcagggtcagcaggggactcgtgcgccccgtcctcctacgccaactgtgcagcctggtcaaggccgcagggacgctcaaggtcagcagcgtctgtgcttcaactgcttcgagcccgggcactatgcggataaatgcccgaagccaaggcgtcagcaaggccaagcgcctccccgctccaacaacggtgggaaggatgtcattcggggtcgtgtgaatcacgtgacggccaaggacgtgctgacaactccggacgtcatcgttggtacgttcctcgttcattccatccctgctaccattttgttcgactctggagcttcccactcgtttatatctgtgccattcgtggggagaaatcagttgggggtagaaaggcttagaaaccctctgctcatcaccacccctggaggggttatgacagcaaagtactatagccctgccgtccctatagaaattcaggggattccttttccctcggatctgattctgctagacaccaagaatttggatataggactgtcagaaatccccatcgtcagggagttcggagatgtgtttccggaagaactacccgagaagaaagacaagacgaagaggatgtgcgtcgactacagagctctcaatgaagtcaccataaaaaacaagtaccctcttccccggatcgatgatctgttcgatcagcttaaaggtgccactgtattctctaagatcgatctccattccggatatcaccaattacgtattcgtgaagaagatattccaaagaccgcattcaccacgcgatacgggctgtatgaattcacggtgatgtcgttcggtttgaccaatgcacctgccttcttcatgaacttaatgaacaaagtgttcatggaatacttggataagtttgttgtggttttcattgatgacattctaatatactcacaatcagaggaagaccatcagcaccatctccgtctggtgttgggaaagttgcgggaacatcaattgtatgccaaacttagcaagcgtgagttctggttgtccgaagtcaaattcttagggcacgtgatatctgctaaaggtgttgctgtggaccccgaaacagtgaccgccgtcaccgattggaagcaacccaagacagttactcaagtccgcagtttcttaggtttggcaggatactaccggagattcatcgagaacttctccaaaatcgctcgacccatgacacagttgttgaagaaagaagagaaatttgtgtggagcccgcaatgcgagaaggcgtttcaaactctcaaggaaaagctggtttcctcgccggtgttaatcttgccggatactcgcaaggacttcatggtgtattgtgacgcttcgcgccaaggattggggtgcgtgctcatgcaggacggtcatgtggtagcctatgcctcccgtcagctacgacctcatgaaggcaactaccctacccatgatttggagttagcagcggtgattcatgatctaaaaatctggcggcactatctcattgggaatcgctgtgaaatatatactgatcataagagtttgaaatacatcttcacccagtcagatctgaatcttcggcaaaggagatggttagaactcatcaaggattatgatgtgggaattcactatcatcctggtaaggccaacgtggttgccgacgctttaagtcgaaagagccattgcaacactcttaacgtccgtggcatcccacccgaacttaatcaacagatggaagccctgaacctaagcatagttagtcgtggatttttggccgcgttagaagccaagcccaccttgctcgatcaaatccgcgaggctcagaagaacgacccggacatgcatggactcctcaagaatatgaaacagggtaaagccgctggtttcacagaagaggaacacggaaccctatggaacggaaaccgggagaaatactggtgggttagtatgaagcgggaaattgcagagttcgtggccctttgtgatgtgtgccagcgtgtcaaggcagagcaccaacgaccggccggacttctccaacctctccaagtaccagaatggaaatgggatgaaattgggatggatttcatcaccggacttccaaaaacccaaggcggatatgattctatatgggtagttgtggatcgattaaccaaggtagctcgatttattcctgtgaagaccacctatggagggaacaagctagccgagctctacttcgctaggatcgtgagtctccatggcgttcccaagaaaatcgtatctgataggggaagccaattcacctctcacttttggaagaaactccaagaagagctgggtacccgattaaacttcagcaccgcctatcacccgcagacagatggacagaccgagcgtctaaatcagatcctagaagatatgctccgcgcatgtgtcctagatttcgggaagacctgggataagagtctcccctatgccgagttctcctacaataacagctatcaagccagcatacaaatggcaccttatgaagcgttgtatgggcgcaaatgccggacaccactattgtgggaccaagttggagaaagccaagtgttcgggactgatatcctgagagaagctgaagctaaagtcagaatcattcgggaaaatctaaaggtggcacagtcccggcagaaaagttatgcagataaccgtcgccgcgacctggaattcgcagtggatgactttgtgtatcttcgggtcacgccattgcgaggtgtacacaggtttcagacaaaagggaagctcgcacctcggtatgtgggtcctttccgtatcattgctcggcgcggagaagtcgcttaccagttggagctgcccgcctccttgggcaacgtgcatgatgtgtttcatgtgtcgcaactcaagaaatgtcttcgagtgccatccgagcaggccgactcagagcaaattgaagttcgcgaagatttgacctacgtggagaggccagtgaaaatcctggacaccatggagcgcaggaccaggaaccgggcgggcccgcccgccaccctcgctgacgggtggggcccacctgtcatcgcctacctcgcgccgcgcccgccgcccgcccgtgccctagcgccgccgccgccgccgccgaatccgccgcatcccgccgtccccgtgcgccataaagagggggaaatcactccccgtgattccctctcccttttcccccgtttttccctctctctctccctcggattcgtttggaatctctcccgcaatcctcgccggcgcaatcaatggcggccggatcctccgcgccggtttccatctcctccggccgccctctctcactcccgacgctatataatcgctcctcgtgcttcgctcctccgtttccgccactcgccgcacactctccccgtcggattcgtgcccgcgccgtcttcctctctctccgccgtcgccgccgagctccggttcgccgccgtcgtcgctccggacctcctcccgactcggcgtcacctccttcggcttcgccgcgttcccgtcgacctcgtccaccccttcgtttcgcccgccgactgtcggagcgccgccgtcctcgtcgatccgaaccgcgccgccgccttcctccgctccggttgtcgtttccgccgtcctcgtcgtcccggggtgagccatggaccgcctccttcgcttcccccttccctcccctctctcggccgccgctccgccgcgccgttggtcgccggcggcgaccatcggggcgcgggtgcgccgcctcccgtcggccgtgccggcgaggccgccttcgggcgcgccccgcggctgccaggtgggcccggccgtcagccgcccgcgcccgcgggtgcggctgacgcgtgggacccacggcgccggtcggcgtcagccgcgtgcacccggtccaccgtggaccgagaggctgacgcgtgggccccactcccgtggacccggctgggctcggggtgcatggttttgatggtagcacctcggccatataaggaccggtcttcgggcctctgttgcaaagcactaccgtacttccacatgtctagtggggcaaatgaaggctacacgagctgcggcccggtagtcgagatgtcatggcacagggccggtgtcctgctgctaggggctcagtcctgcctgcctgtcccgggtgttccggccgtaggcgggattggtcttgctcaatttttcccaagcccataagaggagctccttgaagatgaaggctttggtgtctagctcgtgcctgccgtcaagcgcctgtggtcgtcgccctagtcttccgctgtttctcatggccggcagcgtcacccgtcgtggtttgcacatgactggcttcgtcttggagctgcgaggcatgtgcgtggtcttggggtatccacatggagtggactaccaggccaggccgcttccggagcaggagggtgacgatgcagagccccacgctggttgggaggtcactgcagtgatcctctctggctctcccgagcggacttcgctggcagtcaccgcgggtggagattccttccccgccgcttgccagaacgtcgctctcctcgccatcggcactcttcaccagcgctacccggacgagttgcagcactcgccctaccgctaccaccctcgtcgcggaggagcccgcgactacgccacctttcgggatgctagctcggaggatgacgctaccatcgtgcacctggcgcgcatggtggaggcgtacgacgcggctcgcatcgacttccaccagatggtacgccgtgggatggtcgagaacaacatgaagatcctggagctgcgtcaggagaacctgcagctcaagaaggacctagacgcggtggaggcgcagctgcatcagctcaagatcgcccaaggagaggtcttgccgcccaagcgtcggcgcgtctgccgcagccagaagatcaccgc

SEQ ID NO: 23177 - DNA, 4956 bp, Oryza sativa
  Clone ID: TF_OsC359_7991
atgccgcgctacaagcctgagtacctgtttggtgttgagggttttgtccaggagttgcgtacgatgtcctttgtcataggatttgggactgcccctttttatgctcagattcctcatgatcgtcatgaagagaagtgccgagtcaaagtcaccttgaatagtaatagtgaagatgtcccctcagtgatgttcgaagctggaggaagaaactacatccatgcatgtcaggaagtggcaaggatcgccataggagagctccgtgatcgctacagtgatcggttggctgacactgagtatcgctaccatcctcgtcaaccacagggaagtgaccgtggcagctaccttgagactgaaggaattgagaatgatgctaccacaaggcatttagttgagatgctgtgggctatggatgaaagccgtgcagagactgtgttagcggctcaagatcgtgaagattggaatcgtggtaagatttgcaagttagaagacaaggtggatcgtttggagaaggaactagccgcgttgaagggagaagcaccaccgcagaaggccaggattcgtcttaccgcaaggaagagagctctatttgtccctcgctatcaattggcgccaaaagttcgtgtggtggagaaagaagttgccccagcagatcctccggtcatcatcataagtgatgatgaagaagaagaatccaagcgcacccattccaagattgagtgggtagcaactcaagatgatgaagacgagccgaacgagcctacaatcgacctccgatgctcggaagaactagacaacgggaatggccccaacagcaacaataacaacaacaatggagagaacccaacacttgctcaagttcttgctcaacagactcagttaatgaacatgatgatgcagcaacttcagaatcagcaaaaccaaggaaataaccatgcacctccccagaacaagttagcagaatttcttcgtgtgaggccgcctattttctctagtaccactaatcctgttgaagctggtgattggttgcatgccatagagaagaagatggatttgcttcagtgcactgatcaggagaaggtctcatttgcatcacatcagttgcttggccctgcctctgaatggtgggatcacttccgcctgaataggattactgctgaacctattacttggcttgaattcaccgctgctttccggaagacgcatataccatcgggagtggtgtctctcaagaagaaggagttcaggtcgctcacccagggatctcgctctgttacggagtatctgcacgagttcaatcgtcttgctcgttatgctccggaagatctgcgcaatgatgaagagcgccaggagaagtttttgggaggacttaatgatgagctttcttacccactcatggttggagattatcctgatttccagaaattagtggataaggctatacgtcaggaggacaagtacaatcgcatggagcagaagaaacgccggattgctcacttcaaggcacaacaggggagtaatcagaagccgcgtcttactttaggaccccagtctgtgccacagggaggttcttcgtccattgttcgtccgcagcgtcagttcttcaacaacaatgctggcaacaacatccgtaatcaagtcccacgtcctgttgctgcctcgacacagcaacaacctgccaagaggaagcaaggcagcaagcccgtggtgtgtttcaactatggagacccaggacattatgctgacaagtgtccgaagccccgacgcgtgaaggttgtccctgcccagaataactctgctgtaccagcatcaaaggcccgtgtcaatcatgttgctgctgcagaagctcaagatgctccagatgtgattttgggtacgttccctgttaactcagttcctgcaactgtgcttttcgattctagtgctacacattcattcttatctatgagttttgcgggaaatcatgggatggaagtagaagatcttagacgtcctttgatggttagtaccccaagtaatcaagcactctctctgcaacgtagcccctctgtcagaatagaaattcaaggggtaccatttctagccaatcttatcttgttagaatctaaagaccttgacgtcattctagggatggactggttagccaaacataaaggtgtgatagactgtgccaacagaaaagtaactctcatcagcaatgatggtcgagttgtaactgttcatgcattgtcatctgagtttttaaggtcaagactgaaccagataactttgggagagattcctatagttcgggagtatcccgatgtgttcccagatgatttacctggtatgccgcctaaaagggatatagagttcagaatagatttggtacctggaacaactccgatccataagagaccttatagaatggcagccaatgagttggcagaagtcaaaaggcaagtagatgatttgcttcagaagggatacatcagaccgagttcatcaccatggggagctccagttatttttgtggaaaaaaaagaccatacccagaggatgtgtgtggactatcgtgcactaaatgatgtgactatcaagaataagtatccgctacccagaattgatgatttgtttaatcagcttaaaggtgccactgttttctccaagatagatcttcgatcagggtatcaccagttgagaatcaaagagtatgggttgttcgaatgtacggttatgtcttttggacttaccaatgctcctgctttcttcatgaacttgatgaataaagtatttatggaatacctagacaagttcgtggtggtctttattgatgacattcttatctactcccgaaccaaagaagagcatgaagaacatcttcgccttgcattggagaagctacgagagcatcaactgtatgctaagtttagcaagtgtgaattttggttgtctgaagtgaaattccttggtcacgtcatctcagccggaggagttgccgtcgatcctagtaacgtggaatccgtaaccaattggaagcaaccaaagacagtttcagagattcacagttttctaggcctcgcaggatattatcgaaggtttatagagaatttttccaagattgctaagcccatgacacgcctgcttcagaaatatgtgaagtacaagtggtcggaagaatgtgagcagagttttcaagagttgaaaagtcgtttaatatcagctcctattttgattttgcctgatccaaagaagggtttccaagtgtattgcgatgcatctaaacttgggttaggttgtgttctgatgcaagatgggaaggtggttgcctatgcatctcgtcagttacgtccgcatgaaaagaactaccctactcatgatcttgaattggccgcagtagttcatgcgttgaaaatttggcatcattatcttttcggtactcgtacagaggaatttgaaagattaaatttgggaattgtcagtagaggttttgttgcagccttagaagcgaagcccacactaattgatcaagttagagaagctcaaattagtgatcctgatattcaagagatcaagaagaatatgagaagaggaaaagctatcggtttcttggaggatgagcaaggaactgtatggttgggcgagagaatttgtgtccctgacaacaaagatttaaaggatgcaattctgaaagaagctcatgatactttatactccattcaccctggtagtactaagatgtaccaggatctcaaggaaagattttggtgggcaagtatgaagcgtgaaatcgcagaatacgtagcggtatgtgatatttgccagcgagtcaaggcagaacatcagaaacctgccggtttgttgcagcctttgaagattcctgaatggaaatgggaagaaatcggtatggattttatcactggtttacccagaacgtcatcaggccatgactctatttgggtaatagtcgacagacttaccaaagtggcacatttcatcccggtaaagacaacttattccggaagtcggttggcagaattatatatggcaaggattgtgtgtttgcatggtgtccctaagaaaatagtgtctgatcgaggcagtcagtttacttcaaatttctggaagaaacttcaggaagaaatgggttctaagctgaactttagtactgcttatcatccacagacagacggacaaaccgaaagggtgaatcagattttggaagacatgttgagagcttgtgctttagatttcggtggaagttgggataagaatctaccttatgcagaattctcgtataacaacagttatcaagctagtcttcagatggctccttacgaagcactgtatggtcggaagtgtcgcactccgcttttgtgggatcaaacgggagaacgtcaggttttcgggacggatatcttaagagaagcagaagaaaaggtaaagatcattcaagaaagattgcgtgtggctcagtctcgtcataagagttatgccgacaatcgccgtagagatttgagttttgaagaaggagattatgtgtatcttcgtgtcacgcctcttcgaggagttcatcgttttcacaccaaaggaaaattggcaccgcgttttgtgggaccttataagattgtcagtagaagaggagaggttgcttatcagttagaattacctcaatctttggcaggagtctataatgtgttccatgtgtcacaattgaaaaagtgtttaagggtacctaccgaagaagctaatattgagcagatagaagtccaagaggatttgacctatgttgagaaaccaatccgtatcttggaaacaaatgagagaagaaccaggaatcgagttatccgtttttgcaaagtccagtggagtaatcactcggaagaagaatcaacttgggaacgagaagatgaattgaagtcagctcatccgcatctgttcgccagttcttccgaatctcgaggacgagattctgtttaa

SEQ ID NO: 23178 - DNA, 5317 bp, Oryza sativa
  Clone ID: TF_OsC1713_4447
ggggccttgaccgcgccctgatcgggggcgcccagcccaatggctggtgggcccccgtcacactgcgccatataaaagaggggtggaggccggcacggcacaagccagtgacgggaagcgccaccgccgcgccacacctcatcgccgggacatctacgaccgtcactcccgcagccgtcatcgtcgtcgacctcaccggcgccgcatccacgacaaccgagcgccaacgacgacgatggccggcacttcttcatcctccaacacctcaaccggtggctactccttgatgggttgcattaaagatattccgaccctaaaaggagataactacgcagaatggaaaagaaaactcgaccttgcttttatcttgggagaggtggactgggtgttgactaccccatgtcctatagaacctactgaacttgtcagaggtgaaaatgagtcagatgctgactggcaaaagagacagagggacaatgctcctctcgtcatgtcgtatgacattgaacaaaagaaatggtccttagccaacaagaaatgtttggctgtggtaaagaatacgattgagcctaccatattgggctcgatcccagagtgtgacgctgtctcagagtaccttgaaagaataaagagtcagtttactggctcttcaaagacttatgctacacagctgatcaagcagcttgtgacagaaaggtaccatggaggtggtgttagagaccacatacttagaatgagcaacatggcttccaaattgaagccaatggatttgggcataacagatgactttctggtccatctggttatggcctcattgccaaagcagtttgacaattttattgtcaactacaacataagtccagagaaatggaactttgagaagctcattgctaattgtgtgcaagaggaggagagaatcaaagaatcaaatggtggttcaataaactatgttaaagataagaaaaagaaccacaagtctcccacctcaaaaggtaaacagtctcagcatctgcctcaacaacaacagttcgctgttgagaaagatcaatgtctccactgcaagaagacaggacactacaagagagattgtcctgactttttgaaaatgatcatggcaaagaaaggtgagaacattattacatttgtaaatgaatctcattatgttggttactctagatccacatggtggattgattctggagcaactattcatgcttgtaattgtttaaaggcattccgttcgacgaggactacgcaaagaagagaaagcaccattagagttgccaatggagttgaagaaaaagttgaagctgttggagattttcctctagagctcgcgaatggcttcatacttttacttcgagatgtcttttatgttccttctttgcaaagaaacttaataagtgtatcaaagttggattttgatggatatgattgccgctttggaagtggcaaatgtgaactatggcataataatgcatgtattggtcttgctgtgttgcgagacgagctttatttgttatctctttctgagaatgtgaatgttgtgtcctcgttgacaaaagaaaacaagaaaagaaaggggagaattgagagactagttaagaatgaaattcttcctccattggagttctcagacttagaacaatgcatagaatgcattaaaggaaaatttgtaaagagcatcaaaaagggtgcaaaacgaagcgcaggaattttagagatcattcatacagatatttgtggtccatttcctgtgaaaagtgtggatggctatgactcgttcataacattcacagatgattactcccgctatggttatatttatccaattaaagagcgatcagaagcattggataaatttaagatattcaaagctgaagttgaaaatcagcatgatataaagattaaagtagtaagatctgaccgtgggggggagtactatggtcgacatacgccttatgggcaagtccctggaccttttgcaaggttcttgctagagaatggaatagtagcccagtattcaacaccgggcgaacctcaacagaatggggtagctgaaaggcgcaaccgtaccctcatggatatggcgttaaaaaccgccattcatattctcaacagagttccaagcaaatcggtgcccaaaacaccgtatgagctatggacaggaagagtaccctcgctaactcacctccgtgtgtgggggagtcctgcagaggccaaagtatttaacccaaatattgggaagttggaccccaaaacagtcagctgccattttattggctatcctgaaagatcaaaaggctatcgtttctactgtccaaacagttatacaaagtttgtagaaacgagacacgccgtcttcttggaagacgaaatgattagggggagctcggtagttcgagaaattgatcttgaggagaggcgggtgtctgtacccgctccgtcgactcaggaacctttcttctctctacctgctgatgttgtgcctgcaatgcctgtcattgaggtaccagcacctgttgttacccttcctgtggcaacaatgaatgagagtgaggaacctgttatacaggattcaacagaaatggttgccacaccagaggaggagctacaacagtctcaaatagataatgtgccagtacaggagactcatcaagagcctcaggtacaggatgtgccaaatgtgcaggcccctagaaggtctgaaagagtcagaagatcggctatccgtgatgactataaagtttataatatagaagagtcgcatatggaggatgatcccacctcatatgaagaggccatgagaagcgctcgctcatctgaatggttggaatccatgaaagatgaaatggaatcaatgaaactaaacgatgtttgggatttagaagaaattcctaaaggagccaaaacagtaggctgtaaatgggtctacaaaaccaaatatgactccagagggaatatagaaaagtttaaagcgcgacttgtggcaaaaggcttcacacaacgagaagggattgattacaatgagacattttctccagtctcttgtaaagattccttcaggattataatggcactagtggcacattatgatttggaattacatcagatggatgtaaaaacggcatttctaaatggagatttggaggaaaaagtatacatggcgcaaccgaaaggttttgtcatgaaaggaaacgaaaatatgggatgtcgtctaaagagatccatttatggattaaagcaagcttcgagacagtggtacttgaagtttgatgggacaataaagaaatttgggtttcaagagaatgtcgaggacaactgtatttattcaaagtttaaaaatgggagatttattttcctaattctgtatgtggatgacattctactggctagtagtgatgtcagtctactgcaggaaacaaagaaattcttgtcctcaaactttgacatgaaagacctcggtgaggcttcatatgttttgggcatagagattcaccgagatagaacaaagtatgcattgggactttctcaaaagacatatatagaaaaggtgttgaagaaattcaacatgtacagatgcagtgctacacctgctcctataatgaaaggcgaaaagtatggggcatcgcaatgtcccagaaatcagtatgagctcaatgaaatgaaaacaaagccatatgcgtcagctgtaggaagcctacagtacgcgcaagtgtgcacacgacctgacttggcatttgttaccgggttacttggcagatttcagagtaatccaggcctagagcactggaaattggtaaagaaagtcttgcgttatttgcaaggaacaaaaggcctcatgctgtcttacagaagatcagaatcactccagatagtggggtactcagattctgactttgcaaaagataatacaaagtcaacatcgggatatgtgtttaccctggcaggaggagctatttcatggaaaagctcaaaacagactatcactgcagggtctactatgtatgccgagtttatagcatgctatgaggcaacggggcaggtgaactggctaaagaagttcatacccggtttaaaggtggttgacagtattgagaaaccactaaagttatactgcgacaacgaacccgcagtaatcatcgtgctggagaagaagacgttcttggtggagcggttcgacaagtacgtcaagacgctcggatccgggatccacgtgctcgcccccctcgtcgaccacatcgcgtacgtccactcactcaaggaggaggccatccccatccccgaccagtccgccatcaccaaggacaacatctccatccagatcgacggtgtcctctacgtcaagaatttttggggaaacttcaaattgcatgttctagatgaagcacttcttgctttcaagaaggcagttacaacttctgatgggatattcctcaactggcgtgaacaagatgtggatccttgcaattggaaggatgttagatgtgacagtcacaccaagagactcaaggcaaggagaggcagtgtctcatgggaatcaggggtaaggtgcttctcgattggcccatcagaactggtagcacgtggttcgaaggtatggctatccacgcgcgcaggggggcacctggaagcaggcggcgtcgacgatgccgaaggcggcgacggcgacccaggcggcccagccggaaggctgcctcttgccgcgcgaggcggcgaaggcgacgagcagtgtgccggcggggaggaggcgaagctcggcgacgaagaaggggcccgtcttggctatgacccccttcatggccaccatggccgtgccccagaagaagaagggcgacaccagcgacgcccactcccaccactccctccccacgaatgccgccgaggccgagacgccatcctcctcctcggagacccgcgcgaggccttcgacgaagcactcgacgtccgtgcccgtgccgacgcagtcaaccgcgtccggcggggagggcggcatcgcctcgcggcggaagggttccgcacctgggcggtcgtcgacgtagcactcaacgtcggcggcccgtgccgacgcagtcaaccgcgtcaccgggttaggcggcgtgtggcggggcgcggccgccgccgcgagccgccgcgagatgtcgcacgccacggccaccgcgcgggacggagtagacagtggagggcgggaggatggagtacggcggggcggggcaagacggagtacggcggcgcgggagtacggcggggcggggcggcgctgactgagggcggcggcggacgcgaatggaggcagcggcgcgagtggactgggtga

SEQ ID NO: 23179 - DNA, 2950 bp, Oryza sativa; identical to SEQ ID NO: 14356
  Clone ID: TF_OsC91_2190

SEQ ID NO: 23180 - DNA, 7344 bp, Oryza sativa
  Clone ID: TF_OsC91_2385
atggcaggtccagaggataaagatgaggagggtgcatctcattccccacgcaccaaaggcatcatccaatactttacaaggcaagtgaagcagcacacagaaggacttgatacagatttgcaggtgacaaatgagaagattggacaattggagtccacgcagatctccaccaacactaagcttacagggctggagacagcggtcgcccgcattgacactagccttgctgctcttgtgaggcattttgatgctctcaatgctggaggcaatggtgggggtaatgatgatgacattgacggagagtacgtcgaggataatttggaggatgaatatattgctgacactgaacaagatgatcgagatgctcgagatcgtcgacggctacacaacaatcgacgaggtatgggtggtcgccgccgacgcgaggtacgcaacaatgatgatgctttttctaaaattaaatttaagattcctccttttgatggaaaatatgatcctgatgcgtacctctcttgggagattgctgttgaccaaaaatttgcatgccatgagtttcctgagagcactagagttagagctgctacgagtgagttcaccgattttgcttcggtttggtggatagaacatggcaagaaaaatcctaataacatgccacaaacttgggatgctttgaaacgggtcatgcgggctagatttgttccttcttactatgcacgtgacttgctgaataggttgcaacaattgagacagggtgcgaaaagtgtagaggaatattatcaggagttacaaatgggcttgcttcgttgtaatttagaggaaactgaggacgctgccatggctagatttttgggtgggttaaaccgcgagatttatgacatcgtagactataaagattacactaatatgacccgattgtttcatcttgcttgtaaggctgaaagggaagtgcagggacgacgtgctagtgccaaggctaatttttctgcaggtaaaacttcatcatggcagacacgcaccactcctccggccggccgtactgcttctccatcttccacacccacaaccagtcgagcagcacctcctccatctagtgacaagtcagcgacaaaggctgctcagcccgcaccgagtgcttcttcaatggcatccacaggccgaatgagagatgttcagtgccaccgttgcaagggctttgggcatgtgcagcgtgactgccctagcaagcgagttttggtagtcaaaaacgatggtgagtactcctctgctagtgatttcgatgatgatacacttgctttgcttgcggctgaccatgcagataatgagccaccggaagagcacattggggctgcatttgcggatcactatgagagcctcattgtgcagcgtgtccttagcgcacaaatggagaaggcggagcaaaatcagcgacacacgttgttccaaacaaagtgtgtcgtcaaagagcgttgttgccgcatgatcattgatggaggtagctgcaacaacttggctagcagcgagatggtggagaagcttgcacttagcacaaaaccgcacccacatccatactacatccaatggctgaacaacagtggtaaggcgaaggtaacaaaactggtgcacattaattttgcaattggaaattaccatgatgttgttgaatgtgatgttgtgcccatgcaagcatgtaatattctgctaggtagaccatggcaatttgatagggattctatgcatcatggtaggtccaaccagtactcttttctgtaccatgataagaaaattgtgttgcattccatgtctcctgaagatattttgcgtgatgatgttgctaaggctgccaaatccaaatgtgagagtgataaaaaagcccaatctgatggcaagaaacctgagacaatcaatttgaaacccaaatgcttacttgctactaaatctgatattaatgagttgattgcatcaccttcagttgcctatgctttggtatgcaaagatgctttgatttcacttcacgatatgcagcattctttgccccctgctgttgctaacattttgcaggagtactctgatgtgtttcccaaggaagtgccaccggggctgccaccggtgcgcggcattgagcatcaaatcgacttgatcccaggtgcttccctaccgaaccgtgcgccataccgaacaaaccctgaggaaaccaaggagattcagcgtcaagttcatgagttgcttgataaagggtatgtacgcgagtctcttagtccatgtgcggttccggtaattttggtaccaaagaaagatggttcatggcgtatgtgtgttgattgtagagctattaataacattaccattcgatatcgtcatcctattcctaggttagatgatatgcttgatgaattgagtggctctattgtgttctccaaagttgatttgcgtagtggttaccaccagattcgtatgaagttgggtgatgaatggaaaacagcatttaaaacgaagtttgggttgtatgagtggttagtgatgccttttggtttaactaatgcacccagcactttcatgaggttgatgaatgaggttttgcgtcctttcattggaaaatttgtggtggtctactttgatgatatcttgatttacagcaagtctatgggtgaacattttaatcatttacgtgctgtttttaatgctcttcgtgatgcacgtttatttggtaaccttgagaagtgcaccttttgcacagatcgagtttcttttcttggctatgttgtaactccgcaggggattgaggttgatcaagccaaggttgaagcaattcagagttggccgactcctaaaacggtctcacaagtgcggagctttctaggactcgcggggttctatcgccgctttgtgcaggatttcagcaccattgctgcaccattgaatgtgcttacaaagaagggagtgcctttcacttggggcacatcacaagagaacgccttccacatgttgaaagataagttgacccacgcacctctcctccaacttcccgattttaataagacttttgaacttgaatgtgatgctagtgggattggattgggtggtgttttgctacaagaaggaaaacctgttgcatattttagtgaaaagttgagtgggcctgttctgaattattctacttatgataaggaattgtatgctcttgtgcgaactttagaaacatggcagcattatttgtggcccaaggaatttgtcatacattctgatcatgagtctttgaagcatattcgtagtcaagggaagctgaaccgtagacatgctaaatgggttgaatttattgaatcttttccttatgttatcaaacacaagaaagggaaggagaacatcattgctgatgctttgtctaggagatacactttgttgacacaacttgactacaagatttttggcctggaaacaatcaaagaccaatatgcgcatgatgctgattttaatgatgtgttgctgcattgtaaggatggaagaacatggaacaaattcgtcatcaatgatgggtttgttttcagagctaacaagctatgcattccagctagctccgttcgcttgttgttgttgcaggaagcgcatggaggcggtttgatgggacattttggtgccaagaagacacatgacatccttgctagtcatttcttttggccacagatgcgaagagatgttggcaggttcgttgctcgctgcgctacatgtcaaaaggctaagtcacgcttacatccacatggtttgtatatgcctcttcctgttcctactgttccttgggaagatatttcaatggattttgtgttaggattgcctaggaccaagagggggcgtgatagcatttttgtggttgtggatcgattttctaaaatggcacatttcataccatgtcataaaactgatgatgcttctcatatcgctgatttgttctttcgagaaattgttcgcttgcatggtgtgccaaacacaattgtttctgatcgtgacacaaaatttcttagccatttttggagaactttgtgggctaaattggggactaaacttttgttttctactacttgtcatccccaaactgatggacaaactgaagtggtgaatagaaccttgtctactatgcttagggctgttttgaagaaaaatatcaagatgtgggaagaatgcttgcctcatattgaatttgcttataatcgttccttgcattctactacaaaaatgtgcccatttcagattgtgtatggtttgttgcctcgtgctccaattgatttgatgcctttaccatcttctgaaaaactgaattttgatgctaagcaacgtgctgagttgatgttaaaactgcatgagacaactaaagaaaacatagagcgcatgaatgctaagtataagtttgctggtgacaaaggtagaagggaattgaattttgaacctggagatttggtttggttgcatttgcgaaaagaacgatttcctgatttgagaaagtctaaattgatgcctagagctgatggaccatttaaagtgttagcaaagattaatgagaatgcatataagattgatttgcctgcagatttcagggttagtcccacatttaacgttgcagatttgaagccgtatttgggagaagaagatgagcttgagtcgaggacgactcaaatgcaagaaggggaggatgatgaggacatcaacaccatcgatacatccacgtccccccatatacagcatgatggtcctattacccgcgctcgtgcacgtcaactaaattatcaggacgagtgccctcgtggccgggttgacgcgcaccacaagttcgcggcgaccattggagacgatcgggccacaaaccctagcgggttcgcatcatacggactgtatgaattcacggtgatgtcattcggtttaaccaatgctcctgccttcttcatgaacttaatgaacaaagtgttcatggaatacttggataagtttgttgtggttttcattgatgacattctggtatactcacaatcagaggaagaccatcagcaccatctccgtctggtgttgggaaagttgcgggaacatcaattgtatgccaaacttagcaagtgtgagttctggttgtccgaagtcaaattcttagggcacgtgatatctgctaaaggagttgctgtggaccccgaaacagtgaccgccgtcaccgattggaagcaacccaagacagtcactcaaattcgcagtttcttaggtttggcaggatactaccggaggttcatcgagaacttctccaaaatcgctcgacccatgacacagttgttgaagaaagaagagaaatttgtgtggagcccgcaatgcgagaaggcgttccaaactctcaaggaaaagctggtttcctcgccggttttaatcttaccggatactcgcaaggacttcatggtgtattgtgacgcttcgccccaaggattggggtgcgtgctcatgcaggaaggtcatgtggtggcctatgcctcacgccagctatggcctcatgaaggcaactaccctacccatgatttggagttagccgcggtggttcatgctctaaaaatctggcggcactatctcattgggaatcgctgtgaaatatatactgatcataagagtttgaaatacatcttcactcagtcggacctgaatcttcggcagagaagatggttagaactcatcaaggattatgatgtgggaattcactatcatcctggtaaggccaatgtggtcgccgacgctctaagtcgaaaaagccattgcaacactcttggagtccgtggcattccacccgaacttaatcaacagatggaagccctgaacctaagcatagttagtcgtggattcttggctacgctggaagccaagcctaccttgctcgatcaaatccgcgaggctcagaagaacgatccggacatgcgtggactcctcaagaatatgaaacagggtaaagccgctggtttcatagaggatgaacacggaaccctatggaacagaaaccgggtatgcgttccagatgtcagggaacttaaacagctgatacttcaggaagctcacgagagtccttattccatccacccgggcagtacgaagatgtacttagacttgaaagagaaatactggtgggttagtatgaagcgggaaattgcggagttcgtggccctttgtgacgtgtgccagcgtgtcaaggcagagcaccaacgaccggccggacttctccaacctctccaagtaccagaatggaaatgggatgaaattgggatggatttcatcaccggacttccaaaaacccaaggtggatatgattctatatgggtagttgtggaccgattaaccaaggtagctcggtttattcctgtgaagaccacctatggagggaacaaactagccgagctctacttcgctaggatcgtgagtctccatggcgttcctaagaaaattgtatctgatagggaaagccaattcacctctcacttttggaagaagctccaagaagagctgggtacccgattaaatttcagcaccgcgtatcacccgcagacagatggacagaccgagcgtctaaatcagatcctagaagatatgcttcatgcatgtgtcctagatttcgggaagacctgggataagagtctcccctatgccgagttctcctacaataacagctaccaagccagcatacaaatggcaccttatgaagcgttgtatgggcgcaaatgccggacaccgctcttgtgggaccaagttggggaaagccaagtgttcgggactgatatactgagagaagctgaagcgaaggtcagaaccatttgggataatctaaaggtggcccagtcccggcagaaaagttatgcagataaccgtcgccgtaacttggaattcgcagtggacgattttgtgtaccttcgggtcacgccattgcgaggtgtacacaggtttcagacgaaagggaagctcgcacctcggttcgtgggtcctttccgtatcattgctcggcgcggagaagtcgcttaccagttggagctgcccgcctccttgggcaacgtgcatgatgtgttccatgtgtcgcaactcaagaaatgccttcgagtgccgtccgagcaggccgactcagagcagattgaagttcgcgaagacttgacctacgtggagaggccagtgaaaatcctggacaccatggagcgcaggaccaggaaccgggtaatccgtttttgcaaggtccaatggagcaaccacgccgaggaagaagctacttgggagcgtgaaaacgagctgaaggcagcccatcctgatctcttcgctagttcctccgaatctcggggtcgagattccgtttaa

SEQ ID NO: 23181 - DNA, 4185 bp, Oryza sativa; identical to SEQ ID NO: 14361
  Clone ID: TF_OsC91_2423

SEQ ID NO: 23182 - DNA, 5247 bp, Oryza sativa; identical to SEQ ID NO: 14353
  Clone ID: TF_OsC91_2584

SEQ ID NO: 23183 - DNA, 4704 bp, Oryza sativa
  Clone ID: TF_OsC91_2593
atggcaggtctagaggataaagatgaggagggtgcatctcattccccacgcaccaaaggcatcatccaatactttacaaggcaagtgaagcagcacacagaaggacttgatacagatttgcaggtgacaaatgagaagattggacaattggagtccacgcagatctccaccaacactaagcttacagggctggagacagcggtcgcccgcattgacactagccttgctgctcttgtgaggcattttgatgctctcaatgctggaggcaatggtgggggtaatgacgatgacattgacggagagtacgtcgaggataatttggaggatgaatatattgctgacactgaacaagatgatcgagatgctcgagatcgtcgacggctacacaacaatcgacgaggtatgggtggtcgccgccgacgcgaggtacgcaacaatgatgatgctttttctaaaattaaatttaaaattcctccttttgatggaaaatatgatcctgatgcgtacctctcttgggagattgctgttgaccaaaaatttgcatgccatgagtttcctgagaacactagagttagagctgctacgagtgagttcaccgattttgcttcggtttggtggatagaacatggcaagaaaaatcctaataacatgccacaaacttgggatgctttgaaacgggtcatgcgggctagatttgttccttcttactatgcacgtgacttgctgaataggttgcaacaattgagacagggtgcgaaaagtgtagaggaatattatcaggagttacaaatgggcttgcttcgttgtaatttagaggaaactgaggacgctgccatggctagatttttgggtgggttaaaccgcgagatttatgacatcgtagactataaagattacactaatatgacccgattgtttcatcttgcttgtaaggctaaaagggaagtgcagggacgacgtgctagtgccaaggctaatttttctgctggtaaaacttcatcatggcagacacgcaccactcctccggccggccgtactacttctccatcttccacacccacaaccagtcgagcagcacctcctccatctggtgacaagtcagcgataaaggctgctcagccagcaccgagtgcttcttcaatggcatccacaggccgaatgagagatgttcagtgccaccgttgcaagggctttgggcatgtgcagcgtgactgccctagcaagcgagttttggtagtaaaaaacgatggtgagtactcctctgctagtgatttcgatgatgatacacttgctttgcttgcggctgaccatgcagataatgagccaccggaagagcacattggggctgcatttgcggatcactatgagagtctcattgtgcagcgtgtccttagcgcacaaatggagaaggcggagcaaaatcagcgacacacgttgttccaaacaaagtgtgtcgtcaaagagcgttgttgccgcatgatcattgatggaggtagctgcaacaacttggctaacagcgagatggtggagaagcttgcacttagcaccaaaccgcatccacatccatactacatccaatggctgaacaacagtggtaaggcgaaggtaacaaaactggtgcacattaattttgcaattggaaattaccatgatgttgttgaatgtgatgttgtgcccatgcaagcttgtaatattctgctaggtagaccatggcaatttgatagggattctatgcattatggtaggtcaaaccagtactcttttctgtaccatgataagaaaattgtgttgcatcccatgtctcctgaagatattttgcgtgatgatgttgctaaggctgccaaatccaaatgtgagagtgataaaaaagcccaatctgatggcaagaaacctgagacaatcaatttgaaacccagatgcttacttgctactaaatctgatattaatgagttgattgcatcaccttcagttgcctatgctttggtatgcaaagatgctttgatttcacttcacgatatgcagcattctttggcccctgctgttgctaacattttgcaggagtactctgatgtgtttcccaaggaagtgccaccggggctgccaccggtgcgcggcattcagcatcaaatcgacttgatcccaggtgcttccctaccgaatcgtgcgccataccgaaccaaccctgaggaaaccaaggagattcagcgtcaagttcatgagttgcttgataaagggtatgtacgcgagtctcttagtccatgtgcggttccggtaattttggtaccaaagaaagatggttcatggcgtatgtgtgttgattgtagagctattaataacattaccattcgatatcgtcatcctattcctaggttagatgatatgcttgatgaattgagtggctctattgtgttctccaaagttgatttgcgtagtggttaccaccagattcgtatgaagttgggtgatgaatggaaaacagcatttaaaacaaagtttgggttgtatgagtggttagtgatgccttttggtttaactaatgcacccagcactttcatgaggttgatgaatgaggttttgcgtcctttcattggaaaatttgtggtggtctactttgatgatatcttgatttacagcaagtctatgggtgaacattttaatcatttacgtgctgtttttaatgctcttcgtgatgcacgtttatttggatttcagcaccattgctgcaccattgaatgcgcttcaaagaagggagtgcctttcacttggggcacatcacaagagaacgccttccacatgttgaaagataagttgactcatgcacctctcctccaacttcccgattttaataagacttttgaacttgaatgtgatgctagtgggattggattgggtggtgttttgctacaagaaggaaaacctgttgcatattttagtgaaaagttgagtgggcctgttctgaattattctacttatgataaggaattgtatgctcttgtgcgaactttagaaacatggcagcattatttgtggcccaaggaatttgtcatacattctgatcatgagtctttgaagcatattcgtagtcaagggaagctgaaccgtagacatgctaaatgggttgaatttattgaatcttttccttatgttatcaaacacaagaaagggaaggagaacatcattgctgatgctttgtctaggagatacactttgttgacacaacttgactacaagatttttggcctggaaacaatcaaagaccaatatgcgcatgatgctgattttaatgatgtgttgctgcattgtaaggatggaagaacatggaacaaattcgtcatcaatgatgggtttgttttcagagctaacaagctatgcattccagctagctccgttcgcctgttgttgttgcaggaagcgcatggaggcggtttgatgggacattttggcgccaagaagacacatgacatccttgctagtcatttcttttggccacagatgcgaagagatgttggcaggttcgttgctcgctgcgctacatgtcaaaaggctaagtcacgcttacatccacatggtttgtatatgcctcttcctgttcctactgttccttgggaagatatttcaatggactttgtgttaggattgcctaggaccaagagggggcgtgatagcatttttgtggttgtggatagattttctaaaatggcacatttcataccatgtcataaaactgatgatgcttctcatatcgctgatttgttctttcgagaaattgttcgcttgcatggtgtgccaaacacaattgtttctgatcgtgacacaaaatttcttagccatttttggagaactttgtgggctaaattggggactaaacttttgttttctactacttgtcatccccaaactgatggacaaactgaagtggtgaatagaaccttgtctactatgcttagggctgttttgaagaaaaatatcaagatgtgggaagaatgcttgcctcatattgaatttgcttataatcgttccttgcattctactacaaaaatgtgcccttttcagattgtgtatggtttgttgcctcgtgctccaattgatttgatgcctttaccatcttctgaaaaactgaattttgatgctaagcaacgtgctgagttgatgttaaaactgcatgagacaactaaagaaaacatagagcgcatgaatgctaagtataagtttgctggtgacaaaggtagaagggaattgaattttgaacctggagatttggtttggttgcatttgcgaaaagaacgatttcctgatttgagaaagtctaaattgatgcctagagctgatggaccatttaaagtgttagcaaagattaatgagaatgcatataagattgatttgcctgcagatttcggggttagtcccacatttaacgttgcagatttgaagccgtatttgggagaagaagatgagcttgagtcgaggacgactcaaatgcaagaaggggaggatgatgaggacatcaacaccatcgatacatccacgtccccccatatacagcatgatggtcctattacccgcgctcgtgcacgtcaactaaattatcaggacgagtgccctcgtggccgggttgacgcgcaccacaagttcgcggcgaccattggagacggtgtatcggttgctaaggcgcagcgtctttggacagttgtagtcgggccgtga

SEQ ID NO: 23184 - DNA, 3590 bp, Oryza sativa
  Clone ID: TF_OsC91_2616
atggctgccggctggatgggcaaggttgtgactcgtgtgaagtgtgactcacaagtcctgcgaccgtcggtctacgatcactgccggacggggcacccgacggcgacgaacaaacccgaggatcccacaaacgaagatgacgagaatgagcacaagaacgttcaagcagctaatgcaatacttagcgccttgagtggaagtgagttcaaccgtgtggacgacatcgagagtgccaaagtgatttgggacacgcttcggaatttgcatgaaggcacggatagtgttcgcgagtccaaggtggagatcctcaaggggcaatttgagcggtttgtgatattggatggtgagagcccaagcgacatgtatgatcgattgaacaagattgtcaatgagatcaagggatttggctccaaggacatgatcgatgaggttgtggtcaaaaagatgattcgagcaatcactccaaggaactctatcttggtaaccataattcgtgagcgtccggactacaagactctcacaccttatgacttgctcgggcatacccttgcccatgacatgctcaaacaagagtccaaggaggtcatccaattcatcaaccaaagctcaaccacaagcatcaagaaggaagacttggcgttgaagggaagttcttccaagcactactccaacaagtcaagtggaagacactccgcaagagtgtgctatatgtgcaaagagcccgagcacttcatcgcagattgcccccacatcaatgaagaaaagaagaagattgagaagaaggttgagaagaaggagaaacacaagcatagcaagcatgatcactatggccaatctcaccttgggatgatctttggctctgactccgagtcaagctcaagtaatgaagaaggagttgccacgttcgccgtcaagccttcatcagcaccgagactcttcaactactcaagtgatgaggatgctcccatttgcctcatggcaaagaagcctaaggtaccttcctccctcaagtcattcaatgttgatcttgttagtgatgaggaggatgatgttcaggatgaggttatggatgaggaattgttcaagtccataaccaaggaatctctaccacacttgagtgagtttcttgggagaattgaggatcagtatgcaacccttgagaggcaagaggcattactcattcgtgaaaaagagcggtctcatgaactcaaggggcctcaaattggtacaacagcgaccttcacagaacttgggaaacgtgaaaaggtagcctctgttaacgcgttatgtaaactttttgaccaaccaaccgcgatccagcagtggagcacagtcacggcactcatcagcagctatgcgactgccaggcgacggggccatggcagcttcccatcagcagcttctcacggctgccgcagtggtggttctcgcctctctgcgtgcggtggcgcagcccgccggcgacggctatggcaacgccaccttctccctctgctccggcgtcgacaacacccaggcggcgggccgttctacttggtccggcagactactgcctccgaagccgtcaaggcggccaccgctgcgacggcggacaggtcctcgagcgtggttagcgacggggagtactacgcgctcgcgcagtgccgcgccgacgtgcccgcgggggactgctcgcggtgcctcgccgcctgcctcggagtcatcggcgggagcggagacgacttgtgcgagaaagccgcggtgcgctacgacgaccgctgcctcctccgcttcgccaagggcgacgacttcaccggcttcgacgtcgacgagcacacggcgaccgtgttcgacggcgggcgcagcggcctcaccgtcgccgaggaggtgcccacccgcctgctcgccacggtggcggccgccgccccggcgagcaggtcgaggaccgccgccgggatagcgtcctacggcggcggcggcagcctgtacgggctggcgcagtgcaccacccagatcccggcgccggactgcgccaggtgcctccgcggcgcgctgtcccgcctctcggaggacttcaactccaccgccgccgggatgcaactgcttcgctccagctgcatgctgcgctacgggagctccctcttcttcaaccagtcgtcgccgctcctccccgtcgcccacctcgccatcgccccggccggtggaggcgccggcccgcccgcagccgctccaccatcaccaggccaccgtcctgctcgagctcgaacgatcgccatttccgctgggcagcctggttaccagactctggtgaactcgacaggtaaattcgcagagcgaaataagcttggatctggtggctgtggcacagtctacaaggggatattgcataacaatgaagaaatagccgtgaagaaactcaccagaaaagatttgagagaagtggaaagggaggtttccctggtggcgcagcttcagcacgagaacattgtcaagttcttgggccactgcttccggcacgacaaaatgttcctcgtctacgaatacctgagcaacgggactctgagccgctatttcaaatccgactgtcagaagctggactggccaaaatggcttaacatcatcagagggatcgctcgtggcctttcttatctccacagagattctgggaaggacatcgtccatcgtgatctcaaaccttccaatgtcctccttattccaacttcaatgcaaagattgctgactttgatcttgcaagaccatacgaccggaacaaaagccatgagagcactcaaaagagagcaggcacccagaaaaaataccacaaggatttattggtttcactgtttctcactgaagtggatacatagctccagaactgtatgcgggaggggaatactctaccaaatcggatgtgtacagtttcggcgtgatgactctggagatcatagttggtcagagcaccagcaagttcgacaacgataactgcacgggcctcgtagaatatggcatggcaacactttgtgaggcgtacggttgaagacatgctggacggtgaccatctcggcctggtgaacgacgagcaggtgcagcaggcgtcacggtgcgtgcacgtcgcgctcctctgcgtccagagcaaccgctccgtgaggccctccatggacagggtccacggcgtgctcggcagcaaggaggagctggaggagccctccacccccggcttcgtcgcggcggcggcggccggcgtttcgccgtcggcttactctgtgaacagcgtgacgatcagcgtcatggagcctcgaccatgaatcaagaagccttttgaggtttccaaaaggatttgtacaaagactgttttcagaagtttggatggatggaagcgtttgggaatgaaatcaatgtatgtatctctgacagttcggtgtggcttgccaggcagtttttgatcagtgcaatgccatttcaagcttcgaagaactagcctgtttacccttttcttctcttttcccctgtttcggtgcaatgcagataggcacaagactacagtagtaatgttctttgaaatacttggctgttacaccgtgctctttgaaaaaaaaaaaaaaaaaaaaaaa

SEQ ID NO: 23185 - DNA, 5388 bp, Oryza sativa
  Clone ID: TF_OsC91_2677
atggcaggtccagaggataaagatgaggagggtgcatctcattccccacgcaccaaaggcatcatccaatactttacaaggcaagtgaagcagcacacagaaggacttgatacagatttgcaggtgacaaatgagaagattggacaattggagtccacgcagatctccaccaacactaagcttacagggctggagacagcggtcgcccgcattgacactagccttgctgctcttgtgaggcattttgatgctctcaatgctggaggcaatggtggggttaatgatgatgacattgacggagagtacgtcgaggataatttggaggatgaatatattgctgacactgaacaagatgatcgagatgctcgagatcgtcgacggctacacaacaatcgacgaggtatgggtggtcgccgccgacgcgaggtatgcaacaatgatgatgctttttctaaaattaaatttaagattcctccttttgatggaaaatatgatcctgatgcgtacctctcttgggagattgctgttgaccaaaaatttgcatgccatgagtttcctgagagcactagagttagagctgctacgagtgagttcaccgattttgcttcggtttggtggatagaacatggcaagaaaaatcctaataacatgccacaaacttgggatgctttgaaacgggtcatgcgggctagatttgttccttcttactatgcacgtgacttgctgaataggttgcaacaattgagacaggaggaaactgaggatgctgccatggctagatttttgggtgggttaaaccgcgagatttatgatatcgtagactataaagattacactaatatgacccgattgtttcatcttgcttgtaaggctgaaagggaagtgcagggacgacgtgctagtgccaaggctaatttttctgcaggtaaaacttcatcatggcagacacgcaccactcctctagccggccgtactgcttctccatcttccacacccacaactagtcgagcagcacctcctccatctagtgacaagtcagcgacaaaggctgctcagccagcaccgagtgcttcttcaatggcatccacaggccgaatgagagatgttcagtgccaccgttgcaagggctttgggcatgtgcagcgtgactgccctagcaagcgagttttggtagtcaaaaacgatggtgagtactcctctgctagtgatttcgatgatgatacacttgctttgcttgcggctgaccatgcagataatgagccaccggaagagcacattggggctgcatttgcggatcactatgagagcctcattgtgcagcgtgtccttagcgcacaaatggagaaggcggagcaaaatcagcgacacacgttgttccaaacaaagtgtgtcgtcaaagagcgttgttgccgcatgatcattgatggaggtagctgcaacaacttggctagcagcgagatggtggagaagcttgcacttagcaccaaaccgcacccacattcatactacatccaatggctgaacaacagtggtaaggcgaaggtaacaaaactggtgcacattaattttgcaattggaaattaccatgatgttgttgaatgtgatgttgtgcccatgcaagcatgtaatattctgctaggtagaccatggcaatttgatagggattctatgcatcatggtaggtccaaccagtactcttttctgtaccatgataagaaaattgtgttgcatcccatgtctcctgaagatattttgcgtgatgatgttgctaaggctgccaaatccaaatgtgagagtgataaaaaagcccaatctgatggcaagaaacctgagacaatcaatttgaaacccaaatgcttacttgctactaaatctgatattaatgagttgattgcatcaccttcagttgcctatgctttggtatgcaaagatgctttgatttcacttcacgatatgcagcattctttgccccctgctgttgctaacattttgcaggagtactctgatgtgtttcccaaggaagtgccaccggggctgccaccggtgcgcggcattgagcatcaaatcgacttgatcccaggtgcttccctaccgaaccgtgcgccataccgaaccaaccctgaggaaaccaaggagattcagcgtcaagttcatgagttgcttgataaagggtatgtacgcgagtctcttagtccatgtgcggttccggtaattttggtaccaaagaaagatggttcatggcgtatgtgtgttgattgtagagctattaataacattaccattcgatatcgtcatcctattcctaggttagatgatatgcttgatgaattgagtggctctattgtgttctccaaagttgaattgcgtagtggttaccaccagattcatatgaagttgggtgatgaatggaaaacagcatttaaaacgaagtttgggttgtatgagtggttagtgatgccttttggtttaactaatgcacccagcactttcatgaggttgatgaatgaggttttgcgtcctttcattggaaaatttgtggtggtctactttgatgatatcttgatttacagcaagtctatgggtgaacattttaatcatttacgtgctgtttttaatgctcttcgtgatgcacgtttatttggtaaccttgagaagtgcaccttttgcacagatcgagtttcttttcttggctatgttgtaactccgcaagggattgaggttgatcaagccaaggttgaggcaattcagagttggccgactcctaaaacggtctcacaagtgcggagctttctaggactcgcggggttctattgccgctttgtgcaggatttcagcaccattgctgcaccattgaatgcgcttacaaagaagggagtgcctttcacttggggcacatcacaagagaacgccttccacatgttgaaacataagttgacccatgcacctctcctccaacttcccgattttaataagacttttgaacttgaatgtgatgctagtgggattggattgggtggtgttttgctacaagaaggaaaacttgttgcatattttagtgaaaagttgagtgggcctgttctgaattattctacttatgataaggaattgtatgctcttgtgcgaactttagaaacatggcagcattatttgtggcccaaggaatttgtcatacattctgatcatgagtctttgaagcatattcgtagtcaagggaagctgaaccgtagacatgctaaatgggttgaatttattgaatcttttccttatgttatcaaacacaagaaagggaaggagaacatcattgctaatgctttgtctaggagatacactttgttgacacaacttgactacaagatttttggcctggaaacaatcaaagaccaatatgcgcatgatgctgattttaatgatgtgttgctgcattgtaaggatggaagaacatggaacaaattcgtcatcaatgatgggtttgttttcagagctaacaagctatgcattccagctagctccgttcgcttgttgttgttgcaggaagcgcatggaggcggtttgatgggacattttggtgccaagaagacacatgacatccttgctagccatttcttttggccacagatgcgaagagatgttggcaggttcgttgctcgctgcgctacatgtcaaaaggctaagtcacgcttacatccacatggtttgtatatgcctcttcctgttcctactgttccttgggaagatatttcaatggattttgtgttaggattgcctaggaccaagagggggcgtgatagcatttttgtggttgtggatagattttctaaaatggtacatttcataccatgtcataaaactgatgatgcttctcatatcgctgatttgttctttcgagaaattgttcgcttgcatggtgtgccaaacacaattgtttctgatcgtgacacaaaatttcttagccatttttggagaactttgtgggctaaattggggactaaacttttgttttctactacttgtcatccccaaactgatggacaaattgaagtggtgaatagaaccttgtctactatgcttagggctgttttgaagaaaaatatcaagatgtgggaagaatgcttgcctcatattgaatttgcttgtaatcgttccttgcattctactacaaaaatgtgcccatttcagattgtgtatagtttgttgcctcgtgctccaattgatttgatgcctttaccatcttctgaaaaactgaattttgatgctaagcaacgtgctgagttgatgttaaaactgcatgagacaactaaagaaaacatagagcgcatgaatgctaagtataagtttgctggtgacaaaggtagaagggaattgaattttgaacctggagatttggtttggttgcatttgcgaaaagaacgatttcctgatttgagaaagtctaaattgatgcctagagctgatggaccatttaaagtgttagcaaagattaatgagaatgcatataagattgatttgcctgcagatttcggggttagtcccacatttaacgttgcagatttgaagccgtatttgggagaagaagatgagcttgagtcgaggacgactcaaatgcaagaaggggaggatgatgagaacatcaacaccatcgatacatccacgtccccccatgtacagcatgatggtcctattacccgcgctcgtgcacgtcaactaaattatcaggtgagttctttcttgagttcatattcctcgtctttataccccggagacgcgtgcactcgtgttttactcaggaacgatggagaggatccaaagggaagaggattcgcgcggggtggattcggactgcagggcagcgccaacttctgacggccgccacgacttcatgcgaactccgatttgggcgtgcaagacgagtgtcctcgtggccgggttgacgcgcaccacaagttcgcggcgaccattggagacgcgcctctgagcggcggcggcggtggtaccccacgagcagcggcgacggcgcccctcctcccgcgagcggtggcgactgcggcggcggtggcgcctctccccccgagcccaagcggcggcggcggcgccctcccctcgagcagcggcggcggcgacggcgcctctctcaccgagcccaagcggcagcggcggtgccctccccccgccagcggcgacgacggctcccccatcaccggcggtgcggccgtgtcctccctcaccaccggcagcgcggcgacgtcctcccccaccaccggcggcggcgcccggggaggcgtcggcggctcgccagcatcccaacggcggtggcgcccctcccctctgtcggatccagcgggaggggagctgcggcggcctggcgtccctatgacaacggcggcgctgtag

SEQ ID NO: 23186 - DNA, 3723 bp, Oryza sativa; identical to SEQ ID NO: 14377
  Clone ID: TF_OsC1528_2042

SEQ ID NO: 23187 - DNA, 3735 bp, Oryza sativa; identical to SEQ ID NO: 14376
  Clone ID: TF_OsC359_5634

SEQ ID NO: 23188 - DNA, 2174 bp, Oryza sativa; identical to SEQ ID NO: 14375
  Clone ID: TF_OsC359_5743

SEQ ID NO: 23189 - DNA, 5604 bp, Oryza sativa; identical to SEQ ID NO: 14384
  Clone ID: TF_OsC359_5787

SEQ ID NO: 23190 - DNA, 2649 bp, Oryza sativa
  Clone ID: TF_OsC359_6467
tcccctggtccctagctccctccccaccgtcgccctctctctcccacgtcgccggccgcctccagccgccggtgccgcctcgaccgtgcgccggccggccgcgccgtcgcctcctccagcgtcgccgccacctcctccaccccggcttgccctccgtttcgcgaggtgacccccggagctgccttcccgccgtcgccctcctcttttctccgcgccggccacctccagccgcacctcccgcctcacccgtgcaccctccggctgcgccgtcttctccctcggcctcgcagccacctcctctccctcggtcagccctccgtttcgcggggaaagcaccggagacgcgtcctcgccggcgtccagtggcgtcgccaccacttctccgtccgccgtcccctcctccgctcagccgctgctgcctgccatcatcgtttcatcgtcgtctccgatcgttctcgtcgtcgacgtcccatcggtcgcccggctcgtcgtctcgcggcgccgcctccgtcgtcggcatcgcagcggcgtggtcctcgtcgtcctcgtccccgtgcagccgctgccggctgtcctcgtcgcctcctcgccggtcccggtcgtcgtcgtcgtcgtcctctcgtcgttcccggtcgtcgtggcgttcgtccctccgtcgagccgttctcgtccgtcgtccgcgttcgtcaagcgagccgctgcagccccgtcctcgcctccgtcctcggctccgcgtcgtcaagcctcgtgccggccgcgtctcgcccgtgtgccggtgtcggtagtcgttcgcttgtgcgtgtggtgtccgtgttagtgtgcccgctcggtagccgcgtggtttctacgtgtgcatcccgtgtggtgtctagtggagtccgtttgttggccactcgcctcggttgacacacggggtccgcttccgtcgacccgtggaccgtctctgtgtacccggttttctttttatgtattgttattgcttctttataggtttgtagctttgcttgtgtgcttcgcgtagcttctgtcgttccggaggttcccgaagcgtggttcgcggtcgtcgccgaaggttcggaagtccgttctctctctcttcccctttcaaaacccctaaaacctgttttcggtggggtttgggtgcatgccagttgtgggaagtagcaccccggccactataaggattaagctcgggcctctgttgcaaagcactaccgtacttccacatgtctagtgggtaaggcttagtttgtggctcagtctagttataaacaaaagtacacggattggagatggatgaagtcgggggtcgatggacattccccggcttttcctgggacggggattaatacactggcgttcgggaaaaggcaattttcccggtcgcgacaagctggtatcagagccatctcgactgtaggataagccaagtggataaaacctaaggacatatttttccatccaccactagcctcaagagagttaacaagggtacacccttggtccattccaagcatgctgcttggttcacagctaccattggttggaagtcaagaccaaaatcagtatgtgtttgatcgagcatttgccacccaggtcgataagcttccaatgccagaagaggatgtccccttttgtcacgattgtagagaacgaggacactgtgccctgaattgtccatgggtatatgccaaagaagccccttcctttggtttagcagggcagacatcgctaaaccagcctcctcacaccaagtcaagcttgcagcctagtgtgcaaagtagagagcccaatggagagaatccatggaatcccgggaaatgctttcctcctagcctttcgtaccacgtggggtcacgtactaagcaagccaaacgcaagaagagtaagaatcagaagagaaaagcgccgatgcgaactgaagaagaagtatgtaagatgactattaccagcaccgaatggcctccagcagggataactattcctagacgtcaaagaggaaataccttccgaggtgcacgacagttgacccagcacctcctaagccatggtggcagagtgtctgatagtgaagggtcagatcaagtctcctcggatgatgaagatgagtctccccgacatctcggcgaggaagagatggaatcaaaggcatgcacccgttgtggagaaattggacacattgctagcatgtgtctcacactctgctcttattgtgaagaagaccatccaccaggggagtgtcccacccgcaaggtgacatgttttctgtgcgaaggaacaaaccatgtgcccaaggattgccaactcagtgtgttgttgaccaagaccgcagaaatccaacgaacaaccctacgattgtctcatcagctagtcagctccaacagcaacatcgacgatatcatccacagcaccaatgctcctcccgctgcacctgactctgcaataaatcatagtaataataccttcagcaccaaccattctctgcaccgacagcctcagcaaagatttgtcatcgatagaagaagttgtgtctctccccgacctactccaggccgagcaaagggcaatcaacctcaggaggacgataccaagcagaagaccgttatccgcttcaaccagcaatcagaaggaagcttcccctgtgaatga

SEQ ID NO: 23191 - DNA, 6794 bp, Oryza sativa
  Clone ID: TF_OsC359_8130
ctaggcaacatccgcctgtagtacgaagcctacgccaagcacctggcgaaaagggctgaggatgcccgcggggtcctcgacgctgccgcggcccaagagcggcgggcataggaggttgacacctcgctgcgggcccgggaggtggcgcttgaggccgagcgcacccgctccgcgcaggagttctacgggccggaacccccgggacaggcaggcaggactgagcccctagcagcaggacaccggccctgtgccatgacatctcgactaccgggccgcagctcgtgtagccttcatttgccctggagaatgtccatcgacccccgacttcatccacctccatccgtgtacttttgtttataactagatgggattcaatatgttcaaagatgatgtgacttgccttgctcgctttcccaaacaccggcttcaacttccacgaagagcggatcttccgaagctgcagcgtcgggttccacgggagtggggcccacgcggcagcctcacggttccacggtggaccgggcgcacgcggcttgcgctggccggcgccgtgggtcccacgcgtcagccgcaccgagggcgcgggcggctgacggccgggccccacctggcagccgcggggcgcgcccgaaggcggcctcgccggcacggccgacgggaggcggcgcgcccgcgcccctatggtcgccggcggcggccataggcacggcggagcggcggccgagagaggggagggaagggggaaacgaaatgggcggtccatggctcaccccggatcgatggcgacgacgggaacggcgaccggagcggagagaggcggcggcgcggctcgggtcgacggggacggcggcgttccggcggtcggcgaccgaaacggagaggtggacgaggtcggcgaggatgcggcgaagccgaaggaggcggtgccgaagcgggagatggtccggggcaacgacggcggcgaaccggagctcggcggcgacggcggagagagaggacgacggcgcgagctcgattccgacggggaaagagagcggcgagtggcggaaacggtggagagaggcacggggagtgtttatatagagccgggggcgagagggatgaatttatcaggacgtgacacacatggagtggactaccagggcaagccggtcccagagcaggagggtgacgatgcagagcccgtcgctgcttgggaggtcactgcagtgatcctctctggctcacctgagaggacttcgctggcagtcaccgcgggtggagattccttctccgccgcttgccagaacgccgctctcctcgccatcggcactctgcaccagcgctacccggacgagttgcagcactcgccctaccgctaccaccctcgccgcggaggagcccgcgactacgccaccttccgggatgctagctcggaggatgacgctaccatcatgcacctggcgcgcatggtggaggcgtacgacgcggcccgtatcgacttccaccagatggtgcgccgcgggatggtcgataacaacatgaagatcctggagctgcgtcaggagaatctgcagctgaagaaggatctggacgtgctggaggcgcagctctgtcagctcaaggtcgcccagggagaggtctgtcgtcccaagcgccgccgcgtctgccgcagccagaagatcaccgctcgcaagagtacctccaggcccgagcttgtttgtcagtccctggcgtggacctgcttcgtggagacccctcgtgccgagcccgcgcccgtggttcctcaggagggggaagcctccggcgtagggagcacggaggatgcgctgctgctcaccttccgtcctggcccgtcgcagcggagaagtgctaataccggtgatggccaccaacccgaaggcagcaacctcaacaaccatggcagcccacctccacctcctcctccgcctccaccaccaccaccagacaccaacgccatcctcacccaaatcctcgcccagcaagccaacatgatggctgctttcctccaccacatccaaaatccaccacagcataatgctccacctccaccaccacccccgcaacactctaagctcgccgagttccttcgcattcgcccgcctaccttctccagctccaataaccccgtggatgccttggattggttgcatgcagtggggaagaagttagacactgtgcagtgcaacgatgaggagaaagtcatctttgccacccaccagctgcaggggcccgcatctctatggtgggaccacttctaggctacgcagcccgaggggcagcctatcacctgggcccgtttcaccgccgctttccggagaacccatgtgcctgccggagtcatggcccttaagaaaagggcattccgggagttgaagcaaggcaaccgctctgtgatggagtatttgcatgagtttaacaacctggcccggtacgccccggaggacgttcgggaagatgaggaaaagcaagagaagttcttggcgggaatggaccctgagctgtccgtacgtctgatctccggggattatccggatttccaacgtctggtggacaagagcatccgcttggaagccaagcacaaagaattggagtcgcacaagcgtcgcttggcgaatttccgcaaccaacagggggctaaccaaagggtccgctacaccaatccctatccagggggatcctcctcgcagcagcaacagcagcaacctccctccgcgccccgacctcaatttgtggtgcgcgtcccacagccgcagcaaccgcagggtcagcaagggacccgtgcaccccgtccccctgcgccagctgtgcagcctggtcaaggccacagagacgttcaaggtcagcagagtctgtgcttcaactgcttcgagcctgggcactttgcggataaatgcccaaagccgaggcgccagcaaggccaagcgccgccccgctccaacaacggtggtaaggacgtcattcggggtcgtgtgaaccacgtgactgccgaggatgtgctgacaactccagacgtcatcgttggtacgttcctcatccattccacccctgctaccattttgttcgactctggagcttcccactcgtttatatctgtgccattcgtggggagaaatcagttgggggtagaaaggcttaggaaccctatgctcatcaccacccctggaggggttatgacagcgaagtactatagccctgccgttcccatagaaattcagggaattccgtttccctcggatctgattcttctagacaccaagaacttggatgtgatccttgggatgaattggttggctcaattccaaggagtagtggattgtgcaagacgcactgtcactctgcaccgagggccggaacaaccggttgttttatttgcacccccaacctctgtcagtagttcagaacttcatcagataggactgttagaaatccccatcgtcagagagttcggagacgtgtttccggaagaactacccggtatgccgcccaagcgagagattgagttccggatagatcttgctccaggaacaactcctttgtacaaacggccctaccgtatggcagcaaatgaactggccgaaattaagaaacagttggaagagttgaaagaaaaggggtatatacgtccgagcacttccccctggggtgctcccgtaatttttgtggagaagaaagacaagacaaagaggatgtgtgtcgactacagagctctcaatgaagttactatcaaaaataagtaccctcttccccgaatcgatgatctgttcgatcagcttaaaggtgccacggtattctccaagattgatcttcgttccggatatcaccagttgcgcatccgtgaagaagatatcccgaagactgcattcaccacgcgatatggactgtatgaattcacggtgatgtcgttcggtctgactaatgctcctgctttcttcatgaacttgatgaacaaagtgttcatggaatacttggataagtttgttgtggtcttcatcgacgacattctggtgtactcgcaatcagaggaagaccatcagcaacatctccgtctggtgttgggaaagttgcgggaacatcaattgtatgccaagcttagcaagtgtgagttctggttgtccgaagtcaaattcttagggcacgtgatatctgctaaaggagttgctgtggaccccgaaacagtgaccgccgtcaccgattggaagcaacccaagacagtcactcaaattcgcagtttcttaggtttggcaggatactaccggaggttcatcgagaacttctccaaaatcgctcgacccatgacacagttgttgaagaaagaagagaaatttgtgtggagcccgcaatgcgagaaggcgttcaaaacactcaaagaaaagctggtttcctcgccagtgttaatcttgccggatactcgcaaagacttcctggtgtattgtgacgcttcgcgccaaggattggggtgcgtgctcatgcaggaaggtcatgtggtggcctatgcctcacgccagctacggcctcatgaaggcaactaccctacccatgatttggagttagccgcggtggttcatgctctaaaaatctggcggcactatctcattgggaatcgctgcgaaatatataccgatcataagagtttgaaatacatcttcacccagtcggatctgaatcttcggcagaggagatggttagaactcatcaaggattatgatgtgggaatccactatcaccctggtaaggccaacgtggtcgcagacgcgctgagtcgaaaaagccgttgcaacactcttggcgtccgtggcattccactggagcttaatcaacagttggaagccctgaacctaagcatcgttagccatggattcttagctacactggaagccaagcctaccttactcgatcaaatccgcgaggctcagaagaatgatctagatatgcatgggatcctcaagaatatgaaacagggtaaagccgctggtttcacagaggatgaacacggaactctatggaatggaaaccggcgtgtcaaggcagagcaccaacgaccggccggacttctccaacctctccaagtaccagaatggaaatgggatgaaattgggatggattttatcactggacttccaaaaacccaaggtggatatgattctatatgggtagttgtggaccgactaaccaaagtagctcggtttattcctgtgaagaccacctatggagggaacaaactagctgaactctatttcgctaggatcgtaagtctgcatggcgtccccaagaaaatcgtatctgatcggggaagtcagttcatctctcacttttggaagaagctccaagaagagttgggtacccgattaaatttcagcaccgcgtatcacccgcagacagatggtcaaaccgagcgtctaaaccagatcctcgaggatatgcttcgcgcatgtgtcctagatttcgggaaaacatgggataatagtctcccctatgccgagttctcctacaataacagctaccaagccagcatacaaatggcaccctatgaagcgttgtatggacgcaaatgtcggacaccgctattgtgggaccaagttggggaaagccaagtgttcgggaccgatatcctgagagaagccgaagctaaggtcagaaccatttgggaaaacctaaaggtggcacagtctcggcagaagagttatgcagacaaccgacgccgtgacctggaattcgcagtggatgactttgtgtatctccgggtaacgccattgcgaggggtacacaggtttcagacgaaagggaagctcgcacctcggttcgtgggtcctttccgcatcactgctcgacgcggagaagtagcgtaccaattggagttgcctgcttccttgggcaacgtgcatgatgtgttccatgtgtcgcaactcaagaaatgtcttcgagtgccgtccgagcaggctgactcagagcagattgaagttcgcgaagacttgacctacgtggagagaccagtgaaaatcctagacaccatggagcgcaggaccaggaatcgggtaatccgtttttgcaaggtccaatggagcaaccatgccgaggaagaagctacttgggagcgtgaagacgagcatccccgtgctcccctccaccgtttccgccactcgccgcccttcctccccgtcggaatcgagcccgcgccatcgcactctctctccgccgtcgccgccgagctccggtccgccgccgtcgtcgccccggaccatctcccgccccggcgccgcctccttcggcttcgccgcatcctcgccgacctcgtccacccctccgcttcgctcgccgaccgccggaacgccgtcgaccccgtcgacccgagccgcgccgccaccttcctccgctccggctgccgttttcgtcgtcgccgtcgactcagggtgagccgtggaccgccgtttcgtttccccctttccctcccctctctcggccgctgctccgccatgccggtggtcgccggcggcgaccatcggggcgagggcgctgcctcccgccggccgcgccgccgtggctgccttcgggcgcaccgagcggctgccgcgtggggcccggccgtcagccgcccgcgccctcgggtgcggctgacgcgtggggcccgcggcgccggtcggagtgagccgcgtgcacccggtccaccgtggaccgtgaggctgccgcgtgggccccactcccgtggacccggtccgcgcgcccctcccttcggctcggccatataaggaccggtcttcgggcctctgttgcaaagcactaccgtacttccacat

SEQ ID NO: 23192 - DNA, 8226 bp, Oryza sativa
  Clone ID: TF_OsC415818_1
atggcgctatggaatggcttgggtcaggtggccaacattgcgcagcttgccggggtagatgcatatgggctcatcaagatgatcgtggaggctgcgcagacagctaaaaggaaccgggagacctgccagaagctagcacggcatgtgaagatgatcggcgacctgctgcagcgactccaaagcacagagcttatgcagcatcaagaaacgaggaacccggtggagcagctggaggagacgctccgacacacctacatgctcatcttgtcctgtcaggacagcagctacctgcacagctgcttcatgggagggaagcaggctcaccagctgcgcgaggtgcagagtgatatcaccttctacctccagctcttccctcttgtcagcttcgttgacacgacccgtacctgggagcggcttctgagaagagctcaaccttcttgcactgaggatactgcagatgagttacaaaaagtacatcattcagatcatagaattaggaaccatgtacaggactatgcacacaaatacattaagctgattgagttacattggcaatttatattcagattcaacacagaaattctcaacgcgactgaatttggtgatcagagtgtaactcaatgtccagaagtttttgaggaaaaacgaagtgaacaagcatcaatcagaagcctgaacctggatcaactagttgttaatgatattggaaaaggagcagtgttgactttttcacagatattggctgctacaaacaatttttcagggagatccttaattggacaaggtggatttgggcctgtttacaagggaaaacttcccaatggacttgagattgctgtcaaaaggcatgatacttcttcacatcaaggtgaagaagagttcatggctgagattgacgtcataccaaaacttcgacgaaaaaatataattgagctgattgggttttgtgttcaaggcaaagaatatgaaacaaaaaggatattgctaaattggtctaagcgccttaaaataattgaaggaatctcagatggtcttctttacctacacaaccattctcccaagtgcattgtccatagggacataaaagcaagtaatatcctcttagattatgaaatgaatgctaagatttctgattttggtctggccataaaattagctccgaaagcaactacagaggtgcttgttcgtggcacatggggttatgccgatcctgaatatgttgctactggagtaatctcggagaaaaccgacgtttatagctttggcattgtactgcttgagataataagtggaaagttggaaacgtggcgcggtgggatgagagggcgaggcgagaggggcgacctggctggcgacgggccgaccaccgcggctgtcacctccggcggccgctccagtgccctcaccattgacttgccgcctctcctcccttctccggcaggtatctccaagctgcgcctcccttctccagcccgggctcttaacctctctcaagttcgaccaggtgaagctttccaaaacctcatccttcatctcttccactgccctgttacccctatcgccactacccttggcccgtcaaaaatcatcccaactcctatttggctttgcgctgctccctctaagccgctcaactcgctctatgtcaaaaatgctcttaatttctggttcagttcttcgttttcgtctttctctgtttcttctttgggttttggtttgtttctttctcatgttgcgaacaaagatgtggctacctcgttgtttcttgcgggttcgtctgttcttaagtctgctggtttgtccatccatttgaccaaagattcagctgcaaaggatattcaagaaaatgttacccggttcttggttcagtttgaaggcagttcgtccgttccctctctggtgggtgaaaaagttgttcccgcgcttcaaacagttaagccagcctttactgcaacgtcacgtcatattggatgctcccaacaatccagcaagacctctaccccctctgtgccgacaggccctgcattgaagtctgtttactgccctgtaacaaactccttcagagacgctctcctctcacagccaaaacctaaaccccccgctcgctcagccacttctcgccttcctagcaggggcagaaaaaacctcaccatgctcaaccgatgctttcgctgccttggttctgatcatcaggtcaaagattgccgggatcccttgatttgcgcatcctgccgtcgagcaggtcacaggcaagattcttgccggtcatctatggcttccaacatctcccctcgccgctcatcttcctccttccacccatccacagcaaactccacctcccgcttcactacccgctgggtcaggcgtgctctaaacactccagccccacctccgcctcgcttacctactgccccataccctcgatccaaccacagctccccccctccagataacctagccattgttccttatgttcctcctctgactcatgtggatgcgcagctggaagatgtgattgccatgttggagagcagtctttgttcctctccggtcagatctgttactgctggacctctggtccccatggaggttagtgagaatgcggtcacttcttctgttgcttctcctttaccggacgtaagaaatgccctagtctgtgtgcaagatagttcaatctcagtggctgccttagttccagttcttgcatgtgctgttaatgatctagagactgtctcaactgaagtggtacctgcgactgtttccttggtgtctgttatgcctacaagagctgctgcggttgctgaagttgctcatgctactgttgagtccgttgttgttccgtcctctgtcagcgaagatctctcgccagcggtcaaccttagcagtatgccacctcgtctcagatgcaagaataaaggtttcctcgcttggtacggcgcctgtccatcttcgaggcagccaagctcggtccccccacaggaacctagggatatcttcgtctgttcggaacagttgtctgccaacccaattctgtctccacctcaggatcctgatagcacgagatcgccacctccgacattgagtggcccctcagctgctgagcaaatcagaagagctctagcaggtctaagtccagaaggatctattcactctgcttcactctctccaggtcgggtgccagtcattacttccaatgacactactgctgcgcaggactttgcttttggggaaccagatccagttaacatatcaggagacagtgacgatgatattcttgatatctttatcccctttgttgacatgagagtaactgctcattacgccactgcttatgttacccctccatgtgaatgccctggcagagtaattcgaaaagcaatgcaggatgctcaccctcgttttcagttcactctcatctcagcttgtagaggtgcaatgactctaagatttattcacagtcaggacagagactttgcagttgatcaccaggagaatcttacagctgaaggccacttggttaggcttgaacggcctgaggacagtgcggctcgcttcattcaacacaacactatgctgtccgaactagactgtattgacttcccgccagagatgttgttccctaacaagataagaaatgcttttgaaaattacggcgagctgatggaagtagatgatcaatgcctctatggggacgaacaatcctctctgcgtcttgttgttctgcactatcctggcaagaggatgagccctagatttcggctgcgctacaatttggggattgtctgcactgtctatgtcagggttctaagaacatgggagctggccatgaacgtggatgaagatggaaattacattaagcattatgaacagtttctattccctcatcagttggatcctccccgttcaggaccaactgttggaccagaggcagagttggacaacttgaatcaggctccttcaaatcaaatctctaacaaccaaggacttcagaacaggggaagattgcttgcgattctgcctgcagctagcactgtcttcattgaggaaatctctgatacacctgaaatttttgtccctccgtcaatccattctgctccctccagtatccatgactgcctccaggacctcgtgccctcagatactgaaaatgaacatgagctttcagcccggaaacgcagaaggcagaagaaacggacaattgattcagatgtcaagaggcgatatagcgaaagactggcggccaaagaaggacatttgtacatttcgatggaatccaaagcagccagagcgaaaaaactaaaggaacaacttgccaaatgctcatccaaactcaatgacgcggtacacaagcacaatctgctcgaccttaacttcaagactactccgaaagcgttggaagatctggctattgcttgcagtttgaatgatcacgatattgcccagcttcgaaagctcttcttcagttctctagtgtcttctctcccttcgttatgttctctttcagtctatttactccatgaaactaaacttcaaaacatcccacctgaaaaagcaaaaactattctacctcctaacctcgctaattatgattttgtgggttcttatggctctactgcgggcctgcccactgcctggaatgctgactttacaaaaacttctttcatctccagacacttctcgctgacaatctccttcacctcaaccttcacagacctgtccttttctttaaccaacatctatgggccagccgagcttgatcaaaaacaagacttccttcatgagcttttagaaatagatcccctaatccagggccctagacttctcataggagacttcaaccttactagatccccttccgacaagaactcccaaaacttttcaactggtcttgcagctgctttcaaccaaacaataaactccctaagcctgtttgaattaccacttccagacagactatacacctggtcgaacaaaagagaagttccagtcctggcaaggctagaccgagctttcttcaacaatgcttggaacaacaccctcccaaacacctccctctcttcttgcactagaaccacctctgaccatgttccacttcttctcactgcttctacttccattccaaaatcgaaaactttccgctttgagaatcatcttttgctggaccgagattttcttccttcagtcatgcacaggtggccacaacagctcaatatgaatgatccggctgcttgccttgctgccaagctaaaacagacaagatctatcatcaaagtttggatgaaagaacacaggaaacgtagttctctcaatgaagactgtaagttcacaattgatctcctcgactatattgaagaactcagacctttgaatgatggggaacgctgcctaagaaatcttgtacaggagaaattgtttcaggccatccaaagcaaggttgcatactggaaacaaaggggaaaggtcaagcggctaaagattggaattgacaattcggcattcttcaaggctcatgcatcaaaaaattacaggaattcaaggatcagatcaatcaagcacaatgggtcagaaattgcagatcacaatggaaaagctctgcttctgcactccttcttccaacattttctagggtccgactgtcagccgttgtgggacttcgatctgtcaacactatactcagaagatgaacgagactataatcttttggcttcgcaaggattgcaattttctacggaagagataataacatcaattaaaggcatgaactccaacagtgcaccgggaccggatggtttcggaccaagcttctacaattcagcttggaattctataaaggaggatattatcaagctggctgcgagtttctgctcaaattcagtccaactggaaagaattaacagagctcacattgttctaattccaaaacctggcaaggagaatacagtagatggctatcgaccaatctccctccaaaactgctcagtaaaaattctttcaaaggttttggcaaataggcttcaaaaagttctgacaagaatgattcatctggaccagacaggcttccttaaaggtagatgcatctctgaaaatttaatttatgccactgaactgatacaagcgtgccatgcaaggaaatgcaagaccctcattatcaagttagattttgctaaagctttcgattcagttctctggacgagcctgttccaaatcttggctgtccgggggtttccaaacaattggatttcttggatcaaaagcctacttcaaacatcaaagtcggcagtgcttcttaatggaattccaggaaaatggattaactgcaaaaaagggcttcgccagggagaccccttatctccttatttatttattctagtggcagatgtgctgcaacgactgctggagaaaaactttcagattcggcaccctatctatcaggacagaccatgtgcgaccattcagtacgccgatgacacgctggtgatatgccgagcagaggaggatgatgttcttgctcttagatcaaccttgctgcaattctccaaagccacaggattacaaatcaactttgccaaaagtacaatgatctcccttcatatcgaccgttcaaaggaatcgtcattgtcggaattgctacagtgcaagctggaatcgcttccaatgtcttacttgggcctacctctatccttgcataaactcaccaacaatgatctacaaccaattgtggtcaaagtggatagttttcttacaggctgggaggcatctctactttcacaggccgaacgcctaatcctagttaatgcagtgctaagcagtgttccagtttatgcaatgtccgcgttcaaactcccaccaaaggtaatagaagcaattgataaacggcgacgagcctttttttggaccggtgatgacacctgctccggagcaaagtgtttagtggcctgggatgaggtttgtaccgcaaaagaaaagggaggactaggaatcaaaagtttaaagactcaaaatgaagctcttcttctcaaaagacttttcaaccttttctcagataattcctcctggactaattggatttggaaagaatttgatggaagatcactattaaaatctctaccgttaggtcaacactggagtgtctttcagaaactgctgccagagcttttcaagataactacggtgcacattggggacggctcgagaacatccttttggcatgatcgctggactggcaatatgactcttgcagcacagtttgaatctctcttctcgcattcaactgacgacttagccactgttgagcaaattttatccttcggaatttacgatattctcacccctaggctttcatctgcagcgcaaaacgacctacaagaactgcaaaccattcttcagaatttttccttgacaaatgaatcggatactcggctcaacaatcgccttggcaatttaacaaccaagacaatctatgatttaaggtctccgcctggctttccttcaccaaattggaaattcatttgggactgcagaatgccattaaagatcaagctctttgcttggcttctagtcagagatcgactgtccacaaaattgaatctcttgaaaaagaaaatagtacagacagcaacctgtgacatatgcagcaccactgatgaaacagcagatcacctcagcttcaactgcccttttgctatcagtttctggcaagcacttcatatccaaccgatcatcaatgagactaagtacctggcccaactaaaggcaccagcaactatcccaacaagacattttcagagtttcttcatgctctgctcttgggtcctgtggaaccacaggcatgatgttgtattccgaggaagaccaccttcaattgcttcatgcttgcaacgcggaatttcggaatcctccctatgggctgaaacttttacacctgatgatagatttgtaatagatgtttggaaagacatttcttcctcaattaatgcaatgacaattcaggtggggaacctctcccccccggcactgaagaacagaaaaaagttgcacaagcttattgatccatcattaggtgctaagaaacatgagcgagctcagattatgcaatgtcttagggtggcgatgttgtgcgttcgggatcgcgctgaacatcggcctaccatgtctgaagttgttactatgcttcctagcatcaagacaccgaaagacagaaaggcagttgtcaacgtgcgcttttga

SEQ ID NO: 23193 - DNA, 2079 bp, Oryza sativa
  Clone ID: TF_OsC91_2199
atgactggtttcaacttaccggaaaactttaaggaaaatccagaagctttcttccggagcatcaaaccgcgagtcgttgctccgcagaaaactctcccgacaaagaaaccagccatactagcgccaccgaccttcaagactatggctgacaagactctccgtgaattcgctgctccctctgttggcaatgtagccattgggccgcagctcaacctgggagatgtggattttgatttgaagtccagcctcatcacgatggcgtaggctagcctgttctgcggcaagcctaacgaggatgccaacgcttacttacaacagttcctggagatctgtagcacgtacaccatgaagggtgtcagtccggacgttgtcaggctccggttgttcccgttttccctcctcgggaaagcaaagtagtggttttatgccaaccgtgctacaatcaatacctgggacaaatgctctatagcatttctctcgaagttctttccgatcggcaaaaccaatccccttcatgggagaatttcaagtttccagcagacaagggacaagtctattcctgagacgtgggaacgacttcagaaatatactcccatgtcctgtgaccacctggacacgctagctggagtagccttcttctctaagacggttcaaggagccgttgatttaatagagaagatggcttctaatatgagttggagcaaggaacgactccaaacccgtcagcgaggcattcacaccatcaaggagatagaaatgcttgctgccaagctggacctcctcatgaagcgattggacgatcacgacaaaaggccacaaggcaccatcaaagccttggactcacacgttacgtgtgagatatgcggcagcaccggtcattctaggaatgactgcccggaaacccgtgaagaggcgatgtacatgggcaacaacaacaatgggtatcgtccacaaggagaaacccagctagctcaattggctttattagtccctgcaaatgaatatgggaggattccgaggcagcccgactcctccaagacagacagcctggtgaaattcatgcagaatttcctggaaaaggaaacaacgatgcccaggaaccgttattggaagacaccggtaaaatcaagcataccggccaagaagctagagcagccggctcagaggaagccgtcttccacaccgaaatcaaaaagggggtctggctcttcatcaagtcatcatgacgagtctagtgctcattcatcagctgatgtctcgatggaggatgccgacgctccgcgacatctcctgaacgacgccgacctcgaccttgtcgatgatcgggaaatgcaagcctactatctgctgagtgaccggaaatatgctcacacgcgagaatactctccggagctgctgaaaaagataggtatggatgttgacttccgtgctatttggaaagctgttggttggcaaagatttgctgtaatagattagcctggttctcatttgctcactttgcaatttctgtgcactttgaaagaaatagaagatggaatttcttttcgctttttccataaggaatacacacctacatggaaaggattaagtacacttcttggttttcacgattcctgtaaaatcgatctcctgaaaggaatatctgggttcgagaaaaataggttttgggaagatatttctggtgctccaatttgcaagaaacctaggacgaatgatatccataatcctacacttatgctcatgcacaaatggattgctatgactttgtttactagaggtgatcttagacccattagggggatgaattaattatcatgtttgccatggttaggaaaatcaaaattgctcctgtgaaatgtatgataaggcaatgctaccatgaactaaccattcccctatagaccatagtagaatctcgtgcaggtggagcatacagggaaacacacaacatgacaaggaatgaatgagaaggttcatcatcctcaacacccgtacagatgtatgaggcaggttgggaaccaactggggatgtacccggatggaccccaagctccatgccacagcatcggagtctcaagc

SEQ ID NO: 23194 - DNA, 7693 bp, Oryza sativa
  Clone ID: TF_OsC280853_1
cccggcccgctcgaactcgcctcgcgcctcctccgcgccccgtggtgctcacgccccgcagccggggcgcggccgcccgagccgctaccccctcctcctgccccgccctcctggcgccgctctccccccgtccccgggcccccccgcgccgggcttccttgcctcctgccagccctggggccgtgcgcgcgagcgacttcgcccccgccgccctccgctctccgtcgctgcttcgtctcccatgggggatctggcgttgatgagctttctgtccgggaagcgggagcgacagcggcagctctgccaccgacaaattggacgaggccgtggctcaattacttcagtggctaaaactgaaagaaagggtctgcactaccaactaaaagaaaacgtttaccttccttaggacatcttgcggctgatccatgccatgatgccactgcgagatgctgctcgtgctgcttgcgcctcgcacatattcctgcagtcctggagatgtcgtcccaaccttatcttcactggggagacgttgggcttgattataaatggtactggaaaggatgacgctaaaagagacttcatcaatatagtacagcgcatactgctgaatcactcaggcattggcgtgaaaacactaaagcttgaactcctccattttagcgatctcgacttaggttgtctcgaagcctggcttcagattgctgttgcaccagggattgaggaactcaccctgatgtttccttgcgtaagatacaaattcccatgctcgctcttatttgaaagaggtggaaactcggttcgatatcttcacctcatggtctgcaccttccgtcctacaattggtcttggttgcttgataaaattgacgcagttgcatctgtctttcgtgtggattactggagatgagttagagctcctttccaaatgcgtcgctttggagtggctgaaactctcatattgccctgagataatttgcttgaaagtaccttgtatgctaaggcagcttggctcccttgaggtggctgaatgcagatatttgaaagtcatagagatctgtgctccaaatctttcaaatttttatcttactggttttctagtacggacttcatttgagaatccattgctagtgaagaaactacgaatcatgtgtttacgtcaaggcaactttgtttcttatgctcgtacgaagcttccatcccttgtgccaaatgttgaaacacttacagtagcatctaatgaagcgaccgggcaggcgattcccaccgaccgacggccactccggccccggcggccacccccctgcgccggtagccaccccggcgccgacgcccaccacccacgcctctcttgccccatcgcgcttcccctggagcctgctcgaccgccgctcgacgttgctggccagatgcggttggcgtctctgccgccgtcgtggccagcactccagccggcgcatcccacgctgctccgccaccacaaaccagtaatcccctctcaacccctctctggaccacccctttccccacgaagctccaccccacgccggaacccccagttctggctggagtcgccgccgccgccgccatccagatctgctgtgcctttctccgccgacgatgtctcccacgtctcggagtccccggatccaaggagttcgcccacgcctgctatgccacgctccttcgctgatgctgtcaggttggatttcaatcccgccaaaggagacggcctgcccgttttcaaatccccacacggccaaccaccgccgcgcccaaaattgaagtccgccattactatcccagcctggagcacctttcagcgtcgcgcctacagggctactcccggagaggaaatgggcgtgcgtcgcatccatggtacggcgagaccaggccgcttcaatggcgagtggaaggaagtcaagccacgccactggtggcgccgctcgccgcattcacccgagtcccagcggccagcttccaggcgacaagacgcacattcaaggcgctcgttggctcccgctgcatcggcatcgctgcgcctcttcagagagagaacggctggaaaatgcttcaactgccttgcgcgtgatcaccgcgcagcgcgctgcagggacccggttcgttgcttcagatgtttccgttcggggcacaaggcaaactcctgctcccggcgtgaaccgcgaccacgccaacctcgccagtctccacagaaagcgctgcgccgccaagcttctacaccacccccgccacagaacacgtcgcaccgccaggcttctacgccatccccgtctcttccccgggctacacgaccacgccaaccacgccagtctccgcagaacacgtcgtgccgccaagcctccacaccacctctgcagctacctcttccacccaagccgtcctgcaacacgcggatggctctactgggagacccggcgacccggccggatgaagaccactgcttcgttccgacaccgttcgccacggaggctgagcggaaagaatgggaaagctcggcggtggtgtcctgggcgatgcgggcaccggcttccacaacggcgcaagatgttgaggcggcttttcgggaggaattccgtcttcggcgaggggaggtcacggtgacgcgccaccacccggaagccttcctgatcaagttcgagcatagcagtcactgctatgaagctatgcgcaagggcttcgtcaagcgaaacggtattgagctccacttcatcaagtggcgcagcctgagtgcggccctcggcatcgcgctcatgtttcgccggctcatcgcgcgcacctgtggcctcgaggagatcgagaccaacctgatccacccggtcgacactcgcacggtggatgtgtgggcttggaccggcaatccgagctccatcccgaagcggatgtggctaacctttaccggctcgacgcggggagccaaaccagagcaaatcctggtgtccgacagaccgccggcacactggcaacatggcgccaaattctgcgtctacatccacctggaggagatccacgactacacgacggtggcggtagacctcgatggcaacgaggcatgcgcgccctccaagcggcgccttccggagtggcacctcggcgtggccgacggggacccggtaccaacgcgagccttcgagaacttcccgcaccacccgcctccaccacgcactcgtcaaggccgcgagccagagcgcatcgacgaccgcgacgaccgtcgccgaagagccaaagatgatcgtgaccggagccgtcccaggcggtcgtataatgacgaccacccggaccacgacagggaccaagcctggcgacggcgcgacgacgacgacgaccgcgacggcaggggcggccggggccgcgaggcatggcgaggacgagaaagccgcaaagtctcgggccttgatggccaacgcgtgcgcgagcgttcgccgcgtcggcgcgactgggcagaggacgaccgtcgcggtgaccggcgtcatcacgtgcaggctgctgtcgccctgcctgctacaatcccgcctctcaagctcgctccgaagcaggcaccaagggaaaacctccgtgagacgggggaaaggcttgtgaacagggtgaacaatttcgccgctgcggtggatgacgcttctcagcctggcggggaagaagcctggtccgaccgccggccaagtcgcgtccatgacgtcccgatccggcaggtgttcgaccggctcaagcactgcctcttccctgctggcatccactctacaccaagccactcgggccaagtgatgcctcatgacgagagggcgtcgatcggcgcgcgaggcaacactgcagccgccacggcggttgcgtcgaagacggtgacgccgccgcagctgattacagctgcgccaacgacggaacaagatgaacaccaagatgccgggaataagaacacgctgcaagtgctggagagcctcttctccaccccgccgcgcgccgttttgccacggccgacctcccctgcgctgacgacgacccaagcgaccccagcgccagcaccggcgccgccaggtggccacgggatggagcgtcgccgcagcgcaagactcgcggcaaagccgccaatgccaactatgcaacgctgcacgagggtgttattgaagcggcttggcatgctccatgacgacaagacgctcgacgaggtgctctccgactacatcgccatgttcaatggacctctaccgcaacacgtgatcgcagcgctcacgtccatcttcgacatcgacgccgatgcaatcatggaagccaatcacgtcgacaacacgctcctggaggttgtcggcgaaggcgtcgctgaccttgtcgaggagtgtactgcactaaacgagctaatcgcagagacatcttgcaacctcgtctgcatccaagaaaccaaactaagagcagttgatgaccagctagcccgtttcttaggagcctacaggctagacagttacgctttcaaaccgtccaggggcactaggggaggcatcctacttctgtggaacagcacggcgatctcggtgcacagcactcgcataggtcgttactcgttgacagcgaatataactgtcctacgctgcggaacaagcttcatgctcaccacggtctacggcccaacgcgtcacagagaaaaagactccttcctccgtcacataaggagtttaaagccgtccccgggaaacaaatggcttatcctaggagatttcaacttggtttatcgggcacgagataaaaacaacaacaacctaaatttaggccgaatgaatcgcttcagagctgcactcaaccgctgcgagctaaaggagatccacctccaaaacaggaaattcacgtggagcaatgaaagacgacgaccaaccctcatgagacttgataggttcttttgcaatgaggaatgggacctatctttcgaccgccacatcctacacgctctttcaacaggaccttccgatcactgcccgttgttgctcaccgacccatcctgcccacgtaagccgcggcctttcaaattcgagaatttctggataaagttacctggtttcaaggaggtcgtagagcaagcttgggggaaaccgtcgaatcacaccgagcctatgcaccggcttgcgtataaactacgggatatggccaaagaactaaaacggtgggcgagaaccacgtgctctcagactaagctgaaataccatatggccctagatgtcatcctacgactggatgtggcccaggaacaacgtaccctttcgccggaggaagggaacctaagagcagccctgaaaaggagagttttgggtttagcggtgattgaaagagcgagaaagagacaagcgtcacgaataacgaacataagagcaggcgacgcaaacaccaagtttttccacctcaaagtaaactccacaagaaggaagaatcatatacatcgcctccgcaaacaaaacgggtgggcagtgacgcacgaagaaaaaagccaagcgattttcgaccacttttccctcttcatggggaggccgcaagaaagacaactagatctaaactggcaatccctagggctagagacaacggatttaaattcgctcaatgaacctttcaccgtggatgaaatcaagagagcaatttgtcacatgccgacagacaaagcacctggccctgatggttttaccgggtgtttcttcaaagcatgctgggaaaccataaaaaacgacgtcacgacagctttcaacgccatctacaatcatcggtgcaatcatctaaacctcctcaactcggcaagcgtcgtcctcatcccaaaaaaagatggtgcagaacaagtctccgatttcaggccaataagccttatacacggatttgcaaaaatcttctcaaaattactggcccttcggctgcaacctctcatgcacaaacttgtttcaacaagccaaagcgctttcattcggggaaggagcatacatgataatttcctatatgtcagaactctgttcgcaacttctagctccaagatactcctaaacggaataccgggtaccaaaataattcatgggcaaggcctaagacaaggagaccccctatccccgctactcttcatcttagcaattgacccacttcaaagactacttagcaaagcgacagaactcaagctactaagcaagctacgaggaaagtctgtgacactatgtacttccctctacgcggatgacgcagcagtctttattaaaccaggaaaatccgaagtgcagaatttcactgctattctacatcgctttggcctcgcaaccggcctacgtgcaaatatagaaaaaacacaagtggtggccatcagatgtgaaaacgtggacttggatgaggtgcttcaaaacaccccggcaacaagagcttccctacctatgaaatatcttggacttcccctaacaacgggcagattgcgcaaggcagacctacagctgttgtttgacaaatcggccggaaaaatggcagcttggcgaggtagaaacttgggactcgccggacgaactacactagtcaaatcagtgctatcatcacagccggtctaccttcttattgcactaaaggtctccaaggaatcaatggagacgcttgacaagcaaagaaagagcttcctctgggcaggatcggaaaagctaacgagaggaaaatgtaaagtaaattggaaaagaacctgctcaccgactgtctatggtggtctgggcattctgaatttagaaaactttgctagagcgttgcggatcagatggctgtggcaagagtggaaagctccggagagaacctggatcggccgggacaacccatgtgacaacacagagaaaactctttttgcggcggcaacgacaataactgtgggagacggggaaacggctagcttctggaactcagcttggatgcaagggcggcggccgagggatgtgatgccacttgtatatgcaatatccaaaagaaagaatagaagcctcaaagaaggcgtcacagataacgtctgggtacaagacctaaatttctcttccccagatgcaataacagttgagctgctggaccaaatagtgactctgtggtcgataatccaaagcgtgcagctcagtccagacgtgacagatgaaatcacttggaagttcaccaatcatggggagtatacaacaagctccgcctataagatgcagtttctcggatccatcaatgcaaactatgacgcaatcatctggaaaccatgggcaccaaacaaatgtaaaattttcgcatggttggccatccaaaacagagtctggacggctggcaggctgactacacgtggatggccgaacaacactttctgcccgctctgtagacatacccgggaaacggtattccacctcctagtagactgcagatactctaggaggatttgggagaatctggcttgctggacgtcgcaagagcacatcaaaccaggcaattgggctcaacctgcgtcgctccaagactggtggactgcaatagcaacacacccagggacaccgagaaaaggaaatcgcacccttctgttgctagtgacatgggagatttggaaagagagaaatcaaagaattttccagcgcaacgaactctccatactatcgctctgcacaaagataaaggaggaggccaagacctggactctagccggcgcgaaaaggctatctgagataatcccttaa

SEQ ID NO: 23195 - DNA, 5157 bp, Oryza sativa; identical to SEQ ID NO: 14397
  Clone ID: TF_OsC359_7853

SEQ ID NO: 23196 - DNA, 4135 bp, Oryza sativa
  Clone ID: TF_OsC1713_4081
tcaagccacattagagaagtctatgacaattaactcattcctcaacttgcaaaagcgggtttcatcaagaggcttggtaaagatgtcagctagttgatccttggttcttatgtggctaatgactatgtcacacttggcaacatggtctcttaggaagtgatggcgtattgtcaatatgcttggatctagaatgttggaccgggttattggctatctttatggcactatcattgtcacataggagtggggttttggtgaaggatatgccataatccaacaagatttgtttcatccaaagcaactgggcacaacaactacccgccgaaacatattccgcctcggcggtagagagggctacggagttttgtttcttggatgaccatgacacaagggatctaccaagcatttggaaactacaggatgtgctctttctatccactttgcaaccggcataatccgaatcggaatagccaacaagcttaaatttagcaccttttgggtaccacaagccaatagtagaggaatgctttaaatatcttagaatccttttcacggccactaagtgacactccttaggagcggcttgaaaccgtgcacacatgcaaacactaaacatgatatctggcctagatgcggtaaggtaaagcaagctaacaatcatagaacgataaagctttaaatctactggtttacctccctcatcaaggtcgagatgcccgttggttgccatatgtgtcttgatgggtttcgcatcctccaagccaaacctcttgagtagatccttaatgtacttggtttggctcacgaacgtcccatcctggagttgcttgatttgaagtccaaggaagaagctcaactctccaatcatggacatatcaaattccctagacatcatatcaccaaattccttgcaaaatacttcattagtagaaccgaatatgatgtcatcaacataaatttggcacacaaagaaatcatcaccaatgatttttgtgaaaagagtggtgtcaacttttccaattttgaaatcatttagaaaagcacttttcacatccatttgaaatagttttatgtcaaaacatgatgcaaatgcaagaaggatgagaatagccttaagtcttgctacgggggcaaaagtttcaccaaagtccaaaccttcaacttgtgtgaaaccttgtgccaccaaccttgccttgtttcttaccaccaacccgttctcatcttgtttgttcctaaagacccactttgtccctatgacattgtggtctctaggtctttcaaccaaagtccaaaccttgtttcttgcaaagttgttgagctcttcatgcatagcattcatccaatcaagatcacaaagagcttcatctacatgttttggctcaagacaagaaacaaacgagtaatgttcacaaatcgaagcgacacgagatcgagtttgaacacccttactaatgtcacccaacacttggtcaattgggtgatccttggaaagagcggtgtgtattcttggtggaataggtggatcttgtgccttctcctcctccacttcaacttgagcttgacttggcgtagcggaagtagatgacttatcttgagtggaggtggatggcttgtcttccacttcaataggcttgacatctccaattgacatgttcttcatagctctcatcaagccttcatcacctacatcatccaaattctcgtgcccctcttgggagccattagtctcgtcaaattgaacatcggcggtttcttccacaatacctttattcttgttgtagacctggtatgccttgctatttgaggcataaccaagatcatcacaatagtcctcgatattggtattcttaaactcggaaccattgtcacttctaattttcacaagagtgcaactaaattcattttgggccctttttgcaaactttttgaaaagctcggcaacaatagacttatcatgcaaaaagaacacccaagtatagcgagaataatcatcaacaatcacaagacaatgactattaccaccaatgctcttataggttgttgggccaaacaaatccatatgcaagagctccaatggtctagatgtggacatgatactctgagtaggatgagaacatgcaacttgcttgccggcttgacaagcactacaaagcttatctttctcaaacttcacatcttttaagtccacaactagatcacgttttgaaagtttgctcaattgattcataccaacatgggctagccttctatgccaaagccaacccaaagaagtttttgcaactaaacaagttttcaaatttgcttcactagaattgaaatcaaccaaataaagatttccatatctaaaacctttgaacacacaagacttgtcaagaaggctagaaacaataacttcttgcggtaagaaagcacatgacaagccaagatcacaaattcgagcaaccgaaagcaaattgaaatttagagatttaacaagagagacattatcaattgacaaatcattggagatagcaattttacctaacccaattacctttcctttgctattgtctccaaatgtcactttctcttgtttattccctcctacttcaaatgtggtgaacatagccctatcaccggtcatgtgttgagtgcatccactatcaaacacccaatggctcccaccggtgcggtagttcaccaccgagtataggggaacccacatatctagcaacaatgctaccatcatgagccttccattgctcttgacaaaacgagtggcacagtgagaaggtttcttacccttctttggaatgaatccaagtccctccttgttaaggatgcaccgttgctcactcaaaatcttgtcaagagtgttcttatccttgaagcacctctccaagctcttgttgagcttagccacttgctctttaagctcattgttctcaacaacaagtgaggcatcacaaatagaaacacaagaggtagagctagagctagacatatccacaagatcatcacaagaggtagaaatgctagatgatgcaacatgagcaatatggcaagtagcactatcaccaagcaaatcacaagatatgccaacatcaatgagagctccatgttgagtagtggaaatgaggttgtcttgagcttccttaagcttctcatgagaaatggtgagtctctcatgagaagtctttagctcctcatacaagacctccaaagaagcatgatccttctttagggccttgaacttgacaatctccttctcactataagcatagagctcctcaaacatactcacaagctcatcataggaaacatcatcacaatcatcatcactctcactatcactaagagatgttaccttagaagagccctttgccatgagacaaagtggagcgaagagtgatggagcctccttgatggcaacaacggccatcttcttcttcttggagcttgtatcatcaccatcttcttcctcggacccggatgaggcggagttcttgagctttttcatgagcttgtagcctccactcttcttcttggatgacttgtctccatcatcatccttggaagggcactttaaagcaaagtgtcccttctcaccacactcaaagcacctcaagttggagagagtcttgttgggtcttctatttcttctcctattggagttggagccccttcctctctcctttctccttcccaagagatcattgaaccttctagcaagaagggcaatctcttcctccaagttctcattggcttcattcaccttgccattgcccttgtcttcaacttcggcttggcgagcaatgcacttcttggaaggtgaggtttcctccatctccttcttcttcaacttgtacatgtcattggtgttgatcttccccaagaggcttgccggtgtcatccttgacatgtcggagttgatgagcatggtgacaagggtctcatacttctccggtagagccctaagcatcttttgggcaacctcaagatcggtgtagtttgccccaagccccttgagatcatccacaatgacattgagcctcccatacatgtcattcacactcatgaggcaacatggagaatgtctcatattggatcttgaggaagtgaagcttggcatccttgtactcacttgtgccctcat

SEQ ID NO: 23197 - DNA, 4293 bp, Oryza sativa
  Clone ID: TF_OsC1713_4390
ttaccagttttcgaatatatgcgggtactccgtcctcaagaattcttcgctttcccatgtggcttcatcctcagtgtgattgctccattgtaccttgtacatacgccacactttgctcctagtcctcttttcggcttcatccaatatccggatcgggtgttctggatatgtgagatcattgctaatgtgaatctcttccagcggagcttgctcttccggcactcgtaaacatttctttagctgagacacatggaagactgggtgcacatccgcgatattctctggtaactgtaactgatatgcaacttctcctcgcttggcgatgatctggaatggtcccacatatcttggtgccagttttcctttgaccttaaacctttttgtttccctcatcggagaaacctttagataaacgtaatctccctccttaaattccaggtttcttcttcgggtgtcggcgtaactcttttgtcgtgattgtgctacttttagacggtcacggatcaagcgaaccttttcttcggcttcttgaataatgtcaggtccaaataccgcccgttctccagtctcggaccacattagcggggtacgacattgtcgaccaaacaatgcctcattggttgacatttttaggcttgcttgaaagctgttgttgtaggagaattcggcgtagggcaaacatctctcccagtccttgctaaaatccagagcacaagccctcagcatgtcctccaggacctggttggttctctccgtctggccatctgtctggggatgataagctgtgctaactgcgaggtaacttcctagggcttcatggactttctcccagaaatgtgaggtaaactgtgtgccccgatcagatataattttcttaggtacaccatgaagacatactatcctggtcatgtataactcggctagcttagcactgctataatttgtcttaacgggaatgaatctcgccgtcttggtgagtcgatccacgatcacccaaatagaatcatatcctgttgcggttttgggcaatccaacaataaaatccatacctatctcatcccatttccattcgggaatcctaaggggttgcagcaagcctgccggtcgctgatgctcagccttcactttttggcacacgtcacagagtgctacgtattccaccacatctctcttcatgttgggccaccagtatccttccttcagatcttggtacatcttcgtacttccggggtgcaatgaatatgccgattcgtgagcttcctttaaaattaatcccctcagtccaccctgttcgggtacgtaaattctctttttataccatagaacatctttttcgtcggttgaaaattcctttgcacgtcctgcagctaagcgttccttcacctctcggacttcctcgttgtccttctgggcttcttctatttgggttctcaaaagaggttgaatgtccagggtgtttatccgtccacgaggtactatatgtaggttcagctgagctatttcctccctaagctcagggaccatcccttccattctcagatgattgcaatggctcttacgactcagagcttcggccaccacgtttgctttgcctgggtgatagtgaacctctaaatcatagtccttgattaattctaaccatcgcctttgcctcaagttgagatctgactgggtgaagatatactttagactcttgtggtcagtgtagatatcgcaatggtttccaattagataatgtcttcctcctagtccttgccttgaagcatcacaatatataacaaagtctttcctgatgtcgggaagaactaaaataggtgccgaggtcagcttttctttgagctgctcaaagctttcctgacactgttctgaccacacaaacttcttttccttcttgagtagttgtgtcattggtcgggctatcttagagaacccttcaatgaaccgtcggtagtatccagccaagcctagaaaactccgaatttcagtcacagatttgggtgctttccattccgtgacagcctctactttagcaggatccactgctactccaccggccgagattacgtggcctagaaaagcgacttcttttaaccagaactcacacttgctgaattttgcatataacttatgcttccgaagtttctcgagtaccaatcgcaagtgttccgcatgttcttcctcatctttagagtagattagaatatcatcgatgaataccaccacaaatttgtccaagtagtccatgaacactttgttcataagattcataaagtatgccggagcgttggttaaaccaaacgacattacggtgaactcatataatccatagcatgttgagaacgcggttttgggtatgtccccggttctaattttcaattggtggtatcctgaccgaaggtcaatcttagagaacaccttagctccgttgagttgatcaaaaagatcatcaatccgtggtagtggatacttgtttttaatagttacttcgttcagtgatcggtagtctacacacattctcatgctaccgtctttctttttaacaaataacactggggctccccaaggtgatgaactggggcgtacaaatcccttctcttgcaactccctgatttgctttttaagttcttctaactcattgaccggcatctgatatggtctcttggatatggaggcagttccgggtatcaggtcaataatgaactctatgtcacgatctggtggcattccaggtaaatcttctgggaacacatcaggaaatcgctgcactacgggcattccctttaggggtagcatggtaaatatacctccggcacgttcggttagcctaggatcttgatccatggttgctctcatatccgatccccagggtgtggtcagggtaacttctctatgtctacagtcaattattcctctatgctttgctaaccaatccatacccaaaatgacatcaagagtttggggtattagcaccataagattgtagagaaataccacatccctaaggcggatgggtacgtcaatgcaagctgtatccactgctatctcaaccccaggtgaatgtactaacattggttgtcttagtttaactctggttaaattgtgttgttgacttgctttcaaagatataaatgaatgcgatgctcctgaatcgaagagaactttaactggagtggagttgagtgaaaacatacccatcagtacgccttggtcttcctgggcctcttcagctcgaacgtggttcacttgcccgcgtccaaatccggtagcggtcctgttagtctgcggagtcctgaatagacctcgtccagcagcaggggtagcagtcccgtgaatagccgttgcattagctccggtgcgaatgggtgtcttgtttggatgaggacatttattggcgaaatgctcgtactctccacagttgaaacagcttcctgtccttactgatccagtggcggcctgattcggtgcaggagctcggttctgaatggtaaccgacctgtggaaattgctggaggcggcaggtcgactggttgtcaccactgttggtctccatgccgaggaggttgtccctttaggacgctggggtgcggtctgaggcgagcggttcatggcaagcctccttttacgattgtgctccacgaccttccggtcgttctccagcctaacgaccttattgattaaactctggaaactatcgtgatcttgtccaatcatgggcccgcgtaactcgtcattcaagccttcaatgaatttgtcgatcttttcctcctcgtcggcaagatctctagtcgcgtagcgcgctagctgagtgaaacggttcaggtactcttgtactgtggtattccctttccgtagtctcctgaactcattcttcttcatccgcatcaccgcggcaggcacgaagttgtcacggaaggctgtggtaaattcctcccagtttggttctccagcatcttcttctcgggcttctttgtacgtgtcccaccagtctccggctggtccttccaattggtttgccgcaaagatcactttattggcctcacgtactcgaacaagagttagcttcttctcaatgatccttaaccaatcttcagcatccataggttcttcagctgtggcgaatgtgggtggcttggtcctcataaactctccaaagcttgaccctccgcggttgccttggttgttcgcgatagcttgcagaagttgagtttgggtggccataactccggccagagtggttaagtcgggtgtctgagtttcgtcattgctggttgttgcccgacgtcggcttgccat

SEQ ID NO: 23198 - DNA, 5181 bp, Oryza sativa
  Clone ID: TF_OsC154683_1
gtgcttatacattggtctgatgatgtgatcgccaatgcaacttgggaagacttggaagatcttcgtactcgtttcccaagagcactggcttgggggcaatccagttttcaaggggggaacattgtcaaggctgcgttgggtgctgatgctgacattgccaaggaggagaagatcgaagggagagttctgaatcctagtttaggcagctatcatgagggcgagagggtggcaccattccacgatggcagcagcacctctgcacgaaggcgacaacgacaacacatgggagaggaccggggattaaccactgatgaggacattgaggtgcttaccacgatagagaggtggcagcaatgccgggtggttgacaacaagttgatggcgatggtggatggcttgatggaagacggcgcaggaagtggggaagacgacagaggtggatggcataacagtgctgcgccattcgctgctcgtgcttgcgatgacagcggcaacattggtgctcactcgatcggactgcaacacaaccgcgtctactcgatgtcccgaggcaggaacctaggccggattatagtgagcagcaatagcagcaagacatggaacggtggtctgcaaagggaaaaggagggggtgctggatctacttatagaggaggacagggagttgagcggccagccggaagatgctcaaggtctgtgggatgctgtcgacaccggcgatgtcccgtatcaggaagattgccaggcgctttcagccatcttgcgagcggtgccggctgagatggtccggccgcttgccgagaaggacagcgccaaagacgcctgggatgcgctcaaatccatgcgagtaggcgcagatcgtgttaaggagtcccgagcacagaagctgcgccaaacttttgagtccatgcgattcaagaatggcgaacacctggaggatttcagccttcgtctccagtccttggagatgatctgtctgaagagaaggttgtttgaaaattgcttcgcgtcgttccccggaggcgctgtccctcacgacgcaggaggtgggagaaaatccccggcgcagaggcggctggcagaggagaagacatggatgggagcaactctcaaaattcttgaagacaacaaaaacaatgctcgccaggagggcaaggcatgcagatttacaacacacgtcgacatcatggccgagtgtcgacgagatgaaatggccaatttatcaatatttgtgctatgtccgagaccgacgagtccggataacatattggctaaagctgacaaggctgcagtcattaactcattccatttgtctatgaccgacgaggtgctcttcagcgaaaaggaggcccctgctcactcaaacaaggaagctgggcagaactcagccggggggagggcgtccagctcacggcaaccacaccgcagcaggcgcgagcgcgacggcaacggctccgacggcaagtcaggttcgtcccaagcggcaaaccgcaatgtgtccaaggacaaatgccggtactgtggcaaacttggtcactgggccaaggactgttgcaaggcgaagcgagaccgcgagaaactggctcaggcaaaccttctcatcaccgagcctgctcaagccgcggacgaaggggagccgacactgctgatggcgcaagtgtgcgagcttgcccctgctaccgatcctgtcattactgacggggaggtgacactgaaggaggaacgtgctcacgtttctcttcaggatgaaggaaagcccgttgatctagactggatccttgacacgggcgcttcaaatcacatgacgggctcccgtgatgccttctccgagcttcacaccaccgtgcgcggcactgtcaagtttggtgatgcgtcgagagtccggattgaaggacgaggcacggtgctgttcgcctgcaagaacggcgaccactgcgcgctcactggcgtctactacatccccaagcttcggagcaacatggtcagccttggccagcttgatgaggcacgttgcaagacggtgatcgaggatggcgttctcactctgcgtgattcacagcgacggctgctgtgtagggtgcgccgaggaactgggtgcctctatgttctccacgtcgagctggcgcaaccggtttcccttctcgcaaaggggaacgatcaagcctgggtctggcacgccagatacgggcacctcaacttcgacgcactccgctcactggcgagccgcggcatggcgcgcgacattcccactctggagcgggtcacccaggtctgcgatggctgtctaataggcaaacagcgacgagcgccgttcccaacagcggcgttgcatcgcgccactggtcgtcttgatctggtgcacggggacatctgtggacccatcacgccgtcgacacatggcggagtggaggtggagaccggctgcaagctgcgcgttctccgcactgatcgaggaggcgaattcacctctgtcgagttcgggctatactgcgcgaacgaaggcgtcgctaggcagttgatggcgccgtactctccacagcaaaacggcgtcgtcgagcgccgcaaccagacggttgtggcaatggccagatgcatgatgaaggccaagaacatgccgggggagttctggggcgaggcggtcacaactgccgtctacatcctcaaccaggcgccgacaaagagcgtccgcgacaaaacaccattcgaggcgtggcacggtcgtacacctgctgtgcactactttcgcacatttggctgcatagtctacgtcaaggaggtgaaaccacacatcaacaaacttgatgatcggagcaaggcgatggtctttctcggctacgagccgggttccaaggcgtatcgtatctacgacccggtggccaagcgcatcgtcgtgagccacgatgccgtgtttgacaaggcagcgtcgtggccatgggcgtcacccggggaggaggatggggtggcgtcttctcaggaaaccttcaccgttcgctacgaggtagcggcggtggaagtgccgtcccgccactccgactccatgtcgtcgccggctcactcgggaccaccggcgccatcaatctctgcatcaccgggcgtcccagcggtcgagttcgtgtcgccgcctgcggaaacgcctgatgtcgacgacgacaacgtagggccacgtcgtttccggacggtggctaacatcctcgacactacctcgccaattgagctcgattccgacgagcttcatctggctgctgccgaggaaccaagtaaccacactgaggcggcacaggacacactctggcagcgagcgatgcaggaggaactaaagtccatcgtggagaacaacacgtggactctcgctgacctccctgctggcaagcgtcccattggcttgaagtgggtgttcaagctcaagaaggacgagacgggcgtaattgtcaagcacaaggcccgactggtcgctaagggttacgttcagcagcaggggattgatttcgacgaagtattcgcccctgtcgccagaatggaatccgtgcggttgctactcgccattgcagctcaccttgggtggtttgtgcatcacatggacgtgaagtcagccttcctgaacggagagctggaggaggaggtgtatgtcgcccagccaccaggtttcgtcgacgacaagcacccacatcaagtcctgcgcctgaacagagcactttatggcctgcgtcaagctcctcgtgcctggaacgcgaagctggatgttagtcttcatgaactcgggttcacgcggggcatcacagaacatgctgtgtacacgcgcgggaccgggaacgcgcggctaatcgtcggcgtctacgtcgacgatctcatcatcaccggcgctcactctgaaacaattcaaagtttcaagggggagatgcactccctattccggatgagtgatcttggattactcagctactacctcggcattgaggttcatcaaggcaacgatgggatcacaataaatcaatccacttacgcgcagaagctcttgaagatgggtggcctggcgggatgcaattcagcttgcgttccaatggaacccagattgaaactgacgaagaatagcgatcgaccaagtgttgattcaaccttttatcgcagcttagtggggagtctgcggtacttggtgcattcacggccggacattgctttcgctgtgggctacttcagccgtttcatggagtcgccgcgcgatgatcatctcacggcggtgaagcacattctgcgctatgttgcaggtactgtgaactacggttgcaagtttgcacattcaggagaagaggggatccatttgctgggattttccgacagtgatttggggggagatgtggacgatcggaagagtacctctggtgctctcttcttcctcggctcaagcccggttgcttggctgtcccagagcaagctcccgctgtcgtcgtccatcaccacaagcagcagcaagttgtatacgccctcctgttcgtcttcaacagcatcagcaagtcggggcccccaggccgccgtcgatcgctgtacgccccgcgccgatctccgcccgcatgcgccgtcgccccgccagtttcggagttcggacgcgtcggcactccgcccgccgtcgcccctcttcgcccgcatgcgccattgccccactccgcccgttgccgccccgccggcttcgcgcgcgtcgctgctccgcccgccgtcgccccgcttcgccctccgtccaagatggactgtttcttttcatcgacgtggcgtcaaggaggagaggacgatactgaaggggataaccgacaaggtgaggccgtgggaggtgctggctgtactgggaccatcggggagaggcaagtcgacgctggtctccatcctcggcgggcggctcgccggccggcacgccgggatggtgctggcaggcgggcgcgcgccgtgccgtgccgtgcagcggcgcgcggggttcgtggcgcaggacgacgtgctccacccccacctcaccgtctgcgagacgctcctcttctgcgccatgctccgcctcccgacctccgcgcccgccaccgccgaggccgccaccgccgaggccgtcatctccgagctcggcctcgcgtcgtgcgccgacaccatcgtcggcaacgccggcatttgtgcctacctgagtgctaagtatatggtgattctctga

SEQ ID NO: 23199 - DNA, 4851 bp, Oryza sativa; identical to SEQ ID NO: 14405
  Clone ID: TF_OsC91_2278

SEQ ID NO: 23200 - DNA, 2216 bp, Oryza sativa; identical to SEQ ID NO: 14406
  Clone ID: TF_OsC1713_4158

SEQ ID NO: 23201 - DNA, 4572 bp, Oryza sativa; identical to SEQ ID NO: 14412
  Clone ID: TF_OsC359_6842

SEQ ID NO: 23202 - DNA, 1248 bp, Oryza sativa; identical to SEQ ID NO: 14410
  Clone ID: TF_OsC359_7631

SEQ ID NO: 23203 - DNA, 3918 bp, Oryza sativa; identical to SEQ ID NO: 14417
  Clone ID: TF_OsC1528_1733

SEQ ID NO: 23204 - DNA, 3067 bp, Oryza sativa
  Clone ID: TF_OsC783_2
ttaagtgctaattcgtggaggtggagggagacacttccgagatgggcctagtctattacaaggcccaaggcccaagttcggtttcagcaacatcactgtcttgttttgacgattcccgttgactcgagatgaatttggacatgagaccggatgcgtttgaaaggtagcgagataacctttccatcaagtccaagatcacccaaatcggagttggcatgaaggcgctaggtccgtttgaagtcagtgctgtctccggaggccgaactggacttggacttggaattatcattggaacgtgtgaagttatgtgcgtttccgacgaagtgatgtcctcatcatcctccccttcttgaattggagtcgtcctcgactcaatcccatcttcttgatcgtgttcactctgtcgtccaggggtcatccttggaggtatctcatcatgaaaagcaccctcatattccttcatcttaccacatgtattaaaccactgaatatgatacggatgtggatgtggatgggtagtcaagccaagcttcttgaccatctcttcacttgctaaattgttgcaactcccgctatcaataatcactttgacggtatggcctttcacaagaactttgctttggaataaattgtggcgttggttttgctcttcacacttctctttagcactaagtgctagcttgacaattaggctaggatactgatctagcgactctggatgcaaatggacttcctcgatgtcatcgttatcttgtcctcctacatggtcagtggcaactaaagcatattcatcatcacaatcactagtagaagtatactcaccatcatcattcacaaatagagctcgctgatttggatagtcgcgggcaatgtgtccaatgccatggcacctatgacatgtaatatcacgggtacgtccagtggaagctaccgaagttgcactcttggctggagtctgaactgaagcatttttgcttgtttcttgagcatgggatggcgtggaggtaggtggacgaacggccgtagtaaattgacgtggtgttgattgtcgtgtggaagtagcacctgcaaaagaactcctatgcttgttgcgtccctgcacttctctttcagctttgcaagcaaattggaataatctattcacggtattgtattctttgtattcaagaataccccgcatctccaccaaaatgataacaatccggcctaggtggggttggccgaggcccaacaaattaaggttgcctggactcaaacagttcttaggcacactaaggttagcgctcgacttttgcgtctttgccagtgggtaatagtagaggatgtcctcatcaagctggtggacagcatgatcaagatgctgtgcaccaatggcgtctggtggctggaggacctgcaggacctcctcgcctgctacctctcgctcaacgccgccgagcaccaccgcaccatcgtcgcactcttccgccgcgtcatcctcgtctgaatccaccttagcagcagaggcttcttcccagccaaaggcttcttgctgacgcggtgcagcctcctgccgaccgcccgtccccgcactcgtcctcgccgtgcgcgcttggctcttcccttggacttcatagtttgtcttagatttcgtgaagatagctttagcattttcccttctaggtgtattcatgttttcgaagatccccgtcaggccgtaagcgatggcgcagaagggcagcgcttcaggctccttggccgacagcgctgctgttcccagtccatgagcactggaagccgtccctattcctcgcgcgatggggtcgttgaggccaagcttgtccatggctgcttgcacaaaatttgcgccgatcagcccggtgaggacgacgaccgcagcggttagcgaagaatttacaccttcaaagaaagacacgatgctcagagccaacgccacggttatgcacctcggtaatattgatatggtcagtgaaggctctagccctatcacccgtcctaggatggcagttgagtataacgagaatgttgatgcgatggcaattgatgtgaaaatttccgctgcatgcctcttcacaagctttctctgcttgaacattgagaatgcaaacgatatgatgactgaaccaagaaatcccatcaggacgtcaccagctccaggattagatggcgcctttgtgaggtaatcacctagcactgcatcaactccagaccgggagagatacccatatgctattgctgccaaatctgcagagagtgcacaacaaatgattgggtgaagcactttcttgacaccagatggtatcccagaaccaaccatgtatcccagtacagttgaagcgaggaggaaaggaagacatgttcttgccgtggtgccaagcgctgtggggttaacatacgcaacagcaaacgatgcgacaaagacagcaccccaggcccagaattccagcgtcgcgaacggagacggcttgctcatcggctcagctggtataagctgtgtctggacaatcttcctcacggtgagtgctgtgtatccggccaccatgagtgaagcaaaccagccaccaaaaatgatgaggaagatcttgaggccggaagcagccgggacgtccctgacggcgagcggcaggacgaccagggaagggacgtagaagaggggcagccacctctggatgaagagggtggccggctcgaagaagtccatgaaccccttggcgagcgcgggcgcgaaggcgtcgaggacgacgaggacggagaagacgcagaacatgccgaagagggcgctggggaacttgatggacgccgccgcgaacgcctgcttcaggaagcatgtcagttcgatcggcaggtcatgcgaaatcgcgacgaggctgcgtgcattttgactgattgacgactcacgctgggtaggcccgagggagaggtggcgcccgcgcctcctcctcctcctccggcggcggcggcggcgtggatcggggcgatgaggcggtggcgaggattggcgggagccatggagattgccgccgcttggcgggaggaggaggaggaggaggaggggttgcgtcggcat

SEQ ID NO: 23205 - DNA, 4188 bp, Oryza sativa; identical to SEQ ID NO: 14421
  Clone ID: TF_OsC1713_3518

SEQ ID NO: 23206 - DNA, 2919 bp, Oryza sativa
  Clone ID: TF_OsC1713_3822
atgcctgtccccgtctacgccgccgccgccatgctgccgccgtcgccgtgcccgtctcttgccgccgccgtcctcgtctacaagggatggctgcaaggggccgaccgcgcatgtcggggtgctcctcccgcaatgggatgcccagctatatctagtaggaatcacctgatacctggtaggtatcatccgatacctcgcaagtatcacgcgatacatggtagaaatcgtctgatacctgacaagtatcacatgatacctcgcgagaatcacgcgatacgtggtagaaatcgtttgatacatgacaggtttcacatgatacctcgcgagtatcacgcgatacgtggtagaaatcgcatgatacctgataagtatcacctgaaacgtggctactccttgatgggttgcattaaagatattccgaccctaaaagaagataactacgcacaatggaaaagaaaactcaaccttgctttcatcttgggagaggtggactgggtgttgactaccccatgtcctatagaacctgctgcacttgtcagaggtgaaaataagtcagatgctgactggaaaaagagacagagggacaatgctcctctcgtcatgtcgtatgacattgaacaaaagacatggtccttagccaacaagaaatgtttggctgtggtaaagaatacgattgagccaactatattgggctcaatcctagagtgtgacgctgtctcagagtaccttgaaagaacaaagagtcagtttactggctcttcaaagacttatgctacacagctgatcaagcagcttgtgacagaaaggtaccatggaggtggtgttagagaccacatacttagaatgagcaacatggcttccaagttgaagccaatggatttgggcataacatatgactttctggtccatcttgttatggcctcatttccaaagcagtttgacaattttattgtcaactacaacataagtccagagaaatggaactttgagaagctcattgctaattgtgtgcaagaggaggagagaatcaaagagtcaaatggtggttcaattaactatgttaaagataagaaaaagaactacaagtctcccacctcaaaagctaaacagtctcaacatctgcctcagcaacaacagttcgctgttgagaaagatcagtgtctccactgcaagaagacaggacattacaagaaagactgtcctgacttcttgaaaatgatcatggcaaggaaaggtgagaacattattacatttgtaaatgaatctcattatgttggttactctagatccacatggtggattgattctggagcaactattcatgcttgtaattgtttaaaggcattccgttcgacaaggactacgcaaagaagagaaagctccattagagttgccaatggagttgaagaaaaagttgaagctgttggagatcttcctctagagattgcgaatggcttcacacttttacttcgagatgtcttttatgttccttctttgcaaagaaacttaataagtgtatcaaagttggattttgatggatatgattgccgctttggaagtggcaaatgtgaactatgtgtggatggctatgactcgttcataacattcacagatgattactcccgctatggttatatttatacaattaaagagcgatcagaagcattggataaatttaagatattcaaagctgaagatgaaaatcagcatgatataaagattaaagtagtaagatctgaccgtgggggggagtactatggtcgacatacgccttatgggcaagtccctggaccttttgcaaggttcttgctagagaatggaatagtagcccagtattcaacaccgggcgaacctcaacagaatggggtagctgaaaggcgtaaccgtacccttatgtatatggtgcgcagcatgatgagctactccacactaccactgggtttatggatggaggcgttaaaaaccgctattcatattctcaacagagttccaagcaaatcggtgaccaaaacaccgtatgagctatggataggaagagtaccctcgctagctcacctccgtgtgtgggggagtcctgtacaaacacctgttgttacctctcctgtggcaacaataaatgaaaatgaggaacctgttatacaagattcaatagaaatggttgccacaccagaggaggagctgcaacagcctcaaacagataatgtgccagtacaggagactcaacaagagcctcaggatgatcccacctcatatgaagaggccatgagaagcgctcgcttgtctgaatggttggaagccatgaaagatgaaatgaaatcaatgaaactaaacgatgtttgggatttagaagaaattcctaaaggagcgaaaatagtaggctatggatgtaaaaacgacatttctaaatggagatttggaggaaaaagtatacatggcgcaaccgaaaggttttgtcatgaaaggaaacgaaaatatgggatgccgtctaaaagatccatttatggattaaagcaagcttcgagacagtggtacttgaagtttgatgggacaataaagaaatttgggtttcaagagaatgtcgaggacaactgtatttattcaaagtttaagaatgggagatttattttcctaattctgtatgtggatgacattctactggctagtagtgatgtcagtctactgcaggaaacaaagaaattcttgtcctcaaactttgacatgaaagatctcggtgaagcttcatatgttttgggcatagagattcaccgagataaaacaaagtatgcattgggactttctcaaaagacatatagaaaaggtgttgaagaaattcaacatgaacagatgcagtgctacacctgctcctatagtcaaaggggaaaagtatggggcatcgcaatgtcccagaaatcaatatga

SEQ ID NO: 23207 - DNA, 4173 bp, Oryza sativa; identical to SEQ ID NO: 14425
  Clone ID: TF_OsC1713_4196

SEQ ID NO: 23208 - DNA, 3447 bp, Oryza sativa; identical to SEQ ID NO: 14427
  Clone ID: TF_OsC1713_4332

SEQ ID NO: 23209 - DNA, 4224 bp, Oryza sativa; identical to SEQ ID NO: 14437
  Clone ID: TF_OsC1713_4463

SEQ ID NO: 23210 - DNA, 4176 bp, Oryza sativa
  Clone ID: TF_OsC1713_4855
atggtcgccttcccttccctaacccctctatgctctctcctagggtgccgccgccgcccgttcgcgcctcggcatcaccagtcgtcgccgccgttttcttccttcgcgccggccgccgtgttcgccggtggctactccttgatgggttgcattaaagatattccgaccctaaaaggagataactacgcagaatggaaaagaaaactcgaccttgcttttatcttgggagaggtggactgggtattgactaccccatgtcctatagaacctgctgaacttgtcagaggtgaaaatgagtcagatgctgactggcaaaagagacagagggacaatgctcctctcgtcatgtcgtatgacattgaacaaaagaaatggtccttagccaacaagaaatgtttggctgtggtaaagaatacgattgagcctaccatattgggctcgatcccagagtgtgacgctgtctcagagtaccttgaaagaataaagagtcagtttactggctcttcaaagacttatgctacacagctgatcaagcagcttgtgacagaaaggtaccatggaggtggtgttagagaccacatacttagaatgagcaacatggcttccaagttgaagccaatggatttgggcataacagatgactttctggtccatctggttatggcctcattgccaaagcagtttgacaattttattgtcaactacaacataagtccagagaaatggaactttgagaagctcattgctaattgtgtgcaagaggaggagagaatcaaagaatcaaatggtggttcaataaactatgttaaagataagaaaaagaaccacaagtctcccacctcaaaaggtaaacagtctcagcatctgcctcagcaacaacagttcgctgttgagaaagatcaatgtctccactgcaagaagacaggacactacaagaaagattgtcctgactttctgaaaatgatcatggcaaagaaaggtgagaacattattacatttgtaaatgaatctcattatgttggttactctagatccacatggtggattgattctggagcaactattcatgcttgtaattgtttaaaggcattccgttcgacgaggactacgcaaggaagagaaagctccattagagttgccaatggagttgaagaaaaagttgaagctgttggagatcttccgctagagctcgcgaatggcttcacacttttacttcgagatgtcttttatgttccttctttgcaaagaaacttaataagtgtatcaaagttggattttgatggatatgattgccgctttggaagtggcaaatgtgaactatggcataataatgcatgtattggtcttgctgtgttgcgagacgagctttatttgttatctctttctgagaatgtgaatgttgtgtcctcgttgacaaaagaaaacaagaaaagaaagcgaacttccaatgtctcatcgaaattatggcactgtcgtttgggccatatttcgagggggagaattgagagactagttaagaatgaaattctttccccattggagttctcagacttagaacaatgcatagaatgcattaaaggaaaatttgtaaagagcatcaaaaagggtgcaaaacgaagcgcaggaattttagagatcattcatacagatatttgtggtccatttcctgtgaaaagtatggatggctatgactcgttcataacattcacagatgattactcccgctatggttatatttatccaattaaagagcgatcagaagcactggataaatttaagatattcaaagctgaagttgaaaatcagcatgatataaagattaaagtaaatggggtagctgaaaggcgcaaccgtacccttatggatatggtgcgcagcatgatgagctactccacactaccactcggtttatggatggaggcgttaaaaaccgccattcatattctcaacagagttccaagcaaatcggtgcccaaaacaccgtatgagctatggacaggaagagtaccctcgctaactcacctccgtgtgtgggggagtcctacagaggccaaagtatttaacccaaatattgggaagttggaccccaaaacagtcagctgccattttattggctatcctgaaagatcaaaaggctatcgtttctactgtccaaacagttatacaaagtttgtagaaacgagacacgccgtcttcttggaagacgaaatgattagggggagctcggtagttcgagaaattgatcttgaggagaggcgggtgtctgtacccgctccgtcgactcaggaacctttcttctctctacctgctgatgttgtgcctgcaatgcctgtcattgaggtaccagcacctgttgttacccctcctgtggcaacaatgaatgagagtgaggaacctgttatacaggattcaacagaaatggttgccacaccagaggaggagctacaacagcctcaaatagataatgtgccagtacaggagactcatcaagagcctcaggtacaggatgtggcaaatgtgcaggcccctagaaggtctgaaagagtcagaagatcggctatccgtgatgactataaagtttataatatagaagagtcgcatatggaggatgatcccacctcatatgaagaggccatgagaagcgctcgctcatctgaatggttggaagccatgaaagatgaaatgaaatcaatgaaactaaacgatgtttgggatttagaagaaattcctaaaggagccaaaacagtaggctgtaaatgggtctacaaaaccaaatatgactccagagggaatatagaaaagtttaaagcgcgacttgtggcaaaaggcttcacgcaacgagaagggattgattacaatgagacattttctccagtctcttgtaaagattccttcaggattataatggcactagtggcacattatgatttggaattacatcagatggatgtaaaaacggcatttctaaatggagatttggaggaaaaagtatacatggcgcaaccgaaaggttttttcatgaaaggaaacgaaaatatgggatgtcgtctaaagagatccatttatggattaaagcaagcttcgagacagtggtacttgaagtttgatgggacaataaaaaaatttgggtttcaagagaatgtcgaggacaactgtatttattcaaagtttaagaatgggagatttattttcctaattctgtatgtggatgacattctactggctagtagtgatgtcagtctactgcaggaaacaaagaaattcttgtccacaaactttgacatgaaagacctcggtgaggcttcatatgttttgggcatagagattcaccgagatagaacaaagtatgcattgggactttctcaaaagacatatatagaaaaggtgttgaagaaattcaacatgtacagatgcagtgctacacctgctcctataatgaaaggcgaaaagtatggggcatcgcaatgtcccataaatcagtatgagctcaatgaaatgaaaacaaagccatatgtgtcagctgtaggaagcctacagtacgcgcaagtgtgcacacgacctgacttggcatttgttaccgggttacttggcagatttcagagtaatccaggcctagagcactggaaattggtaaagaaagtcttgcgttatttgcaaggaacaaaaggcctcatgctgacttacagaagatcagaatcactccagatagtggggtactcagattctgactttgcaaaagataatacaaagtcaacatcgggatacgtgtttaccctggcaggaggagctatttcatggaaaagctcaaaacagactatcactgcagggtctactatgtatgccgagtttatagcatgctatgaggcaacggggcaggtgaactggctaaagaagttcatacccggtttaaaggtggttgacagtattgagaaaccactaaagttatactgcgacaacgaacccgcagtaatgtacgctcacaacaatcagtcaagtggtgctgccaaacacattgacataaagtactatgttgtgaaggacaaagtccgggatcaaacaatcagtctcgagcacattaaaacagaaaggatgctcgcggatccgctcacgaaaggcctaccacccaacgtgttcaaggaacatgtagccggcatgggtttaagggaagccttatga

SEQ ID NO: 23211 - DNA, 4022 bp, Oryza sativa
  Clone ID: TF_OsC1713_5239
gtggctactccttgatgggttgcattaaagatattccgaccctaaaaggagataactacgcagaatggaaaagaaaactcgaccttgcttttatcttgggagaggtggactgggtattgactaccccatgtcctatagaacctgctgaccttgtcagaggtgaaaagtgtgacgctgtctcagagtaccttgaaagaataaagagtcagtttactggctcttcaaagacttatgctacacagctgatcaagcagcttgtgacagaaaggtacaatggaggtggtgttagagaccacatacttagaatgagcaacatggcttccaagttgaagccaatggatttgggcataacagatgactttctggtccatctggttatggcctcattgccaaagcagtttgacaattttattgtcaactacaacataagtccagagaaatggaactttgagaagctcattgctaattgtgtgcaagaggaggagagaatcaaagaatcaaatggtggttcaataaactatgttaaagataagaaaaagaaccacaagtctcccacctcaaaaggtaaacagtctcagcatctgcctcagcaacaacagttcgctgttgagaaagatcaatgtctccactgcaagaagacaggacactacaagaaagattgtcctgactttttgaaaatgatcatggcaaagaaaggtgagaacattattacatttgtaaatgaatctcattatgttggttactctagatccacatggtggattgattctggagcaactattcatgcttgtaattgtttaaaggcattccgttcgacgaggactacgcaaagaagagaaagcaccattagagttgccaatggagttgaagaaaaagttgaagctgttggagatcttcctctagagctcgcgaatggcttcatacttttacttcgagatgtcttttatgttccttctttgcaaagaaacttaataagtgtatcaaagttggattttgatggatatgattgccgctttggaagtggcaaatgtgaactatggcataataatgcatgtattggtcttgctgtgttgcgagacgagctttatttgttatctctttctgagaatgtgaatgttgtgttctcattgacaaaagaaaacaagaaaagaaagcgaactcccgatgtctcatcgaaattatggcactgtcgtttgggccatatttcgagggggagaattgagagactagttaagaatgaaattcttcctccattggagttctcagacttagaacaatgcatagaatgcattaaaggaaaatttgtaaagagcatcaaaaagggtgcaaaacgaagcgcaggaattttagagatcattcatacagatatttgtggtccatttcctgtgaaaagtgtggatggctatgactcgttcataacattcacagatgattactcccgctatggttatatttatccaattaaagagcgattagaagcactggataaatttaagatattcaaagctgaagttgaaaatcagcatgatataaagattaaagtagtaagatctgaccgtgggggggagtactatggtcgacatacgccttatgggcaagtccctggaccttttgcaaggttcttgctagagaatggaatagtagcccagtattcaacaccgggcgaacctcaacagaatggggtagctgaaaggcgcaaccgtacccttatggatatggtgcgcagcatgatgagctactccacactaccactcggtttatggatggaggcgttaaaaaccgccattcacattctcaacagagttccaagcaaatcggtgcccaaaacaccgtatgagctatggacaggaagagtaccctcgctaactcacctccgtgtgtgggggagtcctacagaggccaaagtatttaactcaaatattgggaagttggaccccaaaacagtcagctgccattttattagctatcctgaaagatcaaaaggctatcgtttctactatccaaacagttatacaaagtttgtagaaacgagacacgccgtcttcttggaagacgaaatgattagggggagctcggtagttcgagaaattgatcttgaggagaggcgggtgtctgtacccgctccgtcgactcaggaacctttcttctctctacctgctgatgttgtgcctgcaatgcctgtcattgaggtaccagcacctgttgttacccctcctgtcgcaacattgaatgagagtgaggaacctgttatacaggattcaacagaaatggttgccacaccagaggaggagctacaacagcctcaaataaataatgtgccagtacaggagactcatcaagagcctcaggtacaggatgtgccaaatgtgcaggcccctagaaggtctgaaagagtcagaagatcggctatccgtgatgactataaagtttataatatagaagagtcgcatatggaggatgatcccacttcatatgaagaggccatgagaagcgctcgctcatctgaatggttggaatccatgaaagatgaaatgaaatcaatgaaactaaacgatgtttgggatttagaagaaattcctaaaggagccaaaacagtaggctgtaaatgggtctacaaaaccaaatatgactccagagggaatatagaaaagtttaaagcgcgacttgtggcaaaaggcttcacgcaacgagaagggattgattacaatgagacattttctccagtctcttgtaaagattccttcaggattataatggcactagtggcacattatgatttggaattacatcagatggatgtaaaaacggcatttctaaatggagatttggaggaaaaagtatacatggcgcaaccgaaaggttttgtcatgaaaggaaacgaaaatatgggatgtcgtctaaagagatccatttatggattaaagcaagcttcgagacagtggtacttgaagtttgatgggacaataaagaaatttgggtttcaagagaatgtcgaggacaactgtatttattcaaagtttaagaatgggagatttattttcctaattctatatgtggatgacattctactggctagtagtgatgtcagtctactgcaggaaacaaagaaattcttatcctcaaactttgacatgaaagacctcggtgaggcttcatatgttttgggcatagagattcaccgagatagaacaaagtatgcattgggactttctcaaaagacatatatagaaaaggtgttgaagaaattcaacatgtacagatgcagtactacacctgctcctataatgaaaggcgaaaagtatggggcatcgcaatgtcccagaaatcagtatgagctcaatgaaatgaaaacaaagccatatgcgtcagctgtaggaagcctacagtatgcgcaagtgtgcacacgacctgacttggcatttgttaccgggttacttggcagatttcagagtaatccaggcctagagcactggaaattaataaagaaagtcttgcattatttgcaaggaacaaaaggcctcatgctgtcttacagaagatcagaatcactccagatagtggggtactcagattctgactttgcaaaagataatacaaagtcaacatcgggatacgtgtttaccctggcaggaggagctatttcatggaaaagctcaaaatagactatcactgcagggtctactatgtatgccgagtttatagcatgctatgagacaacggggcaggtgaactggctaaagaagttcatacccggtttaaaggtggttgatagtattgagaaaccactaaagttatactgcgacaacgaacccgcagtaatgtacgctcacaacaatcagtcaagtggtgctgccaaacacattgacataaagtactatattgtgaaggacaaagtccgggatcaaacaatcagtctcgagcacattaaaacagaaaggatgctcgcggatccgctcacgaaaggcctaccacccaacgtgttcaaggaacatgtagccggcatgggtttaagggaagcctta

SEQ ID NO: 23212 - DNA, 4440 bp, Oryza sativa
  Clone ID: TF_OsC1713_5492
atggcgggtgcagcgaaggcgtcgtggatggtggcgatgagcgtgggcgccgtggaggcgctcaaggaccagggcggactctgccgctggaactacgcgctgcggtccatccacaaagcagccaaggccaacgccgccggcgtctctcagggcaagaagctgcctgcttctgcggcggcggtggcggagaggaggagagcggagaaggccgaggaggggctgaggacggtcatgtacctcagctgctggggtcccaattgtggctactccttgatgggttgcattaaagatattccgaccctaaaaggagataactacgcagaatggaaaagaaaactcgaccttgcttttatcttgggagaggtggactgggtattgactaccccatgtcctatagaacctgctgaccttgtcagaggtgaaaatgagtcagatgctgactggcaaaagagacagagggacaatgctcctctcgtcatgtcgtatgacattgaacaaaagaaatggtccttagccaacaagaaatgtttggctgtggtaaagaatacgattgagcctaccatattgggctcgatcccagagtgtgacgctgtctcagagtaccttgaaagaataaagagtcagtttactggctcttcaaagacttatgctacacagctgatcaagcagcttgtgacagaaaggtaccatggaggtggtgttagagaccacatacttagaatgagcaacatggcttccaaattgaagccaatggatttgggcataacagatgactttctggtccatctggttatggcctcattgccaaagcagtttgacaattttattgtcaactacaacataagtccagagaaatggaactttgagaagctcattgctaattgtgtgcaagaggaggagagaatcaaagaatcaaatggtggttcaataaactatgttaaagataagaaaaagaaccacaagtctcccacctcaaaaggtaaacagtctcagcatctgcctcaacaacaacagttcgctgttgagaaagatcaatgtctccactgcaagaagacaggacactacaagaaagattgtcctgactttttgaaaatgatcatggcaaagaaaggtgagaacattattacatttgtaaatgaatctcattatgttggttactctagatccacatggtggattgattctggagcaactattcatgcttgtaattgtttaaaggcattccgttcgacgaggactacgcaaagaagagaaagcaccattagagttgccaatggagttgaagaaaaagttgaagctgttggagatcttcctctagagctcgcgaatggcttcatacttttacttcgagatgtcttttatgttccttctttgcaaaggaacttaataagtgtatcaaagttggattttgatggatatgattgccgctttggaagtggcaaatgtgaactatggcataataatgcatgtattggtcttgctgtgttgcgagacgagctttatttgttatctctttctgagaatgtgaatgttgtgtcctcgttgacaaaagaaaacaagaaaagaaagcgaactcccgatgtctcatcgaaattatggcactgtcgtttgggccatatttcgagggggagaattgagagactagttaagaatgaaattcttcctccattggagttctcagacttagaacaatgcatagaatgcattaaaggaaaatttgtaaagagcatcaaaaagggtgcaaaacgaagcgcgggaattttagagatcattcatacagatatttgtggtccatttcctgtgaaaagtgtggatggctatgactcgttcataacattcacagatgattactcccgctatggttatatttatccaattaaagagcgatcagaagcactggataaatttaagatattcaaagctgaagttgaaaatcagcatgatataaagattaaagtagtaagatctgaccgtgggggggagtactatggtcgacatacgccttatgggcaagtccctggaccttttgcaaggttcttgctagagaatggaatagtagcccagtattcaacaccgggcgaacctcaacagaatggggtagctgaaaggcgcaaccgtacccttatggatatggtgcgcagcatgatgagctactccacactaccactcggtttatggatggaggcgttaaaaaccgccattcatattctcaacagagttccaagcaaatcggtgcccaaaacaccgtatgagctatggacagggagagtaccctcgctaactcacctccgtgtgtgggggagtcctgcagaggccaaagtatttaacccaaatattgggaagttggaccccaaaacagtcagttgccattttattggctatcctgaaagatcaaaaggctatcgtttctactgtccaaacagttatacaaagtttgtagaaacgagacacgccgtcttcttggaagacgaaatgattagggggagctcggtagttcgagaaattgatcttgaggagaggcgggtgtctgtacccgctccgtcgactcaggaacctttcttctctctacctgctgatgttgtgcctgcaatgcctgtcattgaggtaccagcacctgttgttacccctcctgtggcaacaatgaatgagagtgaggaacctgttatacaggattcaacagaaatggttgccacaccagaggaggagctacaacagcctcaaatagataatgtgccagtacaggagactcatcaagagcctcaggtacaggatgtgccaaatgtgcaggcccctagaaggtctgaaagagtcagaagatcggctatccgtgatgactataaagtttataatatagaagagtcgcatatggaggatgatcccacctcatatgaagaggccatgagaagcgctcgctcatctgaatggttggaagccatgaaagatgaaatgaaatcaatgaaactaaacgatgtttgggatttagaagaaattcctaaaggagccaaaacagtaggctgtaaatgggtctacaaaaccaaatatgactccagagggaatatagaaaagtttaaagcgcgacttgtggcaaaaggcttcacgcaacgagaagggattgattacaatgagacattttctccagtctcttgtaaagattccttcaggattataatggcactagtggcacattatgatttggaattacatcagatggatgtaaaaacggcatttctaaatggagatttggaggaaaaagtatacatggcgcaaccgaaaggttttgtcatgaaaggaaacgaaaatatgggatgtcgtctaaagagatccatttatggattaaagcaagcttcgagacagtggtacttgaagtttgatgggacaataaagaaatttgggtttcaagagaatgtcgaggacaactgtatttattcaaagtttaagaatgggagatttattttcctaattctgtatgtggatgacattctactggctagtagtgatgtcagtctactgcaggaaacaaagaaattcttgtcctcaaactttgacatgaaagacctcggtgaggcttcatatgttttgggcatagagattcaccgagatagaacaaagtatgcattgggactttctcaaaagacatatatagaaaaggtgttgaagaaattcaacatgtacagatgcagtgctacacctgctcctataatgaaaggcgaaaagtatggggcatcgcaatgtcccagaaatcagtatgagctcaatgaaatgaaaacaaagccatatgcgtcagctgtaggaagcctacagtacgcgcaagtgtgcacacgacctgacttggcatttgttaccgggttacttggcagatttcagagtaatccaggcctagagcactggaaattggtaaagaaagtcttgcgttatttgcaaggaacaaaaggcctcatgctgtcttacagaagatcagaatcactccagatagtggggtactcagattctgactttgcaaaagataatacaaagtcaacatcgggatacgtgtttaccctggcaggaggagctatttcatggaaaagctcaaaacagactatcactgcagggtctactatgtatgccgagtttatagcatgctatgaggcaacggggcaggtgaactggctaaagaagttcatacccggtttaaaggtggttgacagtattgagaaaccactaaagttatactgcgacaacgaacccgcagtaatgtacgctcacaacaatcagtcaagtggtgctgccaaacacattgacataaagtactatgttgtgaaggacaaagtccgggatcaaacaatcagtctcgagcacattaaaacagaaaggatgctcgcggatccgctcacgaaaggcctaccacccaacgtgttcaaggaacatgtagccggcatgggtttaagggaagccttatga

SEQ ID NO: 23213 - DNA, 2717 bp, Oryza sativa
  unsure (1)..(2717): unsure at all n locations
  Clone ID: TF_OsC1713_5587
aatgcgaatcgatgcaaccaccactgtactgattactgattagtaaaattacaatttgcagattagcagcagttcgcgatgataatatacatgcaaggatggaaggatcagagtagagagagagaagaggagattggaagtccggattacttccgtgtaataatcatacaattgattaatgctacagaaagcatttcccgcgcgcgcgaaatgcatgcaacaaaattacagcccaatgggggagaagggctagtgtacacagcggctttggttgcgatcgatcagaaggtcggcacgacgccgtcgacgccgtagtcggcgtcggagccgccgggcgccatgagcgcggcgacggcggccgcggcggaggagtacatctcctcgtcctcgccgtcggcgtcggcgtccgcgtcggcgtccgcgcccgcgccgcccttggtgcgcttggcgaagcggcccttgatgcgcggccgcgtctccgcgtacgccttgcgggacgcgtaccggatggtcttctcgaaccgccggctcttgcgcttctccctgtaccgcatcagccgcgcctcccgctcccgccccctgctcaccaccggcatcggagcgccgccgcccgccgccgcgtccggcaccaccgccgcctccgaggatgatacgctgtggttcatggagtggtcggagtagaagagcttgccgccggtgatgtcgagctcgggcggaccgttctggacgccgatggccttgatgtcgtccatggagcgcgcgaagtcgaggtcgaggtaagggtcggagtcggcgtagagctcgtcggttgcaccgacggcgccatctttctgcccgtggtcgggctcggggaggagccacgacgcggcctcggcgtcgttgctcccgtcatcgtcggccgccgccgcgtcgccgccgtgggcaccggaacccggcttgggcgcgtcggcgagcgcgccgaagaagggcgcgacggggagccgctcgtggcggcgcgcgagcgggttggcggagtggatgtcggcgtcgcaggcggcgcagagcgcggcggcgtcggccctgcacgtgaccgccgcgggcgcgtgctcgcagacctcgcagagccacacccgcgcgtggcgcgacccgggcccgtgcgcccgcgcgtcgcacccggcgcagaggaacgccgcgtcggcgcggcagaacagccgcgccgcctccccgccgcacgcgtcgcacgccctcgccgccagcccccagtacgcccctcccaccaccgccgacttgtcgtccccctccatggccacaccacctcactcactctcagtctctcactcgcgctagcggcggccgcgagctagaaggcgaggcgaggcgaatctcagccaagctttcctagctgacgcagccatttccgcaatggcagaaatcggtgtacgatctacctattctcctccgcatacaggtaaacagacggctagacttcatgataattcatgctaatgttgggaggggcaatccactatgctcagctcatggatcttcaggaatggagctgccagcatataaatgacaaacaaatacaaggtggctactccttgatgggttgcattaaagatattccgaccctaaaaggagataactacgcagaatggaaaagaaaactcgaccttgcttttatcttgggagaggtggactgggtattgactaccccatgtcctatagaacctgctgaccttgtcagaggtgaaaatgagtcagatgctgactggcaaaagagacagagggacaatgctcctctcgtcatgtcgtatgacattgaacaaaagaaatggtccttagccaacaagaaatgtttggctgtggtaaagaatacgattgagcctaccatattgggctcgatcccagagtgtgacgctgtctcagagtaccttgaaagaataaagagtcagtttactggctcttcaaagacttatgctacacagctgatcaagcagcttgtgacagaaaggtacaatggaggtggtgttagagaccacatacttagaatgagcaacatggcttccaagttgaagccaatggatttgggcataacagatgactttctggtccatctggttatggcctcattgccaaagcagtttgacaattttattgtcaactacaacataagtccagagaaatggaactttgagaagctcattgctaattgtgtgcaagaggaggagagaatcaaagaatcaaatggtggttcaataaactatgttaaagataagaaaaagaaccacaagtctcccacctcaaaaggtaaacagtctcagcatctgcctcagcaacaacagttcgctgttgagaaagatcaatgtctccactgcaagaagacaggacactacaagaaagattgtcctgattttttgaaaatgatcatggcaaagaaaggactacgcaaagaagagaaagcaccattagagttgccaatggagttgaagaaaaagttgaagctgnttggagatcttcctntagagctcgcgaatggcttcatacttttacttcgagatgtcttttatgttccttctttgcaaagaaacttaataagtgtatcaaagttggattttgatggatatgattnccgctttggaagtggcaaatgtgaactatggcataataatgcatgtattggncttgctgtgttgcgagacgagctttatttgntatcctctttcttgagaatgtga

SEQ ID NO: 23214 - DNA, 3354 bp, Oryza sativa
  Clone ID: TF_OsC1713_5318
atggaacatataaaacaatggctttcacatcaagaagaggaaggtaaaaacaattttgaagaaaaaaagaatgaagcacctaaattaggtcaagagagcatttcaggtaatttaactgatggtcaactggaccaagaaaaatatgagaaaccaaatggatggtacaacgttgatgctattgggataaattcacctaacgttgttttaaagatcaatgacaatattcaagaagggaagtgttgtgcactgttaaattcagagggatcatcaactgcgcgtcacggttgcgcgcacgagagatcggaaggagcagggccttcggaaccacaccttcgcctgagatctgcaccgggtaggcgggtgatcaggtttttggggagtgcttcagcacgactgctctcgacttctgctctgttcgtcgtcgtctcgtcgtccaccatgtctgcacctggagccgctggcgccgtctctagagttggtgcacctggagccggagccgccgccggcaccgctgccgccgtctctggagatggcgcgccgggatccagagccgctgcgaacttcaacatcaacggaggcagttctgcctcacaatccagcggagggccattctcggggaaggacatgtgggatgcacttgaggccaagttcggagtttccgacgccggcagtgagctgtatgtcatggagcagttctatgactacaagatggtcgatgaccgttctgtagtagaacaagctcatgagattcagatgctggctaaggaacttgagaacaacaactgtgagttgccggacaagtttgtggcgggtggcattattgccaaattgccaccttcttggtcggactttgccacttctctaaagcacaagagacaagagttcagtgtttctgatctcattggctctttgggtgttgaggagaaggcgagggcaaaggacaatcggggcaaaaagtttgagggaggttctagtgccaatatggtacagaagaagaaccctcatgcatcccacaacaacaagaaagtcaagcctgatgtcaaatccaaggctacaaccaattttaagaagaaaggcaagggaaaggcaaagagagactactttgtgtgtggcaagtctgggcatagggccaaggaatgtcctgagcgcaaagacaggaagtctgccaacatggtcgggagaggttcctccttgttgatgggaaacgggtcgcttgcggctgttcatggtgttggttctaagtgccatacttgtgttcaatcgaaacaacctcgcaagcctcacaaggcatctgaggcgaggaatttggcacctctagaacttgttcattccgatttgtgcgaaatgaacggcgtgttgactaaagggggaaagaaatatttcatgacactgatagatgattgcactagatttctttatgtgtatctattgaaaacaaaggatgaagctttgcattactttaagacctataaagctgaggtagaaaaccaacttgaaaggaaaatcaaacggttgaggtctgatagaggtggggagtatttttccaatgaatttgcatccttttgcaaagagtttggaattattcatgagaggacgcctccctattcaccccaatcaaatggggtggccgaaagaaagaaccgcactctaactgagatggtgaatgccatgttagacactgcagggctttctaaggaatggtggggtgaggcagttttgactgcgtgtcatatcctgaataaaattccaacgaagcataaggaagtgacaccattcgaggaatcggaaaggaagaaattaaatctctcgtacctacgaacatggggctgtttggccaagtctagagatgctacattctttgagaatgaatttcccatgaaacatacacctagcacttctagtcaagaaactgtcatgccccatgagcactttgcaccgatagaacacaatgatcaaatgcctgagggaaatcctgaggagcacaacattgtagatactcataagagtaagcaacaaagggttgcaaaatcctttggagatgactacattgtataccttgtggatgacaccccaagaaccatagaagaggcatattcatctcctgacgctgactactggaaggaagcagtacgcagtgagatggactcgattatgtctaatggtacttgggaagtcattgagtgtccatatgggtgcaagcttgtaggatgcaaatgggttttcaagaaaaagcttaggcctgatggtacaattgaaaagtacaaggcaaggcttgtggtcaagggttatacccaaaaggaagacgaggattttttcgacacatactcaccagttgctcgcttaaccacgattcgagtactacttgctctggcagcctctcatggttttctcgtccatcagatggacgttaagacagctttcctaaacggagagctcctcaatgtgattgaggaggtcaaggactttctgtccaagagttttgaaatgaaggatttgggagaggctgatgttattcttaacattaagctactaagaggagatgaggttgggattacacttgtgcaatcccactatgtggacaaagttttgagtcgctttggatatagtgactgcaagccagctcctactccttatgatcccagcgtgctattaaggaaaaacccaagaatagcaagggatcaactaagatactctcaaatcattggttcattgatgtacttggctagtgcaacgaggcctgacatctcatttgctgtaagcaagctgagcggatttgtctcaaattcgggagatgatcattggcaggctctggaaagagtaatgcgctatctaaagggcactatgagctatggaattcactataccgggtatccaaaagtactcgaaggatatagtgactcaaactggatatctgatgctaatgagataaaagccacaagtagatatgtgttcacacttggaggtggcgctgtttcttggaagtcttgcaagcagaccatcttaacgaggtcaacaatggaagcagaacttacagcactagatactgcgacagttgaggccgagtggcttcttgaactcctgatggatttgccggtggttggaaaaccagtgccagctatcctaatgaactgtgacaatcaaacaatgattattaaagtgaacagttcaaaggacaacatgaagtcatctaggcatatcaagagaagactgaaatctgtcagaaagcagaaaaactccggagtgatagcattggactatgtccaaacggctagaaatctggcagatcagtttaccaaggggctaccacgtaatgtgatagacagtgcatcgatggaaatgggcttgatacccacc

SEQ ID NO: 23215 - DNA, 914 bp, Oryza sativa
  unsure (1)..(914): unsure at all n locations
  Clone ID: TF_OsC951_16
cacgcgtacgtaagcttggcctcctagagcgccgcccgggggtgggttttttgaactcaataatcataatatgcgagaagtgtttctgcgccattactgggaattatatttctagtaatggcgttaagaaataccaacataggcgttgtgaagcatgcggcgctcaccattcttgcaggcgaataggatggtggggggcggtccnatnttttctttttatccatccccnattcgnacattgccggtgacgttggtgttgagccggtcatgtggttcgacgcgtcggtgtcgaggatctagcgcttgttgtcgtggtcggtggcgtcgtccagcgcggcgatcaccttctgctccacaaactcgatgacgtctgccgcgcgtgctacagcggccgcgcgacggtgtacatcacggggcgcccctcccaggaccacggcgtcgcaggtgcctacggtggtggtggccgcgggctcatcctcggtggtggtcacgtgcgcttgctcctggtgctacaacctcggcgagaccggccacatcgcgcgcgagtgccccagcaagacctactaggcgctgctcgcggcgtcagatccagctccctcccatgatgcgttttgctcccccctccctccactgaatcaccgagcagcgggtgatcagttctatcttattagtagtcgtagatctcgttaggaaagctatggatctatcggttcgtcgtcgtcgtcgttctatgtaatgggatgggagtcttggagtggtttaatctttttgtttcgttgggtcggtttgagagacaagccatggatttgcactgtctgatctatctatgaatctatctattatgaaccgagaagaaaatattcatcagcatttggatgagtactttgtgtgaaaaaaaaaaaaaaaaggacggc

SEQ ID NO: 23216 - DNA, 4194 bp, Oryza sativa
  Clone ID: TF_OsC91_2461
atggacatctctaggacaaatgaaggctacacgagctgcggcccggtagtcgagatgtcatggcacagggctggtgtcctgctgctaggggctcaatcctgcctacctgtcccggaggttccggccgtaggtggggttgggtcggtactcttgtctatggctaggatgggttggaaactatgtcatgtcttccgtccatatgccgtggtggtaacgaagtcaagagcaactacgaactctccaagaaaatactcaaaaggacatcacggaagccgttgcaaagtctgtccagatgccttcactaaaatcggcttcctgaaccacatggagaggttggacaagcggatatccacgctaactgatcgggtcgccgcgttggagacaccttccaatgaggaagtggttaagttaaaaataccatctttttcgggatattatgatgctgagaaataccttgattgggagatgacagtagaacaaaagtataatgcccaccttgtacccgaacaacatagagttagacaagccagtagtgagttcaaggattttgctattatgtggtgggctgggttatctgatgagggggtcctacctactacttgggaagaacttaaggtagctatgcgcgataggtttgttcctccatcttatcatagagatttacgcaagaaactgatgcgtttggaacaaggggataaatctgtacaggattactatggtgagctacaaaagggtgtgagacgctgtggcatagtggagggggtcgaggatgctatttgtcgtttttattctggtttgagggaggaaattcataacattgttgattgtaaggaatttaactctgtcaaccagttgtttcggtttgctatgcctgcagagaaggaattacaggggcgcgaccatcagggcaagagcaaggcaagcacatacactccgcgcacgacgccatctgcgggattgcccaaggccgtctcttttcgggcgtcctcccagccagcgggcaagcgaccagctgcatccggagcttctgcggcaccaaaaccatttccaccaccacgaccagcagagtcaggtaaaggttccacgcaggtacccgccaagagtgcctcatatgtcgcctcgacaggacgcattcagtgccaccgttgccaagggtttgggcatgtgcagaaagattgccctagtcaacgggcctatgttgctacagaagatggctacatcaccacctctgacatggaagaggaagaggaggaagaagaagttgaggatgaggatggcgaaatctttggtcgtgatgacacaacggactacagaaccatcattgtgcagcgggtgctcagcacgcagatttttttcgtcatcaacaaccgtcgtgcacgtgtgatcattgatggaggtagctgcaacaacttgtggttaaacgattccggaagagcaaaggtaacacaggtttgtagggtttcgttttccattggctcatatgcagattctgttgattgcgatgtggttcctatgcaagcttgttcacttttgttgggccgtccttgggaacatgataatgatgctacacaccatggtaggagtaataaatacacttttgtgcataatgggaagaaaattactttgctacctttgacccctgctgaaattgtagaagctgataaagagcgagctgctagtttgaaacttgatgaatctgaaaatcagcaagtggctaaatctgtttttccacctaaaaaggataagctttcacctagttctaaggttgagggaattaagttgaagggtggtgttatgattgcaacgaaatgtgaaattgctgaaatttcagatgatgatatgtgttatttcttgatatgcaaacaagccttggtttctttagatgatattgctagttcgatgcctcctgttgttactaaccttttgcaggagtatgaggatgtctttccagctgagatacccctaggattgccacccatgagagggatagagcatcaaattgatttgattccaggagcatcattgccaaaccgtgctgcttatcgaaccaacccagaggagactaaggaaattcagcggcaagttcaagaccttttggaccgctggtatgtacgtcaaagccttagtccctgtgtagttcctgtaattttggttcctaagaaagatggttcttggcgaatgtgtgttgattatagagccattaataatattactatccgatatcgtcatcctattcctaggtcagacgacatgcttgatgaattgtgtggctctataattttcacaaagattgacttgcgtagtggctatcaccaaattagaatgaaacttggagatgaatggaaaacagcttttaaaactaaatttggtttgtatgagtggttagtaatgccttttggtttgactaatgcacctagtacattcatgcgcttaatgaatgaggttttaaggccttttattggacgatttgtggtagtgtactttgatgacatattgatttatagcaagtctttcgatgaacacatggatcatttacgtgctgtttttaatgctctacacgatgcacgtttgtttgctaaccttgaaaactgcatcttttgcacggaacgagtctcttttcttggatatgtagttactccacagggaattgaggtggatgagtcgaaaattgaagccataaagagttggccggttccccaaaccatcacacagctgaggagctttcttggtcttgcaggattctaccgccgtttcgtcaaagatttcagtatttttgctgcaccattgaacgagttgacgaagaaaggggtggtcttccattggggaaagacacaggagcagtcatttgacactttgaaggacaagcttacacacgcaccattgctacaacttccaaactttggtaagacttttgagttagaatgtgatgctagtggagttggcattggaggtgtgttgatgcaagatggtaagcctgttgcatactttagcgagaagttgcatggtcctgttttgaattattccacgtatgataaggaattgtatgctcttgaagcgcatggaggagggttgatcggacattttggagctaagaagacgaaagatgttttggccatgcatttcttttggccaaggatgcgaaaggatgttgagagaactaagagggggagggatagtatttttgtggtggtggatcgtttttctaagatggcacatttcataccatatcataaaagtgatgatgctgttcatattgctgatctgtttttccatgagattgttcgcttgcatggtatgccttttactattgtttcagatcgtgatgcaaaattcttaagtcatttctggcgcacgctatggaacaagttgggtacaaagctattgttttctacaacatgtcaaccacaaacagatggacaaacggaggtagtcaactgcactttgggtaccatgttgagggctattttaaagaaaaatttgaagatgtgggaagaatgtttgcctcatgtggagtttgcatacaatcggacaatacattctactaccaaggtaagtccttttcaggtagtgtatggtttcaacccttgtgcttcaattgatattttgcctttacctactagtgagagggttcataatgatgataaggcacacgctgaatttattttgtcaatgcatgagtcaaccaagttcaacattgaaaagatgactgaaaagtatagaattgctggtagtaaagttgagaagattaatgataatgcatataaacttgagttgcctcccgagtttggggtcagtcccacgtttaacatttcagatttgaagccacacttgggagaagaggatgagcttgagtcgaggacgacttcaattcaagagggggaggatgatgcggacatcactacctcggatacacacaacaatcctccaacggtcattcaaggaccgataacaagagctcgtgcgcgacaattaaatttagaggtgagctcgttcctatgttcttctttgtatgaattcgagaatagattgctacctaatgattatattgtgctttggaacaatggaggggacaaggagacactaggagaaggacttacagccatggaggatcatcggggatgttcaagtcaaggtggaggcccaaaccaagtcgacgtctggtgcaattcggagttcaggaccaatctgcactaa

SEQ ID NO: 23217 - DNA, 1836 bp, Oryza sativa
  Clone ID: TF_OsC91_2524
atggaggggacaaggagacacttggagaaggacttagagccatggaggatcattgaggacgtccaagtcaaggtggaggcccaaaccaattcgacctcgggtgcaattcggagtccaggaccagtctgcactaaaacggccgcccaggtcgcatacgtgctcgaattgggacgtaacgaaggtgagaagagtccccaggattttgctgactgtgtcagtcaagagcaactacgaactctccaagaaaatactcaaaagggtatcacggaggccgttgcaaagtctgtccaagatgccttcactaaaatcggtttcctgaaccacatggagaggttggacaagcggatatccacgctaactgatcgggttgccgcgttggagacaccttccaatgaggaagtgagtggtgacgacgatgctcatcctgaagacacggtgtatgattcgagtggctatattgacggaccagctacaaggcaagcacggctacgacgtcgcctaggcacaaaccgcacaggtatgggtggcactcgccaccaacaaggtaataataatcgtgtgcccgatgatccttatgctaagatgacagtagaacaaaagtttaatgcccaccttgtacctgagcaacatagagttagacaagtcagtagtgagttcaaggattttactatcatgtggtgggctgggttatctgatgagggggtactacctactacttgggaagaacttaaggtagctatgcgcgataggtttgttcctccatcttatcatagagacttacgcaagaaattgatgcgtttggaacaaggggataaatctgtacaggattactatggtgagctacaaaagggtgtcagacgctgtggcatagtggagggggtcgaggatgctatttgtcgtttttattctggtttgagggaggaaattcagaacattgttgattgtaaggaatttaactctgtcaaccagttgtttcagtttgctatacttgcagagaaggaattgcaggggcgtgagcagcagggcaagaacaaggcgagcatgtacactctgtgcacgacgccatctgtgggactgcccaaggccgtctcttttcgggcgctgtcccagccagtgagcaagcgaccagctgcattcggagcttctgcaacaccaaaaccatctccaccacgaccagcagagtcaggtaaaagttcttcgcaggtacccgccaagagtgcctcatctgttgcctcgacgggacgcattcagtgccaccgttgccaagggtttgggcatgtgcagaaagattgccctagtcaacgggcatatgttgttacagaagatggctacatcaccacctccgatgtggaagaggaagaggaggaagaagaagttgaggatgaggatggcgaagtctttggtcgtgatgacacaatggcctacaggaccatcattgtgcagcgggtgctcagcacgcagattttcttcatcatcaacaatcgtcgtgcacgtgtgatcattgatggaggtagctgcaacaacttggtgagttttgatttggtcaagaagcttggcttgaccacacgtacacatccacatccttaccatattcagtggttaaacgattctggaagagcaaaggtcgactctagaggatccccggggtaccgagctcgaattcgccctataatgagtcgtattacaattcactggccgtcgttttacaacgtcgtgactgggaaaaccctggcgttacccaacttaatcgcattgcagcacatccccctttcgccagctggcgtaatagcgaagaggcccgcaccgatcgcccttcccaacagttgcgcagcctga

SEQ ID NO: 23218 - DNA, 5154 bp, Oryza sativa
  Clone ID: TF_OsC91_2590
atggcgcatcagatgggctggcagaggacgacatcgctgcgggcggagatctcgctgaagatggagtcacttggaaatcgcttttgcgccggaggaatcgccggagagagagaaggagttcttgctttcgggttgagctgcatcggtttcgatcttcaacaagaggtaaaacttgttatggcagcttgcgttctcaggattagtgcttccatctttatgacactgtgcttccagtgtatctttcgcttttccatatacacctaggaagccaggaaggtttatgcaaaggttctcagtgaggtgcatcacgtcgattgcatggcagacgtccaagaattcccaatagggtaactcccaaaatatagagttctttttccagatcgttgcgtgaccatcttcgctctctataggctggcttccaggcctctttccaaacactactttaagatctttaaccatagcaaacactgttttcccgctgcgatgtttaggcttcgtacggtggtccatcttatgttcaaagtgcttgcctttcttccgtaccgggtggtttgcagcaaggaatcgacgatgacccatgtacacaaccttcctacagtgcttaagatacgtactttctgtttcatccatacagtgagtgcaagtcttgtaacccttgttggctgccttgaaaggttgcttagcaggaattctcttctttgttggctgcccgtcaacttcacctggatcctctcgtctaatcttgtaacgtagtgctttacaaacagggcatgcttctaagttctcgtactcctcaccgcgatataggatacaatcattcggacatgcgtgaatcttctgaacttccagttttttatagtcctcctttgcatcctgcaacatccgaccaagatcatccgctgcgtcattatcgccagcatccctatccacctcacccgtttgatttccttcaaatccagcgtactgagcccagtcgggaatgttctcgtcctccgcttcatcttcttccatttcaaccccttgctcaccgtgggatatccaacaattatagcttggcatgaaccacttattgcatggacaacaaataaaaccgttacgcttgttagcttcggccactctcaaaaaataatgcacgcactcgataaattctttggacctccggtcagcgtacatccattgctgatccatctgagcgcccattttagtgcagactggtcctggactccgaattgcacccaacgtcgacttggtttgggcctcctccttgacttggacgtcctcgatgatcctccatagctctaagtccttctccaagtgtctccttgtcgcctctaaatttaattgtcgcgcacgagctcttgttatcggtccttgaatgaccgttgcaggattgttgtgtgtatccgagttagtgatgtccgcatcatcctccccatcttgaattgaagtcgtcctcgactcaagctcatcctcttctcccaagtatggcttcaaatctgaaatgttaaacgtgggactaaccctaaactcgggaggcaactcaagtttatatgcattatcaatcttctcaacaattttaaaaggaccatcggcacgaggcatcaacttagactttctcaattctggaaatctatcctttctcaagtgcaaccaaactaaatcacccggttcaagcttaacctcttgcctacctttactaccagcaattctatacttttcagtcatcttggtagtagaatgtgttgcccgattgtatgcaaactccacatgaggcaaacattcttcccacatcttcaaatttttcttcaaaatagccctcaacatggtacccaaagtgcggttgactacctctgtttgtccatctgtttgtgggtgacatattgtagaaaacaatagctttgtacccaacttgttccatagcgtgcgccagaaatgacttaagaattttgcatcacgatctgaaacaatagtagaaggcataccatgcaagcgaacaatctcatggaaaaacagatcagcaatatgaacaacatcatcacttttatgatatggtatgaaatgtgccatcttagaaaaacgatccactaccacaaaaatgctatccctccctctcttagttctctcaacatcctttctcatccttggccaaaagaaatgcatggccaaaacatcttccgtcttcttagctccaaaatgtcccatcaaccctcctccatgcgcttcaagagcatacaattccttatcatacgtggaataattcaaaacaggaccatgcaacttctcgctaaagtatgcaacaggcttaccatcttgcatcaacacacctccaatgccaactccactagcatcacattctaactcaaaagtcttaccaaagtttggaagttgtagcaatggtgcgtgtgtaagcttgtccttcaaagtgtcaaacgacttctcctgtgtctttccccaatggaagaccacccctttcttcgtcaactcgttcaatggtgcagcaaaggtactgaaatctttggcgaaacagcgatagaatcctgcaagaccaagaaagctcctcacctgtgtgatggtttggggaaccggccaactctttatggcttcaattttcgactcatccacctcaattccctgtggagtaaccacatatccaagaaaagagactcgttccgtgcaaaagatgcacttttcaaggttagcaaacaaacgtgcatcgcgtagagcattaaaaacagcacgtaaatgatccatgtgttcatccaaagacttgccgcggtccaaaaggtcttgaacttgccgctgaatttccttagtctcctctgggttggttcgataagcagcacggtttgacaatgatgcccctgggatcaaatcaatttgatgcgctatccctctcatgggtggcaatcctgggggtatctcagcactcttcaacttaattccctcaaccttagaactaggtgaaagcttatcctttttaggtggaaaaacagatttagccacttgctgattttcagattcatcaagtttcaaactagcagctcgctctttatcagcttctacaatttcagcaggggtcaaaggtagcaaaataattttcatggtgtgtagcatcattatcatgttcccaaggatggcccagcaaaagtgaacaagcttgcataggaaccacatcacaatcaacagaatctttgctcttccggaatcgtttaaccactgaatatggtaagggtgtggatgtgtacgtgtagtcaagccaagcttcttgaccaaatcagaactcaccaagttgttgcagctgcgtgctgagcacccgctgcacaatgatggtcctgtagtccattgtatcatcacgaccaaagacttcgccatcctcatcctcaacttcttattccccctcttcctcttccacgtcggaggtggtgatgtagccatcttctgtagcaacataggcccgttgactagggcaatctttctgcacatgcccaaacccttggcaacggtggcactgaatgcgtcctgtagaggcgatagatgaggcactcttggcgggtacttgcgaggaacctttacctgactccgctggtcgtggtggagatggttttggtgccgcagaagctccggatgtagctggtcgcttgctcgctggctgggaggacacccgaaaagagacggccttgggcagtcccacagatggcgtcttgcgcggagtgtatgtgcttgccttgctcttgccttgatggtcgcgcccctgtaattccttctctgcaagcatagcaaaccaaaacaactggttgacagagttaaattccttagaatcaacaatgtcctcaaactagaataaaaatgacaaatagcatcctcgaccccctccactatgccacagcgtctcacacccttttttagctcaccatagtaatcctgtacagatttatccccttgttccaaacgcatcagtttcttgcgtaaatctctatgataagatggaggaacaaacctatcgcgcatagctaccttaagttcttccccagtagtaggtagtaccccctcatcagataacccagcccaccacataatagcaaaatccttgaactcatgactggcttgtctaactctatgttgctcgggtacaaggtgggcattaaacttttgttctactgtcatctcccaatcaaggtatttctcagcatcataatatcccgaaaaagatggtattttaaacttaaccttagcacaaggatcatcgggcacacgattattattattaccttgttggtgatgagtgccacccatacctgtgtggtttgtgcataggcgacgtcgtagccgtgcttgccttgtagccggtgcatcgccactggaatcatacaccgtgtcttccggatgagcatcgtcgtcaccactcgccactggaatcatacaccgtgtctccaacgcggcgacccgatcagttagcgtggatatccgcttgtccaacctctccatgtggttcaggaagccgattttaatgaaggcatcttggacagactttgcaacggcctccgtgatgtccttttgagtattttcttggagagttcgtagttgctcttggctgacatagtcagcgaaattctggggactcttctcaccttcgttacttctagggaacaaagtcatagtaatccatttgtgcatgagcctaagtgtagggttatggatatcattcgtcctagatttcttgcaaattggagcaccagaaatgtcttcccaaaacctatttttctcgaacccataaattcctttctggagatcgattttacagaaatcgtgaaaaccaagaagtgtactcaatcctttccatgtaagtgtatattccttatggaaaaagcgaaaggaaattccatcttctatttctttcaaagtgcacagaaattgcaaagtaaacaaatgagaaccaggctcatctaccacagcaaatctctgccaaccaacagctttccaaatagcacaaaagccaacatctatacttatctttttcagcagctccggagagtactctcgcgtgtgagcatactcccggtcactcagcttgtagtaggcttgtctttcccgatcatcgacaaggtcaaggtcggcatcgttcaggatatgttgcggagcgtcggcatcctccat

SEQ ID NO: 23219 - DNA, 5931 bp, Oryza sativa
  Clone ID: TF_OsC1713_5484
ttgtggaggagaaggaggacgcgccgaagtggaaggatgaggagcatcacgacgacgatgatacacaaatgcttgggagctctccaacatttggacttgagaatccaatgtacccactctagtgtgcaatctccccatggaagcattcaagtctccaacatccgtgcgcaagccacgaacatcctcatgtcatgcttcatgcccggtagacaagcgttgaatacttttacttagggtattaatagccccaagtaccgggttgaaatattcattgggttgaattccaaagtaagtatactgtggatggaagaaagcatttggatcatacccatgaggaggaggaggtgctgagcttgagctagctccaagatgagaagagggcaccatcctaagcatgtggagctccaagctgaaggcggggcttgtactgcttgtgcttcttcaaattttgccagcagccccaagcttgtcttgaatcaacctcatgatgtaaggggcataatagattccctgagtgaatgtccccttggagatggcaatctcctgcatcatgagagacacaatgtcgaactgacgaccctgaatgatcgtatcgatgatgtgccaagccacccctctaatgtcatcattgttgccaaggcgagggaggatagtggctctcacaatcctgttaaccacactggggatagtcctcaatccggcaaccttcccatgtgtgtaccgcactccatcttcataaaactgagagagatagtctatggagagcggattgtgagtgtgctcctcatgcaaatcatatccaaagtctaggcgaatattgaggagccgccagaattgcctccgagagatagaacactggagggtatcggacatccacttcatctcattatagtccccagccacccacaacttctggaaagcggtgtgaaaacggggatccggggtgtcccgaggccttaaaaactgatcatgatgcctcaagatggtatactgcgatggattcctcatgttcacatcaaactagatggagggatcaacgtgcatatcatcacttccttcatcctcatcctctccacttccactgtcatcatctccacttgcctcctcactagccccctcaatatttgcttcaacctcttcatcactttgagcgtaatcctctccgctcgattcctcaggctcactcacgggatccggagtgggcgcacaacgaccatggcgagtgcggggaggcatcatcggccagtcaggggcagtcagaccgcggaccgatggccggtcagaccgacggccacagccagtcagaccgcgagcatgccgcccggtcagaccgccgcaactttgttttgaaacttttctcaaattccttctcaatcttattttggggataaatctcattttggccaaaactaagaatctagattccgccgaaacatattccgcctcagcggtagagagggctacggagttttgtttcttggatgaccatgacacaagggatctactaagcatttggcaactaccggatgtgctctttctatccactttgcaaccggtataatccgaatcggaatagccaacaagcttaaacttagcaccttttgggtaccacaagccaatagtagaggaatgctttaaatatcttagaatccttttcacggccaccaagtgacattccttaggagcggcttgaaaccgtgcacacatgcaaacactaaacatgctatccggcctagatgcgataaggtaaagcaaactaccaatcatggaacgataaagctttaaatctaccagtttacctccctcatcaaggtcgagatgcccgttggttgccataggtgtcttgatgggcttcgcatcctccaagccaaacctcttcagtaaatccttgatgtacttggtttggctcacaaacgtcccatccttgagttggttgatttgaagtccaaggaagaagctcaactctccaatcatggacatctcaaattccctagacatcatatcaccaaattccttgcaaaatacctcattagtagaaccgaatatgatgtcatcaacataaatttgacacacaaagaaatcatcaccaatgatttttgtgaaaagggtggtgtcaacttttccaattttgaaatcctttgacaaaagaaaatctctcaatctttcatatcaagccctaggagcttgttttagaccataaagagcttttgagagtttataaacatggttaggatttttaggatcttcaaaaccgggaggttgttcaacaaagacaagttcggcaatttcaccatttagaaaagcacttttcacatccatttgaaatagttttatatcaaaacatgatgcaaatgcaagaaggatgcgaatagcctcaagtcttgccacgggggcaaaagtttcaccgaagtccaaaccttcaacttgtgtgaaaccttgtgccaccaaccttgccttgtttctcaccaccaacccgttctcatcttgtttgtttctaaagacccactttgtccctatgacattgtggtctctaggtctttcaaccaaagtccacaccttgtttcttgcaaagttgttgagctcttcatgcatagcattcatccatccggatcacaaagagcttcatttacatgttttggctcaagacaagaaacaaacgagtaatgttcacaaatcgaagcgacacgagatcgagtttgaacacccttacttatgtcacccaacacttggtcaattgggtgatccttggaaagagcggtgtgtatccttggaggcataggtggatcttgtgctttctcctcctccacctcaacttgagcttgacttggcgtagcggaagtagatggcttatcttgagtggaggtggatggcttgtcttccacttcaataggcttgacatctccaatagacatgttcttcatagctctcatcaagccttcatcacctacatcatccaaattctcgtgcccctcttgggagccattagtttcatcaaattgaatatcgacgatttcttccacaatacctttattcttgttgtagacccggtatgccttgctatttgaagcataacctagaagaaacccttcatcacaccgactttcaaatttggttagtctaacaccctttcggtaaatataacacttgcaaccaaaaactcgaaaataggcaacatttggcttcctcccaacaattagctcataggaagtctttttcaagagacgatgcaaataaagccaattggttgcatggcaagcggtgtttatggcttccgcccaaaaggaatcggaaacaccatattcatcaagcatagtccttgccatctcaatcaatgtacgatttttcctctccacaccgatgctcttataggttgttgggccaaacaaatccatatgcaagagctccaatggtctagatgtggacatgatactcttagtaggatgagaacatgcaacttgcttgccggcttgacaagcactacaaagcttatctttctcaaacttcacatctttcaagcccacaactagatcacgttttgaaagtttgctcaattgattcatgccaacatgggctagcctcctatgctaaagccaacccaatgaagtttttgcaactaacccaattacctttcctttgctattgtctccaaaagtcactttctcttgttcattccctcctacttcaaatgtggtgaacatagccctatcaccggtcatgtgttgagtgcatccactatcaagcacccaatggctcccaccggtgcggtagttcaccaccgagtataggggaacccacatatctagcaacaatgctaccatcatgagtcttcccttgaagcacctctccaaactcttgttgagcttggccacttgctccttaagctcattgttctcaacaacaagtgaggcatcacaaatagaaatacaagagctagagctagagctaggcatatccacaagaccatcacaagaggtagaaatgctagatgatgcaacatgagcaatatggcaagtagcactatcatcaagcaaatcacaagatatgccaacatcaatgagagctccatgttgagtagtggaaaggaggttgtcatgagcttccttaagcttctcatgagaaatagtgagtctctcatgagaggtctttagttcctcatacaagacctctaaagaagcatgatccttttttagggccttgaacttgacaatctccttctcactataagcatggagctcctcaaacatactcacaagctcatcataggaaacatcatcacaatcatcatcactctcactatcactaagagatgttaccttagaggagccctttgccatgagacaaagtggagcgaagagtgatagagcctccttgatggcaacaacggccatcttcttcttcttggagcttgcatcctcaccaccttcttcctcggacccggatgaggcggagctctcctcatttgagtcccattccccgatgaatgcctcaatcttcttgccttccttcttgagcttcttcatgagcttatagcctccactcttcttcttggatgacttgtctccatcatccttggaagggcacttggaagtaaagtgtcccttctcaccacactcaaagcacttcaagttggagagagtcttgttgggtcttctatttcttctcctactggagttggagccccttcctctctctttgcccttgcccttgtcttcaacttcggcttggagagcaatgcacttcttggaaggtgaggcttcctccatctccttcttcttcaacttgtacatgtcattggtgttgatcttccccaagaggcttgcgggtgtcatccttgacatgtcggagttgatgagcatggtgacaagggtctcatacttccccggtagagccctaagcatcttttgggcaacctcaagatcggtgtagtttgccccaagccccttgagatcattcacaatgacattgagcctcccatacatgtcattcacactctcatgaggcaacatggagaatgtctcatattggatcttgaggaaatgaagcttggcatccttgtactcgcttgtgccctcatggatcttcgccaacttgccaacttgttccaaatctcatatgcggtctcaaggtggctcactctatcaaactcctcttggctcaaagagttgaacaaaacattcattgcttgggcattgagttggaggttgcggtgatcaatctccgtcaagggcgtgccggtgatagcaaagccggcgccgggcctcctccacaatcttctcggagaggtcaccgggcaactcctccacaagccgtctaggaggcggcaacctccaagagtaacaagcaatgacccggcgtggagatgatcaatcaagtgccacactagctctacaaatggaagcaaatgcacttgactcttgtctagagcaacctcaaccactacaatggatgaacactaagctcaaagagggccccatcggcctggccggtcagaccgacgttgagtggccggtcagttcggcctcggctcggtcagaccgccatcagctcggtctgaccgaatacggctccgtcggctctgtatcggccaccccgagcagcaccatcccggcctccagggggccggtctgaccgcgcatgtgccgccggtcagaccgccgtttcgtggccggtcagactagccagggcacgccggtcagaccgccactatgtggccgatctgaccgccccgtcatccatgcgcacacatgacgtggacctaacttaaaatatatctcaatagcaacggttagtccacaattagctcttgtcattaattaccaaaattaacaacgggggactagatgcttcaactactagagtacggattatatttttcaaaacaaaacaactactagtgcgcaaaggtgttagctggatgcatcacattagatc

SEQ ID NO: 23220 - DNA, 1482 bp, Oryza sativa
  Clone ID: TF_OsC1528_1773
ctacttcttttcagcccctgaggtggaactctttccatcctgctgcttctgcttgagctgctctaggtatttcttacagtttctcttccaatgacctgtctccttgcaaaagaagcactctgcatccttagcgagccctgtcttttgaaccttggtcttagagttgctagtactcgtgatctcatcagagtttagctttctcttttgaccacttttcttgttgttgggcttgtgcttatgcataaccatcacatggttggagtttttcttaatgctttcctcggtagtctttagcatcccatgcaattctgccaaggtcctgttcaggttgttcatgttgaaattcattatgaacggctcaaagctgggagggagcgactggagaatcaaatcagtagccaactctcggcttaggggaaagccaagcttatccagactctcggtgtaaccaatcattttgatcacatgtgggctcactggattaccttctgcaagcctgcacgcaaacaaggactttgaggtattaaacctcttagctcttgcttggtcctcaaacatgttacgtagtctcgtgattattgtatgagcatccaatgcctcatattgcctttgaaactcaggggacatagtagcaagcatgagacagcttatatcaaggtattcattgcatcgcctttcatgctccctacgtttagcaacaggagcattgttgggcaagtcagctggaaaaggctgtgtaagcacaaactctttgtgctcttgcctgagaacaattctcaggttgcgataccaatccatgaagtttgttccagtcaacttctctttctcaagaatagaccgcaagttaaaattggatggtgcaagagcactcgacgcgctgtgcagcggaagaagatgctgagaagtcgaaagaactctcgcgaagtagcgcgcgtcgatgtagaggaagtagtcaatcgcaccagctcgaccttgtcctcctcgtgcattctcctcgccgtactcccacgcaccaccacgctggtgccagctatcctcccattttagaatcaaggataaatcaccccacaaagtgctcccctcctggatctctttcccgggcgacacatctcgaatggcgacgaccagacggcaagagagaagacggggatgaggttggccgatggtgatggattgccacgaatggaggacggccggcttgtcaccgtcgccgttcaccttctgcaccgagcttccaactctgtcgctgctcctagccgacagccgtcgctcaaccgctccaccgagccaccgcccggcgcacctcaaatagcggcgaccagacggcgggagaaaggatggggatgaggtcggccggcggtggaggatcaccgcgcctggaggacggccgggcttgtaactgccgccgttcagctttcgcaccgagccgccagatccccgtgcgcccagggggctctcccgcacctttctctccctcaccat

SEQ ID NO: 23221 - DNA, 3980 bp, Oryza sativa; identical to SEQ ID NO: 14482
  Clone ID: TF_OsC547_327

SEQ ID NO: 23222 - DNA, 4164 bp, Oryza sativa; identical to SEQ ID NO: 14475
  Clone ID: TF_OsC547_340

SEQ ID NO: 23223 - DNA, 3977 bp, Oryza sativa; identical to SEQ ID NO: 14481
  Clone ID: TF_OsC547_379

SEQ ID NO: 23224 - DNA, 3691 bp, Oryza sativa
  Clone ID: TF_OsC547_389
atggagatccaatatgagcatacttcgtatagggatccaaataggagtcttacgggccttggaggcccgagtgatggatcctatatattcgtgaggggtgtgaccggtggaggcattgcatcaccgcgtcgagtggtaacgatatatgatctaatacttgcttggttcctggtttatgcgatagaaatgtttgatttatgctatcgtagcttacgcttatcccaacagtggatagatgtcggacatctatgtgcggagattattggtttacttgacaagatcatggcagctcctgcatcatccaattttaacttgcggtctattcttgagaaagagaagttgactggaataaacttcatggattggtatcgcaacctgagaactgttctcaggcaagagcacaaagagtttgtgcttacagagccttttccagctaacttgcccaacaatgctcctgctgctcaacgtagggagcatgaaaagcgatgcaatgattatcttgatacaagctatctcatgcttgctactatgtcccctgagcttcaaaggaaatatgatgcattggatgctcatacgataatcacgagactacgtaacatgtttgaggaccaagcaagagctgagaggtttaatacctcaaagtccttggttgcgtgcaggctagcagaaggtaatccaatgagcccacatgtgatcaaaatgattggttacgccgagagtctggataagcttggttttccccttagccgagagttggttactgatttgattctccagtcgctacctcccagctttgagccgttcataatgaatttcaatatgaacaacctgaacaggaccttggcagaattgcatgggatgctaaagactgctgaggaaagcattaagaaaaactccaaccatgtgatagttgtgcataagcgcaagcccaacaacaagaaaagttgtcaaaagagaaagctaaactctgatgagatcacgagtactagcaactctaagaccaaggttcaaaagacagggcccgctaaggatgcagagtgcttcttttgcaaggagacaggtcattggaagagaaactgtaagaaatacctagagcagttcaagcagaagcagcaggatggaaagagttccacctcagtctataacattaatgcaaaaaggcaacgtcctaatgatttgaatcccacttttatttggcattgtcgcttgggtcatataaatgagaaacgcatggagaagcttcatagagatggacttctacactcttttgattttaaatcatttgagacatgcgaatcttgtttacttggcaaaatgacaaaggcacctttcacgggtcaaagtgaaagggcaagtgaactattgggactagtacatactgatgtatgtggaccaatgagctcaactgccaaaggtggttttgggtactttattacctttaccgctgactttagtagatatggttatgtctacttaatgaggcataagtctgagtactttgaaaagttcaaggaatttcagaatgaggtacaaaatcatttgggcaagacaatcaagtatctacgatttgatcgtggtggaaagtacttgagcctagaatttggcaatcatctaaaggaatgtgcaattgttccacaactcactccgccaggaacgcctcagtggaatggggtgtctgaacggaggaatcgtacattgttggacatggtacgatcaatgatgagccaaactgatctgccgctaagcttttggggttacgctctagagacagttgcgttcacactaaacagggttccatcaaaatcagtggataagacaccatatgagatatggactgggaagcgtcccagtttgtctttcctaaagatttggggctgtgtggtctatgtaaaacgtttgcaatcagacaaactcacacctaaatcagataaatgcttctttgtgggatatcctaaggaaacgaaaggatattatttttataatcgggaagagggcaaagtgtttgtcgcccgacacggtgttttcttggaaaaagagtttatttcaagacaggatagtgggagcatggtgcaacttgaagaaattcaagaaacaccggaaaacgcttcaacgtccacacaaccacaagctgagcaagatgttgttcaacaggttgaacaagttgttgttgaaccagttgtggaagcaccggcttcacgaagatccgataggatacgacgtacacctgcgagtttggaactattggttgatccacctaatggtgtaaaagccattgagtgcaaatgggtctttaagaaaaagacagatgtagatggaaattttaacatctacaaggcacgattggtggcgaaaggtttcagacaaattcaaggtgttgattatgatgaaactttctcaccagtcgccatgctaaaatctattcggattgttttagcgattgctgcctatttcgattatgagatatggcaaatggatatcaaaatagctatccacaatggaaatctcgatgaggatgtgtacatgacacaacccaagggatttgttgatccacaatcagctaaaaagatatgcaaattgcagaaatccatttatgggttgaagcaagcatctcggagttggaatattcgtcttgacaaagtagtcaaggcgttgggctttgtcaaaaacgaagaagaggcttgtgtatacaagaagattagtgggagcgcactggtgtttctaatcctatatgtagatgacatattattgattgggaacgatattcttatgcttgaatccgttaagacatcgttgaaaaatagtttttcaatgaaggacttaggggaagcaacatatattctgggcataaggatctatagagatagatcaaagaggctaattggattaagccagagtacatacattgaaagattcatcatgtatgctatgctatgtacacgtccagatgtttcatattcacttagtgcaacaagccgataccaatcagatccatgtgagagtcactggatagctgtaaagaatatcctgaagtacttgagaagaactaaggatatgttcctagtcaatggaggacaggaagagctcgttgtaaatggttacaccgacgcaagcttccaaactgacaaagatgattttagatcacagtctggatttgtgttctgcctgaatggaggcgctgtgagttggaagagttccaagcaagatacagtgtctaattatacaacagaagccgaatacattgcctcttctgaagcagcaaaggaggctgtttggataaagaaattcatttctcgactaggtgtggtgactagtgcttctagcccaatggacctctattgcgataatagtggtgccattgcgcaagccaaggagcctagatcgcatcaaaagtccaaacacattttacggcggtatcacctcattcgcgagggagtatcaaatagagcgcttgccgtcgtggcaagattccagagtcgatgattttgccggcgatggattgatccacctgctatcgccacgactcggaggtcctgtgccgttgggtcacgcataccaacaacctgagatccaacaatctgagataatggtatggggaatgaccaaaacgccctcaaccgtcattgggaatgcatcagcaacgtatacgtggaaggccaggatcagaggagacggtgatggttcggccgaaccc

SEQ ID NO: 23225 - DNA, 2340 bp, Oryza sativa
  unsure (1)..(2340): unsure at all n locations
  Clone ID: TF_OsC547_396
cccgggcaggagccccgccgggagaatccggggcgacgccaccacgtttcttggctcttactctttcctcctctcctctctgtctctcaccgacggcagcggcgggctcggcaccggcggcggcggcctcgaccgccgatcgccgacgccccgcgccgcctcctcgctcatcaggatgggctcggcggtgtgtgccggtgccggcgtgctcggtgcgccagacccgcgacgtcgccttcgaggccgaggacgcgctcgacgacttcctccggcggcagtccactttggtcgcggtcgcggcgacgtccccaacctccatgacgtcgtcgcctcggctactccggagcccactgcccctggccggatttggaagccagctacacaacgacgggcgccggcctgccgttcttcgccctcggcctccaccggcttcccttccgacgtcgccgccttgagctcctcctcacgccctccccgccggcccttcccgatctgctctacccaagccaccacgacgaccagatccaggaagtctctccatcgctctggtcctgacagtggctggaggaccccggccggttgcagcacttcatccccgcaaaaatatcaaagttgacatcgtcagcctcctcatttggataagaatttgtgaatcaggatgttccatctaatttggttttgctcgggttgtcaaatgctcgatggatatgtacctgcgcatgtgcatcaggttggtgtgcttcggcatgtggtgggttgatttccttcagccaaggttgtgctcatctctagtatcctcaaacactaagatactgatgttcttttcctcttctcgccattcccttgcatgccatttttttcaggtaaccaggttcaatgaagaatgggagaattatgtttactgataatgtgcatttttatttactgtgccttattagttcatttggcatggacgcccttacttttgcatcagctcaggcttagcaagaaagattctcatcctgttttaattgctgacccatgaatgattaatcttgaccccccaccctcaagcaactctgttgcttttcgcttgcgagaacgcagttctgtaatctagcttaactcagaccgattccttattttattgataatctcatctatttgtcatgtgagtaatttaagtggcgcttaaacaacaatgaaacaattgtccagatgtggttggaacaaaaccatatccacttgccgtcaaaaaaaaagaaaagaaaaataagtgcaaatttgntatttcttgttcctcgcatggttaaagatggtcttcctcgtatggttgaagatggtcttgcttctcactatgaattattcttgtgcttgcagatggatgatactctgacaactggaagcatcaggagtacagagggggaaaagagacgtttagcagaggcttcacttgcctacaactgtgagaggatagatgtcggacatctatatgcggagattattggtttacttgacaagatcatggcagctcctgcaccatacaattttatcttgcagtctattcttgagaaagagaagttgactggaacaaacttcatggattggtattgcaacctgagaattgttctcaggcaagagcacaaagagtttatgcttacacaaccttttccagctgacttgcccaacaatgctcctgttgctcaacgtagggagcatgaaaggcgatgcaatgaataccttgatataagctgtctcatgcttgctactatgtcccctgagcttcaaaggcaatatgaggcattggatgctcatatgataatcacgggactacgtaacatgtttgaggaccaagcaagagctgagtggtttaatacctcaaagtccttgtttgcgtgcaggcttgtagaagaattgcatgggatgctaaagactgtcgaggaaagcattaagaaaaactccaaccatgtgatggttatgcataagcgcaagcccaacaacaagaagagtggtcaaaagagaaagctaaactctgatgagatcacgagtacaagcagctctaagaccaaggttcaaaagacagggcccgctaaggatgcagagtgcttcttttgcaaggagacaggtcattggaagagaaactgtaagaaatacctacagcagctcaagcagaagcagcaggatggaaagagttccacctcaggtattaatgttatagaaattaatcttgctacttcctttactgattcttgggtatttgataccgggtcagttgctcacatatgcaaatcgttgcaagggctgaaaagaagtaggagcttagtgtcacaccctgaagttcctttcccaagcctaaattga

SEQ ID NO: 23226 - DNA, 3933 bp, Oryza sativa; identical to SEQ ID NO: 14485
  Clone ID: TF_OsC91_1938

SEQ ID NO: 23227 - DNA, 4551 bp, Oryza sativa; identical to SEQ ID NO: 14509
  Clone ID: TF_OsC359_7913

SEQ ID NO: 23228 - DNA, 4652 bp, Oryza sativa
  Clone ID: TF_OsC1517_1429
ctaagggagcagctccgggaactcggcacggagaagatcttctcgctcccaggttgcctcatcttcagaatggttgctccattggaccttgtagaacttgatggtcttccttcgtgtctgacgttctgcctcttcaagaaccttgatcggtctttccttgtaggttagattcttttccagctcgatattacccaggggaacttgttcttctggaactcgaagacatttctttaactgggatacgtggaacacgttgtgcacatctgcgagaccttcaggtaactcaagctgataagccacttcgccacgtctggcggttatgaggtaggggccgatgtagcggggtgctaacttgccggacattccaaacctcctcataccacggaggggcgatacccgcaggtacacatgatctcctttttcgaactcaaggtcatgcctccgattgtcagcgtaattcttctgacggttctgcgctgtctttaaacgttctcggattagcttaacttgttcttctgctgccttgagtatgtcaggaccgaataccagtgcttcgcccacctcattccagcacaagggagtgcggcactttcttccgaacattgcctcattcggcaacatctggatgctggcctgataactgttattgtatgagaactcagcatacggcaaacaacgatcccaagtgccatcggtctgcggatggtaggccgtactaaaatttagatcggttccgagggcttcatgcaactgcttccagaaccttgaggtgaactgagtgcctcggtctgacacaatcttcttgggacagccaaatctacatacgacatgggtcatgtagagttctgctagtttctttctatcaaaggtggtttttactggcacgaaatgagctgatttcgtgagtcggtccacgattacccagatggagtcgtacccgctaggggttcttggcgaaccggtgatgaaatccattccgatctcttcccatttccactcgggaatcggtaggggttgcaacagaccagctggcctctgatgttctgccttgactctttggcaaatgtcacacagggctacgtattctgcgacatctcgcttcattccagcccaccagaagtatgccttgatatcttggtacatcttcgtacttcctggatgaatggagtaggctgactcatgagcttcctttagcatgagatctcttaattccttcttggccggtacacagatgcgtggaccgcaccaaactgtgccttgatcgtctatggagaaattggtgtctttcttctcttgtattctttttattaactcttttatcccttcgtcgtctttctgagcctcccggatttgcgattctagggtgggctgcactgtcaagctggcagggacacctgactgtaccacggtcagccttaacttctccaattctctgcacaggcgatcttggccaggccgtatttgagctacattgcaataggccttgcgacttagcgcatcagcgaccacattagctttaccggggtgataatgaattccaagatcgtaatccttaattagttccaaccatcttctctgcctcatatttaactcgatctgagtgaagatgtacttaagacttttgtgatcggtgtatacttcacatctgttcccgattaaatagtgcctccagatcttaagagcatgaaccacggctgccaactcgagatcatgggtgggataattgacttcatgaggcctgagctgcctggatgcataggccacaacctttcgttcttgcattaggacacatcctaagccttgtcttgatgcatcacagaagatctcgaaatcttttctgatatctggcaaggtgagaactggggcagtggtcaaccttttcttcatttcttgaaagctgtcttcacaggctacagaccattgaaatttcttttccttctttaacagctcggtcataggtctggctagcttagagaatccttcaatgaatcttcgataatatccagctaggccaaggaagctgcgaatctctgacacattcttgggcgggttccaagcaagtacagcttcaaccttgctgggatctacttcgacaccgttggaggagatcacgtgtccaagaaatgctactcggtctaaccaaaattcgcatttcgagaattttgcgaatagttgatgatctctgagcttttccattatcagcctcaggtgttcaacatgttcttccttattcttggagtatatcaggatgtcatcgatgaacaccacgacaaactggtccaggaattccatgaagattttgttcattaagttcatgaagaacgctggagcattggtgagtccgaaggacatcactgtgaactcatatagaccataacgcgttgagaaagcggtcttcgggatatcttcagatctgattttcagttggtggtaacctgatctcaagtcaattttagagaaaactcttgctcctttaagttgatcgaacaaatcgtcaatccgtggcaacgggtacttgttctttatagttacttcattcagggctctatagtcgattaccattctctcatagccatcctttttcttaaccagaagcactggggctccccaaggggatgagctaggtcgcacataacctttactctccaattcttcgatttgtcttttaacttctgctaactcattagctgccattcggtagggtctttttgtaattggtgcggtgcctggtgccagttctatggcgaactcaatctctcgatctgggggcatactcgataactcttctggaaacacgtcgggatattcacagactatgggcaccgattccaagggagtggcttgcaaattggttaggattgaccgacttgcggtaagagtgttgggggtaaagtgaacttgctttccaccaggtccttgcaaggtgatggacctttcggcacaatctatctgtcctttgtgcttagccaaccaatccatccctaggatgatgtccaagctttgcgagtccaggactatcagtttggctaggaagtcaacttcctcaattctaaggttaacttccgggcatattttagttgcccttatatcccttccagtggaatgtactatcattggtactcgtaaattttaggttttccaaccatttcttttcacaaaggcttgcgatatgaaagaataggaagctcctgaatcaaacagaattattgcgggtatggagttgacagagaacatacccatcacaacgtctggagcatcctgagcggtctcagcttgaatgtggttcacccgacctcgaccgaagttgttggaagcatgggaaccttgtccacttgcctaagagctaggacgagactgagctgctgctagagtaggagttctggcggtgctgccattagcatgccctgagttggtgttggtaggattctgagggcactgtctagcagagtgacccatcttgtcccaccggaaacactgtacggttgacagtcctggtggtgacttgaaagaggtaacactgtttggcgcaatattgccacttggggcacgctgctgcggcggaggtgctggacggttcatctgagggcgaggggcatagcctggctggcggttagcctgagtgaccgactggtgatactgcttaggctgaccaaagcgagggtggggtgcacctcgggaagaattcccttgatgggtagacttgcgtttcttatattcttcagtagcctcttttctggcatcctcaagtggaagtgccttgttgatcatgtgctgaaaggtggggaagtcatgagcaagcaactggagtctcattccaactgtgactcctttcaagaacttcctgatcttcttcttgtctgtgtccacttcttcaggagcgtatcgagccaacttgttgaactgactcagatactcattgacactgctattgccttgcttgagcctgataaattcttccttcttcatgtcaatagtgcttttaggcacatgagctacacgaaaagctgcagcgaactcattccatggaatgttagtgggttcggggtgtgcattgcagtaattctcccaccaatctgcagcaggtcctcttagctggtgagaggcgtagaccgtcttctcaataggaatacactgcactaagttgagttttctctcaacatcctttagccaatcgccagcctcaacgggcttgacggtctgagagaactctggcggacgagacctcagaaagtctgtcagcttggatctattgttgcccatgtgagggtggccatttccatgcgcgttgtgctgaataccggctatagctgtggctaaaccttgcaagatttgagtctgaactgccatcaagtgctgcatgttattctcaacatggggtggtgaaggaatgcgttcttcaccagaattgtgaccgacagagcggtgagagcggtgagactattccacttctgcattacgggaaactatgcgatgcgagcggttgctgcggtgggattgctcaacttctgcattgcgggaagcagtacggtgcgaacggttgctgtggtgagactgctcattagctgactcatgatctgcttctggctcaactctaccttcctcaaaaccgaagcgggctggtgcacgagcagcgcggtggggcggctagccat

SEQ ID NO: 23229 - DNA, 6813 bp, Oryza sativa
  Clone ID: TF_OsC1458_1
atggccgacccgagccgcacttcctcgggtggctttccccctccacaagtagctctctccccgcctgtccccgggtcgccgccctccgctctctagccgaccccacgaaacaaaaaggcttcatagctcaacctcctcgccgccggccacgctcacctcccctcccctccccccccatccctcctcctcctcctagccccaggtcgctgctcggctccgccatgtaccgcgcggccgccagcctcgcctccaaggctcggcaagccgggagcagcgctcgccaggttggaagcaggcttgccttgagcaggaactatgctgccaaggatatcaagtttggagttgaggcccgtgctttgatgctgaggggtgttgaggagttggcagatgcagtcaaagtgacaatgggtcctaagggacgcaatgtggttattgagcagagctatggttcaccgaaagtcacaaaggacggtgtgactgttgccaagagcattgagttcaaggatagagtcaagaatgttggtgcaagccttgtaaagcaggttgctaatgcgaccaatgatactgctggagatggtaccacttgtgctactgtattgactaaagcaatatttactgaggggtgcaagtctgttgctgctggcatgaatgcaatggatttaaggcgtggtatttcaatggctgttgatgctgttgtaactaacctaaagggcatggctagaatgatcagcacatcagaggaaatagctcaggtgggcacaatatcagcaaatggggaaagggaaattggtgagcttattgcaaaggctatggagaaggttggcaagaagggtgtaatcaccatggcgcatggttcctccctttacaaaaggacgtgaagttagtcgatgctatgatgcttgacatggagttggtccctgccaaactttggtaccagacccaaatacccaaagatgtgaactggaagacctcttgaaccttattcatgacaaggctgtgtcgaaccttcatggagtagttagagacttggcgttggctttgaagaagcagaggcctctgctgattgttgctgaagatgtagagagcgaggcattgggtactctgattattaacaagcttcgtgcaggcatcaaggtctgtgctgttaaagctcctgggtttggggagaacaggaaagcaaacttacaggaccttgcgatccttactggaggagaagtcataactgaagagctaggaatgaatcttgagaagttcgagcctcagatgttgggtacatgcaagaaggtaactgtatctaaggacgacactgttattcttgatggagctggagacaagaaatccattgaagagagggctgagcagattagatctgcaattgagctaagcacttctgattatgacaaggaaaagctacaggagcggttggcaaagctctccggaggtgttgctgttctaaagatcggaggagccagtgaagctgaagttggtgagaagaaggatagagtgacagatgcattgaatgccactaaagctgctgtggaagagggtattgtaccaggtggaggtgttgcacttctttatgcatcaaaggagctggataaattgccgactgctaactttgatcaaaagattggtgtacaaatcattcagaatgctttgaagacaccggtgcacactattgcttccaacgcaggtgtagaaggggctgttgttgtcggtaagcttttggaacaagataacaccgaccttggctatgatgcggctaaaggtgaatatgtggacatggtgaaggctggtatcattgacccactaaaagtgatcagaactgccttggtggatgctgcaagcgtatcatctctgatgacaaccacggaatccatcatcgtagagatcccaaaggaagagaaggaggcgccagcgatgggaggcatgggtggaatggattactaatcaacacccattaaagtaaactaaaaacatactcctgggatttaggattttttttgcggtgcaagttcatcgtcgatgtattttttgttcttgttgatgaggtggttgtcagacaattttgattccactggcggtaggacgggttggaacgaataaaattttagttcagagctaggagttcttgagagctgaggactgcacttcgatcaaaattgaatctgacaccttgtgccggaacatttttatgagctgatctgaaagattacgccttttggcctgaaaaagtgagaagatatacaaaaaaaaaagcacgatcattgaaacgaccgagatatggaaacacagcgactctgggagcaggcagcggcgattgaggcacaactggacttcgaccgggagcagggtggacgggacattggcgcacgaagccctcgcaggcagcgcgcctccccttcctcggaccggcaccgtggtcgccgtggacgctccggctctcctcccgttgtgcagaccatcgtcaaggatgttggcggcgcatggcccatgctcaccaagactaactacgccgaatgggcgatggtgatgaaggtgaagttgcaggcgcgccacttgcagaaatggagacaaatggaatcaaggtacccgacgagaccttggacaaggtgctcgcagctaaacaatctggtggaaactctgcgctccaaccgccacctgcagaggcgtaatctgattggaacaagaagcccctttgtagccatacgcatcggcagcgaccgcgcccgcaggtccacgcttcagaagctgcgtcaggattgggagaacctggccttcaagccgggtgaggacatcgatgacttcgttctccgcctcaactccttgcagcagcggttggcgcagctcggcgacaccaccattgacgaggagagagccgtggagaagctccttcgcgtcgtccccgagaagtacacgcagctggctctgtcgatcgagacgctgctggacttcaccgagctcacaatcgaagaggtgatgggtcgcctcaaggccgtcgacaaccgcaagcagctacctccctcagagccgatcaccattggtggcaagcttttcttcaccaaggagcagtggctcgcccgccagcaggagtggaagaagggggaggccacaggctcttcggcttcgggatcgtcgagcagccgcaagcgtcgaccacgcaagtgggagaaggcgcgtagtggcgctcttggcgacgccaatggcgagcacaagggcagccgcgacgacacctgccacaactgcgggaagaccggctactgggccaaggactgccggcaggcgaagcacggcggtcaagcacacgtcgctcaagcacaggaggccgcggcccacgtcttcctcagcaacggatcatgcggcgacaagatcgacggatggtgcctcgacaccggtgccactcaccacatgaccgggcggcgggaattcttctccgagcttgactccagcgttcaaggctccgtcaagtttggggacgcctccaccgtggtgatcaagggcgtcggctccatcctcttcactgccaagaccggcgagcaccggctgctcaccggtgtctactacatccccgcgctaaggaactccatcatcagtttgggacaactggatgagaacggctcgcgcgtggagatagaggacggggtcttgcgggtttgggatcgccatcgtcgccttctcgtcaaggtagcgcagcctgtgtgccttgcagcccgccgcgacgatgatgcatggcggtggcacgagcgctttgggcacctcaacttcggagccttgaagcagctcggcaacaaggagatggtgcagggcatgccgcgagtcgagcacgtggagcagttttgcgacacctgcgtcctcaccaagcagcggcgactcccctttccccgccaagcaagtttccgcgccgaggagaagctggagctcgtgcacggtgacctctgcggccctgtgactccggccacacctggaggccggcgcttcttcctgctgctcgtcgacgacgtgtcccgctacatgtgggtggtcctgcacgactccaaggcagctgctgcagacgccatcaagcaccatcaagttgctgcggagaaggagtgcggccgcaagcttcgggtgctacgcaccaacaacggtggcgagttcacggcggctgagttcgcggcgtactgcgccgacgaggggatccagcgccacttctccgcgccatacaccccgcagcagaacggcgttgtggagcgccgcaaccagacagtggtggccactgcccgcgccctcctcaagcaaagagggatgccggcaatctactgggaggaggcggtgatgactgccgtccatctcctcaaccgcttgcccaccaaggcccttgacggcaagacgccgtacgaggcctggcacgggcgcaagccggtggtgagccacctccgcgtctttggctgtctcgccttcgccaaggagctcaaccacgtcggcaagctcgacgaccggagctcgccgggagtcttcatcggctatgcggagggcgtcaaggcctaccgcatcctcgaccctgcgacgcagcgtgtccgcatttctcgggacgtcgtgttcgacgaagggcgaggttgggcttgggacaaggcggtggacgacggctcgacttcgactctccgagacttcgtcgtcgactacgtccactttgggggagccgggggagctagcagctcatcttcaccgagctcgtccacctcggcacccggctcgccatcagctccggcgagtcctccaccacctacaccaccagcgactcctccatcaccggctacgccctgctctcctacaccagcgcccacaccaccggtggagttcgccactccgttgtccaacgacgaggatcgtgttgatgcgtaccacgacgacgagcctctgcgctaccacaccgtggacaacatcttcggtgatcagcccgtccttggactggcgacgcacgacttcgaggccgagctgcacctggcgcatgaggacggcgagccctgctccttcgcagaggcgaatggagatgtggcatggcgcactgcgatgcagcacgagatggacgcggtcgagcgaaaccggacgtgggtgctggcagatcttcctgtcggccaccgcgccatcacccttaagtgggtctacaagctcaagaaggatgaggccggggcggtgatcaagcacaaggcgcgtctggtggcgcgcggcttcgttcagcaggagggagtcgactttgacgacgccttcgcgcccgttgcgcgaatggagtctgttcgtctcctcctcgcgctggcggcccaggaaggatggcgtgtgcaccacatggatgtcaagtccgccttcctcaacggagacctgaagaaggaggtctacgcccaccagccgccaggattcgtcatccccagcaaggagaacaaggttcttcgcctgcgcaaggccctctacggcttgtggcaggcgccccgagcttggaacgccaagctggactccactctcaagcaaatggggttccagcagagctctcacgaagctgctgtctaccggcggggcaaggacggcaatgccctgttggtaggcgtctacgtcgacgacttggtgatcaccggcaccaaggaggctgaggtggaggcgttcaaggaggagatgaaggcgactttccagatgagcgatttgggccttctctctttctacctggggatcgaggtccaccaggacagctctggcatctctcttcgccagaccgcctacgccaagcgcatcgtcgagttgggcgggctcaccggctgcaacctagcctacactcccatggaggaaaggttgaagctgagccgcgacagcacggctgaggagatttggcattcgctgttggctgttagccggttcatgcagcgaccaacgacagagcaccagcaggctgtcaagaggatcctccgttacgtcgagggcaccaccaactacggcttgcactacccgaggtgtcccggtgcgcagcacttcattgggtacagcgacagtgacctcgccggcgacagcgacacgagcaagagcaccagtggcatgctgttcttcctcagcaagtgcctgatcagctggcagtcggtcaagcaacaagtggtggccctgtccagttgcgaggcggagtacatcgctaccacaaccgcctcaactcaagctctctggttggttcggctgctgggagatctcttgggaagagacgctgaagcagtggagctcagggtggacagcaagtctgctttggccttggcaaagaatcccgtcttccatgagcgcagcaagcacatccgcatcaagtatcatttcattcggagctgcttggaggagaggagcatcaaggccagctacattaacacccaggatcagctcgtcgatcttctcaccaagtccctcgggcgggtcaagttccaggagtttcgcgccaggattggaatggacgagtcatgtggcaaggtcaatgacagaaaggctgagctaaaatcacatggagaaaaagcagttaagagaaatgactaccttgctgcgtcaaagatctactccgaggcacttgagctagattattttgatgcaaccttgtattcaaacagaagcctttgcaacctacaaattggagaagcacaaaaggctttgcttgacgcagatagatgtgtagaactgcggcctaagtgggtgaaaggtcactaccgggaaggagctgctttgatggtgctaaaggagcacaagaaagcatttgaggcattcttgaacgcgctgaaactggatcctgctaatgccgagattgagaaagtgatgtggtaa

SEQ ID NO: 23230 - DNA, 6141 bp, Oryza sativa
  Clone ID: TF_OsC1713_5622
ccaagccttgttagattcagaatcagaagatgttaaagaaaaacttgaaacaatactaaataatatagacaatgactcatgttcagatgaagaaaaaaatgcagagattaattgttgccaagacagtggttgctcttgttatgagccagataattcagaagaagagtctgatgaaaatatactcgttttaaccagtttagaagaatttgttctcgatacttttgaaaccattcaagatccagaagaaaaaagaagagttctcgaaaaattcctttcaagagtcaagactgataaggataaactaaaaaaggatattcaaaagagcaaattcctctctattgatgaagtgttcaaaagattagatgaacagaaaaagaagaatgagaaaccagatttgatgagcctattcgaagaccaaaaaattatgaaacaagatttagaagaaataagaaagcgtctatacatgttagaattaaaagaaggattccatatggaagaaaaggacgaaccaattcaagaagatgatcaggttgttggaaccattcaaaaatatatgaagcaaaaatggtacacagaagttatgtatcgttttatagacggatcctactttcagcatatcactttaattgattctggtgctgatgtcaattgcattcgagaaggtattatccctcataaatatttctataaagccgcccacagaattcgtggggcagatggaggacttttaacagtagaatatcaaatccctgaaatctatatttgcatctcggaagtttgcattaaaacatctttcctactcgttaaaaatcttaagcaagatgttattttaggaacaccatttttatcacttattcgtcctttcctagtcacaaacgaagatattcaatttaagataatgggcaaacaggtgagcctaagattttcgtctaacacagatgagattcttgaccagcttgttcagaccaagagagaacaagttgtgaatacaatatatttacatgacgattctttcccatcatatcttccaaaatctatggacttgccaggtggtgtgaattttggtggtattgaggagaagataatcctgtatcttccatgtccaagtctcctgcagacatctttcacagcatttcctaaatcagattgaaggatctgatcgagggttgcatatatggaattcacaagaccatgatctataatggtttggagagatatttcttcatggttgtatgtgggtaggttccggaatctttgaagatttatctcagctttgagaaccaggaatctataggatgggtcagaaattgcctgattatctagtcttaagagagggagcatatatatgattactcgtatggctgggtttctttctctcccttctaaaagatcaaagaaataatcttggagtccaaggaatattttcatttgtctctccttaaacttttgccaaacaagatcgaggatgtcttgcccaaagcaggataaagtttgttccgttttgaagcttaatctgggttggagattttcgtatgtagtactcatgggattttggcttttaagtttctttttgcaagaatctttgtaggcacaagatctacatggtgcttttggctgagtccggagtatatattgtggaaggaataaattaggatgattatgcagtatgtatggtgtttggggaatgatatcatgcctttttgtggatgatgatggtttattatgtgggaaagattgcaataggttattgatatttatgtggaaagcaaccatgctcgaagcaggatctgctgagatcaaaatcttatctgagaataccttggtattcttatctgttgccatagattgttcgacttccatgagaagtttatcttggccatcacgggatttctcctcgcgataatctagtaacctttcttcatgatgagggatatcttgcattttagcccttttttctgttatcttttgatctgagggcacgaaatttttgaaataatatgccaagctatttaaggcatgagctttttcttttttgttttttgtttgccacaaaagatttaataacccatgttgtagctctgttattctgaaattgtgattaaatcgttctccatggcctctgggcagttggggcagtctccatgaactcatatttgtgagccattcagacttctgtgaagccatttccctgcatatatattcaaaatctttagtagcttttaataaatatctatcttcccatgatgtcttacctggcaattctatagattttggaagatatgatgagaaagaatagttgtctatattctcactaagctcatattcattaattctttcttcagactcaagattaggtacttctaagttgtcgagtttgtcgggttttggggagggggaggttccaccacgctttcgtacctctgagatatatggaacattattttgatatgggataaaagtaattccttgctcatgtattactgtggtttgtactgattgttgaaggaaccttaggccaattatcatgtcatcattaatcattgacaaatctcttattgtaatctcatctattatatatttagttgcattaatgtaaacctctgagatatatggaacattattttgatatgggataaaagtaattccttgctcatgtattactgtggtttgtactgattgttgaaggaaccttaggccaattatcatgtcatcattaatcattgacaaatctcttattgtaatctcatctattatatatttagttgcattaatgtaaacctccatattataagctaactgattatgaattttctttattccggacatgtctgtggaaacttcggccttattgtcatcaattgtgtgaactatttcaggacatcttgtgaaatatttgtcatgaataatattctttgtacacccagtgtctactagtgctaatattttataagatactttgggtgtcaattttactttaacagggattcttatacctaatatttctttgaaaggcaatcttactatatatttatttccaaaattggttatggcctctcttagttgaattattttagcagtattactgtcttttaatgttatcaattgctctttaaattcggtgttttgtatgtccttattctctggtaatgccttaatatcgcaattattttttaggttctctaattctacttctagtttatttagtctattttctaacactcgtactctactagataaagtcttttcatccgattctaattctatttcttttctccatttttgtttatttgcttttatacattcagcacaagcttgttttagacatatactacaagtcactctattttcttgactagggtaatatatgcaaaaagcacatttgatattatagtcaccctttcctcgaatccaatcatgttcacaatttaattgatccatcatttcaacctttagacctgctaattcgtcaattaaatctaactcttcatcggatgattcatattcttcgttgatagtttcaacttcgtctgtttctatgatagaatatattgattcgtcatcttttatttcatcatcgcatactaatatgttttcgtttacgctatctataattagaaccctctcttgttcttcatatttactagaatatctcttttgatctttatttgggcatgttctacttaaatgatctggcgagttgcatataaaacatctgcatgttttgtcataggttttctttggattatatcttcttacatttcttttatgtaagaagggtgctctattatctgatcttcttaagaaatatcttttctttgttctaatattattatggtttctattttgatgtttataaatccttttacttctaggcttgtcttctccatatgacaagggtatttgaactattttattgcagaaattgtaatccgagtgtttcatagatctttgggcttggatacccgtgcatatttttcttagttgcttaaacacaaaagttatagcttgagagatattgatttcagctccttcagtttcctttttatattcttcaaatatcatacttcctagtgggtcaggtaatttattaaagtaacgttcaactattcccctgttatatccttgtttagcagttgtagcattatataaataatgttgggagaattcttttatgcctttccaacttgttaacgttaatttttctatttcttttaacctttcattttgcaaagttgtataacctaattccggatcttcagctataataatgttagatataacatttgcaaaattatgcggattgctaccagctcttttcaattcttcataattattaggattcttttcaacccattgttcccatagaatcttagcagattcacctaagaatgtttctaagtaggttatcatatcttcaactttacttcctatattgtgctggttttgtatatatttttgaactattaaacctttccaaatactaataatattaggccaatcaatagggtcatgtgcggctaaatttaatatagcaccatcactcctctggttttgaaatttaacaggcttctcaaagtctcttctctttgtacccatatgcctatattgacctggtatatagttatatgaaaattcttctctatcagggggccattttcctgctgccctagctggtctttctctttctccttcgtttttcacagtaccttctccatatctttttctctttcctgttcctaagtccacttccatagcttccattgcattatcaagattatgtaaccctacttcatctaatgtgtttataaaatcattatattgttctgtattgtctatttcattttctatattctccatctcatttattagattaatttcttcttcataactttcaagaaataatctttcattctctgcccactgctcttcttcacttaaaattttaccaagattttgctcttctttgtcatacttatcttgctctttcctctttatctgttctatcttggtttcttgggttttaaaaatttctactgccatatcttcgttcttctttactttctttactctagctaattctctatagaaataaagttctttatctcttattttaggccactcacacttcatagagttattatattcttcatttatttcctttaatttattttcgtaatattttatctcactttcttgatctaatttttccataaactctgaaacactatgtcttctattatctattatatttctatcagatgcttctgtttctaagtcatctgtggttctgggtttgtaatttataaatctaatgctggtatttcctttactattttgataacttataaaattttcaggctgactcaaagttttgctttcaattaaatcactaattttccattcttctcctgccctttcttcagaacttatttttaaagggctcatgaaagttattcccttagagtgcatattttcaatcacgtcatttacatttattttgtatttggaggcacttctattagttaatcttcctataaattctatgcttactagcaaatttgttcctttaaattcctcgtatccctttgtttgaaaaccaaaactcattttatctataaattcttttacaggcatcattagatctggggctatatatgttatcaacatattctcattcatgtcaccttctaaaaatcctaatgctgctttatctattgtgtcccaccttttatctaacagagttattagaactttagctcctaatttctttcttgtcatacctttgattcctattatatacataccttggtgaatatatttataccctgaatactttaatccattttcaaattccttggctacaatttttaactcaactggctttgttaaaacgcttaactctacttctctagatattctgtataacccatttttattctcaaaaaatcccatgcaatatatttgttgaggtcttattgcccttaaagtatctcgttgatatctttcgagctgtttgtctacttctgcaatatcttcaagctcatctatgtcttcatttttacctttttgtttatcaatacaacttaaagatttatcgtctctgcttgctattcttctaaacaaactcctagataggtccat

SEQ ID NO: 23231 - DNA, 1916 bp, Oryza sativa
  Clone ID: TF_OsC359_7376
catggggtgcagttttcaccaccgccgccgccgcggatcccgccgcctcccgccgtccccgcgtgcaataaagtggggggaatcattccccgtgattccctctccctttccccccatttttccatctctctcttgcgttcaaacgggcggatttgcccccgcaaatctcgccggcgccattgatggcggctggacctcccgcgccgatttccttcccctccggccgctctctcccccttccaaccctatttaaaccctccccgcacctcctccgtccgtttccgcctctcgccgcccttcctcctcgccggattcaagctcgcgacgtcgctctctttctccgccgtcgccgccgagctccggtccgccgccgccgtcgccccgagccgcctcccacctcggcgccgcctccttcggcttcgccgcatcctcgccgacctcgtccacccctccgtttcggtcgccgaccgccggagcgccgccgtccccatcgacccgagccgcgccaccgcctccctccgctccggccgcctcctccgtcgccgtcgtcgccccgggggtgtgtaccgtcgcctcctttcccccttccctcccctctcttggccgccgctccgccgtgccggtggtcgccggcggcgaccatcggggcgcggacgcgctgcctcccgccgaccgcaccggcatggctgccctcgggcgcgccgagtggctcccgcgtggggcccggccgtcagccgcccgcgccctcgggatgtttaacagagaaaaaggaaagaatgtcagcgggtatgcctccagtaacttaagtttccaactcaatccaccactggcctcaagagagttaacaagggcacacccttggtccattccaagcatgctgcttagttcacagctaccattggttggaagtcaagaccaaaatcggtatgtgtttgatcgagcatttgccacccaggtcaatgagcttccaatgccagaagaggatgtccccttttgtcacgattgtagagaacgaggacactatgccctgaattgtccatgggtatatgccaaagaagccccttcctttggtttagcagggcagacatcgctaaaccagcctcctcgcagcaagtcaagcttgcagcctagtgtgcaaagtagagagcccaatggagagaatccattgaatcccgagaattgctttcctcctagcctttcgtaccacatggggtcacgtactaagcaagccaaaggcaagaagagtaagaatcagaagagaaaagcaccgatgcgaactgaagaagaagtacataagatgactattaccagcaccgaatggcctccagcagggataactattcctagacgtcaaagaggaaataccttccgaggtgcacgacagttgacccagcacctcgtaagccatggcggcagagtatctgatagtgaagggtcagatcaagtctcctcggattatgaagatgagtctctccgacatctcggcgaggaagagatggaatcaaaagcatgcccccgttgtggagaaattggacacgttgctagcatgtgtttcacactctgccctcattgtgaggaagaccatccaccaggtgaatgtcccacccgcaaggtcacatgttttctgtgcgaagttagtcagctccaacagcaacatcgacgatatcatccacagcaccaatgctcctcttgctgcacctgactctgcaataaatcatagcaataataccttcagcaccaaccattctctgcaccgacggcctcagcaaagaattgtcatcgatggaagaagttgtgtctctccccgacctactccaggccgagcgaagggcaatcaacctcaggaggatgatacgaagcagaagaccgttattcgcttcaaccagcaatcagaaggaagcttctcctgtgaatga

SEQ ID NO: 23232 - DNA, 3447 bp, Oryza sativa
  Clone ID: TF_OsC359_7371
atggtgggaccacttccagctacgcagccagagggacagcctatcacctgggcccatttcaccgccgccttccggaggacccatgtgcccgccggagtcatggcccttaagaagagggaatttcgggagttgaaacaaggcaaccgctccgtgatggagtatttgcacgagttcaataatttggcccggtacgccccagaggatgttcgtgaagatgaggagaagcaggagaaattcctggcagggatggaccctgagctatctgttcccctggtggacaagagcatccgcctggaagccaagcacaaggaattggagtcgcacaagcgtcgcttggcgaatttccgcaaccaacagggggctaaccaaaggatccgctacaccaatccctatccagggggatcctcctcgcagccgcagcagcaaccccgctccgcgctccgacctcaattcgtggtgcgcgtcccacagccgcagcagcagcagaatcagcaaggggcccatgcaccccgccctcctgcaccagccgtgcagcctggacaaggccgcagggatgctcaaggtcaacagtgtctgtgcttcaactgcttcaagcccgggcactttgcggataaatgcccaaagccgaggcgacagcaaggccaagcgcctccccgccccaacaacggtggtaaggatgtcactcggggccgtgtgaaccacgtgactgccgaggatgtgctgagaactccagacatcatcgttggtacgttcctcattcattccatccctgctaccattttgttcgactctggagcttcccactcgtttatatctgtgccattcatggggagaaatcagctgggggtagaaaggcttaggaaccctctgctcatcaccacccctggaggggttatgacagcaaagtattatagccctgccgttcctatagaaatccagggaattgctttcccctcggatttgattcttctagacaccaagaacttggatgtgatcctcgggatgaattggttggctcaattccaaggagtagtggattgcgcaaggcgcactgtcactgtgtatcggggccctgatcaaccggttgttttctttgcacccccaacttccgccggcagttcagtacttcatcagctaggattgccagaaatacccatcgtcagtgagttcggagatgtgtttccggaagaactacccggtatgccgcccaagcgagagattgagttccagatagatcttgctccaggaaccgctcctctgtacaagcgaccctaccgtatggcggcaaatgaactggccgaaccgagcacttccccctggggtgctcccgtgatttttgtggagaagaaagagaagacaaagaggatgtgtgtcgactacagagctctcaatgaagttactatcaaaaagaagtaccctcttccccggatcgatgatctgttcgatcagcttaaaggtgccactgtattctccaagattgatcttcgttccggatatcaccagttgcgcatccgtgaagaggatatcccgaagaccgcattcaccacgcaatacggactgtatgaattcacggtaatgttgttcggtctaaccaatgctcctgccttcttcatgaacttaatgaacaaagtgttcatggaatacctggataagtttgttgtggtctttattgacgacatactggtgtactcacaatcagaggaagaccatcagcagcatctccgtttagtgttgggaaagctccgggaacaccaattgtatgccaagctcagcaagtgtgagttctggttgcccgaagtcaagttcttagggcacgtgatatctgctaaaggagttgttgtggatcccgaaacgttgctgaagaaggaagaaaaatttgtgtggagccctcaatgcgagaaagcattccaaactctcaaagaaaagctggtttccttgctagtgttaatcttaccggatactcgcaaggacttcctggtgtactgtgacgcttcgcgccaaggattggggtgcgtattaatgcagaaaggtcatgtggtagcctatgcctcacgccagctacggccctatgaaggcaactatcctacccatgatttggagttagccgctgtggttcatgctctaaaaatccggcggcagtatctcattggaaatcgctgcgaaatatataccgatcataagagtttgaaatacatcttcactcagtcggatctgaatcttcggcaaagaaggtggttagagctcatcaaggattatgatgtgggaatccactatcatcctggtaaggccaacgtggtcgccgacactctaagtcgaaaaagccattgcaacactcttggcatccgtggcattccaccggaacttaatcaacagatggaagccctgaacctaagcatagttggtcgtggattcttggctacgctggaagccaagcctaccttgctcgatcgaatccgcgaggctcagaagaatgatccagatatacatgggatcctcaagaatatgaaacagcgtaaagctgctggtttcacagaagatgaacacggaaccctatggaacggaaatcgtgtatgcgtaccggacgacaaggaacttaaacggttgatacttcaggaagctcacgaaagtccttattccatccaccctggcagcacgaagatgtacttagacttgaaagagaaatactggtgggttagtatgaagcgcgtgtcaaagcagagcaccaacgaccggccggacttctccaacctctccaagtaccagaatggaaatgggatgaaattgggatggatttcatcaccggacttccaaaaacccaaggcggatatgattctatatgggtagttgtggatcgattaaccaaggtagctcgatttattcctgtgaagaccacctatggagggaacaaactagcggagctctacttcgctaggatcgtgagtctccacggcgttcccaagaaaatcgtatctgataggggaagccaattcacctctcacttttggaagaagctccaagaagagttgggtactcgattgaatttcagcaccgcctatcacccgcagacagatggacagaccgagcgtctaaatcaaatcctagaagatatgctccgcgcatgtgtactagatttcgggaagacctgggataagagtctcccctatgccgagttctcctacaataacagctatcaagccagcatacaaatggcaccatatgaagcgttgtacgggcgcaaatgccgaacaccgctcctgtgggaccaagttggggaaagccaagtgttcgggactgatatcctgagagaagctgaagctaaagtcagaatcattcgggataatctaaaggtggcacagtcacggcagaaaagttatgcagataaccgtcgccgtgacctggaattcgcagtggatgattttgtgtatcttcgagtcacgccattgcgag

SEQ ID NO: 23233 - DNA, 5727 bp, Oryza sativa
  Clone ID: TF_OsC160495_1
ttagccgacttctctcaaaatgttggtctccctccacactgcaacttcatccttaatatcactgaagagctccgctgccgttctcgccttttgttcaaagatcctgaggtttcgttctcgccacacgaaccagcagatgaggatacaaagggagtcaaaagcgcccctgtagcccgtctgaaaacagagtctgactttaatccaccagtccgcgaactcccgtgccgcgaagaacatctcatacacagaggctgtgcagaaaactctgttaggagtgagcttccaactggtagagtcttgggcatcctcttgcagctgtacctcctgaatctcatcccacaaacgaaaatattccgataaggccagcgcagagaaactccctcgaatgtcgcgcacccagcgattctgcgagagcgcctccgccacagtcagcttcgttctgcccaggtgtgtgaagagcaaaggtgaggagacagagatgcagcccctcggcaaccagttcgccctccaaaagtccgtatctttaccgtcccctacctgaaacgacgccactgattggaacagaccggtgatgtcgtttgtcggtactgagtttatcagagtccacggccttcctctttgctccaatcgtctagcgagccatttcattcgcatcgcttggccaaataattccagatttttaactcccaatcccccgcactccttcgggctgcagacgatatcccaagccactaggcagtggccgccattaacctcctcttgccctttccacaggaacgctcggcatttcttgttaaactctttgattgcccattttggcagcacaagcacagacatgaaatgaactggcagcgcggtcagcaccgatttgatcaggcgcagtcggccgtcgggagagagcagtttgggcttccagccggccacttttttggacagccgatccaaaatcggttgcacttccgccttcgtcggtcttctcagggagagtggaagaccgaggtaagtgatcgggaaattctcaaccctacacccaagcagctgttgaactccgaccaacacatcatcatcgcacctaatcggcgtcaaagcactcttgctgaggttggtcttgagccctgtagcttttccgaaaagctgaagaatggcgtttaccgctgttgcctccctctcgattggttgcaggaacacaatggtgtcatcggcataaatggatgtgtttgggatggaacgtcgagtgtccagcttggcaagaagcccccaggaagtagctttggcgagcaagccttgcagcgcatccatgacaaggacaaagagtagcggcgacaacgggtcaccctgccgcagtcctcgcgccggcttgaagctgtcactttcatggccattgagcaagattctggtttcagaagttaggagcagggcagctatccacgatcgccacctggacccaaagcctctgtttcggagcaagttcagcaagaaacaccaagagattgtgtcgaacgctttagtgatgtcaagtttcaggaggatcataggcttctttcttcggtggaattgcagcgctaaacctctgacaaaaatgaagttttcgtgtatcgatcggccacggatgaaggcagtctggttttcagcaactagatcgcccattctcggcgccaaccgggacgccaaaatcttcgttgcaagcttggaaaagctgtgtatcaggcttatgggcctgtaatccttgatcaacgtgggcgcatccttctttgggagcagagtaatcaccgctgtgttgagattgtcgagattctgatgattcccagagtgaaatttcgtcagtgccgccagcacttcccctttgatgacttgccaacaccgttggtagaaaagcccggtgaatccatccggtcccggcgccttctcgtttggcatctcttttatcaccttccaaacttcctcttcagagaaaggcacttccagctcttgcaggttcggcgccggagggaagatttgattgaattggagctcagccgagtcgggatccgccacacccaaaattccctgaaaatagtccttggccgagttgacttttccctcccggagcggtgagatccgaccctgctggcgcaatctgaggcgttagagcgtcgcgaatcccaggctgcggttcttcaggaatgccttggaactgggttcaaccgcgcaaaggagtgtgatctctggcgcagcagcaaaacggtagatcaattcattggcaatctggagcaggaggcgaaagcgactgatcctctttggtccccaggaacagaaaggcataggaagacgtgccctcttgacatacagaatgacaaagggatctgagtcctcaactggaggcggacgggaatgcgcctcctcttgatcgaagtccagaaacatagagcaaaaagtttcaaaacgaaaccttcttctaccctgcggggtttccccgcaagaaagcaatagcgcacaatgatctgaactggacgaactcagcgcttgcaagtgcgcgtccggaaacgcatcctcccattccgttgagacaagcaccctgtccaatttgaccagggtgggaatttgttgctcgctactccaggtatacctcctcccgaacagatacagttctttgagctcaagttcattaatcttgttgcggaaagcattcatgagccgcctgttcacccgcgagttgttcttgtccgccgctgccgctattaagttgaaatcacctgccacaagccaaacctccccacagattcctctgatttcggcgagttcctccaagaacagaatcttctcgttatcatcttgtggcccgtagaccgaagtgaggaaacatgaatggttgcctgcaatccactccaacttcgccgtcaccgaccattgtcccaaatgcacttgtgatccacggaatacggaccccttccaggccacaataaccccgcccctggtatgtgacgcgggaagggcaacgaaatcatcgaaatccggcccacacagttcatggattacaagcaaatcaactacctctaatttagaccccgccgccaccagcgaagccaggtccggcggtggaacatctgcttcctccagcgcaacatccacatccagcagctccgctagcaccttcatgtgctgggtcgataacggctgatcaatcacggtagtgttctgctggaaggtgtcttgatccgcttcttcttcctcttcaatgatgcccatcttcttcatcgttaccttctgcgcttttgaagttgaatggcgacgagctccgttcccttgttgttgcagacgtgggctgcgccacggcgtgaaccactcagggatcacattgcgccaacaaggcttggatttggggactgactccggcggcctcctcccgagcagggaggggggaggctcagtagcgaccgacgcgaggaatccctgaagaatctggtccgcctcggggggtagcggcgtgttcgccggcgacccctccgaggttggccgcgcgcgggcgagtgccgtcgacggcgaggcgggaggtgggagcatcatctctccgctgagcgcctccctgctgctctcgatctcagtttcctggaccggccgctcgtcatcgctgtgggccacttcttcttggtgggcctgaggtggctcgtcctcgccacatacaacttggcccaccgacatttcctgtcccaggccagccacagcccgtctcaggtcagcctgccccagatcctggcctgccaagcccatgaggccgatcccctccgtcccaggttgctcatggctcggtttcttctgggcctgcttccgcacatagacacggaactctcccgcctttgccgccgattcaaacccacgatcactcctgctctcctgcgctgagctcagcgcgtcgccagtcgccttcaatgctggccgctcgcacccatgctccacgagcgacacctcagccatcgtatcctcatcactgagctcagcacggtcgccatccttctccgtgccgagcgccgacagttcaccgccggttaactcgtccagggagagttggagcggcggtgaaagaggcgacacaccaccggccacgagcgcccagctgcagtcgtcgtccagaacgataagcgcctttgccgttgcaaccacaggcgccgccagcggggtagcgattcccacgtcggcccctggttgctccactgcttgcaccgcttgcggagagaaccacacacccggcgcttgcaaaaccaacgtcggcgaatgcggctgtgacgccaacacctcccccgcctccatgtcttgaacaacaatgtcagcccggtctagaacccggtccgccgctgccatgtcaacgacccccaccaccgcagcggcgtagacatgaccgcctcccacctccgtcggccagggaccagcgccatcgtagcgacctgcccagcaggagaaagtgttccgccgggtgacgtcttcatcatcggagttgtcgtcgaaggaggtcggcggagtatgcaacggcgtagggtcaatgacttcttctacgtggatgatgaccggataggtgagggccggcttctcccgcggcggggaaggtggtgtcgcgctcgtcccctcccgccatcgccctgcggccgggcgttccgggatttccacgtccagatggtgggaaaggtcggacggattcttgaaccaagcgaagagaccgaggcagcgcgcgtccgccgccgggatcagctcggcaagctgaccgtccaagctgttgaccagcttgtgcatggcttcctcctcccaggcgtgcgggggaaggccgtcgagggagatcttggtgaagaactggaaagccgaggcctccgcccagcagcatatgttccacggcttgaacgaaacaggcacctcattacagaacagcgcctttgaacaccgcaggaccgcctccttctccctctggttccgaaacgagatcaggaaatcctccgggcgcgtgacctccaccctgaagtaacgctgctgcacgcctgtgtgcagctcgattgcctccgcaagctctgccggcgagacgggcggccgtcccttgagcaccgacgccatcagggagagttcctggaggtacctctcatggcgctccatcccggaggtccaggacagcaccacccgccccctttctggccgcgagtcgggctcgccgatgcggtacttttccacgaactgcggcggcgtggccgcacagatctggtagccgcccaggttagcacccgccatggctatcaccgcgcccttttctgtcgctgctctcccctggctctgccgccccggattgcccccagagacctccttcctctccggacacgcccacgctaggtgacccgggtaccagcaatggaaacaccttgtctctcccttgcagtcaagcttgcgatgacccaatcctaggcacttgaagcagcgccccagaagccagcgagggatctccttctccgaattgaatgccctgtcatggttgctgaactccttcctcggcttgaatgctctgtcatgtttgttggaggttgggtcacctgcccgcagtgaatgctccgtgctccccttccgccggacctccgtccaagctgcctcctcagcggcggcagggcccctacctttcttcacgacgtcgcgccacgagccgaactgcggcttggatggtggccggcgggcaccggaatggtggtccgccgggtggtaggtgagagcctcacgccccat

SEQ ID NO: 23234 - DNA, 1924 bp, Oryza sativa
  Clone ID: TF_OsC359_7998
atgtttaacagagaaaaaggaaagaatgtcagcgggtatgcctccagtaactcaagttttcaattcaatccaccactggcctcaagagagttaaccagggcacacccttggtccattccaagcatgctgcttagttcacagctaccattagttggaagtcaagaccaaaatcagtatgtgtttgatcgagcgtttgccacccaggtcaatgagcttccaatgccagaagaggatgtccccttttgtcacgattgtagagagcaaggacactatgccctgaattgtccatgggtatatgtcaaagaagccccttcctttggtttagcagggcagacatcgctaaaccagcctcctcgcaccaagtcaagtttgcagcctagtgtgcaaagtgaagagcccaatggagacaatccattgaatcctagaaaatgctttcctcctagcctttcgcaccacgtggggtcacgtactaagcaagccaaaggcaagaagagtaagaatcagaagagaaaagcaccgatgcgaactgaagaagaagtacgtaagatgactattaccagcaccgaatggcctccagcagggataactattcctagacgtcaaagaggaaataccttccgaggtgcacgacagttgacccagcacctcctaagccatggtggcagagtatctgatagtgaagggtcagatcaagtctcctcggattatgaagatgagtccccccgacatctcggcgaggaagagatggaatcaaaagcatgcccccgttgtggagaaattggacacgttgctagcatgtgtttcacactttgccctcattgtgaggaagaccatccaccaggccgagcgaagggcaatcaacctcaggagggcgataccaagcagaagaccgtcatctgcttcaaacagcaatcagaaggaagcttctcctgtgaatgatagcaatatgcagtcctatcacatcatcacagaaccaatcaaggatgcagtcactagaacaatgccagctatccgcctgggccgcctcgaccgtgcgccggccggccgcgccgtcgcctcctccagcgtcgccgctacctcctccaccccggcctgccctccgtttcgcgcggtgatcgccggaggcgcgttcccgccgtcgcccttctcttttctccgcgccggccgcctccagccgcctctcccgcctcgcccgtgcgccgtccggccgcgccgtcttctccctcggcctcgcagccaccccctctccctcgccgacgtcgccaccacctccctcggcgttgctgcatcgccctctcctccggctgctcctcggtttcgccggaacaccgccgtcacgcgtgccgcctttccctcggtctcgtcggcacccactccggcagcccctttcgccgtgccagtgcgccggccgacgtcgccgtctccacctccggcatcgcagcggcaaggacgccctcggcctcgcctccccttcgaccgaaccccgccggtgttcgtcgtcgtcgtcatcgtcccgtcggttgcccggctcgtcgtctcgcggcgccgcctccgtcgtcggcatcgcagcggcgtggtccgcgtcgtccccgtctccgtgcagctgccgccggctgccctcatcgcctcctcgccggccccggtcgtcgtcgtcgtcgtcctctcgtcgttcccggtcgttgtggcgttcgtccctccgtcgagccgttctcgtccgccgcccgcgtttcccctagtgtgctgcagccccgtcatcgtcttcgtcctcggctccgcgtcgtcaagcctcgtgccggccacgtctcgccttcgtccaaggatcgccgccgaagccgtcccctcgccgttcgtctccgttgtgcccgtctgtctccgccgcgcccgttcgtcgttgtcgtccccgcgcctcgtcgcgtggtggtaa

SEQ ID NO: 23235 - DNA, 1367 bp, Oryza sativa
  Clone ID: TF_OsC359_5677
aaaagtttttaaatccttccctaagtcgttgggccgatttcggcccaactctttctctctccgcgcggccgaaccggcccaatcggcccagcagccgccccctcctctggagtccgatctcttcaatccaaggctataaataggaccccctagtcctcctctttcgtttgccccctctcccgtcctctcccgtgacccgtggagccgtcgccaccgtgcaagccgccgccgccgtcgcttcttcgtcgccggccgtcatccgtcgtcgttcggcacttcggtgagcaccatcgggttcgtctcgtcgtcctctacgtgtacatgccctccaaatccgcagccagccgctctatctccggcgaggtcgccatctttatcttttgtatagcatgattcattatagtgcgccagactgtgaagtggcgagaagtccatgggggtcgctggggagtccatgccttgtttataagggggtgactatgatccaggaacggtgcactgttttgagttgtgttgtgcaaagggtattgtcacgatttccccctttgcaatgccgtggtggtatttcggggcatagcaacatgtgtggaatcgtgtcttgtgggtacagtggtacacctctggccagagtaaaactattcgaatagccgtgcccgcggttatgggcgggttgagcaatgtttttcgtgattagtctcacaagatccgagggaaaaggaattccctgaatttctataggaacagcagggctataatactttgctgtcataacccctccaggggtggtgatgaggagagggttcctaagcctttctacccccaactgatttctccccacgaatggcacagatataaacgagtgggaagctccagagtcgaacaaaatggtagcagggatggaatgaatgaggaacgtaccaacgatgacgtctggagttgtcagcacgtcctcggccgtcacgtggttcacacgaccccgaatgacatccttaccaccattgttggagcggggaggcgcttggccttgctggcgcctctgctttgggcatttatccgcaaagtgcccaggctcgaagcaggtgaagcacaaacgctgcggaccttgaacgtccctgcggccttgaccagactgcgcggctggcgtaagaggacggggcgcacgggtcccttgctggctctgcttgtgctgcggctgcgggacgcgcaccacgaaatgaagtcggggcgcggagcgaggttgctgctgctgttgctgctgcgaggacgatccttctggaaagggattcgggtagcggatcctttggttagcctcccggtgaatgtggaaattcgccaagcggggcttgggcgaccccaaggccttgtgc

SEQ ID NO: 23236 - DNA, 4404 bp, Oryza sativa
  Clone ID: TF_OsC91_2068
tcatgccttaagattcgtggcatgaggcaagaaactgtgcggtggaaattgttcccgttctctcttcaagagagagcaaagcaatggtacacctctaccgttggatgtgtaaacggtagttgggagaagttgcgagacagattctgtcttgccttctttccagttactcgtattactgccccgagtatgtgcttctccaacatttccatacgggttttgatgcagcaacgggggttcccgatctttcgatgagaggaggataaacttcgatttggggaaggatacgacgttggcggtccgactacaactaccacaggggtgctgcgccttagcaaccggtacaccgactccacgttgttgctgttcttgccgtgccaagaacaaccttgaacgagctcgagctctagtcattggtccttgctgtgcaataggcgtggttgtatcgttggaagggatgtcctcatcatcctccccttcttgcatttgagtcatcctcgactctaactcatcttcttctcccaaatatggctttaaatctgcaatgttaaacgtggggctaaccccaaaatcggcaggtagctcaagcttgtatgcattgtcattaatcttttgtagcactttgaaaggaccatcagctctaggtagcaacttagattttctcaaattagggaacctatcctttctcaaatgcaaccaaaccaaatcaccaggttcaaaagcaacatgtttctttcctttgctcccagcaagtttatacttaatattcatgcgctctatgttctccttagtggtcttatgcagttttaacatcaattcagcgcgatattttgcatcaaagttcactctctctgaagttgggaggggcaaaagatcaattggagcacggggtagaaggccataaacaatctcaaaagggcacttcttagtagtagaatgttgtgaacgattataagcaaactcaacatgaggcaaacattcttcccacattttaatattctttttcaaaacagccctaagcattgtagataatgttctattcaccacctcagtttgtccatcagtttgggggtgacatgtagtagaaaataaaagtttagtccccaacttagcccacaaggttctccaaaaatgactaaggaattttgtatcgcgatcagaaactatggtgtttggcactccatgcaagtgaacaatctcacgaaagaacaaatcagcaacatgtgtagcatcatcactcttatgacaaggtatgaaatgcgccatcttagaaaatctatctataacaacaaagatactgtccctccccttctttgttctaggcagccctaaaacaaagtccatagaaatatcctcccaaggcacactaggaagaggcaaaggcatatacaaaccatgagggttaaggcgtgacttagctttttggcatgttgtgcagcgagcaacgaacctctccacgtctctcctcatcttaggccaaaagaaatgatcagcaaggatatcctccgtcttcttcacaccaaagtgtcccatcagccctccaccatgcgcttcctgcaataatagcatacgcacggagctagctggaatgcataacttattagctctaaacacaaacccattggtgagaacgaatttgttccaagtccttccctccttgcaattcaacaacacatctttaaaatcatcatcgtgcgcatattgctcttttattgtttctaagccaaaaattttgaagtcaagttgggatagcattgcgtaacgtctagacaaagcatcagcaatgacattttcttttcccttcttatgtttgatgacatatggaaaagattcaataaattcaacccatttagcatgcctacggttaagttttgcttgacttcgaatgtgtttcaaagattcatgatcagagtgtataacaaattctttgggccataaataatgctgccatgtttccaatgttcgcactagagcaaacaattccttatcataagtagaataattcaaactaggcccactcaatttctcgctgaaatatgctacaggtttgccttcttgtaacaacacaccacccaatccaatcccactagcatcacattcaagctcaaaagttttgttgaaatcaggaagttggagtaaaggagcgtgtgttaacttatctttcaaagtgtcgaatgcattcctttgtgctgcagcccaagtgaatgtgacatttctcttggtaagctcatgtaatggggctgcaatggtgctaaaatccttcacaaagcggcggtagaacccagcaagtcctagaaagcttctcacttgtgtgatcgttgttggaaccggccagctatgtatggcttcaaccttggcttgaactacttcaattccctgtggagtcacaacatagccaagaaaagagactcgatctgtgcaaaatgtgcacttctcaaggttaccaaataaacgtgcatctcgtagagcatcaaaaacaacacgcaaatgaccatgatgatcctctattgatctgctatatatgagaatgtcatcaaaatataccaccacaaatcccttatcgagtaactcttgcacttgacgctgaatctcctttgtttcctccgggttggtcctgtatggcgcacggtttggtagagaggccccaggaatgaggtcaatttggtgctcaatccctcgaattgggggcagccccggtagaacctcctttgggaaaatatcagcatactcctgcaaaaggttagtgaccggaggaggcaaagaaataggagtatcctcaattggaaataaggtttctttgcaaaccaaagcatagcaaacaacagtgtcagtgtcaacttcatccaaatctgattttgttgcaatgaaacaagatcccttcagcttaatctcatttttattattttgaacagagttggtgggtttcttcttatgcttctcaagttcattagccgcaataagatgctcactcctagtacgttccttgccgctgctattaagccattgaatatagtagggctgtggatgtggctgtgtgctcaatgcaagtttctccaccatttcagcactagccaaattattgcagcttcctccatctatgatcacgcggcaagagcgttccttgatcacacacttggtttgaaacaaggtgtggcgctgattctgttcagccctttccatttgtgcgcttagcactcgctgcaccatgaggctctcatagtgctctgcagcttcagccccaatgtgttcctcatcttggtggggcgcgtcaccttcccctgcattgttagttgcaagcaaagcataggtttcttcatctaaatcactagcggaggagtacccaccatcagctctcacaatcattacacgagtgcttgggcagtccttgcgcacgtgaccatagcccttgcagcgtaggcactgaatatctcttgttcttcctgatgaagctactgatgatgagctcttggaaggtgtagcagcaacccctcttgttggttcactcgggcatggtgtagagtttgttgtagagggacgcagcttgttgcttgaggacgatggtgctgctgctcgagttgacggtgcagcagcgttagaagatgtccaagagctagcacgacctgcagaaatgttagtcctgaagctagctcttcgtccctgtacttccctttcagctttacaagcaagatgaaacaaacgattaattgaattatattctttgtaggctagaatgtcctgaatttctcggttcagcccacccatgaatctagccataccagcatcatcattttctaccaatccacaacgaagcattctagtagcagccctaacacgtttattctcaggaaaatcatggcaagcaaatttctgatcaatggctaactcccaagtaagatatgcatcagggtcatattttccatcaaagcaaggaatggtaaacttgatcttgcctaaagaatcatcattatcacgtacctcccgccgtggtggagcgcccatgccatggcgctgccggcgctgttgtctttgtggacgaccaagtacctcctcatcatgctcagtgtcagcagcatactccagttcttcccttgctgcgatgctgctattagcatcatggccattgtggttgcgcctagccgatccatcatgaccatcttggcccattctctccaacgtattcaagatacctgcaagagaagtgttcacagccacaagggacctctccaatgaggaaagcttggagttggtgtcaatttgagcagcctccaattgaccaaggcgatcattggcgaccctaacatcctcatcaaggccttcagcatgctccctcacttggcgctcaaaatgttgtatgatgcccctcgtacgtggtgaatgttgagggtgctcccccgatcctcctgtcat

SEQ ID NO: 23237 - DNA, 3951 bp, Oryza sativa
  Clone ID: TF_OsC91_2397
tcatgggcctttgggcttgtaacttcgtttgggaccccggcccaagtggggcccatgtggggtgcgccccaatctggtggagcacgacccttgtcgagtaactcttgcacttgtgatgcagcaacgggggttcccgatctttcgatgagaggaggataaacttcgatttggcgaaggatacgacgttggcggtccgactacaactaccacaggggtgttgcgccttagcaaccggtacaccgactccacgttgttgctgttcttgccgtgccaagaacaaccttgaacctgataattaagttcacgagcttgagctctagtcattggtccttgctgtgcaataggcgtggttgtatcgttggaagggatgtcctcatcaacttgacgctgattctcctttgtttcctccgggttggtcctgtatggcgcacggtttggcagagaggccccaggaatgaggtcaatttggtgctcaatccctcgaattggtggcagccccggtggaacctcctttgggaaaatatcagcatactcctgcaaaaggttagtgaccggaggaggcaaagaaataggagtatcctcaattggaaataaggtttctttgcaaaccaaagcatagcaaacaacagtgtcagtgtcaacttcatccaaatctgattttgttgcaatgaaacaagatcccttcagcttaatctcatttttattattttgaacagagttggtgggtttcttcttatgcttctcaagttcattagccgcaataagatgctcactcctagtatgctccttgccactgctattaagccattgaatatagtagggctgcggatgtggctgtgtgctcaatgaaagtttctccaccatttcagcactagccaaattattgcagcttcctccatctatgatcacgcggcaagagcgttccttgatcacacacttggtttgaaacaaggtgtggcgctgattctgttcagccctttccatttgtgcgcttagcactcgctgcaccacgaggctctcatagtgctctgcagcttcagccctaatatgttcctcatcttggtggggcgcgtcaccttcccctgcattgttagttgcaagcaaagcataggtttcttcatctaaatcactagcggaggagtacccaccatcagctctcacgatcattacacgagtgcttgggcagtccttgcgcacgtgaccatagcccttgcagcgtaggcactgaatatctcttgtccttcctgatgaagctactgatgatgagctcttggaaggtgtagcagcaacccctcttgttggttcactcgggcatggtgtagagtttgttgtagagggacgcagcttgttgcttgaggacgatggtgctgctgctcgagttgacggtgcagcagcgttgggagatgtccaagagctagcacaacctgcagaaatgttagtcctgaagctagctcttcgtccctgtacttccctttcagctttacaagcaagatgaaacaaacgattaattgaattatattctttgtaggctagaatgtcctgaatttctcggttcagcccacccatgaatctagccataccagcatcatcattttctaccaatccacaacgaagcattcctgtttgcaaagcttgataatactcctctacagatttgtttccctgtctaagttgttgcaatttgtgtagcaaatcacgtgcatgatatgaaggaacaaatctagctcgcatgactcttttcattgcatcccaggtttggggagtgttatttggattggaacgaacaaattcactcccgccgtggtggagcgcccatgccatggcgctgccggtgctgttgtctttgtggacgaccaagtacctcctcattatgctcagtgtcagcagcgtactccagttcttcccttgctgcgatgctgctattagcatcatggccatgtggttgcgcctagccgatccatcatgaccatcttggcccattctctctaacgtattcaagatacctgcaagagaagtgttcacagccacaagggacatctccaatgaggaaagcttggagttggtgtcaatttgagcagcctccaattgaccaaggcgatcattggcgaccctaacatcctcatcaaggccttcagcatgctccctcacttggcgctcaaaatgttgtatgatgcccctcgtacgtggtgaatgttgagggtgctcccccgatcctccggagccgacaacagcacgatccgagcaacttgagctctcataccacttgatgcagcaacgggggttcccgatctttcgatgagaggaggataaacttcgatttggggaaggatacgacattggcggtccgactacaactaccacaggggtgctgcgccttagcaaccggtacaccgactccacgttgttgctgttcttgccgtgccaagaacaaccttgaacctgataattaagttcacgagctcgagctctagtcattggtccttgctgtgcaataggcgtggttgtatcgttggaagggatgtcctcatcattatggtcattctcccaccccttttttgattttggtgcggatggcggcttcttctgagccggctgatctgacttcttggccggtacgggtgattttaccggcgttttccaataacggttcctgggcatcgttgtttccttctccaggaaattcatggagcattgttccgtccttggttgaaactcaaacttttcctccttcccgttgatatggaaacggatactccccgttcccacgtcaatgttggctcctgcggtactaaggaatggacgccctaggatgagcggcatctccttccccatgtccatgtctagcaccacaaaatcaaccgggatgaagaaatcccgtatcttgactggcacattctccgctattcctgctgggtaacgaactgatgagtcagccagttggaggcgcatcggtgttggttccaacactgtgaagttgagcttgtcgaagacgtcttttggcatgacgctaacgctggctccaaggtcgcaccaggtctggtcgaattgttgtgccccgatcgagcaggtgatcgtaggacaccccggatctttcttcttctccgggagcttgtggagtatcaggttgctgcattgttccgtcagcttgaccacctccgttgttggcagcggtctcttgttgttgagtatgtccttgagataacgggcgtatgttggcacttgcatagcatccaacaacggcactttgatgtggatcttctggatcacaaaacgagcgaactgctcgtcttgtttcttcgatttgcttgcaggaatagggttgatctgcaccggcaagatcaacaacccacggagaggtgtatcgatcgctaaggcgcaacacaacgtctcgtacggttgtagtcggatcgtcaacgtttctcccaaatcgtagttatcacaactcaccgaaagatcgggccaacaacagcccttagcggaatcaaaaagttcaaaaaacgccaaaacatgatttttggacatattggagttattgggtgcattcgtggcaaaaactcactacgtgattcgcgcggcgaacttttgtcaattaatgccaatattggcacacgagggtgcgatgttttgtactgtaatcaaaaagttcaaaaagcgccaaaacatgatttttggacatattagagtgtattgggtgcattcatggcaaaaactcacttcgtgattcgcgcggtgaacttttgtcaattaatgccaatattggcacacgagggtacgatgttttctactggaatcaaaaagttcagaaagagccaaaacatgacttttggacataatggagtgtatcgggtgtcttcgtggcaaaaacacatttcgtgattcgcgtggctaacttttctcaaataatgtcaatattggcatatattagcccacacgggtgcgatgtttttgacc

SEQ ID NO: 23238 - DNA, 4209 bp, Oryza sativa
  Clone ID: TF_OsC91_2562
ttaactagatttttgctggcgggtactaaaagcaccgcccttgaaaaaatccacgcacattgaaaaatcattgcccattacaaaaatcaccacccaccactccttatccacaccgctccaaattacaaaaatctcctctggttcctccaccagcatccatagtacaaaaaaaccggaccggctcggcggttgaaccggaaaaaaccagaaccagagggctaggcggctcggtttgctgtaaagaccgccccgccagatttgacggtgacagttgtggggcttggtgaggcgagaggagctcagcggcagtgaggtccgatgaggcgggaaaagctcagtgacggtggggcttcccacatacggtggcttcctcatcacaggggtgctgcgccttagcaaccggtacaccgactccacgttgttgttgttcttgccgtgccaagaataaccttgaacctgataattaagttcacgagctcgagctctagtcattggtccttgctgtgcaataggcgtggttgtatcgttggaagggatgtcctcatcatcctccccttcttgcatttgagtcgtcctcgactctaactcatcttcttctcccaaatatggctttaaatctgcaatgttaaacgtggggctaaccccaaaatcggcaggtagctcaagcttgtatgcattgtcattaatcttttgtagcactttgaaaggaccatcagctctaggtagcaacttagattttctcaaattagggaacctatcttttctcaaatgcaaccaaaccaaattaccaggttcaaaagcaacatgtttctttcctttgctcccagcaagtttatacttaatattcatgcgctctatgttctccttagtggtctcatgcagttttaacatcaattcagcgcgatgttttgcatcaaagttcactctttctgaagttgggaggggcaaaagatcaattggagcacggggtagaaggccataaacaatctcaaaagggcacttcttagtagtagaatgttgtgaacggttataagaaaactcaacatgaggcaaacattcttcccacattttaatattctttttcaaaacagccctctccacgtctctcctcatcttgggccaaaagaaatgattagcaaggatatcctccgtcttcttcacaccaaagtgtcccatcagccctccaccatgcgcttcctgcaataatagcatacgcacggagctagctggaatgcataacttattagctctaaacacaaacccattggtgagaacgaatttgttccaagtccttccctccttgcaattcaacaacacatctttaaaatcatcatcgtgcgcatattgctcttttattgtttctaagccaaaaattttgaagtcaagttgggatagcattgtgtaacgtctagacaaagcattagcaatgacattttcttttcccttcttatgtttgatgacatatggaaaagattcaataaattcaacccatttagcatgcctacggttaagttttgcttgacttcgaatgtgtttcaaagattcatgatcagagtgtataacaaattctttgggccataaataatgctgccatgtttccaatgttcgcactagagcaaacaattccttatcataagtagaataattcaaactaggcccactcaatttctcgctgaaatatgctacaggtttgtcttcttgtaacaacacaccacccaatccaattccactagcatcacattcaagctcaaaagttttgttgaaatcaggaagttggagtaaaggagcgtgtgttaacttatctttcaaagtgtcgaatgcattcctttgtgctgcagcccaagtgaatgtgacatttctcttggtaagctcatgtagtggggctgcaatggtgctaaaatccttcacaaagcggcggtagaacccagcaagtcctagaaagcttctcacttgtgtgatcgttgttggaaccggccagctatgtatggcttcaaccttggcctgatctacttcaattccctgcggagtcacaacatagccaagaaaagagactcgatctgtgcaaaatgtgcacttctcaaggttaccaaataaacgtgcatctcgtagagcatcaaaaacagcacgcaaatgaccatgatgatcctctattgatctgctatatatgagaatgccatcaaaatataccaccacaaatctgccaataaaagcacgtaaaacttcattcattaatctcatgaaagtactgggtgcattagtgagaccaaagggcatgactaaccactcatataggctgaatttagttttaaaagctgttttccattcatctcctaacttcatgcgaatctggtggtaaccactacgcaaatcaattttggagaacacaagtgaaccactcaattcatcaagcatatcatctagcctaggtataggatgacgatatctgattgtgatgttgttaattgctctacaatccacacacatgcgccatgagccatctttcttaggaactaaaagcacggggacagcacaaggactaagagactcacgcacataccccttgtcgagtaactcttgcacttgacgctgaatctcctttgtttcctccgggttggtcctgtatggcgcacggtttggcagagaggccccaggaatgaggtcaatttggtgctcaatccctcgaattggtggcagccccggtggaacctcctttgagaaaatatcagcatactccttgccgctgctattaagccattgaatatagtagggctgcggatgtggctgtgtgctcaatgcaagtttctccaccatttcagcactagccaaattattgcagcttcctccatatatgatcacgcggcaagagcgttccttgatcacacacttggtttgaaacaaggtgtggcgctgattctgttcagccctttccatttgtgcgcttagcactcgctgcaccacgaggctctcatagtgctctgcagcttcagccccaatgtgttcctcatcttggtggggcgcgtcaccttcccctgtattgttagttgcaagcaaagcataggtttcttcatctaaatcactagcggaggagtacccaccatcagctctcacgatcattacacgagtgcttgggcagtccttgcgcacgtgaccatagcccttgcagcgtaggcactgaatatctcttgtccttcctaatgatgctactgatgatgagctcttggaaggtgtagcagcaacccctcttgttggttcactcgggcatggtgtagagtttgttgtagagggacgcagcttgttgcttgaggacgatggtgctgctgctcgagttgacggtgcagcagtgttggaaggtgtccaagagctagcacgaccagcatcatcattttctaccaatccacaacgaagcattcctgtttgcaaagcttgataatactcctctacagatttgtttccctgtctaagttgctgcaatttgtgcagcaaatcacgtgcatgatatgaaggaacaaatctagctcgcatgactcttttcattgcatcccaggtttggggagtgttatttggattggaacgaacaaattcactccaccaaatggatgcaaaatcagtaaactcactagtagcagccctaacacgtttattctcaggaaaatcatggcaagcaaatttctgatcaatggctaactcccaagtaagatatgcatcagggtcatattttccatcaaagcaaggaatggtaaacttgatcttgcctaaagaatcatcattatcacgtacctcccgccgtggtggagcgcccatgccatggcgctgccggcgctgttgtctttgtggacgaccaagtaactcctcatcatgctcggtgtcagcagcgtactccagttcttcccttgctgcgatgctgctattagtatcatggccattgtggttgtgcctagccgatccatcatgaccatcttggcccattctctccaacgtattcaagatacctgcaagagaagtgttcacagccacaagggacctctccaatgaggaaagcttggagttggtgtcaatttgagcagcctccaattgaccaaggcgatcattggcgaccctaacatcctcatcaaggccttctgcatgctccctcacttggcgctcaaaatgttgtatgatgcccctcgtacgtggtgaatgttgagggtgctcccccgatcctcctgtcat

SEQ ID NO: 23239 - DNA, 10023 bp, Oryza sativa
  Clone ID: TF_OsC91_2597
tcattcccacaagggagataacttgtgccgatcccgtgtagtctgaatatttctcagaaccaggtcgccgactaaaaaagctcgtgagcggacattgcgattgtgataacggtgcaatccttgcaaataccgagccgactgaattaaaactgcttcacgggcttcttccagtcggttgatatcatctactcggtcctcttcatagcgctcctcatggaagttccgaaatcgtagcgattcaaattccaattcactcggcaacattgcttctgctccataaactaggaaaaaaggcgactgtcccgtagcttgactaggggtggtgcgcaaggaccaaagtactgacggcagctgttctacccacttgccggtgtaaggacgcagccggtcgaagactcgcgcttttattccttgaagtaccatgccattggcgcgctcgacttgtccattactcatggggtgtgccacggaggcataacaaattttaatgccgaagtcttcacaaaagtctttaaatactccacatgtgaattgagtgccgttgtcagtaatgatacaatttggtaccccaaaccgatgtacaatattgatgaagaaatctctagctttgtctgcggtgattgtaatgacctgtttagcttcaatccacttggaaaatttatccacagctacaaagagatgagtataaccaccgaccgcctttttgaatgggctgaccatatcaagcccccaaaccgcgaacggccaagacagcgggatggtttgcaagtcctgagctggtaaatgagtttgtcgggcaaagaattgacaaccctcacatgttcgcacaattttgtcggcgtcggagacagctgtgggccaaaaaaaaccttgccgataagccttgccaacaatggttcgtgcagcagcgtgattaccacagatgcctgaatgaatatcttttagcagttgcctttcctcttccaaagatacacagcgttgcaagattcctgatgggcttttcttgtacaactcggtctcatgaatgacatagagtctgctgcgcctggagatctgctcggcttcatttttatcttgagggagttcttgtttggtcaaaaatcttatgaaaggttctctccagtcggcttcgatcatgcttacgccttgagtatccatggcttcaattgtttcttttctgggcacgattggttcgtgaagatgttcgacgaacacatcagaaggagctgcctcccgttttgagccaaaattggccagtctgtcggctgcctcattattgtgccgaagaacgtgggtgagctcaagtccatcgaatttgtcttctaacttgcgtacttcctgtcgataagcagtcatgttatcatcaaggcaggaccactctttcatgacttcgttaacaaccaactgagaatctccacggacgatcagacgccgaatgcccaaagagatcgcgatcctcaatccatggagcagcgcctcatattctgctacgttatgggacgcagaaaaatgtatccacaatacgtagctcaatctttctccagtcggggagattaaaacaaccccagctccagtgcctgaaagcctcttcgacccatcaaaatgcatggtccaatattccatcttttcctctggcatgtcttcttggcactcggtccactcggcgacaaagtcggctaaagcttggaacttgatcgaaattcgcggctgaggatatcttgtcttggagtcggccaaaacctcgctaacgaagtagattggtcgttggactttttgaacatggccgtcttcttcacgctcaacaaccaggaccgtgctcacaacttgagaagtcgccgacacgtataacaacagtggctcttgcggatgtggtgaagccagaactggaggagtagtgagaagtttcttaaagtcttcaaaggctttttgtgcttcgggtccccactggaaattgtcagttttcttcagcagcttgaaaaagggcatcccccgctcgccgagtcgtgaaacgaaccggctgagcgccgccatgcaaccagtcagcttttggacatctttctgggagctcggcggtttcatattgaggatggcgttgattttctccgggttggcctgtatgcctctatgagacaccataaatccaagtagcttccctgacggtactccgaagatgcacttttcagggtttagtttcatcctgaaagcgcggatgcttgcaaaggtttcttctaaatccgcaattagaacatccttctgcttggtcttgacgactacatcatcaacataagcttcaacatcgcggccgatctgagctgaaaaacatctctgaatcatgcgttgataggttgctcctgcgttcttcaatccaaagggcatggtgatgtagcagtaggccccaaaaaactggtcaatgcgaggtaaaccaaaaggatcttgagggcaagacttgttgaggtcggtgtaatcgacacacatgcgccattgcccggtcttcttccaaactagaattgggttagccagccagtcgggatggaggacttctttgatgaagcccgctgctaacagcttggttaattcctctttgatcgcgtccttcctatcctgtgcaaaacggcagagtcgttgtttgatgggtttggcatcttccttgacatgtaaagagtgctcaatcacctctctggcaataccaggcatatcagatggtttccacgcaaagatatctttattattagcagttttggtaggatcggagggatctagtggaatcttcttagtcttggcgtcactttcttgagtcttcgacatcttggtcgcaggcacttctccttcgtttgccacggtcgcagccagtcggatctcttctcgggcgaatgtgatctcgcgggtctgagccatctcgcaactttctttatcacatgtgacggcttgcttgatgttgctccgtagggatatgactcctcgaggaccaggcatcttcatcatcatgtaggtgtagtgtgggacagccatgaatttggctagggctggtcgtccgagtatagcatgatacgctgtctcgaagtcagcaactttgaaacaaacgttttctgtgcggaaattgtcccaagtaccgaaagtaaccggaagagtgatctggccgagtggtgtagcagataatcctgggatgacgccgtgaaagggtgcattacttggctttaattccgtacgagggatctgcatatcgtccagggtcttggcgaaaaggatgttgagtgcgcaccgaaggtattggggcgtgttgggctgaactgcgttgatctcccgttcggttagcttctgctttctcttagattcataggccaggggtccgctgaagatgtgattaagttccttgcgatggtcctgaaaaccagtcgggggatcgtcttcattatctttcttctttgatgtgccttgatctccgtccgaaggcttacgtgcgttcttggcgtattgctctgcaaattgtttgtagacgaagcagtctttggccgcatggttggagttgggatgatgcggacattgggagttcattatcttgtcgaaggtgttgacgcgggaacgttgtcgggaagatggagtagttgtcgccacaagttcttcgggcttacgcttgcgatccttgtgattgttacttccactccctcccgcagccggcgtgtctttcttcggcttccaagtggtgcccgactgtttggacgcagtaatagtatcttcggctttggcatactcattggctttttcaaacatctgcttaaccgtcttgggaggtttgcgtccgaacttgccgactaggtcctcgtggcgaatgcctttagtaaaggcggcgatgatgacgtcatcggtgatgtcggagatcttgttgcgttgcttggagaagcgtcggatgtaatcagggcgttcaaaagtgccttcgaagttggcgatgaagtggtcgcgtagttctgcccatgatccaattgtgccgcggggtagcccgtaaagccaggaccgggcagaatctgctaaggccacaggcagataatttgccatagctttgctgtctcctcctgctgcgcggattgcgagaccatagacagtgagccaagactcagggttggtggtgccgtcatacttctcgattccagtcggcttaaagctggctggccagtccactcgacgcagatcatttgtgaaggcagcaactccgtccatatcgtcgtcgtagcggtctagtgaataatggggagcatggcctcttgctgcgcggcgctggttgatggtgtcgcgaagatcgacggggcgccttcgatgtggggagtgtagtcgttcaactcgacgctccctatgtcgttcgggaggcgagcgaacagatcgctcgtcatgtcccctactcctgtgactggatccggcgccggcgatgctgaggcttggctggtgatagtcttgagatcgaagaggagggactcggcttccagtcggggtgcgggtacttgcagagttggctggaaccgaggcagcgatcatggtcttcgtgttgtagtcgttctcactcttgtcgttgtcgttcttcttccagtcagcgacgttcaatttcttgtcgtgtgcgctcttcctccacttctcgggctcggcgctgttcctccgtttagttgtcagccatgaatacgccgaaaaagaggggcgtgtagttatcctcatagctatcgtcgaagtcgtcgatgttgccgtggtcgtagtggtagccgaagtcgtggtagtcgaggatctaggttggtcgtgaactgacgctaggggagctgaggtaaccatccaattcttccgtcgagactgtcccaagaggttggagtataacgccaacctccctggagctagattggatcggggccgaagccggatctcgcctagatcttcgggtgggagatgccccacttcctgagcaaggtatagaccaatggcaaattctgtcaaatcacattcagtcaacatttcccaatgggaatcctgatcaatggaattatgtgtggaacccaaatgtttcagagaaagcatttcaacactcagggagggaccacttgtaacatctgcaaccacaggggtgctgcgccttagcaaccggtacaccgactccacgttgttgctgttcttgccgtgccaagaacaaccttgaacctgataattaagttcacgagctagagctctagtcattggtccttgctgtgcaataggcgtggttgtatcgttggaagggatgtcctcatcatcctccccttcttgcatttgagtcgtcctcgactctaactcatcttcttctcccaaatatggctttaaatctgcaatgttaaacgtggggctaaccccaaaatcggcaggtagctcaagcttgtatgtattgtcattaatcttttgtagcactttgaaaggaccatcagctctaggtagcaacttagattttctcaaattagggaacctatcctttctcaaatgcaaccaaaccaaatcaccaggttcaaaagcaacatgtttctttcctttgctcccagcaagtttatactttatattcatgcgctctatgttctccttagtggtctcatgcagttttaacatcaattcagcgtgatattttgcatcaaagttcactctctctgaagttgggaggggcaaaagatcaattggagcacggggtagaaggccataaacaatctcaaaagggcacttcttagtagtagaatgttgtgaacgattataagcaaactcaacatgaggcaaacattcttcccacattttaatattctttttcaaaacagccctaagcattgtagataatgttctattcaccacctcagtttgtccatcagtttggggatgacatgtagtagaaaataaaagtttagtccccaacttagcccacaaggttctccaaaaatgactaaggaattttgtatcgcgatcagaaactatggtgtttggcactccatgcaagcgaacaatctcacgaaagaacaaatcagcaacatgtgtagcatcatcactcttatgacaaggtatgaaatgcgccatcttagaaaatctatctacaacaacaaagatactgtccctccccttctttgttctaggcagccctaaaacaaagtccatagaaatatcctcccaaggcacactaggaacaggcaaaggcatatacaaaccatgagggttaaggcgtaacttagctttttggcatgttgtgcagcgagcaacgaacctctccacgtctctcctcatcttaggccaaaagaaatgatcagcaaggatatcctccgtcttcttcacaccaaagtgtcccatcaaccctccaccatgcgcttcctgcaataatagcatacgcacggagctagctggaatgcataacttattagctctaaacacaaacccattggtgagaacgaatttgttccaagtccttccctccttgcaattcaacaacacatctttaaaatcatcatcgtgcgcatattgctcttttattgtttctaagccaaaaattttgaagtcaagttgggatagcattgcgtaacgtctagacaaagcatcagcaatgacattttcttttcccttcttatgtttgatgacatatggaaaagattcaataaattcaacccatttagcatgcctacggttaagttttgcttgacttcgaatgtgtttcaaagattcatgatcagagtgtataacaaattctttgggccataaataatgctgccatgtttccaatgttcgcactagagcaaacaattccttatcataagtagaataattcaaactaggcccactcaatttctcgctgaaatattctataggtttgccttcttgtaacaacacaccacccaatccaatcccactagcatcacattcaagctcaaaagttttgttgaaatcaggaagttggagtaaaggagcgtgtgttaacttatctttcaaagtgtcgaatgcattcctttgtgctgcagcccaagtgaatgtgacatttctcttggtaagctcatgtaatggggctgcaatggtgctaaaatccttcacaaagcggcggtagaacccagcaagtcctagaaagcttctcacttgggtgatcgttgttggaaccggccagctatgtatggcttcaaccttggcttgatctacttcaattccctgcggagtcacaacatagccaagaaaagagactcgatctgtgcaaaatgtgcacttctcaaggttaccaaataaacgttcatctcgtagagcatcaaaaacagcacgcaaatgaccatgatgatcctctattgatctgctatatatgagaatgtcatcaaaatataccaccacaaatctgccaatgaaagcacgtaaaacttcattcattaatcttatgaaagtactgggtgcattagtgagaccaaagggcatgactaaccactcatataggccgaatttagttttaaaagctgttttccattcatctcctaacttcatgcgaatctggtggtaaccactacgcaaatcaattttagagaacacaagtgaaccactcaattcatcaagcatatcatctagcctagggataggatgacgatatctgattgtgatgttgttaattgctctacaatccacacacatgcgccatgagccatctttcttaggaactaaaagcacggggatagaacaaggactaagagactcacgtacataccccttgtcgagtaactcttgcacttgacgctgaatctcctttgtttcctctgggttggtcctatatggcgcacggtttggcagagaggccccaggaatgaggtcaatttggtgctcaatccctcgaattggtggcagccccggtggaacctcctttgggaaaatatcagcatactcctgcaaaagattagtgaccggaggaggcaaagaaataggagtatcctcaattggaaataaggtttctttgcaaaccaaagcatagcaaacaacagtgtcagtgtcaacttcatccaaatctgattttgttgcaatgaaacaagatcccttcagcttaatctcatttttattattttgaacagagttggtgggtttcttcttatgcttctcaagttcattagccgcaataagatgctcactcctagtatgctcctgatttttttgtttgctagctctagcaagttcatcctttaaaataacttcaggagacataggatgtaacacaagtttttttccattatgcacaaaggagtattgattggatttgccaaagtgtaaagaatctttatcaaactgccatggcctacctaagaaaatagaacatgcttgcataggcacaacatcacagttgattgaatcatgataagaaccaatggcaaaatgtactcttaccaatcgtgttacctttaccttgccgctgctattaagccattgaatatagtagggctgcggatgtggctgtgtgctcaatgcaagtttctccaccatttcagcactagccaaattattgcagcttcctctatctatgatcacgcggcaagagcgttccttgatcacacacttggtttgaaacaaggtgtggcgctgattctgttcagccctttccatttgtgcgcttagcactcgctgcaccacgaggctctcatagtgctctgcagcttcagccccaatgtgttcctcatcttggtggggcgcgtcacctttccctgcattgttagttgcaagcaaagcataggtttcttcatctaaatcactagcggaggagtacccaccatcagctctcacgatcattacacgagtgcttgggcagtccttgcgcacgtgaccatagcccttgcagcgtaggcactgaatatctcttgtccttcctgatgaagctactgatgatgagctcttggaaggtgtagcagcaacccctcttgttggttcactcgggcatggtgtagagtttgttgtagaggggcgcagcttgttgtttgaggacgatggtgctgctgctcgagttgacggtgcagcaacgttggaagatgtccaagagctagcacgacctgcagaaatgttagtcctaaagctagctcttcgtccctgtacttccctttcagctttacaagcaagatgaaataaacgattaattgaattatattctttgtaggctagaatgtcctgaatttctcggttcagcccacccatgaatctagccataccagcatcatcattttctaccaatccacaacgaagcattcctgtttgcaaagcttgataatactcctctacagatttgtttccctgtctaagttgttgcaatttgtgcagcaaatcacgtgcatgatatgaaggaacaaatctagctcgcatgactcttttcattgcatcccaggtttggggagtgttatttggattggaacgaacaaattcactccaccaaatggatgcaaaatcagtgaactcactagtagcagccctaacacgtttattctcaggaaaatcatggcaagcaaatttctgatcaatggctaactcccaagtaagatatgcatcagggtcatatttttcatcaaagcaaggaatggtaaacttgatcttgcctaaagaatcatcattatcacgtacctcctgccgtggtggagcgcccatgccatggcgctgccggcgctgttgtctttgtggacgaccaagtacctcctcatcatgctcagtgtcagcagcgtactccagttcttcccttgctgcgatgctgctattagcatcatggccattgtggttgcgcctagccgatccatcatgaccatcttggcccattctctccaacgtattcaagatacctgcaagagaagtattcacagccacaagggacctctccaatgaggaaagcttggagttggtgtcaatttgagcagcctccaattgaccaaggcgatcattggcgaccctaacatcctcatcaaggccttcagcatgctccctcacttggcgctcaaaatgttgtatgatgccccttgtacgtggtgaatgttgagggtgctcccccgatcctcctgtcat

SEQ ID NO: 23240 - DNA, 9131 bp, Oryza sativa
  Clone ID: TF_OsC91_2633
ttaattaagttcatgagctcgagctctagtcattggtccttgctgtgcaataggcgtggatgtatcgttggaaaggatgtcctcatcatcctccccttcttgcatttgagtcgtcctcgactctaactcatcttcttctcccaaatatggctttaaatctgcaatgttaaacgtggggctaaccccaaaatcggcaggtagctcaagcttgtatgcattgtcattaatcttttgtagcactttgaaaggaccatcagctctaggtagcaacttagattttctcaaattagggaacctatcctttctcaaatgcaaccaaaccaaatcaccaggttcaaaagcaacatgtttctttcctttgctcccagcaagtttatatttaatattcatgcgctctatgttctccttagtggtctcatgcagttttaacatcaattcagcgcgatattttgcatcaaagttcactctctctgaagttgggtggggcaaaagatcaattggagcacggggtagaaggccataaacaatctcaaaagggcacttcttagtagtagaatgttgtgaacgattataagcaaactcaacatgaggcaaacattcttcccacattttaatattctttttcaaaacagccctaagcattgtagataatgttctattcaccacctcagtttgtccatcagtttgggggtgacatgtagtagaaaataaaaatttagtccccaacttagcccacaaggttctccaaaaatgactaaggaattttgtatcgcgatcagaaactatggtgtttggcactccatgcaagcgaacaatctcacgaaagaacaaatcagcaacatgtgtagcatcatcactcttatgacaaggtatgaaatgcgccatcttagaaaatctatctacaacaacaaagatactgtccctccccttctttgttctaggcagccctaaaacaaagtccatagaaatatcctcccaaggcacactaggaacaggcaaaggcatatacaaaccatgagggttaaggcgtgacttagctttttggcatgttgtgcagcgagcaacgaacctctccacgtctctcctcatcttaggccaaaagaaatgatcagcaaggatatcctccgtcttcttcacaccaaagtgtcccatcagccctccaccatgcgcttcctgcaataatagcatacgcacggagctagctggaatgcataacttattagctctaaacacaaacccattggtgagaacgaatttgttccaagtccttccctccttgcaattcaacaacacatttttaaaatcatcatcgtgcgcatattgctcttttattgtttctaagccaaaaattttgaagtcaagttgggatagcattgcgtaacgtctagacaaagcatcagcaatgacattttcttttcccttcttatgtttgatgacatatggaaaagattcaataaattcaacccatttagcatgcctacggttaagttttgcttgacttcgaatgtgtttcaaagattcatgatcagagtgtataacaaattctttgggccataaataatgctgccatgtttccaatgttcgcactagagcaaacaattccttatcataagtagaataattcaaactaggcccactcaatttctcgctgaaatatgctacaggtttgccttcttgtaacaacacaccacccaatccaatcccactagcatcacattcatgctcaaaagttttgttgaaatcaggaagttggagtaaaggagcgtgtgttaacttatctttcaaagtgtcgaatgcattcctttgtgctgcagcccaagtgaatgtgacatttctcttggtaagctcatgtaatggggctgcaatggtgctaaaatccttcacaaagcggcggtagaacccagcaagtcctagaaagcttctcacttgtgtgatcgttgttggaaccggccagttatgtatggcttcaaccttggcttgatctacttcaattccctgcggagtcacaacatagctaagaaaagagactcgatctgtgcaaaatgtgcacttctcaaggttaccaaataaacgtgcatctcgtagagcatcaaaaacagcacgcaaatgaccatgatgatcctctattgatctgctatatatgagaatgtcatcaaaatataccaccacaaatctgccaatgaaagcacgtaaaacttcattcattaatctcatgaaagtactgggtgcattagtgagaccaaagggcatgactaaccactcatataggccgaatttagttttaaaagctgttttccattcatctcctaacttcatgcgaatctggtggtaaccactacgcaaatcaattttagagaacacaagtgaaccactcaattcatcaagcatatcatctagcctagggataggatgacgatatctgattgtgatgttgttaattgctctacaatccacacacatgcgccatgagccatctttcttaggaactaaaagcacggggacagaacaaggactaagagactcacgtacataccccttgtcgagtaactcttgcacttgacgctgaatctcctttgtttcctccgggttggtcctgtatggcgcacggtttggcagagaggccccaggaatgaggtcaatttggtgctcaatccctcgaattggtggcagccccggtggaacctcctttgggaaaatatcagcatactcctgcaaaaggttagtgaccggaggaggcaaagaaataggagtatcctcaattggaaataaggtttctttgcaaaccaaagcatagcaaacaacagtgtcagtgtcaacttcatccaaatctgattttgttgcaatgaaacaagatcccttcagcttaatctcatttttattattttgaacagagttggtgggtttcttcttatgcttctcaagttcattagccgcaataagatgctcactcctagtatgctcctgatttttttgtttgctagctctagcaagttcatcctttaaaataacttcaggagacataggatgtaacacaagtttttttccattatgcacaaaggagtattgattggatttgccaaagtgtaaagaatctttatcaaactgccatggcctacctaataacatagaacatgcttgcataggcacaacatcacagttgattgaatcatgataagaaccaatggcaaaatgtactcttaccaatcgtgttacctttaccttgccgctgctattaagccattgaatatagtagggctgtggatgtggctgtgtgctcaatgcaagtttctccaccatttcagcactagccaaattattgcagcttcctccatctatgatcacgcggcaagagcgttccttgatcacacacttggtttgaaacaaggtgtggcgctgattctgttcagccctttccatttgtgcgcttagcactcgctgcaccacgaggctctcatagtgctctgcagcttcagccccaatgtgttcctcatcttggtggggcgcgtcaccttcccgtgcattgttagttgcaagcaaagcataggtttctccatctaaatcactagcggaggagtacccaccatcagctctcacgatcattacacgagtgcttgggcagtccttgcgcacgtgaccatagcccttgcagcgtaagcactgaatatctcttgtccttcctgatgaagctactgatgatgaggtcttggaaggtgtagcagcaacccctcttgttggttcactcgggcatggtgtagagtttgttgtagagggacgcagcttgttgcttgaggacgatggtgctgctgctcgagttgacggtgcagcagcgttagaagatgtccaagagctagcacgacctgcagaaatgttagtcctgaagctagctcttcgtccctgtacttccctttcagctttacaagcaagatgaaacaaatgattaattgaattatattctttgtaggttagaatgtcctgaatttctcggttcagcccacccatgaatctagccataccagcatcatcattttctaccaatccacaacgaagcattcctgtttgcaaagcttgataatactcctctacagatttgtttccctgtctaagttgttgcaatttgtgcagcaaatcacgtgcatgatatgaaggaacaaatctagctcgcatgactcttttcattgcatcccaggtttggggagtgttatttggattggaacgaacaaattcactccaccaaatggatgcaaaatcagtgaactcactagtagcagccctaacacatttattctcaggaaaatcatggcaagcaaatttctgatcaatggctaactcccaagtaagatatgcatcagggtcatattttccatcaaagcaaggaatggtaaacttgatcttgcctaaagaatcatcattatcacgtacctcccgccgtggtggagcgcccaagccatggcgctgccggcgctgttgtctttgtggacgaccaagtacctcctcatcatgctcagtgtcagcaacgtactccagttcttcccttgctgcgatgctgctattagcatcatggccattgtggttgcgcctagccgatccatcatgaccatcttggcccattctctccaacgtattcaagatacctgcaagagaagtgttcacagccacaagggacctctccaatgaggaaagcttggagttggtgtcaatttgagcagcctccaattgaccaaggcgatcattggcgaccctaacatcctcatcaaggccttcagcatgctccctcacttggcgctcaaaatgttgtatgatgcccctcgtacgtggtgaatgttgagggtgctcccccgatcctccgagcaacttgagctctgataccacttgatgcagcaacgggggttcccgatctttcgatgagaggaggataaacttcgatttggggaaggatacgacgttggcggtccgactacaactaccacaggggtgctgcgccttagcaaccggtacaccgactccacgttgttgctgttcttgccgtgccaagaacaaccttgaacctgataattaagttcacgagctcgagctctagtcattggtccttgctgtgcaataggcgtggttgtatcgttggaagggatgtcctcatcatcctccccttcttgcatttgagtcgtcctcgactctaactcatcttcttctcccaaatatggctttaaatctgcaatgttaaacgtggggctaaccccaaaatcggcaggtagctcaagcttgtatgtattgtcattaatcttttgtagcactttgaaaggaccatcagctctaggtagcaacttagattttctcaaattagggaacctatcctttctcaaatgcaaccaaaccaaatcaccaggttcaaaagcaacatgtttctttcctttgctcccagcaagtttatactttatattcatgcgctctatgttctccttagtggtctcatgcagttttaacatcaattcagcgtgatattttgcatcaaagttcactctctctgaagttgggaggggcaaaagatcaattggagcacggggtagaaggccataaacaatctcaaaagggcacttcttagtagtagaatgttgtgaacgattataagcaaactcaacatgaggcaaacattcttcccacattttaatattctttttcaaaacagccctctccacgtctctcctcatcttaggccaaaagaaatgatcagcaaggatatcctccgtcttcttcacaccaaagtgtcccatcaaccctccaccatgcgcttcctgcaataatagcatacgcacggagctagctggaatgcataacttattagctctaaacacaaacccattggtgagaacgaatttgttccaagtccttccctccttgcaattcaacaacacatctttaaaatcatcatcgtgcgcatattgctcttttattgtttctaagccaaaaattttgaagtcaagttgggatagcattgcgtaacgtctagacaaagcatcagcaatgacattttcttttcccttcttatgtttgatgacatatggaaaagattcaataaattcaacccatttagcatgcctacggttaagttttgcttgacttcgaatgtgtttcaaagattcatgatcagagtgtataacaaattctttgggccataaataatgctgccatgtttccaatgttcgcactagagcaaacaattccttatcataagtagaataattcaaactaggcccactcaatttctcgctgaaatattctataggtttgccttcttgtaacaacacaccacccaatccaatcccactagcatcacattcaagctcaaaagttttgttgaaatcaggaagttggagtaaaggagcgtgtgttaacttatctttcaaagtgtcgaatgcattcctttgtgctgcagcccaagtgaatgtgacatttctcttggtaagctcatgtaatggggctgcaatggtgctaaaatccttcacaaagcggcggtagaacccagcaagtcctagaaagcttctcacttgggtgatcgttgttggaaccggccagctatgtatggcttcaaccttggcttgatctacttcaattccctgcggagtcacaacatagccaagaaaagagactcgatctgtgcaaaatgtgcacttctcaaggttaccaaataaacgttcatctcgtagagcatcaaaaacagcacgcaaatgaccatgatgatcctctattgatctgctatatatgagaatgtcatcaaaatataccaccacaaatctgccaatgaaagcacgtaaaacttcattcattaatcttatgaaagtactgggtgcattagtgagaccaaagggcatgactaaccactcatataggccgaatttagttttaaaagctgttttccattcatctcctaacttcatgcgaatctggtggtaaccactacgcaaatcaattttagagaacacaagtgaaccactcaattcatcaagcatatcatctagcctagggataggatgacgatatctgattgtgatgttgttaattgctctacaatccacacacatgcgccatgagccatctttcttaggaactaaaagcacggggatagaacaaggactaagagactcacgtacataccccttgtcgagtaactcttgcacttgacgctgaatctcctttgtttcctctgggttggtcctatatggcgcacggtttggcagagaggccccaggaatgaggtcaatttggtgctcaatccctcgaattggtggcagccccggtggaacctcctttgggaaaatatcagcatactccaaagcatagcaaacaacagtgtcagtgtcaacttcatccaaatctgattttgttgcaatgaaacaagatcccttcagcttaatctcatttttattattttgaacagagttggtgggtttcttcttatgcttctcaagttcattagccgcaataagatgctcactcctagtatgctccttgccgctgctattaagccattgaatatagtagggctgcggatgtggctgtgtgctcaatgcaagtttctccaccatttcagcactagccaaattattgcagcttcctctatctatgatcacgcggcaagagcgttccttgatcacacacttggtttgaaacaaggtgtggcgctgattctgttcagccctttccatttgtgcgcttagcactcgctgcaccacgaggctctcatagtgctctgcagcttcagccccaatgtgttcctcatcttggtggggcgcgtcacctttccctgcattgttagttgcaagcaaagcataggtttcttcatctaaatcactagcggaggagtacccaccatcagctctcacgatcattacacgagtgcttgggcagtccttgcgcacgtgaccatagcccttgcagcgtaggcactgaatatctcttgtccttcctgatgaagctactgatgatgagctcttggaaggtgtagcagcaacccctcttgttggttcactcgggcatggtgtagagtttgttgtagaggggcgcagcttgttgtttgaggacgatggtgctgctgctcgagttgacggtgcagcaacgttggaagatgtccaagagctagcacgacctgcagaaatgttagtcctaaagctagctcttcgtccctgtacttccctttcagctttacaagcaagatgaaataaacgattaattgaattatattctttgtaggctagaatgtcctgaatttctcggttcagcccacccatgaatctagccataccagcatcatcattttctaccaatccacaacgaagcattcctgtttgcaaagcttgataatactcctctacagatttgtttccctgtctaagttgttgcaatttgtgcagcaaatcacgtgcatgatatgaaggaacaaatctagctcgcatgactcttttcattgcatcccaggtttggggagtgttatttggattggaacgaacaaattcactccaccaaatggatgcaaaatcagtgaactcactagtagcagccctaacacgtttattctcaggaaaatcatggcaagcaaatttctgatcaatggctaactcccaagtaagatatgcatcagggtcatatttttcatcaaagcaaggaatggtaaacttgatcttgcctaaagaatcatcattatcacgtacctcctgccgtggtggagcgcccatgccatggcgctgccggcgctgttgtctttgtggacgaccaagtacctcctcatcatgctcagtgtcagcagcgtactccagttcttcccttgctgcgatgctgctattagcatcatggccattgtggttgcgcctagccgatccatcatgaccatcttggcccattctctccaacgtattcaagatacctgcaagagaagtattcacagccacaagggacctctccaatgaggaaagcttggagttggtgtcaatttgagcagcctccaattgaccaaggcgatcattggcgaccctaacatcctcatcaaggccttcagcatgctccctcacttggcgctcaaaatgttgtatgatgccccttgtacgtggtgaatgttgagggtgctcccccgatcctcctgtcat

SEQ ID NO: 23241 - DNA, 4984 bp, Oryza sativa
  Clone ID: TF_OsC359_8235
tggtttagtcttttgtttttttttccgctgcgtagaactttgttgtaatgtgtcacgtcctgataaattcatcccgaaattaaaaatcattttcacccctccccgccgtcgcccttctctttcccccgcgccggccgcctccagccgcctctccctcctcgcccgagcgccgtccggccgtgccgtcgcctcctccagcgtcgcagccgcctcctctccaccggcctgccctccgtttcgcgcggtgaccaccggaggcgcgttcccgccgtcgtccagtgccgttgccgccactgtaccacctccagccgcccctgccgcgccgctcaggtgcgggccggccgcgccgtctcctccttcggcgtcgccgcgtcgacctccaccccggcctgctctttgattcgtctggagaccgccgtcgcccgtgccggcctctccatcctcgtcgtcgccaacgtccatttggccgccccttcctcctccccggctcgtcggctcgctgcgccgccaccgtcatcgtcatcgcagcggcgtgttcagcgccgcctcttctccgtgcagccgctctggctgccctcgtcgcctcctcaccggccccggtggtcatcatcgtcgtcctctcgtcgttcccggtcgtcgtggcgttcgtccctccgtcgagccgttctcgtccgtcgtccgcgtccgccaagcaagccgcggcagccccgtcctcgtcttcgtcctcgactccgcgtcgtcaagccttgtccaaggatcgccgccgccgtgtaccggtgtcggtagtcgttcgtgggtgcgtgtggtgaccgtgtttgtgtgcccgctcggtagccgcgtgatttccacgtgtgcaacccgcgtggtgtctagtggagtccgtttgtcggccactcgcctcggttggcacacggggtccgcttccgtcgacccgtggaccgtctctgtgtactcggttttctttttatgtattgttatttcttctttataggcttgtagctttgcttgtgtgcttcgcgtagcttctatcgttccggaggttccagaagcgtggttcgcgggtgtcgccgaaggttcggaaggccgttctccctctcttcctctttcaaaacccctaaaacctgttttctggtggggtttgggtgcatgccagttgtgggaagtagcaccccggccaatataaggattaagctcgggcctctgttgcaaagcactaccgtacttccacatgtctagtggggcaaatgaaggctacacgagctgcggcctggtagtcgagatgtcatggcacagggccggtgtcctgctgctaggggcttagtcctgcctacctgtcccggaggtttcggccgtaggtggggttgggtcaatgtacacctctgatcagagtataatctattcgaatagccgcgccctcggttatgggcaagccgagcaatgtacccaaatggccggcagcatcaaccgtcgtggtctggacctgactggcttcgttttggagctgcggggcatgtgcgttgtcctggggtatccgcatggagtggactaccagggcaagcggctcccggagcaggagggtgacgatgcagagccccacgctgcttgggagattactgcagtgatcctcactggctcacccgagaggacttcgttggtagtcaccgtgggtggagattccttctctgccgcttgccagaacgccgcactcctcgccatcggcactctccaccagtgctacccgaacgagttgcagcactcgccctaccgctaccacccttgccgcggaggagcccgcgactacgccaccttccgggatgctagctcggaggatgacgctaccatcatgcacctggcgcgcatggtggaggcgtacgacgcggcccatatcgacttccatcagatggtgcgtcgtgggttggtcgagaacaacatgaagatcctggagctgcgtcaggagaatctgcagctgaagaaggacctagacgcagtggacgcgcagctgcgtcagctcaagatcgcccagggagaggtctgtcgccccaagcgtcgccgcgtctgccgcagcctgaagatcaccgcccgcaagagtacctccaggcccgagcttgttcgtcagtccctggcgtggacctgcttcgtcgagacccctcgtgctgagcccgcgcccgtggttcctcaggaggatggagcctccggcgttggcagcacggaggatgtgctgctgctcaccttccatggtgacaaccaggagaagtgctgctaccggtgaaggcagtcaccccgaaggcagcaaccacaacaaccatggcagcccacctccacctcctcccccgcctccaccaccaccaccagacaccaactccatcctcacccaaatcctcgcctagcaggccaacatgatggctgctttcctccaccacatccaaaatccgccacaacataatgctccaccaccacccccacaacactctaaactcgccgagttcctccgcatccgtccacctaccttctctagctccaataaccccgtggacgcgttggattggttgcatgccgtggggaaaaagttagacaccgtgcagtgtagcgatgaggagtaagtcatcttcgccgcccaccaactgcaggggcccgcatctctatggtgggaccatttccaggctatgcagccagaggggcagcctattacttgggcccgcttcaccgccgctttccggagaacccatgtgcccgccggagtcatggcccttaagaaaagggaattccgagagttgaagcaaggcaaccgctccgtgatggagtatttgcatgagtttaacaacctggcccggtacgccctggaggatgttcgtgaagatgaggagaagcaagagaagttcttggcaggaatggaccctgagctgtccgtgcgtctggtctccggggactatctggatttccaacgtctggtggacaagagcatccgcttggaagccaagcacaaggaactggagtcgcacaagcgtcgcttggcgaatttccgcaaccaacagggggctaaccaaaaggtccgctacaccgctacaccaatccctatccagggagatcctcctcgcagcagcaacagcagcagcaacctcgctccgcgccccgacctcaattcgtggtgcgcgtcccacagccgcagcaacagcagagtcagcaagggactcgtgcgccccgtcctcctacgccagccgtgcagcctggtcaaggccgcagggacgttcaaggtcagcagtgtctgtgcttcaactgcttcgagcctgggcactttgcggataaatgcccaaagccgaggtgccagcaaggccaagcgcctccccgctccaaccacggtggtaaggatgtcatacggggtcgtgtgaaccacgtgatggccgaggacgtgctgacaactccagacgtcatcgttggtacgttcctcattcattccatccctgctaccattttgttcgactctggagcttcccacttgtttatatttgtgccattcgtggggagaaatcagttgggggtagaaaggcttaggaaccctctgctcatcaccacccctggaggggttatgacagcaaagtattatagccctgccgttcctatagaaattcagggaattcctttttcctcggatctgattcttctagacaccaagaacttggatgtgatccttgggatgaattggttggctcaattccaaggagtagtggattgtgcaagacgcactgtcactctgtaccgagggccggaacaaccggttgttttctttgcacccccaacctctgtcggtagttcagaacttcatcagataagactgtcggaaatccccatcatcagagagttcggagacgtgtttccggaagaactacccggtatgccgcccaagcgagagattgagttccggatagatcttgctctaggaaccactcctctgtacaagcgaccctaccgtatggcagcaaatgaactggccgaagtcaagaaacagttggaagagttgaaagaaaaggggtatatacggccgagtacttccccctggggtgctcctgtgatttttgtggagaagaaagacaagacgaagaggatgtgcgttgattacagagctctcaatgaagttactatcaaaaacaagtaccctcttccccggatcgatgatctgttcgatcagcttaaaggtgccacggtattctccaagattgatcttcgttccggatatcaccagttgcgcatccgtgaagaagatatcccgaagaccgcattcacctcgcgatacggactatatgaattcacggtgatgtcgttcggtttaaccaatgctcctgccttcttcatgaacttaatgaacaaagtgttcatggaatacttggatatgtttgttgtggttttcattgacgacattctggtgtactcacaatcagaggaagaccatcagcaccatctccgtctggtgttgggaaagttgcgggaacatcaattgtatgccaaacttagcaagtgtgagttctggttgtccgaagtcaaattcttagggcacgtgatatctgctaaaggagttgctgtggaccccgaaacagtgaccgccgtcactgattggaagcaacctaagacagtcactcaaattcgcagttttttgggtttggcaggatactaccggaggttcatcgagaacttctccaaaatcgctcgacccatgacacagttgttgaagaaagaagagaaatttgtgtggagcccgcaatgcgagaaggcattccaaactctcaaggaaaggctggtttcctcgccggttttaatcttaccggatactcgcaaggacttcatgttgtactgtgacgcttcgcgccaaggattgggaatattcatatcacatggacattggaatggttggattattgtggaattggattcacaccggggaaatattccccgtgattccctccctctttccccccatttttccctccctctc

SEQ ID NO: 23242 - DNA, 3786 bp, Oryza sativa; identical to SEQ ID NO: 14547
  Clone ID: TF_OsC1713_4303

SEQ ID NO: 23243 - DNA, 2955 bp, Oryza sativa
  unsure (1)..(2955): unsure at all n locations
  Clone ID: TF_OsC333328_1
aaacctttagaaccattggtcatggctgctcatgctgttgatctgatgaggcctgagaagtttgctggtgaaaactttaagcgttggcaatccaaagttcgtcattatctggtgtcgcagaacttgtggtatgttattccacaagtgaggccgctgacccaacagcagcatgcggactttgagaccagtaatgatgtggctttaggtgtcatgctttcgctcctgtctgaccagctctacgacgtgtatggtgcttacaccagcgccgcagagctatgggaggcactggaccgtaaatattcggtttcagatgcaggacgttggatatatgtcgtggagcaatatcatgactttaagatgattgacaaccaatcagtggtgaagcaggctcatgatcnttttaacgattatgggtgagatgtctcagtttggtgctattgtgattcctaagtttgtggtggggggcattattgccaagcttcctccattttggagggattttgccactgcacttaagcacaaacgggaggacatgatggttgatgacctgattgcccacctggatgtggaggagaaggcgcgtgcgaaagacacgccgactatggcacaagaagggacatcaaatgccaacctagtgcagaagtcaaatgcaaagaacaagggcaaacaagcagtgcagaaccataaggccaaaaacacaaccaattttaagaagaaaattacttgctatgtttgcggcttggaagggcacaaggccaacaaatgccgtgacaggaagggcaagaagaatgttcagcaagggcagaaaattgccaacatggttgtgagcgaggctgggtcttcagggtatgattctactcctgttgcactttcagcgtatcaatcctttgattggtgggttgatacgggagctaacattcatgctgcaaccggttcctccatcttgatgggcaatggttcaggtgctgctgttcttggagtagggaaggttgatctgaagctcacttcagggaaaatcatctctttgaagaatgtgcagcacgccgaggctgaaaaccaactagaaagaaaaattaaacgtctacggtcagatcgtggtggtgaatatgtgtcagatgagttctcccaattctgtgcggatcatggaataattcatgaaattacacctccctattcaccccaatctaatggggtcgccgaaagaaagaaccgcactttgactgacttggttaacgccatgttagacagtgccggtatgtctaaggcatggtggggggaggctgtattaaccgcctgtcacatcctaaatagagtgcccactaaaaatagtgagatcactccatatgaaggatggaaagggagaaagccatcactatcatatttgcgcacttgggggtgcttggcgaaagtcaatgtaccaataacaaaaaagcgcaaacttggaccaaagactattgattgtgtctttctaggatatgcacataatagtgtggcctacaggtttttagtagtgagatccgatgtaccggatgtaccgataaacatggtaacggaatctcgtgatgcaacattttttgaggatatttttcctatgaaagctaacgaaacttgggagatcactgatcgaccatttggttgcaagccagtggggtgtaagtggatctttaagaaaaaacttagacccgatggtactattgaaaagtacaaggtaaggcttgtggcaaaggggtacacgcaaaaggaaggcgaggatttctttgatacttattcacctgttgctagacttactactatccgtgtgcttctgtcgctggctgccttatatggtttcgttgttcatcaaatggatgtgaaaacggctttcctaaatggtgagctagatgaagaaatctatatggagcagcccgatggctttgtagcactcggacaggaaggcaaggtggttaagttattgaaatctttgtatggcctaaagcaagctcctaagcaatggcatgagaagttcgatcgaacattaacatccgctggtttcattgtaaatgaagctgataagtgtgtgtactatcggtttggtgggggagagggtgtgattttgtgtttatatgttgatgacatactcatatttgggaccaatattaatgtggtgtctgaattaaaatcatttttgtcccaaaaatttgacatgaaggatttgggagaagctgatgttatttcaaacattaaattgatcaaaggcgaggatgggattatgctttcgcaagcccattatgtggagaaagtcctaactcgtttcgggttgatggactgtaaaatagctccaacgccttatgacccaagtcttaagcttcgaaagaacaaaggactaggaaaggatcaattgagatactctcaaatcattggctctctcatgtatttggcgtgtgctaccagacccgacatctcatatgctgttagcaagctgagccggtttacttctaacccggagatgatcattggcaagcactagaacgcatattaagatacttgagaggcacaatgtcatatgggattcactataccgggtaccccgctgtgcttgaggggtatagtgactcaaattggatctcggatgccgatgagatcaaggccacgagtggatatttgtttactcttggtggtgctgcagtttcatggagatcttgcaaacaaacagttttgacaagatcaactatggaggctgaacttgtagcacttgacacagccactgttgaggcggagtggctgcgtgagctcttgatggacttaccggtaggtgaaaaacctatcccggcgatccttatgtactgtgataaccaaacagttctcataaaggttaagagcacaaaggataatatgaagtcctcaagacatgtgaaaaggccggggatcctctagagtcgacctgcaggcatgcaagcttgagtattctatagtgtc

SEQ ID NO: 23244 - DNA, 7939 bp, Oryza sativa
  Clone ID: TF_OsC359_7957
atgggcaaagaagtagttgagagcatcctagaggtgctcaagaagaacattgatatcttcgcttggagccctgacgaggtgggaggtgtttcgacagatctcatcatgcatcacctagcaatcaagccggataccaagccaagaaaacagaagttgcgcaagatgtccgccgatcaccaagaagcggcgaaagccgaagtccaaaaactgctcagcgctggggttattcaagagattgaccatccggagtggctggcgaatccagtgctgatccacatgaagccgctcgacatccccaaaacatccttcatcagtccattcggcacattttgtcaccttaggatgcctttcggcctgaggaatgcaggagcaaccttcgccaggctggtgtacaaagtcctttgcaagcagttggggcggaatgtggaagcttatgtcgacaacatcatcgtaaaaagccgcaacgctttcgaccatgcgtccgacctacaggagaccttcgacaacttgcgggcagcgggcataaaactgaatcctgagaagtgcgttttcggcgttcgcgcaggcaagttgttgggcttccttgtttccgaaagaggcatcgaggcaaatcccgagaaaatcgatgccattcagcaaatgaagcctccgtcgagcatacatgaagtacaaaagctcgcgggccgaattacggcactcagtcgattcctctcaaaggcagccgaaaggggtttgcccttcttcaagaccctccggggcacgggaaagtttaattggacaccagagtaccaagcagcgttcgacgagctaaagcaatacctgcaaagcccgccagctctgataagcccagcaccaggaagcgaactgctattatacttagcagcttcgccggtggcagtcagtgctgccctcgtccaagaaacagagttcggccagaaaccggtctatttcgtctccgaagcgttgcaaggagcgaagacaagatacattgaaatggaaaagctcgcttacgccctggtgatggctttgcgcaagcttaagcattacttccaggcccacaaagtcatagtgccatcacggtaccccttgggcgaaatactccgaggcaaggaagtcactggccggctcagcaagtgggcggcagagctatccccccgcccctaccgccgcgttagcacgccggccggccgtgccgtcgcctcctccagcatcgcagccgcctcctcttcgccggcctgccctctgttttccgcggagacctccggaggtgcctccccgccggcgacagtggcgttgccgccactgttccgcctccggccgcctctgccgcgtcccctgtgcgccggccgacgtcgccatcacctctcccggcaccggagcgccgtcctctttcccagccaggccacggcgtcgcccgattttcgccggaacgccgtcgcccgcgccggcttctccttcctcctcgtcggcatctcctccggcagcccctttcgccatgcccgtccgtcagccggcgctgccgtcccctccctcggcacgccgcgacgtcatccttggcatcgcttccccttcggccgaacaccgccggtgtccgtcgtcgtcttcaccgttcatcctcgccggctcgtcgtctcgcggcgccgcctccgtaatcggcatcgcagcggcgtgttccacgccatcctcgcctccgtgcagccgctgccggctgccctcgtcgcctcctcgccggccccggtcgctgtagccgtcgtcgtcttcgtcctcggctccgcgtcgtcaagcctcgtgccggccgcgtctcgcccgtgtatcggtatcggtagtcgttcgcttgtccgtgtagtgtccgtgttagtgtgcccgcttggtagccgcgttgtttccacgtgtgaaacccgtgtggtgtctagtagagtccgtttgtcggccactcgcctcggttgacacacggggtccgcttccgtcgacccgtggaccgtctctgtgtacccggttttctttttatgtattgttattgcttctttataggcttgtagctttgcttgtgtgcttcgcgtagcttctgtcgttccagaggttcccgaagcgtggttcgcggtcgtcgccgaaggttcggaaggccgttctctctctccccctctattcaaaacccccaaaatggttttaggctgggctcgaggtgcgtggttgggttttgttagtcgtacctcgggtactataaggattaagctcgagcctctgttgcgaagcactaccgtacttccacatgtctagtgggtaaggcttagtttgtggctcagtctggttataaacaaaagtacacggatggagatggacgaagtcgggggtcgatggacatctctaggacaaatgaaggctacacgagctgcggcccggtagtcgagatgtcatggcacagggccggtgtcctgctgctaggggctcagtcctgcctacctgtcctgggggttccggccgtaggtggggttgggtcgatgtacacctctgatcagagtataatctattcgaatagccgcgccctcggttatgggcaagccgagcaatgtacccaaatggccggcagcatcaaccgtcgtggcctggacctgactggattcgttttggagctgcggggcatgtgcgttgtcctggggtatctgcatggtgtggactaccagggcaagcagctcccggagcaggagggtgacgatgcagatccccacgctgcttgggaggttactgcagtgatcctcactggctcacccgagaggacttcgttggcagtcaccgcgggtggagattccttctccgccgcttgccagaacgccgcactcctcgccatcggcactcttcaccagcgctacccggacgagttgcagcacccgcctatcgctaccacccacgccgcggaggagcccgcgactacgccaccttccgggatgctagcttggaggatgacgctaccatcatgcacctggcgcgcatggtggaggcgtacgacgcggcccgtatcgacttccatcagatggtgcgccgcgggttggtcgagaacaacatgaagatcctggagctgcgtcaggagaatctgcagctgaagaaggacctagacgcagtggaggcgcagctgcgtcagctcaagatcgcccagggagaggtctgtcgccccaagcgtcgccgcgtctgtcgcagcctgaagatcaccgcccgcaagagtacctccaggcccgagcttgttcgtcagtccctggcgtggacctgcttcgtcgagacccctcgtgccgagcccgcgcccgtggttcctcaggaggagggagcctccggcgttggtagcacggaggatgcgctgctgctcaccttccaccctggcccgtcgcagaagtagacgagtagttagtaggcttgcgcatggtgacaaccaggagaagtgctgctaccggtgaaggcagtcaccccgaaggcagcaaccacaacaaccatggcagcccacctccacctcctcccccgcctccaccaccaccaccagacaccaacgccatcctcacccaaatcctcgcccagcaggccaacatgatggctgctttcctccaccacatccaaaatccgccacaacataatgcttcaccaccacccccacaacattctaaactcgccgagttcctccgcatccgtccgcctaccttctctagctccaataaccccgtggatgctttggattggttgcatgccgtggggaaaaagttagacatcgtgcagtgcaacgatgaggagaaagtcatctttgccgctcaccaactgcaagggcccgcatcgctatggtgggaccacttccaggctatgcagccagaggggcagcctattacttgggcccgcttcaccgccgctttccggaggacccatgtgcccgccggagtcatgacccttaagaaaagggaattccaagagttgaagcaaggcaaccgctccgtgatggagtatttgcatgagtttaacaacctggcccggtacgccccggaggatgttcgtgaagatgaggagaagcaagagaagttcttggcaggaatggaccctgagctgtccgtgcgtctggtctccggggactatccggatttccaacgtctggtggacaagagcatccacttggaagccaagcacaaggaactggagtcgcacaagcgtcgcttggcgaatttccgcaaccaacaaggggctaaccaaagggtccgctacaccaatccctatccaggggaatcctcctcgcagcagcaacagcagcagcaacctcgctccgcgccccgacctcaattcgtggtgcgcgtcccacagccgcagcagcagcagagttagcaagggacccgtgcgccccgtcctcctacgccagctgtgcagcctggtcaaggccgcagggacgctcaaggtcagcagcgtctgtgcttcaactgcttcgagcccgggcactttgcggataaatgccaaagccgaggcgccagcaaggccaagcgcctccccgccccaacaacggtggtaaggatatcattcggggtcgtgtgaaccacgtgactgccgaggatgtgctgacaactccagacgtcatcgtgggtacgttcctcattcattctgtccctgctaccattttgttcgactctggagcttcccactcgtttatatctgtgccattcatggggagaaatcagttgggggtagaaaggcttaggaaccctctgctcatcaccacccctggaggggttatgacagcaaagtattatagccctgccgttcctatagaaattcagggaattccttttctctcggatctgattcttctagacaccaagaacttggatgtgatccttgggatgaattggttggctcaatttcaaggagtagtggattgtgcaagacgcactgtcactctgtaccgagggccggaataaccggtcgttttctttgcacccccaacctctgtcggtagttcagaacttcatcagataagactgtcggaaatccccatcgtcagagagttcggagacgtgtttccggaagaactacccggtatgccgcccaagcgagagattgagttccggatagatcttgctctaggaaccactcctttgtacaagcgaccctatcgtatggcagcaaatgaactggccgaagtcaagaaacagttggaagagttgaaagaaaaggggtatatacggccgagcacttcctcctggggtgctcccgtgatttttgtggaaaagaaggacaagacaaagaggatgtgtgttgactacagagctctcaatgaagttactatcaaaaacaagtaccctcttccccagatcgatgatctgttcgaccagcttaaaggtgccacggtattctccaagattgatcttcattccggatatcaccagttgcgcatccgtgaagaagatatcccgaagaccgcattcaccacgcgatacggactgtatgaattcacggtgatgtcgttcggtttaaccaatgctcctgccttcttcatgaacttgatgaataaagtgttcatggaatacttggataagtttgttgtggttttcattgacgacattctagtgtactcacaatcagaggaagaccatcagcactatctccgtctggtgttgggaaagttgcgggaacatcaattgtatgccaaacttagcaagtgtgagttctggttgtccgaagtcaaattcttagggcacgtgatatctgctaaaggagttgctgtagaccccgaaacagtgaccgccgtcactgattggaagcaacccaagacagtcactcaaattcgcagtttttgggtttggcaggatactaccggaggttcatcgagaacttctccaaaatcgctcgacccatgacacagttgttgaagaaagaagagaaatttgtgtggagcccgcaatgcgagaaggcattccaaactctcaaggaaagactggtttcctcgccggttttaatcttaccggatactcgcaaggacttcctggtgtactatgacgcttcgcgccaaggattggggtgcgtgctcatgcaggaaggtcatgtggtagcctatgcctcacgccagctacggcctcatgaaggcaactaccctacccatgatttggagttagccgcggtggttcatgctctaaaaatctggcggcactatctcattgggaatcgctgtgaaatatatactgatcataagagtttgaaatacatcttcacccagtcggatctgaatcttcggcagagaagatggttagaactcatcaaggattatgatgtgggaatccactatcaccctggtaaggccaacgtggtcgccgacgctctaagtcgaaaaagccattgcaacactcttaacgtccgtggcattccacccgaacttaatcaacagatggaagccctgaacctaagcatagttcgtcgtggattcttggctacgctggaagccaagcctaccttgctcgatcaaatccgcgaggctcagaagaatgatccggatatgcgtggactcctcaagaatatgaaacagggtaaagccgctggtttcacagaggatgaacacggaaccctatggaacggaaatcgggtatgcgttccagacgacaaggaacttaaacagctaatacttcaggaagctcacgaaagtccttattccatccaccctggcagtacgaagatgtacttagacttgaaagagaaatactggtgggttagtatgaagcgggaaattgcagagttcgtggccctttgtgatgtgtgtcagcgtgtcaaggcagagcaccaacgaccggccggacttctccaacctctccaagtaccagaatggaaatgggatgaaattgggatggatttcatcaccggacttccaaaaacccagggcggttatgattctatatgggtagtcgtggatcgactaaccaaggtggctcggtttattcctgtgaagaccacctatggagggaacaaactagccgagctctacttcgctaggatcgtgagtctccatggcgttcctaagaaaattgtatctgataggggaagccaattcacctctcacttttggaagaagctccaagaagagctgggtacccgattaaaattcagcaccgcgtatcacccgcagacagatggacagaccgagcgtctaaatcagatcctagaagatatgctagaacatgcccccgacacactgctgtcctaccattctcgggaacgacatgggataagaatctccccctatgccgagttctcctacaataacagctaccaaaccagcatacaaatggcaccctatgaagcgttgtatggacgcaaatgccggacaccgctattgtgggaccaagttggggaaagccaagtgttcgggacggatatcctgagagaagctgaagctaaagtcagaaccattcgggataatctaaaggtggcacagtcccggcagaagagttatgcagataaccgacgctgtaatctggaattcgcagtggacgactttgtgtaccttcgggtcacgccattgcgaggtgtacacaggtttcagacgaaagggaagctcgcacctcggtttgtgggtcctttccgtatcattgctcgacgcggagaagtcgcttaccagttggagctgcccgcctccttgggcaacgtgcatgatgtgttccatgtgtcgcaactcaagaaatgccttcgagtgccgtccgagcaggccgactcagagcagattgaaattcgtgaagacttgacctacgtggagagaccagtgaaaatcctggacaccatggagcgcaggaccaggaaccgggtaatccgtttttgcaaggtccaatggagcaaccacgccgaggaagaagctacttgggagcgtgaagacgagctgaaggcagcccatcccaatctcttcggcagttcttccgaatctcggggtcgagattccgtt

SEQ ID NO: 23245 - DNA, 1102 bp, Oryza sativa
  Clone ID: TF_OsC359_8257
ctagttgaatgagatgctttctgatagtattgtgctggcgagtttgttttttcgacacaaatcttcttttgcttgaatctctagggacattactttgcgtctcttgtattcttgcatctctttcttttcttggatgtcttggcacatgtcgcaggatgcttttgctcttttgtcatcagggaaggttggacgtactgcattaacatttggcgaattcgggcttccttggggatagaagggcatccttgagatgctcatattagcttgtagtagtgcatccatatagggtttttgggggcagtgtctcatgtaatggccaatttcgtggcaaatgaagcatatgaatccgggaacgtgtctgatcttctttgatttgagggtgggggtcttggataagttttggcaagattgcagtgtctgacattgtgggacatcttgcatgtcaacttctgatggcaaggtctttcttttgtgacaacttccttctttaaccatgctattttcttgcgatacggattcattgattgagttctgaaggttggggcaattattagctcgaagtggggttttcatccctgtaatcatcacatttaagaattctttgttcttctctttatgggtatcagtgccttctactgattgtgttccttgtatttctgcggcctcattcttactcttgtctggattcaccttgggctgtggtagtagcagttgttgttgtatagaagccaaattttgagctatttcttgtagcatctgagtctgattggctagaatctgataaatatccattgaggagtgttggtttctggttgcaacttccttctttggtccaggaacagcattaccagtcttggcgacttggttggtgacttgttcagctagttgatttggattttctgacaaagctgggtcttcctcagaaccaaggtagttgcggacacaagtctgacaggttggttgaggtgccatttgcttcagaggaactgagaacccaatctgataccgccgtataacggcacctgataggagcgtgtcgtaggggaaaacggcgcgaaccgcttcctacgaaaccgcggtctcggtaccagtcccaggacat

SEQ ID NO: 23246 - DNA, 1215 bp, Oryza sativa
  Clone ID: TF_OsC91_2592
ctagctgattccaaattcaagtccagaccacccaccagtccaaatcttgttcctcttctttccccaaaccctcgcgctcagggctctgatccagcgctcgccgacggccgcgtcggccaaggcctccttggtggcggcgacggcaggcgtgggcggggtggagccagccgtgacgctcgaccaggtgccacggtggagcaaccctgaccagcgcctctcctcctcttcccgcaccgccgccggatcctttgtgctcatgttggggcattctttatatggatggaaagctaagaagataaattttccaatggtcttggtcccacgtccaaattctttccgagtcaacgggacttgactgaacaatttgacgtccagaatcttgtccttgtttgtgttcttcaattcgcaaacagggattagccttctcggcgaggtcatccgcgtttcgacacgggtgataacaagagaagacgtggtgctgtgattgcggagctcaagagcgtgcgcgttcaagaagccggatcgatttgtgtcgcgagtctttgccagcgggtaatagtagaggatgtcctcatcattcccacccccacttgaccccttgttgcgtctttgccagcgggtaatggtgggagatgtcctcatcaccagatctatcctgaattctatatctctcttaggcggtatgccacgtagatcaactgggaacacatttggatagtcccgcatcgaaatcacatctggtgcgccttgagcttctgcggcagcaacatgattgacacgagccttcggtgctggtgcaatggacttgttctgaataggggcagtctccacacgtcgaggtttcggacacttgtcagcaaaatggcctggctcatcatagttgaagcacaccactggcatgtttccttgctccttgataggctggttgtgagcaatcttgtgtttcttctcttccattcggttgtacttgtcttcctggcgaatagccttgtccaccaacttctcgtccatgcaaacatcctcaggagcataacgggccagacaattgaactcatgcagaaactcggtgatagaacaagatctcagagtgagtgccctgaactccctcttcttgagagccaccactcccgatggtacatgaatcttcttgaaagcaacagtaaactcgagccaagtgattggctcaacaacaacctgaaggatctccttcatcat

SEQ ID NO: 23247 - DNA, 2799 bp, Oryza sativa; identical to SEQ ID NO: 14557
  Clone ID: TF_OsC91_2399

SEQ ID NO: 23248 - DNA, 1140 bp, Oryza sativa
  Clone ID: TF_OsC334495_1
gtctttctctccatttttcctctcttcctcctcatcatcttcaacgtcgaagatgctgatgtagccatcttccatagcaatgtatgcccgttgactagggcaatccttctgcacatggccaaatccatggcagcggtggcactgaatgctgggcgtgcatcccgtcaaagcgacggacgaggcactcttgaaactccggacgcaactggtcgcttgcttgctggtgggggtgtccggaaagagatgggcttgggcagccccaaagatggcttcgcccgcggcatgggaatagacactgtggtgtacatgtgctcctctgcctccgcctcctcctcccgcaaggacgccgccgttgtcggcctcggcaggcgcagcgtcctcgccgcgtcgttccggagcgcgagcaccagcaccccgctcatccccgtcggcgtcgacaaggcgccgaacattgaccccaacctctacttcgtcgccatcaccggcatcaaggtcgccagcggcgagatcgtcagcgacaaggccgccgcgatcatgaccaccgtttccaccctttacacgttcctcaacccggtgctcttcgaccacctcaagaagcagctgccgccgctagcagacaagggctcatccgtactgtgctacacgaaggacaccgagctcccggcgatcacgctggtgttcgccggcaaggacgccgccatgaagctggcgccggagcactactcgtacaagaggagcgatggcgccgtgtgcctctccatcctgcgctcgccgctgcacggcggggtgttcgtcatcggcagaaggggcgggcccaggattttcaacttggtgaggtatcgacttcgtcacctcgtcgtcgacggcagcggcaggtcggtggccggtggcggcgacgcggcgcggggccctgcgcccctgcgactgcgggctagcaggctgccgtggtcggtgcctcggtggagcgtaggcaggcaggcaggcgccaggcggcaactcgtcaccgcggcgccgcaccggcgggcggcggcggctggagcatggaggcgggcgccgcggggggatgccggatgcgccgagcgcccgagccgccaaggcgccgacggcgccgtgcgcgcctgcgccgcggccgaagggtag

SEQ ID NO: 23249 - DNA, 4494 bp, Oryza sativa; identical to SEQ ID NO: 14568
  Clone ID: TF_OsC359_5835

SEQ ID NO: 23250 - DNA, 4883 bp, Oryza sativa
  Clone ID: TF_OsC359_6886
atgtcatggcacagggccggtgtcctgctgctaggggctcagtcctgcctgcctgtcccgggggttccggccatggccggcagcgtcacccgtcgtggtttggacatgactggcttcgtcttggagctgcggggcatatgcgtggtcttggggtacccacatggagtggactaccaggccaggccgcttccggagcaggagggtgacgacgcggagccccacgctggttgggaggtcactgcagtgatcctctctggctatcccgagcggacttcgctggcagtcaccgcgggtggggattccttccccgccgcttgccagaacgacgctctcctcgccatcgtcactcttcaccagcgctacccggacgagttgcagcactcgccctaccgctaccaccctcgtcgcggaggagcccgcgactacgccaccttccgagatgctagctcggaggatgacgctaccatcgtgcacctggcgcgcatggtggaggcgtacgacgcggctcgtatcgacttccatcagatggtgcatcgcgggatggtcgagaacaacatgaagatcctggagctgcgtcaggagaacctgcagctcaagaaggacctagacgtggtggaggcgcagctgcatcagctcaagatcgcccagggagaggtctgccgccccaagcgtcgccgcgtctgccgcagccagaagatcaccgcccgcaagagcacctccaggcccgagcttgttcgtcagtccctggcgtggacttgcttcgtcgagacccctcgtgccgagcccgcgcccgtggttccccagaagggggaagcctccggcgttggtagcacggaggatgcgctgttgctcaccttccgtcctggcccgtcgcagcggagaaatgctgctaccggtgatggcaaccaacctgaaggcagcaaccacaaccaccagggcaacccacctccacctcctcctccacctccaccaccaccaccagataccaatgccattctcacccaaatcctcgcccagcaggccaacatgatgactgctttcctccaccacctccaaaatccaccacaacataatgctccaccaccacccccacaacactctaaactcgccgagttcctccgcatccgtccacccaccttctctagctccaacaaccccgtggatgcgttggattggttgcatgccgtggggaaaaagctagacacggtgcagtgcagcgatgaggagaaagtcatcttcgccgcccaccagctgcaggggcccgcatctctatggtgggaccatttccaggctacgcagccagaggggcaacctattacttgggcccgcttcaccgccgctttccggagaacccatgtgcccgccggagtcatggcccttaagaaaagggaattccgagagttgaagcaaggcaaccgcttcgtgatggagtatttgcatgagttcaacaatctggcccgttacgccccggaggatgtgcgggaagatgaggagaagcaagagaagttcttggcaggaatggaccccgagctgtccgtccgtctagtctctggggactatccggatttccaacgtctggtggacaagagcatccgcttggaagccaagcacaaggaactggagtcgcacaagcgccgcttggcgaatttccgcaatcaacagggtgctaaccaaagggtccgctacaccaatccctatcccgggggatcctcttcgcagcagcaacaacagcagcagcaaccccgctctgcgccccgacctcaattcgtggtgcgcgtcccacagccgcagcagcagcagaatcagcaagggactcgtgcgccccgtcctcctacgccaacggtgcagcctggtcaaggccgcagggacgctcaaggtcagcagcgtctgtgcttcaactgcttcgagcccgggcactttgtggataaatgcccgaagccaaggcgccagcaaggccaagcgcctccccgctccaacaacggtgggaaggatgtcattcggggtcgtgtgaatcacgtgacggccaaggacgtgctgacaactccagacgtcatcgttgggagttcggagatgtgtttccggaagaactacccggtatgccgcccaagcgagagattgagttccggatagatcttgctccaggaatcactcctctgcacaagcgaccctaccgtatggcagcaaatgaactggccgaagtaaagaaacagttggaagagttgaaagaaaaggggtacatacgtccgagtacttccccctggggtgctcctgtgatttttgtagagaagaaagacaagacgaagaggatgtgcgttgactacagagctctcaatgaagtcaccatcaaaaacaagtaccctcttccccggatcgatgatctgttcgatcagcttaaaggtgccactgtattctccaagattgatcttcgttccggatatcaccaattacgtattcgtgaagaggatattccgaagaccgcattcaccacgcgatacggactgtatgaattcacggtgatgtcgtttggtttaaccaatgcacctgccttcttcatgaacttaatgaacaaagtgttcatggaatacttggataagtttgttgtggttttcatcgatgacattctgatatactcacaatcagaggaagaccatcagcaccatctccgtctggtgttgggaaagttgcgggaacatcaattgtatgccaaacttagcaagtgtgagttctggttgtccgaagtcaaattcttagggcacatgatatctgctaaaggagttgctgtggaccccgaaacagcgaccgccgtcaccgattggaagcaacccaagacagtcacccaaattcgcagtttcttaggtttggcaggatactaccggagattcatcgagaacttctccaaaatcgctcgacccatgacacagttgctgaagaaagaagagaaatttgtgtggagcccgcaatgcgagaaggcgttccaaactctcaaagaaaagctggtttcctcgccggacggtcatgtggtggcctatgcctcacgccagctacggcctcatgaaggcaactaccctacccatgacttggagttagccgcggtggttcatgctctaaaaatctggcggcactatctcattgggaatctctgtgaaatatatactgatcataagagtttgaaatacatcttcacccagtcggatctgaatcttcggcaaaggagatggttagaactcatcaaggattatgatgtgggaattcactatcatcctggtaaggccaacgtggttgccgacgctctaagtcgaaaaagccattgccacactcttaacgtccgtggcattccacccgaacttaatcaacagatggaagccctgaacctaagcatagttagtcgtggattcttggctacgctggaagccaagcccaccttgctcgatcaaatccgcgaggctcagaagaacgacccggacatgcatggactcctcaagattatgaaacagggtaaagccgctggtttcacagaggatgaacacggaaccctatggaacgaaaatcgggtatgcgttccagataacagagaacttaaacagctgatacttcaggaagctcacgagagcccttattccattcactcgggcagtacaaagatgtacttaaacttgaaggagaaatactggtgggttagcatgaagcgggaaattgcagagtttgtggccctatgtgatgtgtgccagcgtgtcaaggcagagcaccaacgaccggccggacttctccaacctctccaagtaccagaatggaaatgggatgaaattgggatggatttcatcaccggacttccaaaaacccaaggtggatatgattctatatgggtagttgtggatcgattaaccaaagtagctcgatttattcctgtgaagaccacctatggagggaacaaactagccgagctctacttcgctaggatcgtgagtctccatggcgttcccaagaaaatcgtatctgataggggaagccaattcacctctcatttctggaagaaactccaagaagagttgggaacccgattaaatttcagcaccgcgtatcacccgcagacagatggacagaccgagcgtctatatcagatcctagaagatatgcttcgcgcatgtgtcctagatttcgggaagacctgggataagagtctcccctatgccgagttctcctacaataacagttatcaagccagcatacaaatggcaccttatgaagcgttgtacgggcgcaaatgccggacaccactattgtgggaccaagttggagaaagccaagtgttcgggactgatatcctgagagaaactgaagctaaagtcagaaccattcgggataatttaaaggtggcccagtctcggcagaaaagttatgcggataaccgacgccgtgatatggaattcgcagtggatgactttgtgtatcttcgggtcacgccattgcgaggtgtacacaggtttcagacaaaggggaagctcgcacctcggtatgtgggtcctttccgtatcattgctcggcgcggagaagtcgcttaccagctggagctgcccgcctccttgggcaacgtgcatgatgtgttccatgtgtcgcaactcaagaaatgccttcgtgtgccatccgagcaggccgactcagagcagattgaagttcgcgaagacttgacctatgtggagaggccagtgaaaatcctggacaccatggagcgcaggaccaggaaccgggtaatccgtttttgcaaggtccagtggagcaaccacgccgaagaagaagctacctgggagcgtgaagacgagctgaaggcagcccatcccgatctcttcgccagttcttccgaatctcggggtcgagattccgtttaa

SEQ ID NO: 23251 - DNA, 2323 bp, Oryza sativa
  Clone ID: TF_OsC1713_5255
ctatttgcatatcttgtcagttgcaggatcaaactgactagcatgtctgcatctcatcaagatttggacctgcacaggagctaagcagatctcccaggctggtgtgttcgattttttcgtcaacatccgtgcgccgccgctgcttgtgttgcttctgtctgcttccccggttctaattgcttgcgcgcacgagagatcggaacgagcagggcctccagaaccacaccttcgcctgagatctgcaccgggtaggcgggtgatcaggtttttggagagtgcttccgcacgactgctctcgacttctgctctgttcatcgtcgtctcgtcgtccaccatgtctgcacctggagccgccgccgccgctggagccactgtcgccatccctgaagatggcgcgccgggagccggagccgctgcgaacgtcaacgtcaacggaggcagttctgcctcacaatccagcggagggacattctcggggtcattttcggtagttggctttgctgctgcactgaaaccacatgcatttgatggttctaactataagaggtgtaaagcacgtgcactattgtggttgacagcgatgcaatgcttctatgtttcacgcggtatacgaagtgaaccacctctctctcctgaggaagaggttaagttcgaggcttcggattgcctgttccgtggggcattgatcagtgtactcgctgacaacatagtggacgtgtacatgcacatgccttctgggaaggacatgtgggatgcacttgaggccaagtttggagtttccgataccggcagtgagctgtatgtcatggagcagttctatgactataagatggtcgatgaccattctgtagtagaacaagctcatgagattcagatgctggctaaggaacttgagaacaacaactgtgagttgccggacaagtttgtagcgggtggcattattgccaagttgccaccttcttcgtcggactttgccacttctctaaagcacaagagacaagagttcagtgtttctgatctcattggctctttgggtgttgaggagaaggcgagggcaaaggacaaccggggcaaaaaggttgagcgaggttctagtgccaatatggtacagaagaagaacccacatgcatcccacaacaacaagaaagtcaagcctgatgtcaaatccaaggctacaatcaattttaagaagaaaggcaagggaaaggcaaagggagactgctttgtgtgtggcaagtctgggtattgggccaaggactgtcctgagtgcaaagacaggaagtctgccaacatggtcgggagaggttcctccttgttgatgggaaacgggtcgcttgcggctgttcatggtgttggtacagtcgatctgaagtttacttcgggaaagaccgtgcagctgaagaacatgcagcatgtcccttcaataaagaagaatcttgttagcggctctctattgtgtagagaaggttttaggcttgcgtttgaatccaataaatgtgtcgtatctaaatatggaacttttgttggaaaaggttatgacagaggaggcttgttccgctcttctttggatgacatgtgtaataatcataatgttgtgaaccatattagcaagaatgatgagtctaatgtgtggcattcgcaactctgtcatgacgcctccctattcaccccaatcaaattgggtggccgaagaaagagccgtactctaactgagatggtgaatgccatgttagacactgcggggctttccatggaatggtggggtgaggcaattttgactgcgtgtcatatcctgaataaaattccaatgaagcataaggaagtgacaccattcgaggaatggaaaaggaagaaattaaacctcccatacctacgaacatggggctgtttggccaaggtaagtgtacctatagccaaaatgcgaaaacttagaccaaatactgttgattgtgtgttccttggttatgttattcatagtgtgggttatagattcttaatagtaaactctggagtacccaacatgcgtgttggtacaattattgagtccagagatgctacattctttgagaatgaatttcccatgaaacatacacctagcacttctagtcaagaaactgtcataccccatgagcactttgcaccgatagaacacaatgatcaaacgcctgaggaaaatcctgaggaggacaacattgtagatactcgtaagagtaagagacaaagggttgcaaaatcctttggagatgactacgttgtatacctcgtggatgacaccccaagaatcatagaagaggcatattcatctcctaacgctgactactga

SEQ ID NO: 23252 - DNA, 630 bp, Oryza sativa
  Clone ID: TF_OsC369407_1
atgaagtctgagtatatgaccgaggaagatccactggtattatggcaatccctgaaggatcgctgcgaccatcaagggtcaattttgctcccatgggcacaacatggcctaatcaccctatgcttccaagactacaaatttatagtggcgtataactctgccctatattggatcagtgcttggttatgtttatgtgaccaaaagatcactgatactgagatgattgagaaaaagttatccacctaccaccccaacaacatgcatgggagaagagatagaagggtaagggaagtatcatgttcaaggggcaagggaagggtaagcccaaaggcaaaagccgaatgcaagaaagttacatgtggaacatctggggaaaacatgataattgctatagatgtggaggcattgagcattggtctcgtaactgccatgttcccaagcatctggttgagctctaatgagaaaatgagccaatatgagtcatacttcaccactgagcctgaagctcacattgaaaactatgatgacatgtttgtcaacactaaggatggtgaagatgtccatatggacgatgatgaggacaaccttattgaagaagtaatctcctatatgtctcttataagtgtctga

SEQ ID NO: 23253 - DNA, 3342 bp, Oryza sativa; identical to SEQ ID NO: 14692
  Clone ID: TF_OsC1713_4313

SEQ ID NO: 23254 - DNA, 3956 bp, Oryza sativa
  Clone ID: TF_OsC1528_1743
atggctggttttgccgatgcactgaggccagataaattctccggtgtgcactttaagagatggcaaatcagggtcactctgtggctgacagctatgaaatgcttctgggtgagtactggcaaacctgaaggaattcttattgctgatcagcagaagcaattcgaggaagccactactctctttgtgggatgcattcttagcgttcttggcgatcgtctggtcgaggtgtatatgcatatgaccgacgctaaggagttgtgggatgcactgaatactaaattcggtgctactgatgctagcaatgatctgtatatcatggagcagtttcatgactacaagatgactgacaaccgttctatagtcgaacaggctcatgagatacaaaccatggctaaggaactcgaactccttaagtgtgtcttacccgataaatttgtggctgggtgcattattgcgaaactacctccatcttggagaagtttcggtactgcactcaaacacaagagataggaatactccgttgaggggttgatagcgtctcttaatgttgaggggaaagctcgggaaaaagatgctgcgtctaagggtgatagtgggcagtccagtgccaatgttgtgcataaggctcagaacaagagcaaggggaaatacaaagctcaacagaccaccaactttaagaagaagaagaagaacaacaacaatcctaatcaggatgagaggacttgctttatgtgtggccaacctggtcatctggctaggaagtgtccacaacgcaaggggatgaaggcacctgcagggcagacttctaagtctgctaatgtgaccattggcaacactggagatggaggcgggtatagtaatttacctactgtttttttagttaatcagtctactaattggtgggttgatactagggccaatgtacatgtttgtgctgacatcttattgttttcttcttatcaggtcgcacggggttccatcgtcctaatggggaatgggtcacatgcttcttttcatggtgttggcacggtagatctgaagtttacttcgggaaagatcgtgcagctgaagaacgtgcagcatgtcccttctatcgataggaatcttgttagtggctcccgtcagactagagacgaatttaagttggtttttgagtgtaataaagtagtcgtgtctaaacatggatattttattggtaaaggttatgagtgcggaggactgttccgcttttccctttctgatttctgcaataagtctgtgaaccatatttgtggcagtgtggatgatgaggctaatgtttggcactcatgtttatgtcatattaattttgacttgatgtctcggctttccagcatgtgtttaattcctaagttcttcactgtcaaaggttctaagtgccatagttgtgtgcaatcgaagcaacctcgcaagcctcacaaggctgtcgaggagagaaacttggcaccactagaactcctacattcagatctttgtgaaatgaatggggtgttgacgaagtgtggaaaatgatatttcatgacgttgattgatgatgctactatattttgctatgtgtacttgttgaaaacgaaagacgaggctctagactatttgaaaatttataaggcagaagttgaaaatcaacttgacaaaaagataaaaaggcttaggtttgatcgtggtggagagtttttctcaaacgagtttgacttattctgtgaggaacatgacatcatacataagaggacgcctccctattctcccgagtctaatgggattgctgaaaggaataaccgcacactgactgacttggtgaatgacatgttggacaccacgggactacctaaggcatggtgggggaggcattgttgacctcgaatcatttgttaaatagagttcctaacagaaataaggacaaaacaccatatgagatatggattgggagaaaaccatcactttcaccaagcacatgagggtgcttggcgaaagtcaatataccaataacgaagaagcgcaaattgggacctaagactgtggactgtgtctttctgggatatgctcattacagcattacctatagatttttaatagttaaatctgaggtacctgacatgcatgttggtacaattatggagtctcgtgatgctaccttctttgagagctttttcccaatgaaggatacacatagtagttcgagccaaccctctgaagtaattccccgttcaatcacacaaccagaacaaactgaacatacacataaacatgtcattgaggaggatgtcagtgaagctcctcgaaggagtaagagacaaaggacggctaagtcctttggtgatgatttcactgtgtacctcgtggatgacactcctaagtcaatttcagaagcatatgcatctcctgatgcagactactggaaggagactgtccgtagtgaaatggattccattatcgctaacgggacttgggaggtgacaaatcgaccctatgggtgtaaacctgtggggtgcaagtgggtgttcaagaagaagcttaggcctgacggtactattgaaaagtacaaggctcggcttgttgctaagggctataatcagaaagaaggcgaagatttcattgacacttactcacctgttgctagattgaccacagttcatgtgctactttccctagcagccacacatggtcttctcgttcatcaaatggacgttaagacagcttttcttaatggagagctagatgaggagatctatatggatcaacctgatgggtttgtagttgaaggtcaagaaggcaaagtgtgcaaattgttgaagtctttgtatggtctgaaacaagctcctaagcaatggcatgagaaatttgacaaaacattgacatcttcaggctttgcagtcaatgaggcagataaatgtgtgtactatcgctatggtgggggtgagggagttattctgtgcttgtatgttgatgacatactgatatttgggacaaaccttgaggtgataaatgaggttaaatcattattgtctcaaaattttgatatgaaggatttgggagtagctgatgttatcttaaacattaagctaattagaggtgagaatgtgattacattcttgcagtcccattatgtggagaagatcttgaatcgctttggctacattgatagtaagccttctccaacaccttatgatcctactccctcccttcgcaagaacaagagaattgctaggaatcaactggaatactcccaaatcattggctcgctgatgtacctagctagtgcaactaggcctgatatctcctttgttgtgagcaagttgagccggtttacctctaatccaggagatgattactggcgtgcgcttgagcgagtaatgcgctatctgaaagatactatggaattggggcttcactattctaggtatcctgcggtactggagggatatagtgattctaagtggatctctgatgtggatgagataaaagccactagtggatatgtcttcacactgggtggtggtgctgtttcgtggaggtcttgcaaacagaccattttgacgaggtcaaccatggaagcagagctgacggtactggatactgctactgttgaggcagaatgactgcgtgatctattaatggatcttcctattgttgaaaaaccggtgccggctgtccttatgaactatgacaatcaaacgacatgtgaaaagacgattgaagtctgtcaggaaattgagaaactccggagttataacgttggattacatccaaacagctagaaacctggcagatcccttcacgaagggactatcacgaaatgtgatagacaatgcatcgtaggagataggtttgagacccatagcattcttgaaagaactcacctttgtaagcttgactgttggtcgcagtctatagagattttgggtgaatcttctaggaatcttactaaagatctaggagta

SEQ ID NO: 23255 - DNA, 5408 bp, Oryza sativa
  Clone ID: TF_OsC1713_5231
tatgggctcaaatatgtctctatgaatgtaaatagcaaaaatgtaaatgcaacaaataaatgagacaagagacaaggaatttttcaccgaggttcggaaactcgccggtttcctaatccccgttgaggcgagcccaactccaccgctcaaccacgaagccaccgcacgcccccttcgtcaagggatgggcaaggcgggagctggcccacggagaggactacccaagcctcgatcactcggggtagttcttccttcactccgaaggtggtgaactccaaaccactcacaaaccggcgccgggcctcctccacaatcttctcggagaggtcaccgggcaactcctccacaagccgtctaggaggcggcaacctcattatgtagagagcataatagattccttgtccaatagtcccctttgagatggcaatctccttcatcataaggttgataacatcaaaccgacgaccatccataatggcatcaataacatgccaagcaactctgcgtatgtcatcattgttgccgcatcttgggaggatggtggcccttactatgtggttgatcacacttgggagagcccttaaacccgccacctttccatatgtgtgccttcccccttcttcataaaactgagaaaagtgatcaatggggaagggattgtgggtgtgctcatcatgaaggtcatccccgttgttgaagcgaatgtgcaagagctccttgaattcacggcggttgatagagcatcggagggtccccaacatccacttcattgcatcacaatcgccggacacccatacggtggcatagaattgccggatgagatcttcatcaaaaggttgcttcatggtgacaattctatcaatcccaacggtccggaacatctcttgcaaattctcaaactccggtgtctcaccaatgtgcctccaagagatccatttgtgtttggcgaaggctttgttggcatacacttgtacatacacggacttttggaaccgtgtatgaaatcttggatcattacaatcgttaggcctccggaattgatcatgatgacggaagatagtgtattgttgagcattcctcaaattaagcacaaattggatggaggaatcgagaggactcccatcatcacttgcctcatcatcttcaccatttccactctcattgtcatcaccatcatcacttacttccatctcatcaccctcaacattttccatattgtcctcatcactttgaacatactcatctccgcttgattcctcattttcactaacgggatcgggcgtgggagcacgacgaccatgccgagtgcggggaggcatagcaagcatttggcaactaccggatgtgctctttctatccactttgcaaccggtataatccgaatcggaatagccaacaagctgaaatttagcaccttttgggtaaatccttttcacggccactaagtgacactccttaggagcggcttgaaaccgtgcacacatgcaaatactaaacatgatatccggcctagatgcggtaaggtaaagcaagctaccaatcatgaaacgataaagctttaaatctaccagtttacctccctcatcaaggtcgagatgcccgttggttgccataggtgtcttgataggcttcgcatcctccaagccaaacctcttgagtagatctttgatgtacttggtttggctcacgaacgtcccatccttgagttgcttgatttgaagtccaaggaagaagctcaactctccaatcatggacatctcaaattccctagacatcatatcaccaaattccttgcaaaatacctcattagtagaactgaatatgatgtcatcaacataaatttgacacacaaagaaatcatcaccaatgatttttgtaaaaagagtggtgtcaacttttccaattttgaaatcctttgacaaaagaaaatctttcaatctttcataccaagccctaggagcttgttttaaaccataaagagcttttgagagtttgtaaacatggtttggatttttaggatcttcaaaaccgggaggttgttcaacaaagacaagttcggcaatttcaccatttagaaaagcacttttcacatccatttgaaatagttttatatcaaagcatgatgcaaatgcaaaaaggatgcgaatagcctcaagtcttgccatgggggcaaaaatttcaccaaagtctaaaccttcaacttgtgtgaaaccttgcgccaccaaccttgtcttgtttctcaccaccaatccgttctcatcttgtttgtttctaaagatccactttgtccctatgacattgtggtctctaggtctttcaatcaaagtccacaccttgtttcttgcaaagttgttgagctcttcatgcatagcattcatccaatccggatcacaaagagtttcatctacatgttttggctcaagacaagaaacaaacgagtaatgttcacaaatcgaagcgacacgagatcgagtttgaacacccttactaatgtcacccaacacttggtcaattgggtgatccttggaaagagcagtgtgtattcttggaggcataggtggatcttgtgccttctcatcctccacttcaacttgagcttgacttgacgaggcggaagtagatggctcatcttgagtggaggtggatggcttgtcttctacttcaataggcttgacatctccaatatacatgttcttcatagctctcatcaagccttcatcacctttgttcttgttgtagacccggtatgccttgctatttgaggcataacctagaagaaaccctttatcacaccgactttcaaatttggttagtctaacacccttatggtaaatataacacttgcaaccaaaaactcgaaaataggcgacatttggcttcctcccaacaattagctcataggaagtctttttcaagagacgatgcaaataaagcctattgattgcatggcaagcggtgtttatggcttccgcccaaaaggaatcggaaacaccatattcatctagcatagtccttgccatctcaatcaatgtacgatttttcctttccactacaccattttgttgaggtgagtaggtagcggaaagttcgtgtttgataccaagatcatcacaatagtcctcgatattggtattcttaaattcggaaccattatcacttctaattttcacaagagtgcaactaaattcattttgggccctttttgcaaactttttgaaaagctcggcaacaatagacttatcatgcaaaaagaacaccccaagtatagcgagaataatcttcactttgctattgtctccaaatgtcactttctcttgttcattccctcctacttcaaatgtggtgaacatagccctatcaccggtcatgtgttgagtgcatccactatcaagcacccaatggctcccaccggtgcggtagttcacccaaacaagtttgggtccttggaggttagagaccaaagctttgggcacccaaatggcattctttttaccaccgagtataggggaacccacatatctagcaacaatgctaccatcatgagccttcttaagcatataatgagaatcaaacatacatgtcttaggaggcttacttccggggcaatcactcaccaaatgcccaacctcacgacacttggagcaatacttaccatttctcttgacaaaacgagtggcatggtgagaaggtttcttacccttctttggaatgaatccaagtccctccttattaaggatgcaccgttgctcactcaaaatcttgtcaagagtgttcttacccttgaagcatctctccaaactcttgttgagcttagacacttgctccttaagctcattgttctcaacaacaagtgaggcatcacaaatagaaacacacgagctagaactagagcaagggctaggcatatccataagattatcacaagaggtagaaatgctagatgatgcaacatgagcaatatggcaagtagcactatcatcaagcaaatcacaagatatgtcaacatcaatgtgagctccatgttgagtagtggaaaggaggttgtcatgagcttccttaagcttctcatgagaaatggtgagtctctcatgagtggtctttagctcctcatacaagacctctaaagaagcatgatccttctttagggccttgaacttgacaatctccttctcactataagtatggagctcctcaaacatactcacaagctcatcataggaaacatcatcacaatcatcatcactctcactatcactaagagatgttaccttagaggaaccctttgccatgagacaaagtggagcgaagagtgatggagcctccttgatggcaacaacggccatcttcttcttcttggagcttgcatcatcaccaccttcttcctcggacccggatgaggcggagctctcctcatttgagtcccattccccgatgaaagcctcaatcttcttcccttccttcttaagcttcttcatgagcttgtagcctccactcttcttcttggatgacttgtctccatcatcatccttggaagggcacttggaagcaaagtgtcccttctcaccacactcaaaacacctcaagttggagagagtcttattgggtcttctattttttctcctattggagttggagccccttcctctctcctttctccttcccaagagatcattgaaccttctagcaagaaggaccatctcttcctccaagtcctcattgacttcattcaccttgctcttgctctggtcttcaacttcggcttggagagcaatgcacttcttggagggtgaggcttcctcaatctccttcttcttcaacttgtacatgtcattggtgttgatcttccccaagaggcttgcgggtgtcattcttgacatgtcggagttgatgagcatggtgacaaaggtctcatacttctccggtagggctctaagcatcttttgggcaacctcaagatcggtgtagtttgccccaagccccttgagatcatttacaatgacattgagcctcccatacatgtcattcacactctcatgaggcaacatggagaatgtctcatattggatcttgaggaaatgaagcttggcatccttgtactcacttgtaccctcatggatctccgccaacttgttccaaatctcatatgcggtctcaaggttgctcactctatcgaactcctcttggctcaaagagttgaacaaggcattcatggcttgggcattgagttggaggttgcggtgatcaatctccgtcaagggtgtgccggtgatggcaaagcctacatccacaatactccaaatatggaagctcatagctttgaggtgagtagacattttaattttccaagtggagtagtttgtgccattaaacatgggagccttccctacatggttcacctcgttcgacat

SEQ ID NO: 23256 - DNA, 11169 bp, Oryza sativa
  Clone ID: TF_OsC359_8337
atggatgaagtcgggggtcgatggacattctccagggcaaatgaaggctacacgagctgcggcccgatggccggcagcgtcacccgtcgtggtttggacatgactggcttcgttttggagctgcgaggcatgtgcgtggtcctggggtatccacacggagaggactaccaggccaggccgcttccggatcaggagggagatgacgcggagccccacgctgggtgggaggtcaccgcagtgatcctctctggctcccccgagcggacttcgctggcagtcaccgcgggtggagactccttccccgccgcttgccagaacgccgctctcctcgccatcggcacccttcaccagcgctacccggacgagttgcagcactcgccctaccgctaccaccctcgtcgcggaggagcccgcgactacgccaccttctgggatgctagctcggaggatgacgctaccatcgtgcacctggcacgcatggtggaggcgtacgacgcggctcgtatcgacttccatcagatggtacgccgcgggatggtcgagaacaacatgaagatcctggagctgcgtcaggagaacctgcagctcaagaaggacctcgacgcagtggaggcgcagctgcaccagctcaaggtcgcccagggagagatctgccgccccaagcgtcgccgtgtttgccgcagccagaagatcaccgcccgcaagagcacctccaggcccgagcttgtccgtcagtccctggcgtggacttgcttcgtcgagacccctcgtgccgagcctgcgcccgtggttccccaggagggggaagcctccggcgttggtagctcggaggcagtagacgagcagttagtaggcttgcgcgtgtgttctttctcgtttgtcttttttggagtcgtgtggggcatggttatgccgatggtgacgaccaggagaaatgctgttaccggtgatggcaaccaacccgaaggcagcaaccccaaccaccagggcaacccacctccacctcctcctccgcctccaccaccaccaccagacaccaacgccattctcacccaaatcctcgcccagcaagccaacatgatgaatgctttcctccaccacctccaaaatccgccacaacagaatgctccaccaccacccccacaacactctaaactcgccgagttcctccgcatccgcccacctaccttctccagctccaacaaccccgtggatgctttggattggttgcatgccgtggggaaaaagctagacacggtgcagtgcagcgatgaggagaaagtcgtcttcgccgcccatcagctgcagggacctgcatctctatggtgggaccacttccaggctacgcagccagagggacagccgattacttgggctcgcttcaccgccgctttccggagaacccatgtgcccgctggagtcgtggctcttaagaaaagggaattccgagagttgaagcaaggcaaccgctccgtgatggagtatttgcatgagttcaacaacctggcccgttacgctccggaggatgtgcgggaagatgaggagaagcaagagaagttcttggcaggaatggaccctgagctgtccgtccgtctagtctctggggactatccggattttcaacgactggtggacaagagcatccgcttggaagccaagcacaaggagctggaatcgcacaagcgccgcttggcgaatttccgcaatcaacagggtgctaaccaaagggttcgctacaccaatccctatccagggggatcctcctcgcagcagcagcaacagcagcagcaacctcgcccagcgccccgacctcaattcgtggtgcgcgtcccacagccgcagcagcagcagaatcagcaagggactcgtgcgccccgtcctcctacgccaactgtgcagcccgttcaaggccgcagggacgctcaaggtcagcagcgtctgtgcttcaactgcttcgagcccgggcactttgcggataaatgcccaaagccaaggcgtcagcaaggccaagcgcctccccgctccaacaacggcgggaaggatgtcattcggggtcgtgtgaatcacgtgacggccgaggacgtgctgacaactccagacgtcatcgttggtacgttcctcgttcattccatccctgctacaattttgttcgactctggagcttcccactcgtttatatctgtgccattcgtggggaaaaatcagttgggggtagaaaggcttagaaaccctctgctcatcaccacccctggaggggttatgacagcaaagttttatagccctgccgtccctatagaaattcaggggattccttttccctcggatctgattctgctagacaccaagaacttggatgtgattcttgggatgaattggttggcacaattccaaggagtagtggattgcgcgagacgcactgttactctgtaccgagggccggaacaaccggttgttttctttgcacccccaacctctgttagaagttcagaacttcatcagatagaactgtcagaaattcccatcgtcagagagttcggagacgtgtttccggaagaactacctggtatgccgcccaagcgagagattgagttccgaatagatcttgctccaggaactactcctctgcacaagcgaccctaccgtatggcagcaaatgaactagccgaagtaaagaaacagttggaagagttgaaagaaaaggggtacatacgtccgagtacttccccatggggtgctcctgtgatttttgtagagaagaaagacaagacgaagaggatgtgcgttgactacagagctctcaatgaagtcaccatcaaaaacaagtaccctcttccccggatcgatgatttgttcgatcagcttaaaggtgccactgtattctccaagattgatctccgttccggatatcaccaattacgtattcgtgaagaagatattccgaagaccgcattcaccacgcgatacgggctgtatgaattcacggtgatgtcgttcggtttgaccaatgcacctgccttcttcatgaacttaatgaataaagtgttcatggaatacttggataagtttgttgtggttttcattgatgacattctgatatactcacaatcagaggaagaccatcagcaccatctccgtctggtgttgggaaagttgcgggaacatcaattgtatgccaagcttagcaagtgtgagttctggttgtccgaagtcaaattcttagggcacgtgatatctgctaaaggagttgctgtggatcccgaaacagtgaccgccgtcaccgattggaagcaacccaagacagttacccaagtccgcagtttcttaggtttggcaggatactatcggagattcatcgagaacttctccaaaatcgctcgacccatgacacagttgttgaagaaagaagagaaatttgtgtccagcccgcaatgcgagaaggcgttccaaactctcaaggaaaagctggtttcctcgccggtgttaatcttgccggatactcgcaaggacttcatggtgtattgtgatgcttcgcgccaaggattggggtgcgtgctcatgcaggacggtcatgtggtagcctatgcctcacgccagctacgtcctcatgaaggcaactaccctacacatgatttggagttagccgcagtagttcatgctctaaaaatctggcggcactatctcattgggaatcgctgtgaaatctataccgaccataagagtctgaaatacatcttcactcagtcggacctgaatcttcggcaaaggagatggttagaactcatcaaggactatgatgtgggaattcactatcatcctggtaaggccaacgtggttgccgacgctctaagtcgaaagggccattgcaacactcttaacgtccgtggcattccacccgaacttagtcaacagatggaagccctgaacctaaacatagttggtcgtggatttttggccgcgttggaagccaagcccaccttgctcgatcaaatccgcgaggctcagaagaatgatccggacatgcatggactcctcaagaatatgaaacagggtaaagccgctggtttcacagaggatgaacacggaaccctatggaacggaaatcgggtatgcgttccagataaccgagaacttaaacagctgatacttcaggaagctcacgaaagtccttattccatccaccctggcagtacaaagatgtacttagatttgaaggagaaatactggtgggttagcatgaagcgggaaattgcagagtttgtggccctgtgtgatgtgtgccagcgtgtcaaggcagagcaccaacgaccggccggacttctccaaccactccaagtacctgaatggaaatgggatgaaattgggatggatttcatcaccggacttccaaaaacccaaggcggatatgattctatatgggtagttgtggatcgattaaccaaggtggctcgatttattcttgtgaagaccacctatggagggaacaaactagcggagctctacttcgctaggatcgtgagtctccacggcgttcccaagaaaatcgtatctgataggggaagccaattcacctctcacttttggaagaagctccaagaagagctgggtactcgattgaatttcagcaccgcctatcacccgcagacagatggacagaccgagcgtctaaatcaaattctagaagatatgctccgcgcatgtgtactagatttcgggaagacctgggataagagtctcccctatgccgagttctcctacaataacagctatcaatccagcatacaaatggcaccatatgaagcgttgtacgggcgcaaatgccggacaccgctcctgtgggaccaagttggggaaagccaagtgttcgggactgatatcctgagagaagctgaagctaaagtcagaatcattcgggataatctaaaggtggcacagtcacggcagaaaagttatgcagataaccgtcgccgtgacctggaattcgcagtggatgattttgtgtatcttcgagtcacgccattgcgaggtgtccacaggtttcagacgaaagggaagcttgcacctcggtatgtgggtcctttccgtatcgttgctcgacgcggagaagtcgcttaccagttggagctgcccgcctccttgggcaacgtgcatgatgtgttccatgtgtcgcaactcaagaaatgccttcgagtgccatccagcagaccgactcagagcaaattgaagttcgcgaagatttgacctacgtggagaggccagtgaaaatcctggacaccatggagcgcaggaccaggaaccgggtaatccgtttttgcaaggtccagtggagcaatcacgccgaagaaaaagctacttgggagcgtgaagacgagtttctctccgccgtcgccgccgtgctccggttcgccgccgccgtcgctccggacttcctccccactcggcgtcacctccatcggcttcgccgcgttcccgtcgacctcgtccgcgcctccgtttcgctcgccgaccgccggagcaccgtcgtcctcgtcgtcccgaaccgcgccgccgccttcttccgcttcggccgccgttcccgtcgtcgccgtcgaccggggtgagccgaagaccgctccattcgcttcccccttccctcctctctctcgggtgccgctccgccgcgccggtggtcgccggcggtgaccatcggggcgcgggcgcgtccccctaccttcggccgtgccggcgaggccgccttcgggcgcgccctcgcggctgccaggtgggacccggccgtcagccgcccgagcccgcgggtgcggctgacgcgtgggacccacggcgccgaccgccgccagccgcgtgctcccggtccaccgtggaccgagaggctgacgcgtgggacccactcccgtggacccggtccgcgcgccctctccctcggctcggccatataaggaccggtcttcgggcctctgttgcaaagcactaccgtacttccaaatgtctagtggggcaaatgaaggctacacgagctgcggcccgatggccggcagcgttacccgtcgtggtttggacatgactggcttcgtcttggagctgcgaggcatgtgcgtggtcttggggtatccacatggagtggattaccaggccaggccgcttccggatcaggagggagacgacgcagagccccacgctgcgtgggaggtcacagcagtgatcctctccggctctcccgagcggacttcgctggcagtcaccgcgggcggagactccttccccgccgcttgccagaacgccgctctcctcgccatcggcacccttcaccagcgctacccggacgagttgcagcactcgccctaccgctaccaccctcgtcgcggaggagcccgcgaccacgccaccttccgagacgccagctcggaggatgacgctaccgtcgtgcatctggcacgcatggtggaggcgtacgacgcggctcgtatcgacttccaccagatggtgcgtcgtggcatggtggagaacaacctgaagatcctggagctgcgtcaggagaacctgcagctcaagaaggacctcgacgcgttggaggcgcagctgcaccagctcaagatcgcccagggagaggacagccgtcccaagcgtcgccgcgtctgccgcagccagaagatcaccgcccgcaagagcacctccaggcccgagcttgttcgtcagtccctggcgtggacctgcttcgtcgagacccctcgtgccgcacctgcgcccgtggttccccaggagggggaagcctccggcatggtgacgaccaggagaaatgttaacaccggtgaaggcaaccaacccgagggcagcaaccccaacccccaaggcaacccacctccaccaccaccaccagacaccaacgccattctcacccaaatcctcgctcagcaagccaacctgatgactgctttcctccaccacctccaaaatccgccacaacagaatgctccaccaccccctccccaacactccaaactcgccgaattcctccgcatccgcccacccaccttctctagctccaacaatcccgtagatgcgttggattggttgcatgccgtggggaagaagctagacacggtgcagtgcagcgacgaagagaaagtcatcttcgccgcccaccagctgcaggggcccgcatctctctggtgggaccacttccaggctacgcagccagaggggcagccgatcacttgggctcgcttcaccgccgctttccggagaacccatgtgcccgccggagtcgtggctctcaagaagagggaattccgagagttgaagcaaggcaaccgctccgtgatggagtatttgcacgagttcaacaacttggcccgttacgcccctgaggatgtgcgggaagatgaggagaagcaagagaagttcttggcaggaatggaccccgagctgtctgttcgtctagtctctggggactatccggattttcaacgactggtggacaagagcatccgcttggaggccaagcacaaggagctggaatcgcacaagcgccgcttggcgaacttccgcaatcagcagggtgctaaccagagggtccgctacaccaatccctatccagggggatcctcctcgcaacagcaacaacagcagcagcaacctcgcccagcgccccgacctcaattcgtggtgcgcgtcccacagccgcagcagcagaatcagcaagggactcgtgcatcccgtcctcctacgccagctgtgcagcccgttcaaggccgcagggacgcttcaggtccgcagcggctgtgcttcaactgcttcgagcccggacactttgcggataaatgcccaaagccaaggcgtcagcaaggccaagcgcctccccgctccaacaacggcgggaaggatgtcattcggggccgtgtgaatcatgtgacggccgaggacgtgctgacaactcccgacgtcaccgttggtacgttcctcgtccattccatccctgctacaattttgttcgactctggagcttcccactcgtttatatctgtgccattcgtggggaaaaatcagttgggggtagaaaggcttagaaaccctctgctcatcaccacccctggaggggttatgacagcaaagtattatagccctgccgtccctatagaaattcaggggattccttttccctcggatctgattctgctagacaccaagaacttggatgtgatccttgggatgaattggttggcccaattccaaggagtagtggattgcgcgaggcgcactgtcactctgtaccgaggaccagaacaaccggttgttttctttgcacccccaacctctgtcagaagttcagaacttcatcagatagaactgtcagaaattcccatcgtcagagagttcggagacgtgtttccggaagaactacctggtatgccgcccaagcgagagattgagttccggatagatcttgctccaggaaccactcctctgtacaagcgaccctaccgtatggcagcaaatgaactggccgaagtaaagaaacagttggaagagttgaaagaaaaggggtacatacgtccgagtacttccccatggggtgctcctgtgatttttgtagagaagaaagacaagacgaagaggatgtgcgtcgactacagagctctcaatgaagtcaccatcaaaaacaagtaccctcttccccggatcgatgatctgttcgatcaactcaaaggtgccactgtattctccaagattgatctccgttccggatatcaccaattacgtattcgtgaagaagatattccgaagaccgcattcactacgcgatatggactgtatgaattcacggtgatgtcgttcggcttgaccaatgctcctgccttcttcatgaacttaatgaacaaagcgttcatggaatacttggataagttcgttgtggttttcatcgatgacattctgatatactcacaatcagaggaagaccatcagcaccatctccgtctggtgttgggaaagttgcgggaacatcaattgtatgccaagcttagcaagtgtgagttctggttgtccgaagtcaaattcttggggcacgtgatatctgctaaaggagttgctgtggaccccgaaacagtgaccgccgtcaccgattggaagcaacccaagacagtcactcagattcgcagtttcttgggtttggcaggatactaccggaggttcatcgagaacttctccaaaatcgctcgacccatgacacagttgttgaagaaagaagagaagtttgtgtggagcccgcaatgcgagaaggcgttccaaactctcaaagaaaagctggtttcctcgccagtgttaatcttgccggatactcgcaaggatttcatggtgtattgtgatgcttcgcgccaaggattggggtgcgtgctcatgcaggacggtcatgtggtagcctatgcttcacgtcagctacgacctcatgagggcaactaccctacgcatgacttggagttagcagcggtggttcatgctctaaaaatctggcggcactatctcattgggaaccgctgtgaaatatatactgatcacaagagcttgaaatacatattcacccagtcggatctgaatcttcggcaaaggagatggttagaactcatcaaggattatgacgtgggaatacactatcaccctggtaaggctaacgtggttgccgacgctctaagtcggaagagccattgcaatactctcaacgttcgaggcattccacccgagcttaatcaacagatggaagccctgaacctaaacatagttggtcgtggattcttggctgcgttagaagccaagcccaccttgctcgatcaaatccgcgaggctcagaagaatgatccggacatgcatggactcctcaagaatatgaaacagggtaaagccgctggtttcacagaggatgaacacggaaccttatggaacggaaagcgggtatgcgttccagatagcagagaacttaaacagctgatacttcaggaagctcacgaaagtccttattccattcacccgggcagtaccaagatgtacttagacttgaaggagaaatactgcgtgtcaaggcagagcactagcgaccggctggacttctccaacctctccaagtaccagaatggaaatgggatgaaattgggatggatttcatcaccggacttccaaaaacccaaggtagctcgattcattcctgtgaagaccacctatggaggacacaagctagccgagctctacttcgctaggatcgtgagtctccatggcgttcccaagaaaatcgtatctgataggggaagccaattcacctctcacttttggaagaagctccaagaagagcttggtacccgactaaatttcagcaccgcgtatcacccgcagacagatggacagaccgagcgtctaaatcagatcttagaagatatgcttcgcgcatgtgtcctggacttcgggaagacttgggataagagtctcccctatgccgagttctcctacaataacagctatcaagccagcatacaaatggcaccttatgaagcgttgtatgggcgcaaatgccgaacaccgctattgtgggaccaagttggagaaagccaagtgttcgggactgatatcctgagagaagctgaagctaaagtcagaatcattcgggataatctaaaggtggcacagtctcggcagaaaagttatgcagataaccgtcgccgtgatctggaattcgcagtggatgattttgtgtaccttcgggtcacgccattgcgaggtgtgcacaggtttcagacaaaagggaagctcgcacctcggtatgtgggtccctttcgtatcactgctcgacgcggagaagtcgcttaccagctggagctgcccgcctccttgggcaacgtgcatgatgtgttccatgtgtcgcaactcaagaaatgtcttcgagtgccatccgagcaggccgactcagagcaaatcgaagttcgcgaagatttgacgtatgtggagaagccagtgaaaatcctggacaccatggagcgcaggaccaggaaccgggtaatccgtttttgcaaggtccagtggagcaaccacgccgaagaagaagctacttgggagcgtgaagacgagctgaaggcagcccatcccgatctcttcgccagttcttccgaatctcggggtcgagattccgtttaa

SEQ ID NO: 23257 - DNA, 2146 bp, Oryza sativa; identical to SEQ ID NO: 15065
  Clone ID: TF_OsC359_7847

SEQ ID NO: 23258 - DNA, 3211 bp, Oryza sativa
  Clone ID: TF_OsC359_8062
atggactccccagcgacccccgtgggcttatctccgccacttctcagtctggtgccccgcaatgaaccatgctatacaaaaggaaaaggagatttattgcgtcagcggctagggtttgcggtggaccgggcgcacggcggcggttcacaagaacggacggccgagatcaatccatccaaaacggacggccgagatcgattggtgcacgaccggctcacagcgaacggccccgatgacgtcggcgatgacgtcacctaccggcggcggctcgggctcacacgctcgacggcgaacggtggtgcttcagcacgaacggagggcaccagcacgtagaggacgacgcggcgaactcaccggtgaccaaaacggcggcggaagaacaacggacgacgacggcgatgaggaagaagcggcggcgctcttcggcttgacgacggcgacggtgctccggcggacaacaacgacggcgaaggggcggacgaggacgtcggcctccccgcgcgcgcgcgccgctgacaggcgggcccgcccgccactctcgctgacgggtgggacccacctgtcatccccaaccccgcgccgcgcccgccgccgcccgtgccctagcgccgccgccgccgcggattccgccgcatcccgccgtccccgcgcgcattaaagagaggggaattactccccgcgtttccctctcccgattccccctcttttccctctctctctccctcggattcgtccggattcatcccgcgaagttcgccggcgtcttcaatggcgcccgagatctccgcgcgcggtttcctctctccccggccgcgctctccccctcccgttgctataaaatcgtccctcgtgcttcgctcttccgtttccgccgctcgccgctcgctctcgccgtcggtttcgtgcccgcgccgtgctcctctctctccgccgtcgccgccgagctccgtttcgccgccgtcgtcgctccggtcctcctcccgactcggcgccacctccatcggcttcgccgagtggttgccgaccccgtccgccgctccgcttcgcccgccgaccgccggagcaccgtcgacatcggcatcccgaaccgcgccgccgcttttctccactccggccgtcgtttccgccgtcctcgttgtcccggggtgagccgtggaccgtccctctcgcttccctctcctctccgctctctcgggcgccgctccgccgcgccggtggtcgccggcggtgaccatcggggcgcgggcgcgccgctcccgtcggccgtgccggcgaggccgccttcgggcgcgccccgcggctgccaggtgggcccggccgtcagccgcccgcgcccgcgggtgcggctgacgcgtgggacccacggcgccgaccgccgccagccgcgtgctcccggtccaccgtggaccgagaggctgacgcgtgggccccacttcccgtggacccgggcaaatgaaggctacacgagctgcggcccgatggctgacaatgagaaaggcaataaggtcagaagtcaggacattggtacctcaagctcccgagtgaatgaagcaccagacaccagttgtgtggcagtggtccaacacctgattaaccagaacaaattgcttatagagatactacagcagcatcggatgccaattttgaacccgagtcagatgcaacctcaagtgcagttggaggcagtccaagcactcacaccacaagtcagcgcaccgccaacatcccagaaggcccctcatgccatgccacatgttgacccaaaagaagcaagtatcatctgttttatgtgtgatgagcaagggcactacgcaaggaactgtcctcagcagaaaagaaaagcaccaatgcgaaccgaagatgaagtccgtaagatgatcattaccagcacagaatggcctccaccaggaatgacaaaacatcagagaagaaattccttccgaggtgcacaacagttgacagagcatcttttagctaatggaggtagagtgtctgatagtgaagattcagatcaagtctcctcagatgatgaagatgagaagtctccccaaggttttaaccagaataaaatggaacgtaaggcatgctctcgttgtggagaaatcggtcatgttgccagctcgtgtgccactacctgctttcattgtgaggaagaccgtccacccggtgaatgccccatgagcaggatcacttgtttcttttgtgaaggaactgatcatgtaccaaaagattgtcaattcagttttctgctgacgaagaagatggccaaccaacccaccagttccaacggagagaagcatcaaggcaacacaaatccccgccaagattaccgtttcagcctaactccagtgccaggacagaggaatcgaaatgagaaaagaaaatgccgagtccgggaagacatctgttgcttcaattgtcaaggaatgggtcatttcgccgacaagtgcccaaaaccgagaaacatagctgccagcacgtcagtccacgcaactccctgcaatcagaagcttgctcctcagcgaattgtcatccatgcatcccaaagcagtcctatagcccgcgttgcaacagctccaactccagcgagtgcattaccacaaggtgtcaatgctcaatttcagccccagccatcagttgacaagacagaggccagtatcggcattgtacctttggatgttccagcacagcagccaagaaatcaagtacaggatgaagaacccaagcagaaacatgagataatgaatgagcttgataagtttattgagggatccatgttagggttgcaagtgctttctggaactgaagccccatcttcaagtgccgcaacccagtcgaagtcagctaaaggttcaaccagggacaagtcaggtgaagagaagattccatctatcttcttgctagcctcctcgaatctcggggacgagattcctgtaaggggggtggatttgtcacgtcgggtggggcccacctctatcggcttcgccgcatcctcgtcgacctcgtccgcgcctccgtttcgcccgccgaccgtcggagcgccgtcgtcctcgtcgtcccgaaccgcgccgccgccttcctccgcttcggccgccgttcccgtcgtcgccgtcgacccggggtgagccgaagaccgcccctttcgcttccctctcctctccgctctctcgggcgccgctccgccgtgccggtggtcgccggcggtgaccat

SEQ ID NO: 23259 - DNA, 1335 bp, Oryza sativa
  Clone ID: TF_OsC359_7548
tcattttagcacattttggtcttcaacaacattgggtccataaaggtaagtcacatgagacttaggtacccaaatggattttatgctagcatgtggtgaactaatcaccctaatagcacaaatgtcctttttggcatccctaggcaaatcataatcaaatgaggagtttggcttaggaatgttacccatgggacaattgttaccaatatgtccctttgcacggcaattgtagcaaagtcgattcttgtctttacatggtgctttcttcaccacatcttgcatcttctctgctaccttgctacttgctaccttgatattaagcttcttccttgatgacacaaagtgattcttcatgtgagggcaagatgcaacttcatgactcttctcattgcatccatagcacttcctattgcttcttcttgttctcctctttggaagtgtgacttggtcatcaatcttgttggaacatatcaaggcatagtgtcccactttcttgcacatgaagcaagtaatgagagttttgatccaactttgaatttgccccttactcttgttgttggacttattgttttcttgacaggacttggtgcaagctacggttgatcccttctcaagcttcttcaccatgttcccacggttatcttgagaaggttgagccttgtccacaagtccatgatccatgtgcttctctctttttcctacacaatccaagtcacatgtagtgctcggggaaatgtttgtgttggagcaacaagtgttagcacaagtaaaatcaacttgaacatgtggctcataagattttaccgttgcaattatcacctcatgagctatctctaccatggcatgagaatctacaaggttctcatgagacacacaaaagttcatcgtgtgtttcttgtaaatccatatactttttagtgatctcctcaaattgagatttgagctcttaattttccttctccaaagatgcttgctcatagtgtatgttgatgagatggatgatgaggtgagatcttcttggtcggaggagataatcacttgggacttgtcatgatgaggtaatgaagtagagcaattcccaaatgatgcttccacaagagtatcctctccatcacatttagacttgtcatatctttcctttagtgttatccaaatgagatgagcatctacaagtggcatgatggttttgaacacatattcactcaaagcactaaacaaaacattaatagcttgagcattgagatgtgtgcatttctcttcctcttcaaatgatagctctttatcattaggaggagaaatactcacatctacaactcgctctatatgaggacccat

SEQ ID NO: 23260 - DNA, 5800 bp, Oryza sativa
  Clone ID: TF_OsC91_2609
atggcaggtctagaggataaagatgaggagggtgcatctcattccccacgcaccaaaggcatcatccaatactttacaaggcaagtgaagcagcacacagaaggacttgatacagatttgcaggtgacaaatgagaagattggacaattggagtccacgcagatctccaccaacactaagcttacagggctggagacagcggtcgcccgcattgacactagccttgctgctcttgtgaggcattttgatgctctcaatgctggaggcaatggtgggggtaatgacgatgacattgacggagagtacgtcgaggataatttggaggatgaatatattgctgacactgaacaagatgatcgagatgctcgagatcgtcgacggctacacaacaatcgacgaggtatgggtggtcgccgccgacgcgaggtacgcaacaatgatgatgctttttctaaaattaaatttaagattcctccttttgatggaaaatatgatcctgatgcgtacctctcttgggagattgctgttgaccaaaaatttgcatgccatgagtttcctgagaacactagagttagagctgctacaagtgagttcaccgattttgcttcggtttggtggatagaacatggcaagaaaaatcctaataacatgccacaaacttgggatgctttgaaacgggtcatgcgggctagatttgttccttcttactatgcacgtgacttgctgaataggttgcaacaattgagacaggatgcgaaaagtgtagaggaatattatcaggagttacaaatgggcttgcttcgttgtaatttagaggaaactgaggacgctgccatggctagatttttgggtgggttaaaccgcgagatttatgacatcgtagactataaagattacactaatatgacccgattgtttcatcttgcttgtaaggctgaaagggaagtgcagggacgacgtgctagtgccaaggctaatttttctgcaagtaaaacttcatcatggcagacacgcaccactcctccggccggccgtactacttctccatcttccacacccacaaccagtcgagcagcacctcctccatctggtgacaagtcagcgataaaggctgctcagccagcaccgagtgcttcttcaatggcatccacaggccgaatgagagatgttcagtgccaccgttgcaagggctttgggcatgtgcagcgtgactgccctagcaagcgagttttggtagtaaaaaacgatggtgagtactcctctgctagtgatttcgatgatgatacacttgctttgcttgcggctgaccatgcagataatgagccaccggaagagcacattggggctgcatttgcggatcactatgagagcctcattgtgcagcgtgtccttagcgcacaaatggagaaggcggagcaaaatcagcgacacacgttgttccaaacaaagtgtgtcgtcaaagagcgttgttgccgcatgatcattgatggaggtagctgcaacaacttggctagcagcgagatggtggagaagcttgcacttagcaccaaaccgcacccacatccatactacatccaatggctgaacaacagtggtaaggcgaaggtaacaaaactggtgcacattaattttgcaattggaaattaccatgatgttgttgaatgtgatgttgtgcccatgcaagcttgtaatattctgctaggtagaccatggcaatttgatagggattctatgcatcatggtaggtcaaaccagtactcttttctgtaccatgataagaaaattgtgttgcatcccatgtctcctgaagatattttgcgtgatgatgttgctaaggctgccaaatccaaatgtgagagtgataaaaaagcccaatctgatggcaagaaacctgagacaatcaatttgaaacccagatgcttacttgctactaaatctgatattaatgagttgattgcatcaccttcagttgcctatgctttggtatgcaaagatgctttgatttcacttcacgatatgcagcattctttgccccctgctgttgctaacattttgcaggagtactctgatgtgtttcccaaggaagtgccaccggggctgccaccggtgcgcggcattgagcatcaaatcgacttgatcccaggtgcttccctaccgaatcgtgcgccataccgaaccaaccctgaggaaaccaaggagattcagcgtcaagttcatgaattgcttgataaagggtatgtacgcgagtctcttagtccatgtgcggttccggtaattttggtaccaaagaaagatggttcatggcgtatgtgtgttgattgtagagctattaataacattaccattcgatatcgtcatcctattcctaggttagatgatatgcttgatgaattgagtggctctattgtgttctccaaagttgatttgcgtagtggttaccaccagattcgtatgaagttgggtgatgaatggaaaacagcatttaaaacaaagtttgggttgtatgagtggttagtgatgccttttggtttaactaatgcacccagcactttcatgaggttgatgaatgaggttttgcgtcctttcattggaaaatttgtggtggtctactttgatgatatcttgatttacagcaagtctatgggtgaacattttaatcatttacgtgctgtttttaatgctcttcgtgatgcacgtttatttggtaaccttgagaagtgcaccttttgcacagatcgagtttcttttcttggctatgttgtaactccgcaggggattgaggttgatcaagccaaggttgaggcaattcagagttggccgactcctaaaacggtctcacaagtgcggagctttctaggactcgcggggttctatcgccgctttgtgcaggatttcagcaccattgctgcaccattgaatgcgcttacaaagaagggagtgcctttcacttggggcacatcacaagagaacgccttccacatgttgaaagataagttgactcatgcacctctcctccaacttcccgattttaataagacttttgaacttgaatgtgatgctagtgggattggattgggtggtgttttgctacaagaaggaaaacctgttgcatattttagtgaaaagttgagtgggcctgttcagaattattctacttatgataaggaattgtatgctcttgtgcgaactttagaaacatggcagcattatttgtggcccaaggaatttgtcatacattctgatcatgagtctttgaagcatattcgtagtcaagggaagctgaaccgtagacatgctaaatgggttgaatttattgaatcttttccttatgttatcaaacacaagaaagggaaggagaacatcattgctgatgctttatctaggagatacactttgttgacacaacttgactacaagatttttggcctggaaacaatcaaagaccaatatgcgcatgatgctgattttaatgatgtgttgctgcattgtaaggatggaagaacatggaacaaattcgtcatcaatgatgggtttgttttcagagctaacaagctatgcattccagctagctccgttcgcctgttgttgttgcaggaagcgcatggaggcggtttgatgggacattttggcgccaagaagacacatgacatccttgctagtcatttcttttggccacagatgcgaagagatgttggcaggttcgttgctcgctgcgctacatgtcaaaaggctaagtcacgcttacatccacatggtttgtatatgcctcttcctgttcctactgttccttgggaagatatttcaatggactttgtgttaggattgcctaggaccaagagggggcgtgatagcatttttgtggttgtggatagattttctaaaatggcacatttcataccatgtcataaaactgatgatgcttctcatatcgctgatttgttctttcgagaaattgttcgcttgcatggtgtgccaaacacaattgtttctgatcgtgacacaaaatttcttagccatttttggagaactttgtgggctaaattggggactaaacttttattttctactacttgtcatccccaaactgatggacaaactgaagtggtgaatagaaccttgtctactatgcttagggctgttttgaagaaaaatatcaagatgtgggaagaatgcttgcctcatattgaatttgcttataatcgttccttgcattctactacaaaaatgtgcccttttcagattgtgtatggtttgttgcctcgtgctccaattgatttgatgcctttaccatcttctgaaaaactgaattttgatgctaagcaacgtgctgagttgatgttaaaactgcatgagacaactaaagaaaacatagagcgcgtgaatgctaagtataagtttgctggtgacaaaggtagaagggaattgaattttgaacctggagatttggtttggttgcatttgcgaaaagaacgatttcctgatttgagaaagtctaaattgatgcctagagctgatggaccatttaaagtgttagcaaagattaatgagaatgcatataagattgatttgcctgcagatttcggggttagttccacatttaacgttgcagatttgaagccgtatttgggagaagaagatgagcttgagtcgaggacgactcaaatgcaagaaggggaggatgatgaggacatcaacaccatcgatacatccacgtccccccatgtacagcatgatggtcctattacccgcgctcgtgcacgtcaactaaattatcaggaacgatggagaggatccaaagggaagaggattcgcgcggggtggattcggattgcagggcagcgccaacttctgacggccgccacgacttcatgcgaactccgatttgggacgagtgccctcgtggccgggttgacgcgccccacaagttcgcggcgaccattggagacgcccaccaacagctccaccacaaacccgactacagcttgacaggtcttgttgctacagcaccgatacacctcgttccacggttgctaacttgtggtgttgctgtccccctcctgtgggcaaggtccagaggataaagatgaggagggtgcatctcattccccacgcaccaaaggcatcatccaatactttacaaggcaagtgaagcagcacacagaaggacttgatacagatttgcaggtgacaaatgagaagattggacaattggagtccacgcagatctccaccaacactaagcttacagggctggagacagcggtcgcccgcattgacactagccttgctgctcttgtgaggcattttgatgctctcaatgctggaggcaatggtgggggtaatgacgatgacattgacggagagtacgtcgaggataatttggaggatgaatatattgctgacactgaacaagatgatcgagatgctcgagatcgtcgacggctacacaacaatcgacgaggccgaatgagagatgttcagtgccaccgttgcaagggctttgggcatgtgcagcgtgactgccctagcaagcgagttttggtagtcaaaaacgatggtgagtactcctctgctattgatttcgatgatgatacacttgctttgcttgcggctgaccatgcagataatgagccaccggaagagcacattggggctgcatttgcggatcactatgagagcctcattatgcagcatgtccttagcgcacaaatggagaaggcggagcaaaatcagcgacacacgttgttccaaacaaagtgtgtcgtcaaagagcgttgttgccgcatgatcattgatggag

SEQ ID NO: 23261 - DNA, 2398 bp, Oryza sativa
  Clone ID: TF_OsC359_5828
taaaaagaaaaatccctaaaagaagtccttttccccccctcccttcttgggccggctcggcccagtccctccctctctctctcttcccccgcggcccatcggcctcccgcgcgcgcgcgccgctgacaggcgggcccgcccgccgccctcgctgacgggtgggtcccacctgtcgtcttcctcctcgcgccgcgccgccgctcgcccgtgccctagcgccgccgccgccgcggatttcgccgcatcccgccgtccccgcgcgcattaaagagggggaaaatcacccccgtgattccctctcccgtttccccctcttttccctctctctccctcggattcgttcgaatcgcgcccgcaatcctcgccggcgcaatcaatggcggccgagatctccgcgcccgtttactcccttttcggccgcgctctccccctttcggcgctatataatcgttccccgagctccgttcttccgtttccgccgcttgccgctcgctctcgccttcggattcgtgctcgcgacgttctcctctctctccgccgtcgccgccgaccttcggttagccgccgtcgtcgctccggtcttcctcccgactcggcgccacctccatcggcttcgccgcgttgtcgccgaccccgtccgccccttcgcttcgcccgccgaccgccggagctccgtcgccttcgtcgtcccgaaccgcgccgccgcgttcctccgctccggccgtcgtttccgccgtcctcgttgtcccggggtgagccgtggaccgtccctctcgcttccctctcctctccgctctctcgggcgccgctccgccgcgccggtggtcgccggcggtgaccatcggggcgcgggcgcgcgtctcccgtcggtcgagccggcgaggccgccttcggccgcctcccgcggctgccaggtggggcccggccgtcagccgcccgcgcccgcgggatgtttaacagagaaaaaggaaagaatgtcagcgggtatgcctcaagtaactcaagttttcaactcaatccaccactggcctcaagagagttaaccagggcacacccttggtccattccaagcatgccgcttagttcacagctaccattggttggaagtcaagaccaaaatcagtatgtgtttgatcgagcatttgccacccaggtcaatgagcttccaatgccagaagaggatgtccccttttgtcacgattgtagagaacaaggacactatgccctgaattgtccatgggtatatgccaaagaagccccttcctttggtttagcagggcagacatcgctaaaccagcctcctcacaccaagacaagcttgcagcctagtgtgcaaagcagagagcccaatgaagagaatccattgaatcctgggaattgctctcctcctagcctttcgtaccacgtggggtcacgtactaagcacgccaaaggcaagaagagtaagaatcagaagagaaaagcgccgatgcgaactgaagaagaagtacgtaagatgactattaccagcaccgaatggtctacagcagggataactattcctagacgtcaatgaggaaataccttccgaggtgcacgacagttgacccagcacctcctaagccatggtggcagagtatctgatagtgaagggtcagatcaagtctcctcggattatgaagatgagtcccccccacatctcggcgaggaagagatggaatcaaaagcatgcccccgttgtggagaaattggacacattgctagcatgtgtctcacactctgccctcattgtgaagaagaccatccaccaggggagtgtcccacccgcaaggtcacatgttttctatgcgaaggtacaaaccatgtgcccaaggattgccaactcagtgtgttgttgaccaagaccgcagaaatccaacgaacgaccctacgattgtctcgtcagctagtcagctccaacagcaatatcgacgatatcatccacagcaccaatgctcctcctgctgcacctgactctgagaaaagaaaatgccgagtccgggaagatatctgttgcttcaattgtcaaggaatgggtcatttcgccgacaagtgccccagaccgagaaacatagctgccagcacgtcagtccacgcaactccttgcaatcagaagcttgctcctcagcgaattgtcatccatgcatcccgaagcagtcctatagaccgcgttgcaacagctccaactccagcgagtgcattaccacaagttgtcaatgctcaatttcagccccagccatcagttgacaagacagaggccagtatcggcattgtacctttggatgttccagcacagcagccaaagaaatcaagtacaagatgaagaacccgagcgtaagaaaccgcccgccgccctcgctgacgggtgggtcccacctgt

SEQ ID NO: 23262 - DNA, 1863 bp, Oryza sativa; identical to SEQ ID NO: 14949
  Clone ID: TF_OsC359_6320

SEQ ID NO: 23263 - DNA, 9778 bp, Oryza sativa
  Clone ID: TF_OsC359_6170
atggcgatgcggcggaggcgcgcggtcgccggcgacgacaaccagcggcaggcgatgccgcgctacaagcctgagtacttgtttggtgttgagggttttgtccaggagttgcgtacgatgtcctttgtcataggatttgggactgtccttttttatgcccagattcctcatgatcgtcatgaagagaagtgccgagtcaaagtcaccttgaacagtaatagtgaagatatcccctcagtgatgttcgaagctggaggaagaaactacatccatgcatgtcaggaggtggcaaggatcgccataggagagctccgcgatcgctacagtgatcagttggccgacactgagtatcgctaccatcctcgccaaccacagggaagtgatcgtggcagctaccttgagactgagggaattgagaatgatgctaccacaaggcatttggttgagatgctgtgggctatggatgaaacccgtgcggagacagtgttagcggctcaagatcgtgaagaccggaatcgtggtaagatttgcaagttggaggacaaggtggatcgtttggagaaggaactagccgcgttgaagggagaagcaccaccgcagaaggccaggattcgtcttaccgcaaggaagagagctctatttgtccctcgttaccaattggcgctaaagatggtgaacactcgcgccagtggaagtggaaacaataacaatgaagggaacccaactcttgcccaagtcctggctcaacaggcacagcttatgaacatgatgatgcagcaactccagaaccagcagaaccaaggaaataaccatgcacctccccagaacaagttagcagaatttcttcgtgtgaggccgcctactttctctagcaccactaatcctgttgaagctggtgattggttgcatgctatagagaagaagttggatttgcttcaatgcaccgatcaggagaaggtctcatttgcatcacatcagctgcatggccctgcctctgaatggtgggatcacttccgcctgaataggactactgctgaacctatcacttggcttgaattcaccgctgctttccggaagacgcatataccatcgggagtggtgtctctcaagaagaaggaattcaggtcgctcactcaggggtctcgctctgttacggagtatctgcacgagttcaatcgtcttactcgttatgctccagaagatgtgcgcactgatgaagagcgccaggagaagttcttggaaggacttaatgatgagctttcttacccactcatgactggggattatcctgatttccagaagttggtggataaggctattcgccaggaagacaagtacaatcgcatggagcaaaagaaacgccggattgctcaattcaagacacaacagggaaataatcagaagccgcgtcttactttaggaccccagtctatgccacagggaggttcttcgtctgttgttcgtccgcagcgtcagttcttcaacaacaatgctggcaacaacatccgcaatcaagctccacgccctgttgcagtttcgacacagcaacaacctgccaagagggagcaaggcagcatgcccgtggtgtgtttcaactgtggagacccaggacattatgctgacaagtgtccgaagccccgacgcgtgaaggttgtccctgcccagagcaactctaccgcacctgcgtcaaaggcccgtgtcaatcatgttgcggctgcagaagctcaaggtgctccagatgtgattttgggtacgttccttgttaactcagtttctgcaacagtgcttttcgattctggtgctacacattcattcttatctatgagttttgcgggaaatcatgggatggaagtagaagatcttagacgtcctttgatggttagtaccccaagtaatcaagcactctctttgcaacgtagcccctctgtcagaatagaaattaaaggagtaccatttttggccaatcttatcctgttagaatccaaagaccttgatgtcatcctatggatggactggttagccagacataaaggtgtgatagactgtgctaacagaaaagtaactctcaccagcaatgatggtcgagttgtaactgttcatgcattgtcttctgagtctttaaggccaagtctaaaccaaataactttggaagagattcctatagtccgggagtatcctgatgtgttcccagatgatttacctggtatgccgcctaaaagggatatagagttcagaatagatttggtaccaggaacaactccgatccataagagaccttatagaatggcagccaatgagttggcagaagtcaagaggcaagtagatgatttgcttcagaaaggatacatcagaccgagttcatctccatggggagctccaattatttttgtggaaaagaaagaccatacccagaggatgtgtgtggactatcgtgcactaaatgatgtgactatcaagaataagtatccgctacccagaattgatgatttgtttgatcagcttaaaggtgccactgttttctccaagatagatcttcgatcagggtatcaccagttgagaattaaagaggaagatatacctaagacagcttttaccactaggtatgggttgtttgaatgtactgttatgtcttttggacttaccaatgcccccgctttcttcatgaacttgatgaataaggtgtttatggaatacctagacaagttcgtggtggtctttattgatgacattcttatctactcccgaaccaaagaagagcatgaagaacatcttcgccttgcactagagaagctacgagaacatcaactgtatgctaagtttagcaagtttgaattttggttgtctgaagtgaagttccttggtcacgtcatctcagccggaggagttgccgtcgatcctagtaatgtggaatccgtaaccaattggaaacaaccaaagacagtttcagagattcgcagtttcttaggcctcgcaggatattatcggaggtttatagagaatttttccaagattgctaagcccatgacacgattgcttcagaaagatgtgaagtacaagtggtcggaagaatgtgagcagagttttcaagagttgaagaatcgcttgatatcagctcctattttgattttgcctgatccaaagaagggtttccaagtgtattgcgatgcatccaaacttggggtaggttgtgttctgatgcaagatgggaaggtggttgcctatgcatctcgtcagttacgtccgcatgagaagaactaccctactcatgatcttgagttagctgcagtagttcatgcgttgaaaatttggcatcattatcttttcggtactcgtacagaagtatataccgatcacaagagtttaaagtatatctttactcagccggatctgaacatgagacaacggagatggttggaattaattaaggattatgacatgggaatacattatcacccgggaaaggctaatgttgtagcagacgctcttagcaggaaaggctattgcaatgctacggaaggacgacagttgccattggaattatgcaaggaatttgaaagattaaatttgggaattgtcagtagaggtttcgttgcagccttagaagcgaagcccactctaattgatcaagttagagaagcccaaattaatgatcctgatattcaagaaatcaagaagaatatgagaagaggaaaagctattggtttcttggaagatgagcaaggaactgtgtggttgggtgagagaatctgcgtccccgacaacaaagatttaaaagatgcaattctgaaagaagctcatgatactttatactccattcaccctggtagtactaaaatgtaccaggatctcaaggaaaggttttggtgggcaagtatgaagcatgaaatcgcagaatacgtagcagtatgtgatgtttgtcagcgcgtcaaggcagaacatcagaaacccgcagtcgacagacttaccaaagtggctcatttcatcccagtaaagacaacctattccggaagtcggttagcggaattgtatatggcaaggattgtgtgtttgcatggcgtccctaagaaaatagtgtctgatcgaggcagtcagtttacttcaaatttttggaagaagcttcaggaagagacagacgaacaaaccgaaagggtgaatcagattttggaagacatgttgagagcttgtgctttagacttcggtggaagttgggataagaatctaccctatgcagaattttcatacaacaacagttatcaagctagtcttcagatggctccttacgaagcactgtatggtcgaaagtgtcgcactccgcttttgtgggatcaaacgggagaacgtcaggttttcgggacggatatcctaagggaagcagaagaaaagccgtgcgccgccgccgttccagtcgtcgccgtcgctcgggaaggtcgtcatcgtggtcgccaagtcgtcgccgtcctcgtccgccccttcgccgtcgctgtagaccgccggagcaccgtcgccgccgtcgacccgatcttctccgccgcttcgacctcgacgccgtcgccgtccgttgatcttccgccgcttctttggtcaccgattccgacgtttccggagagtccgttttcgcaggagaagaatttgaagagttccaaggccagcaaggcaactcctggtttggaatggtatattcctggtttggagatagaactgtgcagccgggatggttgttcagaatggttggtcctatacaacaggatgccgcgctacaagcttgagtatttgtttggtgttgagggatttgtccaggatttgcgtacgatgtcctttgccataggatttgggactgcccctttttatgcccagattcctcatgatcgtcacgaagagaagtgccgagtcaaagtcaccttgaacagtaatagtgaagatatcccctcagtgatgttcgaagctggaggaagaaactacatccatgcatgtcaggaggtagcaaggatcgccataggagagttccgcgatcgttacagtgatcagttggccgacactgagtatcgctaccatcctcgtcaaccacagggaagtgaccgtggcagctaccttgagactgaaggaattgagaatgatgctaccacaaggcatttggttgagatgttgtgggctatggatgaaacccgtgcggagactgtgttagcagctcaagatcgggaagatcggaatcgtggtaagatttgcaagctagaagacaaggtggatcgtttagagaaggaactagccgcgttgaagggagaagcaccaccgcagaaggccaggattcgtcttaccgcaaggaagagagctctatttgtccctcgctaccaattggtgccaaagatggtgctcactcgcagcaacgggaatggccctaacaacaataacaacaacaatggagagaatcccccacttgcccaagtcctggctcaacaggcacagcttatgaacatgatgatgcagcaactccagaaccagcagaaccagggaaataaccatgcacctccccagaacaagttagcagaatttcttcgtgtgaggccgcctaccttctctagcaccactaatcctgttgaagcaggtgattggctgcatgccatagagaagaaattggatttgctccagtgcactgatcaggagaaggtctcatttgcatcacatcagctgcatggccctgcctctgaatggtgggatcacttccgccttaacaggactactgctgaacctatcacttggcttgaattcaccgctgctttccggaagacgcatataccatcgggagtggtgtctctcaagaagagggaattcaggtcgctcactcaggggtctcgctctgttacggagtatctgcactagttcaatcgtctggctcgttatgctccggaagatgtacgcactgatgaagagcgtcaggagaagttcttggaaggacttaatgatgagctttcttatccactcatgactggagattatcctgatttccagaagttagtagataaggctattcgccaggaggacaagtacaaccgcatggagcaaaagaaacgccggattgctcaattcaagacacaacaggggaataatcagaggccgcgtcttactttaggaccccagtccatgccacagggaggttcttcgtctgttgttcatccgcagcgtcagttcttcaacaacaatgctggcaacaacatccgcaatcaagctccacgccctgttgcagttttgacacagcaacaacctgccaagaaggagcaaggcagcaagcccgtagtgtgtttcaactgtggagaaccaggacattacgctgacaagtgtccgaagccccgacgcatgaaggttgtccctgcccagagcaactctactgtaccagcatcaaaggcccgtgtcaatcatgttgcggctgcagaagctcaagatgctccagatgtgattttgggtacgtttcttgttaacttagttcctgcaacagtgcttttcgattctggtgctacacattcattcttatctatgagttttgcgggaaatcatgggatggaagtagaagatcttagacgtcctttgatggttagtaccccaagtaatcaagcactctctatgcaacgtagcccctctgtcagaatagaaattcaaggagtaccatttctggccaatcttatcctgttagaatccaaagaccttgatgtcatcctagggatggactggttagccaggcataagggtgtgatagactgtgccaacagaaaagtaactctcaccagcaatgatggtcgagttgtaactgttcatgcattgtcttctgagtctttaaggtcaagactgaaccaaataactttggaagagattcctgtagtccgggagtatcctgatgtgttcctagatgatttacctggtattcctcctaaaagggatatagaattcagaatagatttggtaccaggaacaactccgatccataagagaccttatagaatggcagccaatgagttggcagaagttaagaggcaagtagacgatttgcttcagaaaggatacatcagaccgagttcatctccatggggagctccggttatttttgtggaaaagaaagatcatacccagaggatgtgtgtggactatcgtgcactaaatgatgtgactatcaagaataagtatctgctgcccagaattgatgatttgtttgatcagcttaaaggtgccaccgttttctccaagatagatcttcgatcagggtatcatcaattgagaatcaaagaggaagatatacctaagacagcttttaccactaggtatggattgttcgaatgtactgttatgtcttttggacttaccaatgcccccgctttcttcatgaacttgatgaataaggtgtttatggaatacctagacaagttcgtggtggtctttattgatgacattcttatctactcccgaaccaaagaagagcatgaagaacatcttcgccttgcactagagaagctacgagaacatcaactgtatgctaagtttagtaagtgtgaattttggttgtctgaagtgaagttccttggtcacgttatctcagcaggaggagttgccgtcgatcctagtaatgtggaatccgtaaccaactggaaacaaccaaagacagtttcagagattcgcagtttcctaggcctcgcaggatattatcagaggtttatagagaatttttccaagattgctaagcccatgacacgactgcttcagaaagatgtgaagtacaagtggtcagaagcatgtgagcagagttttcaagaattgaagaatcacttaatatcagctcctattttgattttacctgatccaaagaagggtttccaagtgtattgcgatgcatccaaacttgggttaggttgtgttctgatgcaagatgggaaggtggttgcctatgcatctcgtcagttacgtccgcatgaaaagaactaccctactcatgatcttgagttagctgcagtagttcatgcgttgaagatttggcgtcattatcttttcggcactcgtacagaggtgtataccgatcacaagagtttaaagtatatctttactcagccggatctgaacatgagacaaaggagatggttggaattaattaaggattatgacatgggaattcattaccacccgggaaaggctaatgttgtagcagacgctcttagcaggaaaggctattgcaatgctacggaaggacgacagttgccattggaattatacaaggaatttgaaagattaaatttgggaattgtcagtagaggtttcgttgcagccttagaagcgaagcccactctaattgatcaagttagagaagcccaaattaatgatcctgatattcaagaaatcaaaaagaatatgagaagaggaaaagctatcggtttcttggaggatgagcaaggaactgtatggttgggcgagagaatctgtgtccccgacaacaaagatttaaaagatgcaattctgaaagaagcccatgatactttatactccattcaccctggtagtactaagatgtaccaggatctcaaggaaagattttggtgggcaagtatgaagcgtgaaatcgcagaatacgtagcagtatgtgatgtttgtcagcgagtcaaggcagaacatcagaaactcgccggtttgttgcagcctttgaagattcctgaatggaaatgggaggaaatcggtatggatttcattactggtttacccagaacgtcatcaggccatgactctatttgggtgatagtcgacagacttaccaaagtggctcatttcattccggtaaagacaacatattctggaagtcgattggcggaattgtatatggccaggattgtgtgtttgcatggcgtccctaagaaaatagtgtctgatcgaggcagtcagtttacttcaaatttttggaagaagcttcaggaagagatgggttctaagctgaactttagtactgcttatcatccgcagacagacggacaaactgaaagggtaaatcaaattttggaagacatgttgagagcttgtgctttagatttcagtggaagttgggataagaatctaccttatgcagaattttcatacaacaacagttatcaagctagtgttcagatggctccttacaaagcactatatggtcggaaatgccgcactccgcttttgtgggatcaaacgggagaacgtcaggttttcgggacggatatcctgagggaagcagaagaaaaggtgaaaatcattcaagaaagattacgtgtggcccagtctcgtcataagagttatgccgacaatcgtcgtagggatctaagttttgacgaaggagattatgtgtaccttcgtgtcacgccttttcgaggagttcatcgttttcacaccaaaggaaaattggcaccgcgtttttgtgggaccttataagattatcagtagaagaggagaggttgcttatcagttggaattacctcaatctttggcaggagtccataatgtgttccatgtgtcacaattgaaaaagtgattaagggtacctaccgaagaagctaatcttgaacagatagaagtccaagaggatctgacctatgttgagaaaccaatccgtattttggaaatagatgagagaagaaccagaaatcgagttatccgtttttgcaaagttcaatggagtaatcactcggaagaagaatcaactggggaacgagaagatgaattgaagtcagctcatccgcatctgttcgccggttcttccgaatctcgaggacgagattctgtt

SEQ ID NO: 23264 - DNA, 2706 bp, Oryza sativa
  Clone ID: TF_OsC359_7815
gtcgtcctcccgtcgttcccggtcgtcgtcgtcgtcgtcctcccgtcgttccgggtcgtcgtggcgttcgtccctccgtaaagccgatcgcgttcgccgcccgtggttcatcaagcgagccgctccagccccgtcatcttcgtcctcgcctccgtgtcgccaagcgttgcgccggccgcgtctcgcccgtgtactggtgtcggtagtcgttcgcttgtgcgtgtagtgtccgtgttagtgtgcccgctcggtagccgcgtggtttccacgtgtgcagcccgtgtggtgtctagtggagtccatttgtcgaccgcttgcctcggttgacacacgggatccgcttccttcgacccgtggaacgtctctgtgtactcggttttctttttatgtattgttattgcttctttataggcttgtagctttgcttgtgtgcttcgcgtagcttctgtcgttccgaaggttctcgaagcgtggttcgcggtcgtcgccgaaggttcagaaggccgttctctctcccccctctattcaaaactcccaaaatggttttaggctgggctcgaggtgcagggttttgctagtagcacctcggccactataaggaccggttttcgggcctctgttgcaaagcactaccgtactaaccacatgtctaatgggtaaggcttaactcggtgctcagtctagtcctgaacaaaaggacacggatagagatggatgaagtcgttgcgacgatggatatctctgaggcaaatgaaggctacgcgagctgtggctcggtaatcgagatgtctaggcaaatgaaggctacacgggtcggtgcccgggctcaatcctggcctgcctgtcccgggataccggccgtaggcagggttggatcggtacttttgttcacggctaggatgggtaaagggttatgtcacgttttttatgatgggttccaattgcaatggaatgcagagtaaaggcgtgtcttgtgggttggcctgggttggcttgggacgagctgggacccaggtcgggttgccagttcggtccgaatcatcgtaggccttgggttaaggcagtactaggtggtcagctttgcgaagaagaagatgtcgtcaattgtctgccgaagctccgcaagactgttggatctgctagcgaagcgagggaagcagtgaagccagatgtgaagcaggagaaaaagtgtagctctgttaaggtcctatccttagtttctgatctgtctctcccctttgtttttcctctctccctctccaaaacctgcaacagatggcggataatgagaaaggcaataaggtcagaagtcaggaaatgggtacctcaagctcccgagtgaatgaagcaccagacaccaattgtgtggcagtggtccaacacttgattaaccagaacaaattgcttatagagatactacagcagcatcggatgccaattctgaacccgagtcagatgcaacctcaggcgcagttggaggcaatccaagcactcacaccacaagtcagcgcaccgccaacatcccagaaggcccctcatgccatgtcacatgttgactcaaaagaagcaagtatcattggttttatgtgtgatgaacaagggcactatgcaaggaactgtcctcagcagaaaagaaaagcaccaatgcgaaccgaagatgaagtccgtaagatgatcattaccagtacagaatggcctccaccaggaatgacaaaacgtcagagaagaaattccttccgaggtgcaccatagttgacagagcatcttttagctaatggaggtagagtgtctgatagtgaagattcagatcaagtctcctcagatgatgaagatgagaagtctccccaagggttcaaccagaataaaatggaacataaggcatgctctcattgtggagaaatcggtcatgttgccagctcatgtgccactacctgctttcattgtaaggaagaccatccacccggcgagtgccccatgagcaggatcacttgtttcttgtgtgaaggaactgatcatgtaccaaaagattgtcaactcagttttctgctgacgaagaagatggccaaccaacatgcccgttctaatggagagaagcatcaaggcaacaccaatcctcgccaagattacagtttcagcctaactccagtgccaggacagaggaatcaaaatgagaaaagaaaatactgagtccggaaagatatctgttgcttcaattgtcaagaaatgtgtcatttcactgacaagtgcccaaaaccgagaaacatagctaccagcacgtcagtccacgcaactccccacaatcagaagcttgctcctcagcgaattgtcatccatgcatcccgaagcattcctatagcccgcgttgcaacagctccaactccagtgattgcactaccacaaggtgtcaatgctcaatttcagccccagccaccagttgacaagacagaggccagtatttgcgttgtacctttggatgttccagcacagcagccaagaaatcaagtacaagatgaagaacccgagcgtaaaaaagttatagtctatttcaactgtagagaagaagggcattactcgagggactgtcccctaccaaggcaaaatcagcccccacattttcgccaatttacaggaagcagacataccaatcgccaagtggtcactggagcaaatgcagtacctgttaagcctagtgctagtcaaaagcaa

SEQ ID NO: 23265 - DNA, 2781 bp, Oryza sativa
  Clone ID: TF_OsC359_8038
atggacgaagtcgggggtcgatggacatctctaggacaaatgaaggctacacgagctgcggcccggtagtcgagatgtcatggcacagggctggtgtcctgctgctaggggctcaatcctgcctacctgtcccggaggttccggccgtaggtggggttgggtcggtactcttgtctatggctaggatgggttggaaactatgtcacgtcttccgtccgtataccgtggtggtattttgctcaataactaaaatgtcgaatggttagcctgggttggcttgggacgagctgggacccagggtcgggttgccagttcggtcttgatcatcgtaggccttgggttaaggcagtactagatggtcaggtcagtgaagaagaagacatcgtcagttgtttgccgaagctccggaagactgcaggatccgctagcgaagtggaggaagcagtgaagccagctgtgaagcaggacaaaagacttagatctgttaaggtcctatccttagtttctaatctgtctctcccctttgttttccctctcttcctctccaaacctttgcaacagatggctgacaatgagaaaggcaataaggtcagaagtcaggacattggtacctcgagctcccgagtgaatgaagcaccagacaccagttgtgtgacactggtccaacacctgattaaccagaaccgattgcttatagagatactacagcagcatcagacgccaattctgaacctgagtcagatacaacctcaagtgcagttggaggcagtccaagcactcacaccacaagtcagcatgccgccagcatcccgaaggacccatggtgacgtgccacatgttgactcaaaagaagcaagtatcatttgttttatgtgtgatgagcaagggcactatgcaagggagtgtcctcagcagaaaagaaaaacaccaatgcgaaccgaagatgaagtccgaatgacaaaacgtcagagaagaaataccttccgaggtgcaccacagttgacagagcatcttttagctaatggaggtagagtgtctgatagtgaagattcagatcaagtctcctcagatgatgaagatgagatggaacgtaaggcatgctctcgttgtggagaaatcggtcatgttgccagctcgtgtgccactacatgcgttcattgtgaggaagaccatccacccgacaggtgtccaacgagcaggatcacttgtttcttttgtgaaggaactgatcatgtaccaaaagattgtcaattcagtttgctgctgacgaagaagatggccaaccaacccgccagttccaacggagagaagcatcaaggcaacacaaatcctcgccaagattacagtttcagcctaactccagtgccaggacagaggaatcaaaatgagaaaagaaaatgccgagtccgggaagatatatgttgcttcaattgtcaaggaatgggtcatttcgccgacaagtacccaaaaccgagagacatagctgccagcacgtcagtccacgcaactccctgcaatcagaagcttgctcctcagcgaattgtcatccatgcatcccgaagcagtcctatagcccgcgttgcaacagctccaactccagcgagtgcattaccacaaggtgtcaatgctcaatttcagccccagccaccagttgacaagacagaggccagtatcggcattttacctttggatgttccagcacagcagccaagaaatcaagtacaagatgaagaacccaagccaatgggaatgatcacagtgcaactactcctagaggaatatgaagattttgagaaacttgtggacaaagccatacaactcgaaagtgagcataatcggatgaagaactgtaagagaaggattgtcagcatcccagtattcccatgtggtaaccaaagacagcgcacggagccacttcagatcaccggatcttctgttgcgcatcaagagtttccgccccaagaagatggacacaatgcagacaacaacattagcaatactaatgatgatgataccaccaacaaccatgcttcttgccccattagtgaccactcaaatcaagcgtgcaatgtcaacatcattcaccaaggtgtcgacgatagtatcaatgatggcacccaaaatgacaaccctagcaattgtgactctgagaaagactccaatggtgatagcaactatggtaccactgatgccaatgttagcaaggatttccaaccaccaattccaactccaagtcagaatgatcgtccccagacggatagctcagcaaagaagacgttgatttgctacaattgcaaaggaccagggcattactcgagggactgcctgcaaccaaggcaaagtcgatctccacattaccgccaatttacacgaagcagacatcccaatcgtattgtggtcactggagcaaacgccgtacccgtttcactgaaaggcagcaagccaaaggatctcatcgtccccagaagcgtccgcaatccacattaaagaataccacctgttagaggttgacgccaaagatatgaatgataagaagttctagaaccgaagccccatcctcaaccaccgcagcctagtctgggtcagttagaagttcaaccagggacaagtcgggtgaagagaagattccatctgcaacaggagatcgagccaagcgttccagagtggagaagtcctgttaggcaagttggttatagaagacggagcggaagaagtcagacaagaagagaagactgcccaacctatcttcatgctagcctgctcgaatctcggggaccagat

SEQ ID NO: 23266 - DNA, 4825 bp, Oryza sativa
  Clone ID: TF_OsC1458_2
atggcgctgcgcctcgctgccgtaccagagagcgccgccgccgacctgagcgccgccgccaataccctgccgtgcatctcctaccgcgactcgatccggagcgtcgccgccgtcgtctccggcggccgagggcctctcttccagtccgaagattccgcctccacctggtcgtcttcctcctacgcgtccgactgctccggccactcctccggcgtctccgccgccgcggccgctggcttcagggcactcacggcgcacgagctcagggaggtcgcgcgtcgcatggtcgccgacggctacgcccagcgcatggtccaagcgttcgacgacgcggcgacggtcgaggtcctcgagggggagatgttagccgattgtaggttagatgacgatattgccaaagattatgaggcgcgagcggctgtgcgggaagcgcgcgcggcgcgtgaggaagcagaggcgcggctgcaggtagccacgagggcggcacgtctcgtggcagcagaagctgaagcagcacgcaccgcggaggccgccaggcaggctgcagctgctgctgctactttgcgagctgaggaggaggaggagcgacgtgacctggagctgacagacgcggcccgcgtgcgacgcgacgcggaccgggatcgacacataggccgacgtgatcgcgacttcagcccccatcgcagaggatcagatctccaccgcggtgaggaggagcggcgcgatccatggcgcgatcctcgaatcaaccgcgctctggagacccagcgactccgggagcaggcagcggcgattgaggcacaactggacttcgaccgggagcagggtggacgagacgttggcgcacggagccctcgcaggcagcgcgcctccccttccccggaccggcgccgtggtcgccgtggacgctccggctctcctcccgttgtgcagatcgtcgtcaaggatgttggcggcgcatggcccatgctcaccaagactaactacgccgagtgggcgatggtgatgaaggtgaagttgcaggcgcgccacatgtgggacgcggttcgatacggcgacgtcgactacggggaagatcggcgggcgttggagcggttggcgcagctcggcgacaccaccatcgatgaggagagagccgtggagaagctcctttgcgtcgtccccgagaagtacacgcagctggctctgtcgatcgagacgctgctggacttcaccgagctcacgaacgaagaggtgacaggtcgcctcaaggccgtcgacaaccgcaagcagctacctccctcagagccgatcaccattggtggcaagcttttcttcaccaaggagaagtggctcgcccgccaacaagagcggaagaagggggaggccacaagctcttcggcttcgggatcgtcgagcagccgcaagcgtcgaccacgcaagtgggagaaggcgcgtagtggcgctcttggcggcgccgatggcgagcgcaagggcagccgcaacgacacctgccacaactgcgggaagaccggccactgggccaaggactgccggcaggcgaagcacggcggtcaagcacacgtcgctcaagcgcaggagggtgatgaggtggctctgtttttcgtacacggaagcatcgagccacacttcactcccacaccggacgctaccgcgcccctccacctcgacgagctgtgggcccacgtcttcctcagcaacggatcctgcgacgacaagatcgacgggtggtgcctcgacactggtgccactcaccacatgaccgggcgacgggaattcttctccaagcttgactccagtgttcaaggctccgtcaagtttgaggacgcctcagccgtggagatcaagggcgtcggctccatcctcttcaccaccaagaccggcgagcaccggctgctcaccggtgtctactacatccccgcgctgaggaactccatcatcagtttgggacaactggatgagaacggcttgctcgtggagatagaggacggggtcttgcgggtttgggatcgccatcgtcgccttctcgtcaaggtgaacaggggtgccaaccgcctctatgttctccatgtacaggtggcgcagcccgtgtgccttgcagcccgccgcgacgatgatgcatggcggtggcacgagcgctttgggcacctcaacttcgaggccttgaagcagctcagcaacaaggagatggtgcagggcatgccacgagtcgagcacgtggagcagttttgcgacacctgcgtcctcaccaagcagcggcgactcccctttccccgccaagcaagtttctgcgccaaggagaagttggagctcgtgcacggcgacctctgcggtcccgtgactccggccacacctggaggccggcgcttcttcctgctgctcgtcgacgacgtgtcctgctacatgtgggtggtcctgctcgactccaaggcagtggctgcagacgccatcaagcaccatcaagttgctgcggagaaggagtgcggccgcaagcttcgggtgctacacaccgacaacggtggcgagttcacgacggctgagttcgcagcgtactgcgccgacgagaggatccagcgccacttctccgcgccatacaccccgcagcagaacggcgttgtggagcgccgcaaccagacagtggtggccactgcccgcgccctcctcaagcaaagagggatgccggcaatctactggggggaggcggtgatgactgccgtccatctcctcaaccgctcgcccaccaaggcccttgatggcaagacgtcgtacgaggcctggcacgggcgcaagccggtggtgagccacctccgcgtctttggctgtctcgccttcgccaaggagctcaaccacgtcggcaagctcaacgaccggagctcgccgggagtcttcatcggctatgcggagggtgtcaaggcctaccgcatcctcgacccttcgacgcagcacgtccgcatttctcgggacgtcgtgttcgacgaagggcgaggttgggcttcgtacaaggcggtggacgacggctcgacttcgactctcagagacttcgtcgtcgactacgtccactttagggcagccgggggagctagcagctcatcttcaccgagctcgtccacctcggcacccggctcgccatcagctccggcgagtcctctaccacctacaccaccagcaactcctccatcaccagctacgccccgctctcctacaccggcgcccacaccaccggtggagttcgccactccgttgtccaacgacgaggatcgtgttgatgcgtaccacgacgacgagcctctgcgctaccgcaccatggacaacatcttcggtgatcagcccgtccctggactggagacgcgcgacttcgaggccgagttgcacctggcgcatgaggacggcgagccctgctccttcgcagaggcgaatggagatgtggcatggcgcactgcgatgcagcacgagatggacgcggtcgagcggaactggacgtgggtgttggcagatcttcctgccagccaccgcgccatcacccttaagtgggtctacaagctcaagaaggatgaggccggggcggtgatcaagcacaaggcacgtctagtggcgcgcggcttcgttcagcaggagggagtcgactttgacgacgccttcgcgcccgttgcgcgaatggagtctgttcgtctgctcctcgcgctggcagcccaggaaggatggcgtgtgcaccacatggatgtcaagtccgccttcctcaacggagacctgaaggaggaggtctacgtccaccagccgccgggattcgtcatccccggcaaggagaacaaggttctccgcctgcgcaaggccctctacggcttgcggcaggccctctacgccaagctggactccactctcaagcaaatggggttccagcagaactctcacgaagctgctgtctaccagcggggcaaggacggcaatgccctgttggtaggcgtctacgtcgacgacttggtgatcaccggcaccaaggaggctgaggtggaggcgtttaaggaggagatgaaggcgactttccagatgagcgatttgggccttctctctttctacctggggatcgaggtccaccaggacagctctggcatctcccttcgccaaaccgcctacgccaagtgcatcgtcgagttgggcgggctcaccggctgcaacccagcctacactcccatggaggaaaggttgaagctgagccgcgacagcacggctgagggaggtcgacgccacgcagtaccggcatattgtgggcagccttcgctacctcgtccacacgcggccagacttggcatttgctgttggctatgtcagccggttcatgcagcgaccgacgacagagcaccagcaggctgtcacgtcgagggcaccaccgactacggctttcactacccgaggtgtcccgtgcctgatcagctggcagtcggtcaagcaacaagtggtggccctgtctagttgcgaggcagagtacatcgctaccacaaccgcctcaactcaagctctctggttggctcggctgctgggtgatctcttgggcagaaacactgaagcagtggagctcaggatggacagcaagtccgctttggccttggcaaagaatcccgtcttccatgagcgcagcaagcacatccgcatcaagtatcatttcattcggagctgcttggaggaggggagcatcaaggccagctacattaacacccaggatcagctcgccgatcttctcaccaagtcccttgggcgggtcaagttccaggagtttcgcgccaggattggaatggttcaaattccccaaaaggcgccacacatgacttag

SEQ ID NO: 23267 - DNA, 1671 bp, Oryza sativa; identical to SEQ ID NO: 15037
  Clone ID: TF_OsC1528_1632

SEQ ID NO: 23268 - DNA, 5808 bp, Oryza sativa; identical to SEQ ID NO: 15020
  Clone ID: TF_OsC1528_1674

SEQ ID NO: 23269 - DNA, 3657 bp, Oryza sativa; identical to SEQ ID NO: 15031
  Clone ID: TF_OsC1528_1689

SEQ ID NO: 23270 - DNA, 4326 bp, Oryza sativa; identical to SEQ ID NO: 14952
  Clone ID: TF_OsC1528_1718

SEQ ID NO: 23271 - DNA, 4230 bp, Oryza sativa; identical to SEQ ID NO: 15016
  Clone ID: TF_OsC1528_1730

SEQ ID NO: 23272 - DNA, 3924 bp, Oryza sativa
  Clone ID: TF_OsC1528_1831
atggctggttttgccgatgcactgaggccggataaattaaccggtgtgcattttaagagatggcaaatcagggtcactctgtggctgacagctatgaaatgcttctgggtgagtactggcaaacctgaaggagttcttactgctgaacagcagaagcaattcgaggaagccactactctctttgtgggatgcattcttagcgttcttggcgatcgtctggtcgaggtgtatatgcatatgaccgacgctaaggagttgtgggatgcactgaatactaaattcggtgctactgatgctagcaatgatctgtatattatggagcagtttcatgactacaagatggctgacaaccgttctgtagtcgaacaggctcatgagatacaaaccatggctagggaactcgaactccttaagtgtgtcttacccgacaaatttgtggccgggtgcattattgcaaaactacctccatcttggagaagtttcggtactgcactcaaacacaagagacaggaatactccgttgaggggttgatagcgtctcttgatgttgaggagaaagctcgggaaaaagatgccgcgtctaagggcgatggtgggcagtccagtgccaatgttgtgcacaaggcccagaacaagagcaaggggaaatacaaagctcagcagaccaccaacttcaagaagcagaagaagaacaacaacaatcctaatcagaatgagaggacttgctttgtgtgtggccaagttggtcatctggctaggaagtgtccacagcgcaaggggatgaaggcacctgcagggcagacttctaagtctgctaatgtgaccattggcaacactggacatggaagcgggtatggtaatttacctactgttttttcagttaatcaatctactaattggtgggttgatactggggccaatgtacatgtttgtgctgacatttcattgttttcttcttatcaggtcgcacggggttccaccgtcctaatagggaatgggtcacatgcttctgttcatggtgttggcacggtagatctgaagtttacttcgggaaagatcgtgcagctgaagaacatgcagcatgtcccttctatcgacaggaatcttgttagtggctcccgtctgactagagacggatttaagttggtttttgagtctaataaagtagtcgtgtctaaacatgtatattttattggtaaaggttatgagtgcggaggcctgttccgtttttccctttctgatttctgcaataagtctgtgaaccatatttgtggcagtgtggatgatgaggctaatgtttggcattcacgtttatgtcatattaattttggcttgatgtctcggctttccagcatgtgtttaattcctaagttttccattgtcaaaggttctaagtgccatagttgtgtgcaatcgaagcaacctcgcaagcctcacaaggctgccgaggagagaaacttggcaccactagaactcctacattcagatctttgtgaaatgaatggggtgttgacgaagggtggaaaacgatatttcatgacattgattgatgatgctactagattttgctacgtgtacttgttgaaaacgaaagacgaggctctagactattttaaaatttataaggcagaagttgaaaatcaacttgacagaaagataaaaaggcttagatctgatcgtggtggagagtttttctcgaacgagtttgacttattctgtgaggaacatggcatcatacatgagaggacgcctccctattctcccgagtctaatgggattgctgaaaggaagaaccgcacactgactgacttggtgaatgccatgttggacaccgcgggactgcctaaggcatggtggggggaggcattgttgacctcaaatcatgtgttaaacatagttcctaacagaaataaggacaaaacaccatatgagatatggattggtaaaaaaccaccactttcttatttgcgcacatgggggtgcttggcgaaagtcaatgtaccaataacgaagaagcgcaaacttggacctaagactgtggactgtgtttttctgggatatgctcatcatagcattgcctatagatttttaatagttaaatccgaggtaccggacatgcatgttggtacaattatggagtctcgtgattctatcttctttgagagctttttcccaatgaaggatacacatagtggttcgaaccaaccctctgaaataattcccagtccaatcacaccaccagaacaaactgaacatacacatgaacttgtctctgaggaggatgtcagtgaagctcctcgaaggagtaagagacaaaggacggctaagtcttttgatgatgatttcactgtgtaccttgtggatgacactcctaagtcaatttcagaagcatatgcatctcctgatgcagactactggaaggaggctgtccgtagtgaaatggattccattatcgctaacggaacttgggaggtgacagagcgaccctatgggtgtaaacctgtggggtgcaagtgggtgttcaagaagaagcttaggcctgacggtactattgaaaagtacaaggctcggcttgttgctaagggctatactcagaaagaaggcgaatatttctttgacacttactcacctgttgctagattgaccacaattcgtgtgctactttccctagcagcctcacatggtcttctcgttcatcaaatggacgttaagacagcttttcttaatggagagctggatgaggagatctatatggatcaacctgatgggtttgtagttgaaggtcaagaaggcaaagtgtgcaaattgttgaagtctttgtatggtctgaaacaagctcctaagcaatggcatgagaaatttgacaaaacattgacatctgcaggctttgcagtcaatgaggcagataaatgtgtgtactatcgccatggtgggggtgagggagttattttgtgcttgtatgttgacgacatactgatatttgggacaaaccttgaggtgataaatgaggttaaatcattcttgtctcaaaattttgatatgaaggatttgggagtagctgatgttatcttaaacattaagctaattagaggtgagaatgggattacactcttgcagtcccattatgtggagaagatcttgaatcgttttggctacattgatagtaagccttctccaacaccttatgatcctagcttgttgcttcgcaagaacaagagaattgctaggaatcaactggaatactcccaaatcattggctcgttgatgtacctggctagtgcaactaggcctgatatctcctttgctgtgagcaagttgagccgatttacctctaatccgggagatgatcactggcgtgcgcttgagcgagtaatgcgctatctgaaaggtactgtggaattggggcttcactatactgggtatcctgcggtactggagggttatagtgattctaactggatctctgatgtggatgagatcaaagccactagtggatatgtcttcacactaggtggtggtgctgtttcgtggaggtcttccaaacagaccattttgacgaggtcaaccatggaagcagagctgacggcattggatactgctactgttgaggcagaatggatgcgtgatctattaatggatctgcctattgttgaaaaaccaacatgtgaaaagacgattgaagtctgtcaggaaattgagaaacttcggagttataacgttggattacatccaaacagctaaaaacctggcagatcccttcacgaagggactatcacgaaatgtgatagacaatgcatcgaaggagatgggtttgagacccatagcattcttgaaagaactcacctttgtgagcttgactgttggtcgcagtctatggagattttgggtgaatcttctaggaagcttactaaagacctaggagta

SEQ ID NO: 23273 - DNA, 4486 bp, Oryza sativa
  Clone ID: TF_OsC1528_1835
tcagccctcctcttcttcctcctctccccatctccctctctcttcaactctctcccctctcctctctcgcgacgcgcgcgacggcagaggctcggctccggcggctatggacggaagaggtagggggcggcgggaggtggacctagctgcggcgaccggcggagaggaactgggcgtcagcagcggaagcggagtctcgaaggctggcccccaggcgatgcggaatcgacagcgggagctgcgggaagacggcagccgctgtggccgcccgcgcatggaggagaggtgggagccagagagcgcgagctcctcctcttccgcgacgccaccggcctcaatgctcgatctcaccctcctcgcggcgttagagctccgtctaatattcttgtcgagatccggccagagtagcaccaagcccacgaggccaagctggccatcgtcccgccacagctcgatgagacgatggtgctcctcgattggtgagctcgagccggcggccagatgcagagcggaagaggacgcagagcacgtgctacgacaagtccgcccggcggccggctgtgtccggtgttctgtgttcatgtgcgctcctccatgggggaagccgccccgatctaatgatgcgttcatgctagttttcatctgtaatgtcatgatttatttatggaataaattaaatccttatatgcccataatctcaacaatccaaaaaccttattataggcactgtgattttactatggctggttttgccgatgcactgaggccggataaattcaccggtgtgcattttaagagatggcagatcagggtcactctgtggctgacagctatgaaatgcttctgggtgagtactggcaaacctgaaggagttcttactgctgaacagcagaagcaattcgaggaagccactactctctttgtgggatgcattcttagcgttcttggtgatcgtctggtcgaggtgtatatgcatatgaccgacgctaaggagttgtgggatgcactgaatactaaattcggtgctactgatgctagcaatgatctgtatatcatggagcagtttcatgactacaaaatggctgacaaccgttctgtagtcgaacaggctcatgagatacaaaccatggctaaggaactcgaactccttaagtgtgtcttacccaacaaatttgtggccgggtgcattattgcaaaacttcctccatcttggaggagtttcggtactgcactcaaacacaagagacaggaatactccgttgaggggttgattgcgtctcttgatgttgaggagaaagctcgggaaaaagatgccgcgtctaagggcgatggtgggcagtccagtgccaatgttgtgcacaaggcccagaacaagagcaaggggaaatacaaagctcagcagaccaccaacttcaagaagcagaagaagaacaacaacaatcctaatcaggatgagaggacttgctttgtgtgtggccaagttggtcatctggctaggaagtgtccacaacgcaaggggatgaaggcacctgcagggcagacttctaagtctgctaatgtgaccattggcaacactggagatggaagcgggtatggtaatttacctactgttttttcagttaatcaatctactaattggtgggttgatactggggccaatgtcgcacggggttccaccgtcctaatggggaatgggtcacatgcttctgttcatggtgttggcacggtagatctgaagtttacttcgggaaagatcgtgcagctgaagaacgtgcagcatgtcccttctatcgacaggaatcttgttagtggctcccgtctgactagagacggatttaagttggtttttgagtctaataaagtagtcgtgtctaaacatggatattttattggtaaaggttatgagtgcggaggcctgttccgcttttccctttctgatttctgcaataagtctgtgaaccatatttgtggcagtgtggatgatgaggctaatgtttggcattcacgtttatgtcatattaattttggcttgatgtctcggctttccagcatgtgtttaattcctaagttttccattgtcaaaggttctaagtgccatagttgtgtgcaatcgaagcaacctcgcaagcctcacaaggctgccgaggagagaaacttggcaccactagaactcctacattcagatctttgtgaaatgaatggggtgttgacgaagggtggaaaacgatatttcatgacattgattgatgatgctactagattttgctatgtgtacttgttgaaaacgaaagacgaggctctagactattttaaaatttataaggcagaagttgaaaatcaacttgacagaaagataaaaaggcttaggtctgatcgtggtggagagtttttctcgaacgagtttgacttattctgtgaggaacatggcatcatacatgagaggacgcctccctattctcccgagtctaatgggattgctgaaaggaagaaccgcacactgactgacttggtgaatgccatgttggacaccgcgggactgcctaaggcatggtggggggaggcattgttgacctcaaatcatgtgttaaacagagttcctaacagaaataaggacaaaacaccatatgagatatggattggtagaaaaccatcactttcttatttgcgcacatgggggtgcttggcgaaagtcaatgtaccaataacgaagaagcgcaaacttggacctaagactgtggactgtgtttttctgggatatgctcatcatagcattgcctatagatttttaatagttaaatccgaggatgtcagtgaagctcctcgaaggagtaagagacaaaggacggctaagtcttttggtgatgacttcactgtgtacctcgtggatgacactcctaagtcaatttcagaagcatatgcatctcctgatgcagactactggaaggaggctgtccgtagtgaaatggattccattatcgctaacgggacttgggaggtgacagagcgaccctatgggtgtaaacctgtggggtgcaagtgggtgttcaagaagaagcttaggcctgacggtactattgaaaagtacaaggctcggcttgttgctaagggctatactcagaaagaagacgaagatttctttgacacttactcacctgttgctagattgaccacaattcgtgtgctactttccctagcagcctcacatggtcttctcgttcatcaaatggacgttaagacagtttttcttaatggagagctggatgaggagatctatatggatcaacctgatgggtttgtagttgaaggtcaagaaggcaaagtgtgcaaattgttgaagtctttgtatggtctgaaacaagctcctaagcaatggcatgagaaatttgacaaaacattgacatctgcaggctttgcagtcaatgaggcagataaatgtgtgtactatcgccatggtgggggtgagggagttattttgtgcttgtatgttgacgacatactgatatttgggacaaaccttgaggtgataaatgaggttaaatcattcttgtctcaaaattttgatatgaaagatttgggagtagctgatgttatcttaaacattaagctaattagaggtgagaatgggattactctcttgcagtcccattatgtggagaagatcttgaatcgctttggctacattgatagtaagccttctccaacaccttatgatcctagcttgttgcttcgcaagaacaagagaattgctaggaatcaactggaatactcccaaatcattggctcgttgatgtacctggctagtgcaactaggcctgatatctcctttgctgtgagcaagttgagccgatttacttctaatccgggagatgatcactggcgtgcgcttgagcgagtaatgcgctatctgaaaggtactgtggaattgggacttcactatactgggtatcctgcggtactggagggttatagtgattctaactggatctctgatgtggatgagatcaaagccactagtggatatgttttcacactgggtggtggtgctgtttcatggaggtcttgcaaacagacaattttgacgaggtcaaccatggaagcagagctaacggcactggatactgctactgttgaggcagaatggctgcgtgatctattaatggatctgcctgttgttgaaaaaccggtgccggctatccttatgaactgtgacaatcaaacgacatgtgaaaagacgattgaagtctgtcaggaaattaagaaactccggagttataacgttggattacatccaaacagcgagaaacctggcagatcccttcacgaagggactatcacgaaatgtgatagacaatgcatcgaaggagatgggtttgagacccatagcattcttgaaggaactcacctttgtgagcttgactgttggtcgcagtctatgaagattttgggtgaatcttctaggaagcttactaaagacctaggagtatga

SEQ ID NO: 23274 - DNA, 5433 bp, Oryza sativa; identical to SEQ ID NO: 14986
  Clone ID: TF_OsC1528_1869

SEQ ID NO: 23275 - DNA, 4662 bp, Oryza sativa
  Clone ID: TF_OsC1528_2006
atctaatctcctctctctcaactaagcctgcggcacggggcaacctcgccggagaagacgacggaccgaggctacgagctacgtagccgagggccggctacccgagggcctgacgcccttgacaacctggtatcacgttccagacgatcctcgccgcgccgcgccgtctccccaccacccgccacatcctcgccaccaccagccgccgcgccaccatcctcggactcgtcctccggcgcgtcctgcccacccggcatgggtgaccccaatgacctcaagacctccgtggaggctctcaccaccgccatgaaggagatgcaggcctcgatcgccgccaacgccaaggccattgccgccctctcctccggccgcacctcatcctcgggcgccacgacagactccggcgaaccccgcaccgtccggccgccgcgatttcagaaaatggatttcccgcgctatgatgggaagtccgatccgctcaccttcctcaattggtgtgagtcgtacttccaccaacaacggatcatggacgaagagaaggtttggatggcgtcctacaaccttgaagatggtgcacagctatggtacatgcaagtccaggcggatgagggtaaaccgtcgtggcgtcgcttccgggaactcctcgtcctacggtacgggccgccactccgttcggctcccctcttcgagttagccgactgccgccgcactaccaccgtggaggactaccaggaccacttccaagcgctcctgccccgcgccggccgcctgacgaaggcacaacgggttcagctcttcaccggcggtctgcttcctccgctcagtctcaaggtccagatgcagaatccgcagtccctcgtcaccgccatgagtttggctcggcagttcgagctgatggagcagtgcactgccaccctggccaaagcccctggccacgggatactgccgacgctgggtccgcgccaggccccgccccagccgccggcgcctagggccgcatcgccccctgtcctcatcgacggtcgcccggtgaagcggctctctcaggcggagcaggacgagcgtcgccgcctcgggctatgctttaactactactccatcccgctcgccggcgtgcaccagcgatcaggagagcaggtctccggaacctctgcctttgacgtcctgcaccgggagaaggcggcaataaggcactgtgattttactatggctggttttgctgatgcactgaggccggataaattcaccggtgtgcattttaagagatggcagatcagggtcactctgtggctgacagctatgaaatgcttctgggtgagtactggcaaacctgaaggaattcttactgctgaacagcagaagcaattcgaggaagccactactctctttgtgggatgcattcttagcgttcttggcgatcgtctggtcgaggtgtatatgcatatgaccgacgctaaggagttgtgggatgcactgaatactaaattcggtgctactgatgctagcaatgatctgtatatcatggagcagtttcatgactacaaaatggctgacaaccgttctgtagtcgaacaggctcaagagatacaaaccatggctaaggaactcgaactccttaagtgtgtcttacccgacaaatttgtggccgggtgcattattgcaaaactacctccatcttggaggagtttcggtactgcactcaaacacaagagacaggaatactccgttgaggggttgattgcgtctcttgatgttgaggagaaagctcgggaaaaagatgccgcgtctaagggcgatggtgggcagtccagtgccaatgttgtgcacaaggcccagaacaagagcaaggggaaatacaaagctcagcagaccaccaacttcaagaagcagaagaagaacaacaacaatcctaatcaggatgagaggacttgctttgtgtgtggccaagttggtcatctggctaggaagtgtccacaacgcaaggggatgaaggcacctgcagggcagacttctaagtctgctaatgtgaccattggcaacactggagatggaagcgggtatggtaatttacctactgtcgcacggggttccaccgtcctaatggggaatgggtcacatgcttctgttcatggtgttggcacggtagatctgaagtttacttcgggaaagatcgtgcagctgaagaacgtgcagcatgtcccttctatcgacaggaatcttgttagtggctcccgtctgactagagacggatttaagttggtttttgagtctaataaagtagtcgtgtctaaacatggatattttattggtaaaggttatgagtgcggaggcctgttccgcttttccctttctgatttctgcaataacatgtgtttaattcctaagttttccattgtcaaaggttctaagtgccatagttgtgtgcaatcgaagcaacctcgcaagcctcacaaggctgccgaggagagaaacttggcaccactagaactcctacattcagatctttgtgaaatgaatggggtgttgacgaaggaagttgaaaatcaacttgacagaaagataaaaaggcttaggtctgatcgtggtggagagtttttctcgaacgagtttgacttattctgtgaggaacatggcatcatacatgagaggacacctccctattctcccgagtctaatgggattgctgaaaggaagaaccgcacactgactgacttggtgaatgccatgttggacaccgcgggactgcctaaggcatgtgaagctcctcgaaggagtaagagacaaaggacggctaagtcttttggtgatgatttcactgtgtacctcgtggatgacactcctaagtcaatttcagaagcatatgcatctcctgatgcagactactggaaggaggctgtccatagtgaaatggattccattatcgctaacgggacttgggaggtgacagagcgaccctatgggtgtaaacctgtggggtgcaagtgggtgttcaagaagaagcttaggcctgacgcctcacatggtcttctcgttcatcaaatggacgttaagacagcttttcttaatggagagctggatgaggagatctatatggatcaacctgatgggtttgtagttgaagtcaatgaggcagataaatgtgtgtactatcgccatggtgggggtgagggagttattttgtgcttgtatgttgacgacatactgatatttgggacaaaccttgaggtgataaatgagtcccattatgtggagaagatcttgaatcgctttggctatattgatagtaagccttctccaacaccttatgatcctagcttgttgcttcgcaagaacaagagaattgctaggaatcaactggaatactcccaaatcattggctcgttgatgtacctggctagtgcaactaggcctgatatctcctttgctgtgagcaagttgagccgatttacttctaatccgggagatgatcactggcgtgcgcttgagcgagtaatgcgctatctgaaaggtactgtggaattgtggcttcactatactgggtatcctgcggtactggagggttatagtgattctaactggatctctgatgtggatgagatcaaagccactagtggatatgttttcacactgggtggtggtgctgtttcatggagcaaagatgttgtcctgcagagcattcttgaaggaactcacctttgtgagcttgactgttggtcgcagtctatgaagattttggactactccatcccgctcgccggcgtgcaccagcgatcgggagagcaggtctccggaacctctgcctttgacgtcctgcaccgggagaaggcggcaataagccgtggccataacaaaatctgcaagcacttgttcctcttggactgcgctatggatgacgacgacgacaccgacgcggctgaggaaccgcaggacttggagtccccggtgttctccctccacgcgatcgccggcgtaccggtcgccgacaccatgcaggtacaggtgaccgtcggcgccaccaccctcaccgctctcctcgacagcggctccacccacagcttcattgccgaggaggcagcgtgccgcacgggtctgccggtccagccacgcccacgcatgacggcgactgtggccaatggcgagaaggtcgcatgtcctggcgtcatccgacaggccgtgctctccatcgacggctcgctcttcaccgtcgatctctttgtcattccacttgcaggttacgacatggtgctcggcacccagtggatggcgtctctggggccgattgtttgggacttcacggagcggacgatgtccttccagtaccacggccgcaccatctgctgggcaggcgtgccgtcgtctcctgcaccacgcatccgagtcacaacagcggccagcgagtcgctactcgatgagctcctagccgacttcggcgacgtcttcgccgagcccaaggggctgcccctgcagcatgctcgagatcacaccatcgtcctcaagccggacgcgccccctgtcgctgttcgtccgtaccggtacccggcggcccataaggatgaactggaacggcagtgcgccgctatgatcgagcagggcatcgtccgccgtagcgactcggcgttctcttcaccagtccttctcattaagaaggctgacgggtcgtga

SEQ ID NO: 23276 - DNA, 4299 bp, Oryza sativa; identical to SEQ ID NO: 15028
  Clone ID: TF_OsC1528_2011

SEQ ID NO: 23277 - DNA, 4071 bp, Oryza sativa
  Clone ID: TF_OsC1528_2060
atggctggttttgccgatgcactgaggccggataaattcaccggtgtgcattttaagagatggcagatcagggtcactctgtggctgacagctatgaaatgcttctgggtgagtactggcaaacctgaaggagttcttactgctgaacagcagaagcaattcgaggaagccactactctctttgtgggatgcattcttagcgttcttggcgatcgtctggtcgaggtgtatatgcatatgaccgacgctaaggagttgtgggatgcactgaatactaaattcggtgctactgatgctagcaatgatctgtatatcatggagcagtttcatgactacaagatggctgacaaccgttctgtagtcgaacaggctcatgagatacaaaccatggctaaggaactcgaactccttaagtgtgtcttacccgacaaatttgtggctgggtgcattattgcgaaactacctccatcttggagaagtttcggtactgcactcaaacacaagagacaggaatactccgttgaggggttgatagcgtctcttgatgttgaggagaaagctcgggaaaaagatgccgcgtctaagggcgatggtgggcagtccagcgccaatgttgtgcacaaggcccagaacaagagcaaggggaaatacaaagctcagcagaccaccaacttcaagaagcagaagaagaacaacaacaatcctaatcaggatgagaggacttgctttgtgtgtggccaagttggtcatctggctaggaagtgtccacagcgcaaggggatgaaggcacctgcagggcagacttctaagtctgctaatgtgaccattggcaacactggagatggaagcgggtatggtaatttacctactgttttttcagttaatcaatctactaattggtgggttgatactggggccaatgtacatgtttgtgctgacatctcattgttttcttcttatcaggtcgcacggggttccaccgtcctaatggggaatgggtcacatgcttctgttcatggtgttggcacggtagatctgaagtttacttcgggaaagatcgtgcagctgaagaacgtgcagcatgtcccttctatcgacaggaatcttgttagtggctcccgtctgactagagacggatttaagttggtttttgagtctaataaagtagtcgtgtctaaacatggatattttattggtaaaggttatgagtgcggaggcctgttccgcttttccctttctgatttctgcaataagtctgtgaaccatatttgtggcagtgtggatgatgaggctaatgtttggcattcacgtttatgtcatattaattttggcttgatgtctcggctttccagcatgtgtttaattcctaagttttccattgtcaaaggttctaagtgccatagttgtgtgcaatcgaagcaacctcgcaagcctcacaaggctgccgaggagagaaacttggcaccactagaactcctacattcagatctttgtgaaatgaatggggtgttgacgaagggtggaaaacgatatttcatgacattcattgatgatgctactagattttgctatgtgtacttgttgaaaacgaaagacgaggctctagactattttaaaatttataaggcagaagttgaaaatcaacttgacagaaagataaaaaggcttaggtctgatcgtggtggagagtttttctcgaacgagtttgacttattctgtgaggaacatggcatcatacatgagaggacgcctccctattctcccgagtctaatgggattgctgaaaggaagaaccgcacactgactgacttggtgaatgccatgttagacaccgcgggactgcctaaggcatggtggggggaggcattgttgacctcaaatcatgtgttaaacagagttcctaacagaaataaggacaaaacaccatatgagatatggattggtagaaaaccatcactttcttatttgcgcacatgggggtgcttggcgaaagtcaatgtaccaataacgaagaagcgcaaacttggacctaagactgtggactgtgtctttctgggatatgctcatcatagcattgcctatagatttttaatagttaaatccgaggtactggacatgcatgttggtacaattatggagtctcgtgatgctaccttctttgagagctttttcccaatgaaggatacacatagtggttcgaaccaaccctctgaaataattcccagttcaatcacaccaccagaacaaactgaacatacacatgaacttgtctctgaggaggatgtcagtgaagctcctcgaaggagtaagagacaaaggacggctaagtcttttggtgatgatttcactgtgtacctcgtggatgacactcctaagtcaatttcagaagcatatgcatctcctgatgcagactactggaaggaggctgtccgtagtgaaatggattccattatcgctaacgggacttgggaggtgacagagcgaccctatgggtgtaaacctgtggggtgcaagtgggtgttcaagaagaagcttaggcctgacggtactattgaaaagtacaaggctcggcttgttgctaagggctatactcagaaagaaggcgaagatttctttgacacttactcacctgttgctagattgaccacaattcgtgtgctactttccctagcagcctcacatggtcttctcgttcatcaaatggacgttaagacagcttttcttaatggagagctggatgaggagatctatatggatcaacctgatgggtttgtagttgaaggtcaagaaggcaaagtgtgcaaattgttgaagtctttgtatggtctgaaacaagctcctaagcaatggcatgagaaatttgacaaaacattgacatctgcaggctttgcagtcaatgaggcagataaatgtgtgtactatcgccatggtgggggtgagggagttattttgtgcttgtatgttgacgacatactgatatttgggacaaaccttgaggtgataaatgaggttaaatcattcttgtctcaaaattttgatatgaaggatttgggagtagctgatgttatcttaaacattaagctaattagaggtgagaatgggattacactcttgcagtcccattatgtggagaagatcttgaatcgctttggctacattgatagtaagccttctccaacaccttatgatcctagcttgttgcttcgcaagaacaagagaattgctaggaatcaactggaatactcccaaatcattggctcgttgatgtacctggctagtgcaactaggcctgatatctcctttgctgtgagcaagttgagccgatttacctctaatccgggagatgatcactggcgtgcgcttgagcgagtaatgcgctatctgaaaggtactgtggaattggggcttcactatactgggtatcctgcggtactggagggttatagtgattctaactggatctctgatgtggatgagatcaaagccactagtggatatgttttcacactgggtggtggtgctgtttcatggaggtcttgcaaacagaccattttgacgaggtcaaccatggaagcagagctaacggcactggatactgctactgttgaggcagaatggctgcgtgatctattaatggatctgcctgttgttgaaaaaccggtgccggctatccttatgaactgtgacaatcaaacgacatgtgaaaagacgattgaagtctgtcaggaaattaagaaactccggagttataacgttggattacatccaaacagcgagaaacctggcagatcccttcacgaagggactatcacgaaatgtgatagacaatgcatcgaaggagatgggtttgagacccatattcaaaatggatactatagcattagtttggtggaaacaacaatagaaccaaacaaggttggttatgatctttgtgttggaatcacgagcctgggttacacgcagaaagacatgtattctcaaaaggttacaacatgtgttgtttttacttttggctccaccacttctcctatagcaaaaattccaccaccatttgtggaatcaaggcaatga

SEQ ID NO: 23278 - DNA, 3846 bp, Oryza sativa
  Clone ID: TF_OsC1528_2066
atggctggttttgccgatgcactgaggccggataaattcaccggtgtgcattttaagagatggcagatcagggtcactctgtggctgacagctatgaaatgcttctgggtgagtactggcaaacctgaaggagttcttactgctgaacagcagaagcaattcgaggaagccactactctctttgtgggatgcattcttagcgttcttggcgatcgtctggtcgaggtgtatatgcatatgaccgacgctaaggagttgtgggatgcactgaatactaaattcggtgctactgatgctagcaatgatctgtatatcatggagcagtttcatgactacaaaatggctgacaaccgttctgtagtcgaacaggctcatgagatacaaaccatggctaaggaactcgaactccttaagtgtgtcttacccgacaaatttgtggccgggtgcattattgcaaaactacctccatcttggaggagtttcggtactgcactcaaacacaagagacaggaatactccgttgaggggttgattgcgtctcttgatgttgaggagaaagctcgggaaaaagatgccgcgtctaagggcgatggtgggcagtctagtgccaatattgtgcacaaggcccagaacaagagcaaggggaaatacaaagctcagcagaccaccaacttcaagaagcagaagaagaacaacaacaatcctaatcaggatgagaggacttgctttgtgtgtggccaagttggtcatctggctaggaagtgtccacagcgcaaggggatgaaggcacctgcagggcagacttctaagtctgctaatgtgaccattggcaacactggagatggaagcgggtatggtaatttacctactgttttttcagttaatcaatctactaattggtgggttgatactggggccaatgtacatgtttgtgctgacatctcattgttttcttcttatcaggtcgcacggggttccaccgtcctaatggggaatgggtcacatgcttctgttcatggtgttggcacggtagatctgaagtttacttcgggaaagatcgtgcagctgaagaacgtgcagcatgtcccttctatcaacaggaatcttgttagtggctcccgtctgactagagacggatttaagttggtttttgagtctaataaagtagtcgtgtctaaacatggatattttattggtaaaggttatgagtgcggaggcctgttccgcttttccctttctgatttctgcaataagtctgtgaaccatatttgtggcagtgtggatgatgaggctaatgtttggcattcacgtttatgtcatattaattttggcttgatgtctcggctttccagcatgtgtttaattcctaagttttccattgtcaaaggttctaagtgccatagttgtgtgcaatcgaagcaacctcgcaagcctcacaaggctgccgaggagagaaacttggcaccactagaactcctacattcagatctttgtgaaatgaatggggtgttgacgaagggtggaaaacgatatttcatgacattgattgatgatgctactagattttgctatgtgtacttgttgaaaacgaaagacgaggctctagactattttaaaatttataaggcagaagttgaaaatcaacttgacagaaagataaaaaggcttaggtctgatcgtggtggagagtttttctcgaacgagtttgacttattctgtgaggaacatggcatcatacatgagaggacgcctccctattctcccgagtctaatgggattgctgaaaggaagaaccgcacactgactgacttggtgaatgccatgttggacaccgcgggactgcctaaggcatggtggggggaggcattgttgacctcaaatcatgtgttaaacagagttcctaacagaaataaggacaaaacaccatatgagatatggattggtagaaaaccatcactttcttatttgcgcacatgggggtgcttggcgaaagtcaatgtaccaataacgaagaagcgcaaacttggacctaagactgtagactgtgtttttctgggatatgctcatcatagcattgcctatagatttttaatagttaaatccgaggtaccggacatgcatgttggtacaattatggagtctcgtgatgctaccttctttgagagctttttcccaatgaaggatacacatagtggttcgaaccaaccctctgaaataattcccagttcaatcacaccaccagaacaaactgaacatacacatgaacttgtctctgaggaggatgtcagtgaagctcctcgaaggagtaagagacaaaggacggctaagtcttttggtgatgatttcactgtgtacctcgtggatgacactcctaagtcaatttcagaagcatatgcatctcctgatgcagactactggaaggaggctgtccgtagtgaaatggattccattatcgctaacgggacttgggaggtgacagagcaaccctatgggtgtaaacctgtggggtgcaagtgggtgttcaagaagaagcttaggcctgacggtactattgaaaagtacaaggctcggcttgttgctaagggctatactcagaaagaaggcgaagatttctttgacacttactcacctgttgctagattgaccacaattcgtgtgctactttccctagcagcctcacatggtcttctcgttcatcaaatggacgttaagacagcttttcttaatggagagctggatgaggagatctatatggatcaacctgatggctttgcagtcaatgaggcagataaatgtatgtactatcgccatggtgggggtgagggagttattttgtgcttgtatgttgacgacatactgatatttgggacaaaccttgaggtgataaatgaggttaaatcattcttgtctcaaaattttgatatgaaagatttgggagtagctgatgttatcttaaacattaagctaattagaggtgagaatgggattacactcttgcagtcccattatgtggagaagatcttgaatcgctttggctacattgatagtaagccttctccaacaccttatgatcctagcttgttgcttcgcaagaacaagagaattgctaggaatcaactggaatactcccaaatcattggctcgttgatgtacctggctagtgcaactaggcctgatatctcctttgctgtgagcaagttgagccgatttacttctaatccgggagatgatcactggcgtgcgcttgagcgagtaatgcgctatctgaaaggtactgtggaattggggcttcactatactgggtatcctgtggtactggagggttatagtgattctaactggatctctgatgtggatgagatcaaagccactagtggatatgttttcacactggttggtggtgctgtttcatggaggtcttgcaaacagacaattttgacgaggtcaaccatggaagcagagctaacggcactggatactgctactgttgaggcagaatggctgcgtgatctattaatggatctgcctgttgttgaaaaaccggtgccggctatccttatgaactgtgacaatcaaacgacatgtgaaaagacgattgaagtctatcaggaaattaagaaactccggagttataacgttggattacatccaaacagcgagaaacctggcagatcccttcacgaagggactatcacgaaatgtgatagacaatgcatcgaaggagatgggtttgagacccatagcattcttgaaggaactcacctttgtgagcttgactgttggtcacagtctatgaagattttgggtgaatcttctaggaagcttactaaagacctaggagtatga

SEQ ID NO: 23279 - DNA, 4674 bp, Oryza sativa
  Clone ID: TF_OsC1528_2076
tcagcttattacaagcttatgaatagtcgatattgccctttgcatgatttgttctacttcttcgattgcttgggcatcggctgcatctgtgcttgggatcggtttcacagtcttatttagttcggctaagtgcttgattgaagacttcagcttgggtttttgttcttcgatggctcttggcagatcggcaagcttatgttcttctaaagctagttcagcattacatgcttcaagttcagccagcaattcaatttttctgtttttcagccgatctatgttagattggataggattgggtccagagatcattgcatcaagcttagctttttcttcaataatggattgccgattggattgaatggtggcttcaagatcttttctttccctcctatcggctatcctttgtcttgctctctccagtttgtgccgatattgctcaaggaagactgctggagagatgatctcaaaccttgccctgattagaccacagtccgcaactagagcatccaaagaactttcaagctgatgagctatatccttaagtgtggttttcaagtcatcggctagaggagcttgtgttttgctggttgtttcttcctcttcatccataaactgcatgatgtcaaatgaaaacatatcagctaaggcaggaatggcaggaatcggctggtcttcaatttggtggctacctctagccgatggcgtatgtttacttgattcatgttggattggagttggagaccgaatccgatatcctctctttctctcttcctcttcttcctcagcaatgtcgacggcggcggcgtccgagactagcagcgcgagcgcgtggtgggcggcccttgacagcgtcccgtgcgcggagcgacgcatcggccaacgccgccacgggcaacagccgccgccaagcacgcgagtgtcctgctgctgggccgaggcggcggcggtggcggagcaggcggggttgagatggtcgagcgcgcatgaggcagggagcgggagcgggagcgcccgtggaggcggggagcgggagcgacaagcggccacgggcaacaagcagatccacgacgagcgagtgagcgacaaggccgacacgcgattgacgacgaggatgacgagatggcgaagagcggcggggaactggcagctgccgaactcgacggtgtacgccctcgcgaagttggcgccgctcgtcgccagcctcttcttgtcgttcagctcctgcacgatcaatcaatcgatagatggatcagctcatcgaagcaactactccatcccgctcgccggcgtgcaccagcgatcgggagagcaggtctccggaacctctgcctttaacgtcctgcaccgggagaaggcggcaataaggcactgtgattttactatggctggttttgccgatgcactgaggccggataaattcaccggtgtgcattttaagagatggcagatcagggtcactctgtggctgacagctatgaaatgcttctgggtgagtactggcaaacctgaaggagttcttactgctgaacagcagaagcaattcgaggaagccactactctctttgtgggatgcattcttagcgttcttggcgatcgtctggtcgaggtgtatatgcatatgaccgacgctaaggagttgtgggatgcactgaatactaaattcggtgctactgatgctagcaatgatctgtatatcatagagcagtttcatgactacaagatggctgacaaccgttctgtaatcgaacaggctcatgagatacaaaccatggctaaggaactcgaactccgtaagtgtgtcttacccgacaaatttgtggctgggtgcattattgcgaaactaccttcatcttggagaagtttcggtactgcactcaaacacaagagacaggaatactccgttgaggggttgatagcgtctcttgatgttgaggagaaagctcgggaaaaagatgccgcgtctaagggcgatggtggacagtccagtgccaatgttgtgcacaaggcccagaacaagagcaaggggaaatacaaagctcagcagaccaccaacttcaagaagcagaagaagaacaacaacaatcctaatcaggatgagaggacttgctttgtgtgtggccaagttggtcatctggctaggaagtgtccacaacgcaaggggatgaaggcacctgcagggcagacttctaagtctgctaatgtgaccattggcaacactggagatggaagcgggtatggtaatttacctactgtcgcacggggttccaccgtcctaatggggaatgggtcacaagcttctgttcatggtgttggcacggtagatctgaagtttacttcgggaaagatcgtgcagctgaagaacgtgcagcatgtcccttctatcgacaggaatcttgttagtggctcccgtctgactagagacggatttaagttggtttttgagtctaataaagtagtcgtgtctaaacatggatattttattggtaaaggttatgagtgcggaggcctgttccgcttttccctttctgatttctgcaataagtctgtgaaccatatttgtggcagtgtggatgatgaggctaatgtttggcattcacactactggaaggaggctgtccgtagtgaaatggattccattatcgctaacgggacttgggaggtgacagagcgaccctatgggtgtaaacctgtggggtgcaagtgggtgttcaagaagaagcttaggcctgatggctttgcggtcaatgaggcagataaatgtgtgtactatcgccatggtgggggtgagggagttattttgtgcttgtatgttgacgacatactgatatttggaacaaaccttgaggtgataaatgagtcccattatgtggagaagatcttgaatcgctttggctacattgatagtaagccttctccaacaccttatgatcctagcttgttgcttcgcaagaacaagagaattgctaggaatcaactggaatactcccaaatcattggctcgttgatgtacctggctagtgcaactaggcctgatatctcctttgctgtgagcaagttgagccgatttacctctaatccgggagatgatcactggcgtgcgcttgagcgagtaatgcgctatctgaaaggtactgtggaattggggcttcactatactgggtatcctgcggtactggagggttatagtgattctaactggatctctgatgtggatgagatcaaagccactagtggatatgttttcacactgggtggtggtgctgtttcatggaggtcttgcaaacagaccattttgacgaggtcaaccatggaagcagagctaacggcactggatactgctactgttgaggcagaatggctgcgtgatctattaatggatctgcctgttgttgaaaaaccggtgccggctatccttatgaactgtgacaatcaaacggaaattaagaaactccggagttataacgttggattacatccaaacagcgagaaacctggcagatcccttcacgaagggactatcacgaaatgtgataaacaatgcatcgaaggagatgggtttgagacccatgtctccggaacctctgcctttgacgtcctgcaccgggagaaggcggcaataaggtactcgtcgaacacgccggccctggcctgcccggccttgcgcagcggcggaggcggcgatcacggcggcgagacccagcagcgcggcgcgcctgccgccgccctgctcagcttgggcggtgccgcgacgtgcacgcgcttcggcagcgccggcgagccggccgactgcggcaccgccgcggcgggcttgaggccgacaaggctgttgttcactccggccatggctcgattgagctgcgtgcaagcggctgtcaccacctgccgcctacctctgacaaatccgtgggatacacaacaaacaaagctatgggaattgtccaaaacaccctcaaccgtcattgggaaggcatcagcaacgtacacgtggagggccaggatgagggatgcagatctttgtgaagacactcactggcaataccataaggttgagtcctctgacacgattgacaatgtcaaggccaagattcaggacaaggagggtattccacctgaccagcagcgcctcatctttgcgggcaagcaacttgaggacggacgcaccctcgcagattacaacattcagaaagagtccaccctccaccttgtccttcgcctcaggggaggaatgcagatctttgtgaagaccttgacaagaaagacccatcactttggagcgtctttatctttgctggcaagcagcttgaggatggacaaggagggcatccccccggaccagcagcgcctcatcttcgccggcaagcagctcaaggacggacgcaccctggctgactacaatatccagaaggagtctacccttcacctagtgctcaggctcaggggtggaatgcaaatctttgtcaagacattgaccggcaaaaccattaccttggaggttgagtcgtcggacacaattgacaacgtgaaagcaaagattcaggacaaggagggcattcccccggatcagcagcgactgatctttgctggcaagcagctcgaggatggccgcaccttagcaggttacaacatccagaaggagtccaccttgcacctggcgctccgtctccgtggtggcct

SEQ ID NO: 23280 - DNA, 3099 bp, Oryza sativa; identical to SEQ ID NO: 14991
  Clone ID: TF_OsC1528_2095

SEQ ID NO: 23281 - DNA, 2655 bp, Oryza sativa; identical to SEQ ID NO: 14964
  Clone ID: TF_OsC1528_2104

SEQ ID NO: 23282 - DNA, 3458 bp, Oryza sativa
  Clone ID: TF_OsC1528_2131
atgttattgaaaaaattattgctgtctccatctccaatgcagcaatgatatctacaaagaagaggattcctcggacgccacccgccagggaaagggcaccgctggctgggggggcgccgaccgccaaggggagggcgccgcccctcgggggaaaggcgccgctggcctggtggaggatgccacgtctgaggcaccgggcgccgtcggccgggaggtcgccctggctgaggggtaggaagagcggtgccgccgactactccatcccgctcgccggcgtgcaccggcgattgggagagcaggtctccggaacctctgccttcgacgttctgcaccgggagaaggcggcaataaggcactgtgattttactatggctggttttgccgatgcactgaggccggataaattcaccggtgtgcattttaagagatggcagatcagggtcactctgtggctgacagctatgaaatgcttctgggtgagtactggcaaacctgaaggagttcttactgctgaacagcagaagcaattcgaggaagccactactctctttgtgggatgcattcttagcgttcttggcgatcgtctggtcgaggtgtatatgcatatgaccgacgctaaggagttgtgggatgcactgaatactaaattcggtgctactgatgctagcaatgatctgtatatcatggagcagtttcatgactacaaaatggctgacaaccgttctgtagtcgaacaggctcatgagatacaaaccatggctaaggaactcgaactccttaagtgtgtcttacccgacaaatttgtggccgggtgcattattgcaaaactacctccatcttggaggagtttcggtactgcactcaaacacaagagacaggaatactccgttgaggggttgattgcgtctcttgatgttgaggagaaagctcgggaaaaagatgccgcgtctaagggcgatggtgggcagtccagtgccaatgttgtgcacaaggcccagaacaagagcaaggggaaatacaaagctcagcagaccaccaacttcaagaagcagaagaagaacaacaacaatcctaatcaggatgagaggacttgctttgtgtgtggccaagttggtcatctggctaggaagtgtccacagcgcaaggggatgaaggcacctgcagggcagacttctaagtctgctaatgtgaccattggcaacactggagatggaagcgggtatggtaatttacctactgtcgcacggggttccaccgtcctaatggggaatgggtcacatgcttctgttcatggtgttggcacggtagatctgaagtttacttcgggaaagatcgtgcagctgaagaacgtgcagcatgtcccttctatcgacaggaatcttgttagtggctcccgtctgactagagacggatttaagttggtttttgagtctaataaagtagtcgtgtctaaacatggatattttattggtaaaggttatgagtgcggaggcctgttccgcttttccctttctgatttctgcaataacatgtgtttaattcctaagttttccattgtcaaaggttctaagtgccatagttgtgtgcaatcgaagcaacctcgcaagcctcacaaggctgccgaggagagaaacttggcaccactagaactcctacattcagatctttgtgaaatgaatggggtgttgacgaaggaagttgaaaatcaacttgacagaaagataaaaaggcttaggtctaatcgtggtggagagtttttctcgaacgagtttgacttattctgtgaggaacatggcatcatacatgagaggacgcctccctattctcccgagtctaatgggattgctgaaaggaagaaccgcacactgactgacttggtgaatgccatgttggacaccgcgggactgcctaaggcatgtgaagctcctcgaaggagtaagagacaaaggacggctaagtcttttggtgatgatttcactgtgtacctcgtggatgacactcctaagtcaatttcagaagcatatgcatctcctgatgcagactactggaaggaggctgtccgtagtgaaatggattccattatcgctaacgggacttgggaggtgacagagcgaccctatgggtgtaaacctgtggggtgcaagtgggtgttcaagaagaagcttaggcctgacgcctcacatggtcttctcgttcatcaaatggacgttaagacagcttttcttaatggagagctggatgaggagatctatatggatcaacctgatgggtttgtagttgaaggctttgcagtcaatgaggcagataaatgtgtgtactatcgccatggtgggggtgagggagttattttgtgcttgtatgttgacgacatactgatatttgggacaaaccttgaggtgataaatgagtcccattatgtggagaagatcttgaatcgctttggctacattgatagtaagccttctccaacaccttatgatcctagcttgttgcttcgcaagaacaagagaattgctaggaatcaactggaatactcccaaatcattggctcgttgatgtacctggctagtgcaactaggcctgatatctcctttgctgtgagcaagttgagccgatttacctctaatccgggagatgatcactggcgtgcgcttgagcgagtaatgcgctatctgaaaggtactgtggaattggggcttcactatactgggtatcctgcggtactggagggttatagtgattctaactggatctctgatgtggatgagatcaaagccactagtggatatgttttcacactgggtggtggtgctgtttcatggagcaaagatgttgtcctgcagagcattcttgaaagaactcacctttgtgagcttgactgttggtcgcagtctatgaagattttggactactccatcccgctcgccggcgtgcaccggcgatcgggagagcaggtctccggaacctctgccttcgacgttctgcaccgggagaaggcggcaataagagtcctgacatggaatgacgggttctacaacggcgagataaagacaaggaagatagagaacaacctagtgacggagctcacagctgagcagctcctcctacagagaagcgagcaactgagggagctgtacaactctctcctctctggtgagtctgcagaccaacagaggaggaggcctgtcactgcactatcgccggaggatctcggcaacgtagaatggtactacgttgtctgcatgacctacgccttccgccctggacaatgtgtgccaggtaaaagctttgcaagcaatggatgtgcctggctgtgcaacgctcagtctgccgatagcaaagccttcccgcgcaagctcttagccaagaacgcttctattcagacaattgtctgcgttccattcatgactggcgttcttgagcttgggaccactgatccgaaaaccgacaccttctag

SEQ ID NO: 23283 - DNA, 4185 bp, Oryza sativa
  Clone ID: TF_OsC1528_2144
atgcagcctccttttgcagttttgttttgctgcaaattcggattcgtttttgttttggaaacgttccgaaaaatccgatctaatgatgcgttcatgctagttttcatctgtaatgtcatgatttatttatggaatagattaaatcattatatgtctataatctcaacaatccaaaaaccttattataggcactgtgattttactttggctggttttgccgatgcactgaggccggataaattcaccggtgtgcattttaagagatggcagatcagggtcactctgtggctgacagctatgaaatgcttctgggtgagtactggcaaacctgaaggagttcttactgctgaacagcagaagcaattcgaggaagccactactctctttgtgggatgcattcttagcgttcttggcaatcgtctggtcgaggtgtatatgcatatgaccgacgctaaggagttgtgggatgcactgaatactaaattcggtgctactgatggtagcaatgatctgtatatcatggagcagtttcatgactacaaaatggctgacaaccgttctgtagtcgaacaggctcatgagatacaaaccatggctaaggaactcgaactccttaagtgtgtcttacccgacaaatttgtggccgggtgcattattgcaaaactacctccatcttggaggagtttcggtactgcactcaaacacaagagacaggaatactccgttgaggggttgattgcgtctcttgatgttgaggagaaagctcgggaaaaagatgccgcgtctaagggcgatggtgggcagtccagtgccaatgttgtgcacaaggcccagaacaagagcaaggggaaatacaaagctcagcagaccaccaacttcaagaagcagaagaagaacaacaacaatcctaatcaggatgagaggacttgctttgtgtgtggccaagttggtcatctggctaggaagtgtccacagcgcaaggggatgaaggcacctgcagggcaaacttctaagtctgctaatgtgaccattggcaacactggagatggaagcgggtatggtaatttacctactgttttttcagttaatcaatctactaattggtgggttgatactggggccaatgtacatgtttgtgctgacatctcattgttttcttcttatcaggtcgcacggggttccaccgtcctaatggggaatgggtcacatgcttctgttcatggtgttggcacggtagatctgaagtttacttcgggaaagatcgtgcagctgaagaacgtgcagcatgtcccttctatcgacaggaatcttgttagtggctcccgtctgactagagacggatttaagttggtttttgagtctaataaagtagtcgtgtctaaacatggatattttattggtaaaggttatgagtgcggaggactgttccgcttttccctttctgatttctgcaataagtctgtgaaccatatttgtggcagtgtggatgatgaggctaatgtttggcattcacgtttatgtcatattaattttggcttgatgtctcggctttccagcatgtgtttaattcctaagttttccattgtcaaaggttctaagtgccatagttgtgtgcaatcaaagcaacctcgcaagcctcacaaggctgccgaggagagaaacttggcaccactagaactcctacattcagatctttgtgaaatgaatggggtgttgacgaagggtggaaaacgatatttcatgacattcattgatgatgctactagattttgctatgtgtacttgttgaaaacgaaagacgaggctctagactattttaaaatttataaggcagaagttgaaaatcaacttgacagaaagataaaaaggcttaggtctgatcgtggtggagagtttttctcgaacgagtttgacttattctgtgaggaacatggcatcatatatgagatgacgcctccctattctcccgagtctaatgggattgctgaaaggaagaatcgcacactgactgacttggtgaatgccatgttggacaccgcgggactgcctaaggcatggtggggggaggcattgttgacctcaaatcatgtgttaaacagagttcctaacagaaataaggacaaaacaccatatgagatatggattggtagaaaaccatcactttcttatttgcgcacatgggggtgcttggcgaaagtcaatgtaccaataacgaagaagcgcaaacttggacctaagactgtggactgtgtttttctgggatatgctcatcatagcattgcctatagatttttaatagttaaatccgaggtaccggacatgcatgttggtacaattatggagtctcgtgatgctatcttctttgagagctttttcccaatgaaggatacacatagtggttcgaaccaaccatttgaaataattcccagttcaatcacaccaccagaacaaactgaacatacacatgaacttgtctctgaggaggatgtcagtgaagctcctcgaaggagtaagagacaaaggacggctaagtcttttggtgatgatttcactgtgtacctcgtggatgacactcctaagtcaatttcagaagcatatgcatctcctgatgcagactactggaaggaggctgtccgtagtgaaatggattccattatcgctaacgggacttgggaggtgatagagcgaccctatgggtgtaaacctgtggggtgcaagtgggtgttcaagaagaagcttaggcctgacggtactattgaaaagtacaaggctcggcttgttgctaagggctatactcagaaagaaggcgaagatttctttgacacttactcacctgttgctagattgaccacaattcgtgtgctactttccctagcagcctcacatggtcttctcgttcatcaaatggacgttaagacagcttttcttaatggagagctggatgaggagatctatatggatcaacctgatgggtttgtagttgaaggtcaagaacgcaaagtgtgcaaattgttgaagtctttgtatggtctaaaacaagctcctaagcaatggcatgagaaatttgacaaaacattgacatctgcaggctttgcagtcaatgaggcagataaatgtgtgtactatcgccatggtgggggtgagggagttattttgtgcttgtatgttgacgacatactgatatttgggacaaaccttgaggtgataaatgaggttaaatcattcttgtctcaaaattttgatatgaaggatttgggagtagctgatgttatcttaaacattaagctaattagaggtgagaatgggattacactcttgcagtcccattatgtggagaagatcttgaatcgctttggctacattgatagtaagccttctccaacaccttatgatcctagcttgttgcttcgcaagaacaagagaattgctaggaatcaactggaatactcccaaatcattggctcgttgatgtacctggctagtgcaactaggcctgatatctcctttgctgtgagcaagttgagccgatttacctctaatccgggagatgatcactggcgtgcgcttgagcgagtaatgcgctatctgaaaggtactgtggaattggggcttcactatactgggtatcctgcggtactggagggttatagtgattctaactggatctctgatgtggatgagatcaaagccactagtggatatgttttcacactgggtggtggtgctgtttcatggaggtcttgcaaacagaccattttgacgaggtcaaccatggaagcagagctaacggcactggatactgctactgttgaggcagaatggctgcgtgatctattaatggatctgcctgttgttgaaaaaccggtgccggctatccttatgaactgtgacaatcaaacgacatgtgaaaagacgattgaagtctgtcaggaaattaagaaactccggagttataacgttggattacatccaaacagcgagaaacctggcagatcccttcacgaagggactatcacgaaatgtgatagacaatgcatcgaaggagatgggtttgagacccatatgagttatactatggtgagcattcttgaaagaactcacctttgtgagcttgactgttggtcgcagtctatgaagattttgggtgaatcttctaggaagcttactaaagacctaggagtatga

SEQ ID NO: 23284 - DNA, 3206 bp, Oryza sativa
  Clone ID: TF_OsC1528_2147
atgggcacaaaaaccaaccctgaccggtggaatggttcactgtcacagggtctgggggagggagggttattttttgaagatgagagcggttatgacgacaaagtgggggtcggctcggccggtcagacagggcgccaggccagtcaggcctctggcactcctgcggtcagaccgacgcatgacgtgggtcagaccggcctgggtcgtcggctgagggttctgttgatgctgctcgagatggtcctccagaaattactacttcggccaatactgatacagaacgtggatcaacttcagaagttactgctcctttgcacattcaccgccgacatccgccggaacacaattattggtaatataggtgagcggactgcaagacttgtctggttgttgcctgtcacaagaccaaattgtggcaagggcgagacatcagtcaaagggaacactggtggcaagacctacatccgcgtcttgggcaaccatgttgaacacggcggtggcgtgctggagctcatcagcaagcctcatattttgaaagctcaagtatcggtgctgtactactactccatcccgctcgccggcgtgcaccagcgatcgggagagcaggtctccggaacctctgcctttgacgtcctgcaccgggagaaggcagcaataagggtcactctgtggctgacagctatgaaatgcttctgggtgagtactggcaaacctgaaggagttcttaccgctgaacagcagaagcaattcgaggaagccactactctctttgtgggatgcattcttagcgttcttggcgatcgtctggtcgaggtgtatatgcatatgaccgacgctaaggagttgtgggatgcactgaatactaaattcggtgctactgatgctagcaatgatctgtatatcatggagcagtttcatgactacaaaatggctgacaaccgttctgtagtcgaacaggctcatgagatacaaaccatggctaaggaactcgaactccttaagtgtgtcttacccgacaaatttgtggccgggtgcattattgcaaaactacctccatcttggaggagtttcggtactgcactcaaacacaagagacaggaatactccgttgaggggttgattgcgtctcttgatgttgaggagaaagctcgggaaaaagatgccgcgtctaagggcgatggtgggcagtccagtgccaatgttgtgcacaaggcccagaacaagagcaaggggaaatacaaagctcagcagaccaccaacttcaagaagcagaagaagaacaacaacaatcctaatcaggatgagaggacttgctttgtgtgtggccaagttggtcatctggctaggaagtgtccacaacgcaaggggatgaaagcacctgcagggcagacttctaagtctgctaatgtgaccattggcaacactggagatggaagctggtatggtaatttacctactgtcgcacggggttccaccgtcctaatggggaatgggtcacatgcttctgttcatggtgttggcacggtagatctgaagtttacttcgggaaagatcgtgcagctgaagaacgtgcagcatgtcccttctatcgacaggaatcttgttagtggctcccgtctgactagagacggatttaagttggtttttgagtctaataaagtagtcgtgtctaaacatggatattttattggtaaaggttatgagtacggaggcctgttccgcttttccctttctgatttctgcaataacatgtgtttaattcctaagttttccattgtcaaaggttctaagtgccatagttgtgtgcaatcgaagcaacctcgcaagcctcacaaggctgccgaggagagaaacttggcaccactagaactcctacattcagatctttgtgaaatgaatggggtgttgacgaaggaagttgaaaatcaacttgacagaaagataaaaaggcttaggtctgatcgtggtggagagtttttctcgaacgagtttgacttattctgtgaggaacatggcatcatacatgagaggacgcctccctattctcccgagtctaatgggattgctgaaaggaagaaccgcacactgactgacttggtgaatgccatgttggacaccgcgggactgcctaaggcatgtgaagctcctcgaaggagtaagagacaaaggacagctaagtcttttggtgatgatttcattgtgtacctcgtggatgacactcctaagtcaatttcagaagcatatgcatctcctgatgcagactactggaaggaggctgtccgtagtgaaatggattccattatcgctaacgggacttgggaggtgacagagcgaccctatgggtgtaaacctgtggggtgcaagtgggtgttcaagaagaagcttaggcctgacgcctcacatggtcttctcgttcatcaaatggacgttaagacagcttttcttaatggagagctggatgaggagatctatatggatcaacctgatgggtttgtagttgaaggctttgcagtcaatgaggcagataaatgtgtgtactatcgccatggtgggggtgagggagttattttgtgcttgtatgttgacgacatactgatatttgggacaaatcttgaggtgataaatgagtcccattatgtggagaagatcttgaatcgctttggctacattgatagtaagccttctccaacaccttatgatcctagcttgttgcttcgcaagaacaagagaattgctaggaatcaactggaatactcccaaatcattggctcgttgatgtacctggctagtgcaactaggcctgatatctcctttgctgtgagcaagttgagccgatttacttctaatccgggagatgatcactggcgtgcgcttgagcgagtaatgcgctatctgaaagactactccatcccgctcgccggcgtgcaccagcgatcgggagagcaggtctccggaacctctgcctttgacgtcctgcaccgggagaaggcagcaataaggtttttgggaagcgcttcgcgcgactgctccctgttcgttcgcgacggctcgccttcctcttcgctcgcgtgtttcgtgccttcgtagacggtaacaatggtggctctaaaggctccagggtgcttttaggtaagttcagccctttcggcaggttttcgtgtattcttctaggcgacaagcctggctccgaactgctcatcagtcat

SEQ ID NO: 23285 - DNA, 4323 bp, Oryza sativa
  Clone ID: TF_OsC1528_2189
atggcggcggcggcggcctgcacgaagctgccgttgctgctcctgctcgtcgccgtcgccgtcgcagcgtcgtcggcgtcgtcactaacgccgcagcacgcggcgtgccggagaagggacctcgccccggcggcggcggcgttaccttgcacctcgaccaccgccaggtactgggatgtggtatggaatttccccggatccaataatccaagaggcatgatcgatatgctggatagtactgaattcaaggtagtatcctcaagtgaagatcaagtggagctttccttcaggagcacctacaatccatcacgtccaaatagtgtcaggctaaacatcgacaagaggcactgtgattttactatggctggttttgccgatgcactgaggccggataaattcaccggtgtgcattttaagagatggcagatcagggtcactctgtggctgacagctatgaaatgcttctgggtgagtactggcaaacctgaaggagttcttactgctgaacagcagaagcaattcgaggaagccactactctctttgtgggatgcattcttagcgttcttggcgatcgtctggtcgaggtgtatatgcatatgaccgacgctaaggagttgtgggatgcactgaatactaaattcggtgctactgatgctagcaatgatctgtatatcatggagcagtttcatgactacaagatggctgacaaccgttctgtagtcgaacaggctcatgagatacaaaccatggctaaggaactcgaactccttaagtgtgtcttacccgacaaatttgtggccgggtgcattattgcaaaactacctccatcttggagaagtttcggtactgcactcaaacacaagagacaggaatactccgttgaggggttgatagcgtctcttgatgttgaggagaaagctcgggaaaaagatgccgcgtctaagggcgatggtgggcagtccagtgccaatgttgtgcacaaggcccagaacaagagcaaggagaaatacaaagctcagcagaccaccaacttcaagaagcagaagaagaacaacaacaatcctaatcaggatgagaggacttgctttgtgtgtggccaagttggtcatctggctaggaagtgtccacagcacaaggggatgaaggcacctgcagggcagacttctaagtctgctaatgtgaccattggcaacactggagatggaagcgggtatggtaatttacctactgttttttcagttaatcaatctactaattggtgggttgatactggggccaatgtacatgtttgtgctgacatctcattgttttcttcttatcaggtcgcacggggttccaccgtcctaatggggaatgggtcacatgcttctgttcatggtgttggcacggtagatctgaagtttacttcgggaaagatcgtgcagctgaagaacgtgcagcatgtcccttctatcgacaggaatcttgttagtggctcccgtctgactagagacggatttaagttggtttttgagtctaataaagtagtcgtgtctaaacatggatattttattggtaaaggttatgagtgcggaggcctgttccgcttttccctttctgatttctgcaataagtctgtgaaccatatttgtggcagtgtggatgatgaggctaatgtttggcattcacgtttatgtcatattaattttggcttgatgtctcggctttccagcatgtgtttaatttctaagttttccattgtcaaaggttctaagtgccatagttgtgtgcaatcgaagcaacctcgcaagcctcacaaggctgccgaggagagaaacttggcaccactagaactcctacattcagatctttgtgaaatgaatggggtgttgacgaagggtggaaaacgatatttcatgacattgattgatgatgttactagattttgctatgtgtacttgttgaaaacgaaagacgaggctctagactattttaaaatttataaggcagaagttgaaaatcaacttgacagaaagataaaaaggcttaggtctgatcgtggtggagagtttttctcgaacgagtttgacttattctgtgaggaacatggcatcatacatgagaggacgcctccctattctcccgagtctaatgggattgctgaaaggaagaatcgcacactgactgacttggtgaatgccatgttggacaccgcgggactgcctaaggcatggtggggggaggcattgttgaccttaaatcatgtgttaaacagagttcctaacagaaataagaacaaaacaccatatgagatatggattggtagaaaaccatcactttcttatttgcgcacatgggggtgcttggcgaaagtcaatgtaccaataacgaagaagcgcaaacttggacctaagactgtggactgtgtttttctgggatatgctcatcatagcattgcctatagatttttaatagttaaatccgaggtaccggacatgcatgttggtacaattatggagtctcgtgatggtaccttctttgagagcttttgcccaatgaaggatacacatagtggttcgaaccaaccctctgaaataattcccagttcaatcacaccaccagaacaaactgaacatacacatgaacttgtctctgaggaggatgtcagtgaagctcctcgaaggagtaagagacaaaggacggctaagtcttttggtgatgatttcactgtgtacctcgtggatgacactcctaagtcaatttcagaagcatatgcatctcctgatgcagactactggaaggaggctgtccgtagcgaaatggattccattatcgctaacgggacttgggaggtgacagagcggccctatgggtgtaaacctgtggggtgcaagtgggtgttcaagaagaagcttaggcctgacggtactattgaaaagtacaaggctcggcttgttgctaagggctatactcagaaagaaggcgaagatttctttgacacttactcacctgttgctagattgaccacaattcgtgtgctactttccctagtagcctcacatggtcttctcgttcatcaaatgaacgttaagacagcttttcttaatggagagctggatgaggagatctatatggatcaacctgatgggtttgtagttgaaggtcaagaaggcaaagtgtgcaaattgttgaagtctttgtatggtctgaaacaagctcctaagcaatggcatgagaaatttgacaaaacattgacatctgcaggctttgcagtcaatgaagcagataaatgtgtgtactatcgccatggtgggggtgagggagttattttgtgcttgtatgttgacgacatactgatatttgggacaaaccttgaggtgataaatgaggttaaatcattcttgtctcaaaattttgatatgaaggatttgggagtagctgatgttatcttaaacattaagttaattagaggtgagaatgggattacactcttgcagtcccattatgtggagaagatcttgaatcgctttggctacattgatagtaagccttctccaacaccttatgatcctagcttgttgcttcacaagaacaagagaattgctaggagtcaactggaatactcccaaatcattggctcgttgatgtacctggctagtgcaactaggcctgatatctcctttgctgtgagcaagttgagccgatttacctctaatccgggagatgatcactggcgtgcgcttgagcgagtaatgcgctatctgaaaggtactgtggaattggggcttcactatactgggtatcctgcggtactggagggttatagtgattctaactggatctctgatgtggatgagatcaaagccactagtggatatgttttcacactgggtggtggtgctgtttcatggaggtcttgcaaacagaccattttgacgaggtcaaccatggaagcagagctaacggcactggatactgctactgttgaggcagaatggctgcgtgatctattaatggatctgcctgttgttgaaaaaccggtgccggctatccttatgaactgtgacaatcaaacgacatgtgaaaagacgattgaagtctgtcaggaaattaagaaactccggagttataatgttggattacattcaaacagcgagaaatctggcagatcccttcacgaagggactatcacgaaatgtgatagacaatgcatcgaaggagatgggtttgagacccatagcattcttgaaagaactcacctttgtgagcttgactgttggtcgcagtctatgaagattttgggtgaatcttctaggaagcttactaaagacctaggagtatga

SEQ ID NO: 23286 - DNA, 5135 bp, Oryza sativa
  Clone ID: TF_OsC1528_2233
cttttgcagttttgttttgctgcaaattcggattcgtttttgttttggaaacgttccgaaaaatccggtgcgtgcaaacggcgtggagtccggataagttacgcgcgacttatccggttcggttacgcgcagtagagatcgtgcgggcgccctgatcaagcgacccttctctatataaaccgacccgccgtcttcacgcaggatatacgcaaaatcaatctagggtttgcctcctactctgtactgcgccgtcgctcgtagactactccatcccgctcgccggcgtgcaccagcgatcgggagagcaggtctccggaacctctgcctttgacgtcctgcatcgggagaaggcggcaataaggtttttgggaagcgcttcgcgcgactgctccctgttcgttcgcgacagctcgccttcctcttcgctcgcgtgtttcgtgccttcgtagacacctgcgaaaagtttcgaccaagcagccggtctttccgtcacctcggtgagtactggcaaacctgaaggagttcttactgctgaacagcagaagcaattcgaggaagccactactctctttgtgggatgcattcttagcgttcttggcgatcgtctggtcgaggtgtatatgcatatgaccgacgctaaggagttgtgggatgcactgaatactaaattcggtgctactgatgctagcaatgatctgtatatcatggagcagtttcatgactacaaaatggctgacaaccgttctgtagtcgaacaggctcatgagatacaaaccatggctaaggaactcgaactccttaagtgtgtcttacccgacaaatttgtggccgggtgcattattgcaaaactaccttcatcttggagaagtttcggtactgcactcaaacacaagagacaggaatacttcgttgaggggttgatagcgtctcttgatgttgaggagaaagctcgggaaaaagatgccgcgtctaagggcgatggtgggcagtccagtgccaatgttgtgcacaaggcccagaacaagagcaaggggaaatacaaagctcagcagaccaccaacttcaagaagcagaagaacaacaacaacaatcctaatcaggatgagaggacttgctttgtgtgtggccaagttggtcatctggctaggaagtgtccacagcgcaaggggatgaaggcacctgcagggcagacttctaagtctgctaatgtgaccattggcaacactggagatggaagcgggtatggtaatttacctactgtttttttagttaatcaatctactaattggtgggttgatactggggccaatgtacatgtttgtgctgacatctcattgttttcttcttatcaggtcgcacggggttccaccgacctaatggggaatgggtcacatgcttctgttcatggtgttggcacggtagatctgaagtttacttcgggaaagatcgtgcagctgaagaacgtgcagcatgtcccttctatcgacaggaatcttgttagtggctcccgtctgactagagacggatttaagttggtttttgagtctaataaagtagtcgtgtctaaacatggatattttattggtaaaggttatgagtgcggaggcctgttctgtttttccctttctgatttctgcaataagtctgtgaaccatatttgtggcagtgtggatgatgaggctaatgtttggcattcacgtttatgtcatattaattttggcttgatgtctcggctttccagcatgtgtttaattcctaagttttccattgtcaaaggttctaagtgccatagttgtgtgcaatcgaagcaacctcgcaagcctcacaaggctgccaaggagagaaacttggcaccactagaactcctacattcagatctttgtgaaatgaatggggtgttgacaaatggtggaaaacgatatttcatgacattgattgatgatgctactagattttgctatgtgtacttgttgaaaacgaaagacgaggctctagactattttaaaatttataaggcagaagttgaaaatcaacttgacagaaagataaaaaggcttaggtctgatcgtggtggagagtttttctcgaacgaatttgacttattctgtgaggaacatggcatcatacatgagaggacgcctccctattctcccgagtctaatgggattgctgaaaggaagaatcgcacgctgactgacttggtgaatgccatgttggacaccgcgggactgcctaaggcatggtggggggaggcattgttgacctcaaatcatgtgttaaacagagttcctaacagaaataaggacaaaacaccatatgagatatggattggtagaaaaccatcactttcttatttgcgcacatgggggtgcttggcgaaagtcaatgtaccaataacgaagaagcgcaaacttggacctaagactgtggactgtgtttttctgggatatgctcatcatagcattgcctatagatttttaatagttaaatccgaggtaccagacatgcatgttggtacaattatggagtctcgtgattctatcttctttgagagctttttcccaatgaaggatacacatagtggttcgaaccaaccctttgaaataattcccagttcaatcacaccaccaaaacaaactgaacatacacatgaacttgtctctgaggaggatgtcagtgaagctcctcgaaggagtaagagacaaaggacggctaagtcttttggtgatgatttcactgtgttcctcgtggatgacactcctaagtcaatttcagaagcatatgcatctcctgatgcagactactggaaggaggctgtccgtagtgaaatggattccattatcgctaacggaacttgggaggtgatagagctaccctatgggtgtaaacctatggggtgcaagtgggtgttcaagaagaagcttaggcctgacggtactattgaaaagtacaaggctcggcttgttgctaagggctatactcagaaagaaggcgaagatttctttgacacttactcacctgttgctagattgaccacaattcgtgtgctactttccctagcagcctcacatggtcttctcgttcatcaaatggacgttaagacagcttttcttaatggagagctggatgaggagatctatatggatcaacctgatgggtttgtagttgaaggtcaagaaggcaaagtgtgcaaattgttgaagtctttgtatggtctgaaacaagctcctaagcaatggcatgagaaatttgacaaaacattgacatctgcaggctttgcagtcaatgaggcagataaatgtgtgtactatcgccatggtgggggtgagggagttattttgtgcttgtatgttgacgacatactgatatttgggacaaaccttgaggtgataaatgaggttaaatcattcttgtctcaaaattttgatatgaaggatttgggagtagctgatgttatcttaaacattaagctaattagaggtgagaatgggattacactcttgcagtcccattatgtggagaagatcttgaatcgctttggctacattgatagtaagccttctccaacaccttatgatcctagcttgttgcttcgcaagaacaagagaattgctaggaatcaactggaatactcccaaatcattggctcgttgatgtacctggctagtgcaactaggcctgatatctcctttgctgtgagcaagttgagccgatttacctctaatccgggagatgatcactggcgtgcgcttgagcgagtaatgcgctatctgaaaggtactgtggaattggggcttcactatactgggtatcctgcggtactggagggttatagtgattctaactggatctctgatgtggatgagatcaaagccactagtggatatgttttcacactgggtggtggtgctgtttcatggaggtcttgcaaacagaccattttgacgaggtcaaccatggaagcagagctaacggcactggatactgctactgttgaggcagaatggctgcgtgatctattaatggatctgcctgttgttgaaaaaccggtgccggctatccttatgaactgtgacaatcaaacgacatgtgaaaagacgattgaagtctgtcaggaaattaagaaactccggagttataacgttggattacatccaaacagcgagaaacctggcagatcccttcacgaagggactatcacgaaatgtgatagacaatgtatcgaaggagatgggtttgagacccataaagaggaagcaaacaagagattgcaaggggttcaaataactaccacagctccaattataagccaccttttgtttgctgatgatagcttgttactattcaaagctactagtgtttgtgcagatgcagtgagtagagttttaactaactattgtgcagcttccggacaactggtcaacttttctaagtcctgcattttcttcagcaagaagtgtgatatggccatccgtgaggacatcaaacgaaaggttggaatgactaatgaatctataacagatcgctatttgggtttgccaacggatgtgggtagagccaaggaaggaaaatttaaatacttgaaggacagagtgtggaaaagagtgcagggatggatggagaaaacactttcagttggaggtaaagaagtccttattaaatcaatagttcaagccatcccaacttattcaatgagttgtttccgtttacccatgggcctttgcaaccatataaattctttaatccggaaattttggtgggcaagtaaacaaggttcaaggaaaaccaattgggtagcatgggacaagatgactgtgcctaagtttcttggtggaatgggatttagggacataaatattttcaatctagtattgcttgccaagcaagggtggagaatcttgcagtatcctaattcactagcagcaagagttttgaaagctgtctatttttcaaatggtgacttcctgaatgctggtttgggaagtaggccatcacatacttggcgtgctattattgaaggtcgtgaaattcttaaactaggaattattcgaaggattggaagtggaaaagatacttttatctgggatgataattggattccaagagattggatgcttcgaccaatcagggcctaa

SEQ ID NO: 23287 - DNA, 3633 bp, Oryza sativa; identical to SEQ ID NO: 14993
  Clone ID: TF_OsC1528_2246

SEQ ID NO: 23288 - DNA, 4938 bp, Oryza sativa
  Clone ID: TF_OsC1528_2253
atggcagcgatctgcggggagacgatctccgtcgacgagttgtggcgggagatcttgctcagggcgccaaccaaagacgtcgcccgttcatgctgcgtctcgacgcagtggcgcggcatcgtcagggacccctccttccggaagctccaccatgacaggcatgccgtgccgtccaaggacgacgtcccggacgctctgctcgtcatcacggtcaacgccgacggccaaagcgtctccaccgtcgtcccagctatggtctctccggtgtcgacgagccagcgggcgcccatgtaccgggttattaagaacggcatcagctatagcctcgccaatgtctgcaatggcttcctctgcttcgcgtcatggagcagggccaaggtcgtcgtgtgcaaccccatcaccggcgagaagctggcgatccccagggctcctcccatcgggccagattataaatcgtcgcgtgccaggatcgacgtgtacacgctgcccacaagcggtggcaagatatgcgtgatgaccgctactggcaccccgagctggcacccacccgaaattcccacactcggtccggtgttggtggtcgacgtcgcgagcgagaagcatcgcatgtatagcccaccggacaacgggtgcccagcggctgacgaaacgtcgttcactgcctttgagctgcacggacggttgtgcctggccatcaggatatccatgaccaacacagtccagttctggactttgtcggttgaagaagacgacgacgacgacgacgacctgccgtggcagcttctctacacgatcaaaatcaacatgaaagatggctataataatggattccaggaactagagcctatgaatgattggttcaatggcggcaataatggatttatccaggtaccagagcccatggatgcttggctcgacggcgagacccacacccttgctacagagagggcagcacattgtactttagactactccatcccgctcgccggcgtgcaccagcgatcgggagagcaggtctccggaacctctgcctttgacgtcctgcaccgggagaaggcggcaataagatctaatgatgcgttcatgctagttttcatctgtgatgtcatgatttatttatggaataaattaaatccttatatgcccataatctcaacaatccaaaaaccttattataggcactgtgattttactatggctggttttgccgatgcactgaggccggataaattcaccggtgtgcattttaagagatggcagatcagggtcactctgtggctgacagctatgaaatgcttctgggtgagtactggcaaacctgaaggagttcttactgctgaacagcagaagcaattcgaggaagccactactctctttgtgggatgcattcttagcgttcttggcgatcgtctggtcgaggtgtatatgcatatgaccgacgctaaggagttgtgggatgcactgaatactaaattcggtgctactgatgctagcaatgatctgtatatcatggagcagtttcatgactacaaaatggctgacaaccgttctgtagtcgaacaggctcatgagatacaaaccatggctaaggaactcgaactccttaagtgtgtcttacccgacaaatttgtggccgggtgcattattgcaaaactacctccatcttggaggagtttcggtactgcactcaaacacaagagacaggaatactccgttgaggggttgattgcgtctcttgatgttgaggagaaagctcgggaaaaagatgccgcgtctaagggcgatggtgggcagtccagtgccaatgttgtgcacaaggcccagaacaagagcaaggggaaatacaaagctcagcagaccaccaacttcaagaagcagaagaagaacaacaacaatcctaatcaggatgagaggacttgctttgtgtgtggccaagttggtcatctggctaggaagtgtccacagcgcaaggggatgaaggcacctgcagggcagacttctaagtctgctaatgtgaccattggcaacactggagatggaagcgggtatggtaatttacctactgttttttcagttaatcaatctactaattggtgggttgatactggggccaatgtacatgtttgtgctgacatctcattgttttcttcttatcaggtcgcacggggttccaccgtcctaatggggaatgggtcacatgcttctgttcatggtgttggcacggtagatctgaagtttacttcgggaaagatcgtgcagctgaagaacgtgcagcatgtcccttctatcgacaggaatcttgttagtggctcccgtctgactagagacggatttaagttggtttttgagtctaataaagtagtcgtgtctaaacatggatattttattggtaaaggttatgagtgcggaggcctgttccgcttttccctttctgatttctgcaataagtctgtgaaccatatttgtggcagtgtggatgatgaggctaatgtttggcattcacgtttatgtcatattaattttggcttgatgtctcggctttccagcatgtgtttaattcctaagttttccattgtcaaaggttctaagtgccatagttgtgtgcaatcgaagcaacctcgcaagcctcacaaggctgccgaggagagaaacttggcaccactagaactcctacattcagatctttgtgaaatgaatggggtgttgacgaagggtggaaaacgatatttcatgacattgattgatgatgctactagattttgctatgtgtacttgttgaaaacgaaagacgaggctctagactattttaaaatttataaggcagaagttgaaaatcaacttgacagaaagataaaaaggcttaggtctgatcgtggtggagagtttttctcgaacgagtttgacttattctgtgaggaacatggcatcatacatgagaggacgcctccctattctcccgagtctaatgggattgctgaaaggaagaaccgcacactgactgacttggtgaatgccatgttggacaccgcgggactgcctaaggcatgcattgcctatagatttttaatagttaaatccgaggtaccggacatgcatgttggtacaattatggagtctcgtgatgctaccttctttgagagctttttcccaatgaaggatacacatagtggtttgaaccaaccctctgaaataattcccagttcaatcacaccaccagaacaaactgaacatacacatgaacttgtctctgaggaggatgtcagtgaagctcctcgaaggagtaagagacaaaggacggctaagtcttttggtgatgatttcactgtgtacctcgtggatgacactcctaagtcaatttcagaagcatatgcatctcctgatgcagactactggaaggaggctgtccgtagtgaaatggattccattatcgctaacgggacttgggaggtgacagagcgaccctatgggtgtaaacctgtggggtgcaagtgggtgttcaagaagaagcttaggcctgacggtactattgaaaagtacaaggctcggcttgttgctaagggctatactcagaaagaaggcgaagatttctttgacacttactcacctgttgctagattgaccacaattcgtgtgctactttccctagcagcctcacatggtcttctcattcatcaaatggacgttaagacagcttttcttaatggagagctggatgaggagatctatatggatcaacctgatgggtttgtacttgaaggtcaagaaggcaaagtgtgcaaattgttgaagtctttgtatggtctgaaacaagctcctaagcaatggcatgagaaatttgacaaaacattgacatctgcaggctttgcagtcaatgaggcagataaatgtgtgtactatcgccatggtgggggtgagggagttattttgtgcttgtatgttgacgacatactgatatttgggacaaaccttgaggtgataaatgaggttaaatcattcttgtttcaaaattttgatatgaaagatttgggagtagctgatgttatcttaaacattaagctaattagaggtgagaatgggattacactcttgcagtcccattatgtggagaagatcttgaatcgctttggctacattgatagtaagccttctccaacaccttatgatcctagcttgttgcttcgcaagaacaagagaattgctaggaatcaactggaatactcccaaatcattggctcgttgatgtacctggctagtgcaactaggcctgatatctcctttgctgtgagcaagttgagccgatttacctctaatccgggagatgatcactggcgtgcgcttgagcgagtaatgcgctatctgaaaggtactgtagaattggggcttcactatactaggtatcctgcggtactggagggttatagtgattctaactggatctctgatgtggatgagatcaaagccactagtggatatgttttcacactgggtggtggtgctgtttcatggaggtcttgcaaacagacaattttgacgaggtcaaccatggaagcagagctaacggcactggatactgctactgttgaggcagaatggttgcgtgatctattaatggatctgcctgttgttgaaaaaccggtgccggctatccttatgaactgtgacaatcaaacgacatgtgaaaagacgattgaagtctgtcaggaaattaagaaactccggagttataacgttggattacatccaaacagcgagaaacctggcagatcccttcacgaagggactatcacgaaatgtgatacacaatgcatcgaaggagatgggtttgagacccatagcattcttgaaggaactcacctttgtgagcttgactgttggtcgcagtccatgaagattttgggtgaatcttctaggaagcttactaaagacctaggagtatga

SEQ ID NO: 23289 - DNA, 3332 bp, Oryza sativa
  Clone ID: TF_OsC1528_2265
gagcgcgggtgagcgggagagagggggaagtgggcgcgggtgcgagggcgacgtggacggcgtggcccgggaggcgcggacgcgaggcgcggcggcggttgcgggcgcggcggcgagcggctggagcgtgcaccggcgatcgggagagcaggtctccggaacctctgccttcgacgtcctgcaccaggagaaggcggcaataaggcactgtgattttactatggctggttttgccgatgcactgaggccggataaattcaccggtgtgcattttaagagatggcagattagggtcactctgtggctgacagctatgaaatgcttctgggtgagtactggcaaacctgaaggagttcttactgctgaacagcagaagcaattcgaggaagccactactctctttgtgggatgcattcttagcgttcttggcgatcgtctggtcgaggtgtatatgcatatgaccgatgctaaggagttgtgggatgcactgaatactaaattcggtgctactgatgctagcaatgatctgtatattatggagcagtttcatgactacaagatggctgacaaccgttctgtagtcgaacaggctcatgagatacaaaccatggctaaggaactcgaactccttaagtgtgtcttacccgacaaatttatggccgggtgcattattgcaaaactacctccatcttggaggagtttcggtactgcactcaaacacaagagacaggaatactccgttgaggggttgattgcgtctcttgatgttgaggagaaagctcgggaaaaagatgccgcgtctaagggcgatggtggacagtccagtgccaatgttgtgcacaaggcccagaacaagagcaaggggaaatacaaagctcagcagaccaccaacttcaagaagcagaagaagaacaacaacaatcctaatcaggatgagaggacttgctttgtgtgtggccaagttggtcatctggctaggaagtgtccacagcgcaaggggatgaaggcacctgcagggcagacttctaagtctgctaatgtgaccattggcaacactggagatggaagcgggtatggtaatttacctactgtcgcacggggttccaccgtcctaatggggaatgggtcacatgcttctgttcatgttgttggcacggtagatctgaagtttacttcgggaaagatcgtgcagctgaagaatgtgcagcatgtcccttctatcgacaggaatcttgttagtgactcccgtctgattagagacggatttaagttggtttttgagtctaataaagtagtcgtgtctaaacatggatattttattggtaaaggttatgagtgcggaggcctgtttcgcttttccctttctgatttctgcaataagtctgtgaaccatatttgtggcagtgtggatgatgaggctaatgtttggcattcacaagttgaaaatcaacttgacagaaagataaaaaggcttaggtctgatcgtggtggagagtttttctcgaacgagtttgacttattctttgaggaacatggcatcatacatgagaggacgcctccctattctcccgagtctaatgggattgctgaaaggaagaaccgcacactgactgacttggtgaatgccatgttggacaccgcgggactgcctaaggcatgtgaagctcctcgaaggagtaagagacaaaggacggctaagtcttttggtgatgatttcactgtgtacctcgtggatgacactcctaagtcaatttcagaagcatatgcatctcctgatgcagactactggaaggaggctgtccgtagtgaaatggattccattatcgctaacgggacttgggaggtgacggagcgaccctatgggtgtaaacctgtggggtgcaagtgggtgttcaagaagaagcttaggcctgacgcctcacatggtcttctcgttcatcaaatggacgttaagacagcttttcttaatggagagctggatgaggagatctatatggatcaacctgatgggtttgtagttgaaggctttgcagtcaatgaggcagataaatgtgtgtactatcgccatggtgggggtgagggagttattttgtgcttgtatgttgacgacatactgatatttgggacaaaccttgaggtgataaatgagtcccattatgtggagaagatcttgaatcgctttggctacattgatagtaagccttctccaacaccttatgatcctagcttgttgcttcgcaagaacaagagaattgctaggaatcaactggaatactcccaaatcattggctcgttgatgtacctggctagtgcaactaggcctgatatctcctttgctagcattcttgaaagaactcacctttgtgagcttgactgttggtcgcagtctatgaagattttggactactccatcccgctcgccggcgtgcaccagcgatcgggagagcaggtctccggaacctctgcctttgacgtcctgcaccgggagaaggcggcaataagaggatggaagcagcagcagcagcagcagcagatgccatggcaacgacgtgatctccgtccaattcatgcagaaggtacatccatggtgcatgtgcatgaacaaaaacctgctgattcttgcggaaattctggggacatatttcatgatattcgccgggtgcggcgccgtggtggtgaaccagagcaccggcggcgcggtgacgttcccggggatctgcgccgtgtgggggctcgtcgtcatggtgctagtctacactgtcagccacatctccggtgcccacttcaaccccgccgtcaccgtcgccttcgccacgtgcggacgcttccggtggaagcaggtgccatcgtacgtggtggcccaggtgctgggatccaccatggcaagcctgacgctgcgcgtggtgttcggcggcggcggcggcggcgcgcgcggggagcacttgttcttcgggacgacgccggcggggtcgatggcgcaggcggcggcgctggagttcgtcatctccttcttcctcatgttcgtcgtctccggcgtcgccacggacaacagagcaatcggtgaattggctgggctcgctgtcggtgcgacggtcgcggtgaacgtgctcttcgcagggccggtgacgggggcgtcgatgaacccggctcggagccttggtccggcgatggtggcggggaggtacggcggcgtgtgggtgtacgtggcggcgccggtgagcgggacggtgtgcggcgcgtgggcgtacaacctgctccgcttcaccgacaagccgctgcgtgacatcgccaacaccgcctccttcctcaggaggagctcgcgtaggagttag

SEQ ID NO: 23290 - DNA, 9993 bp, Oryza sativa
  Clone ID: TF_OsC1528_2274
atggagtacggattcaccgccaactacaaggtttggacctatcacggggaattcgccaatccggaagatgacgatgaagagttaagtttcgagatgaatgaggcagagaattttataatcgaagacatgtcgcgtgaaagaatggttgtcgatgtttccaccgatagtgatgatttcgatggtggttttgatttagaggatatgctacgccatgttgaaccagaggtgctagcgggcaggtcacgaggattggagaattggcaagcattagagaaggcatcgaaggatcttctttacgatgaaacgaagggatgtgataaggatttcacagtcttgcgttcagtgcttgaacttctgagattgaaggctaaacatggatggtcggacacaaagtgtaccgatccagattctgataagggtaagcgcgggaagattccttcaatggtgatgtggtacctaccaattaaggaccgcctgaagcgtctgtactcaaacccgactgatgctgagttgatgagatggcatcaagagagctggaaaatagatggtatgattcgacatcccgccgacgctcgccagtggaagacatttgatgcaaaacacccagaatttgctaaggatcctaggaatgtaaggtttgcgttgagcactgatggaatgaacccgtttgtggagaatgacactgccccagtagcaagaggtggtacatacgtgtatgagataacaaagaagattaaggttgtatatggaaagggaaagaagaagacagtaaagaggaagaaagctgatggtgacaacggtactgcgtcgcctttcaagaagcactcaattttctttaaatacttagattactggaaggacctagagattcgacatgcaattgatgttatgcacctcgagaagaacgtgtttgatagcaccgttggcacattgctggacatcccgagtccgcttcagacatttgccgtcgagactgtatgccagcttgagatgtatttcccaccatcatttttagatatgatggagcatttgatcgttcacatcgtccctcagattattgaacttggtccattatacttacatcagatgtgggcctatgagcgttacatgtcgatcctcaaaggctatgtacgcaatcgcgctcacccggaaggatcaatgatagagggatacacaactgaagaggcagtcgagtgttgtatggactacataaaggatgctaatgccattggaattcctgttcatcgacatgaaggtagattgtctagaaggggtactgttggtaggaagcagttcttcgataatgattacaaaaaggtgtccgcggcatacaacagcgttcttcaacagctcgctatcgttgagccattcattgagcgacacctagaagaaatcaaagcctgcttcccagggcggtccaatgattggatatcaagagagcacaagcgtcgctttcctctgtggttgaaagatctaaacctgccagttggtgattctgtggaggaacttactttacaaagattggcatgtgggccttcaagtattgtcaattcatggcaaggttacgacatcaatggatttaccttgagtacgactacgaaggacatgaaaagcaccacacaaaacagtgggatccgtgtcgaagcgattgacacgagtggagaaaagaggtcgtattatgggaccattcaagaaatatgggaactggactatggcctaaacatccagatccctgtgctccgttgtgaatgggttaaagacacaataggggtttccgttgatgactacgggctaacgatagtcgatcacagtaaaacaggccacaaggatgatccatgggttttagcagagcgtgtggctcaagtgttttatgtgaaggacccttcagatgaaagaaaaactattgtcatatccggaaagcaacagatcgtcggcatcgacaacatcgaagaccccaatgattacaaccagttcgacgatgtaccattgtttactgatcttcctatgcgaattaagaaggttgagagaacaatcgatgaagcaaatatgtcgtacgttcgagcagatggtgttgccaaggacctctcccccctcgccgttgccgtcgccgccgccaggacctctcccccctcgccgtcgccgtcgccgccgccaggtcgccgtcgccaccgcacggaactctcccccctcgccgttgccatcgccgccgccaggtcgtccccgccgccaagtcgtccccgctaccgccaggctcctccccgaagtcgccccgcccctcgccgtcgccgacgccactgccaggacctctcccccctcgccgtcgccgtcgccgccgccaggtcgccgtcgccgccgcacggacctctcccccctcgccgttgccatcgctgccgccaggtcgtcgccgccgccaggtcgtccccgccgtcgctcggcgggagtgggaaaaaaagacgtggtgagagaagcaagaataaattaaccaaggaaacttacaacgtgattgctctcgatcaggatgggaagcccatcgagccaccgatagtgcggtccaagttcagcaacgcctgtggcactctagtcaggacgcgttgtcccattaatgtcaagttgtgggaaacagtggacgacaacatcaagacacttctctggaatgagttgcagaagtattttgtgttccctcctggatcagaggtcagggggagagattacgcacttaaaaagatgggagatcgatggcgacagtggaagtccgatctaaatcgggattatgttcagaagaatctcccaccgtttacggattatggacatatatcgcaggctgactgggacacgtttgttgcggatcgtacaacagctgaagcattggctttgaggaaaaaaatgtccgagctcgcaaagaagaacaaatatccccatagattggggtcgagcggatacgctggtcacgtcgatcaatggcgggagatcgagcaaagatttgccgcggccggtaagcccctgctggtagaccccatggttgaacgtagcaagaactgggtttgggcgcgcagcacaggtcaagtctcggatgagggagacatactattcgagactccagacatagaagaagtgactactaatttgcagcagatagtcgagaaagaaagatcaggacagttcgtcccacggagggagagagatcagcttactgcggcgttggggacggctgaacactctggacgtgtaaggggtttgtcctcaaagacaagttggaaggtcgggtttccacaagacgcaccaagttataagaagagagacaaatacaaagaacaactatcggacaagatctatgcgcaagtgaaggaacacttctactcgttggcagctgaaaacccgacagcatttccaaggttattccctgatagccagcaacccacacaatccgcacagcaaacaactaatgtacccagcagtgtaggctcagtgcagacaagtaccttccctgtggatagtataactggaccaactccgtgcagtctcgtcgtaccaatcggccgcgctggaaagactaaggaggttgcaacgggtttagcgatacctggacgtcaattccacaacacggcaatccctgaggattacgcaagggtacaggtcgccaaggtccatagcgaccacgtttccttggaactagacatacctgcacctgaggggattgaacttctcggtgatgcagtgaatcagtttatcttgtggcaccgcagagacataatcctgagcgcggccgttcttgcagcaggatcttcaaccccatcctcatcgcaggcaatgactgctgccgctcctgcaccaccgtcgcctcctaaaccaccgtcacctcgacatccgccgtcaccaccaccgcttaggtcaccgcctcgccaacctacaccaccaccctccccttctcaacaaccgcctctcccgaccccgcaaccagttcaagcctctcccacctccccaactaaacagcatgctcccccggctccgccctcagttcaaacctctccacctacaccccaatctgctctggtagaagaagtgcacataccagatggtactacatccgaaccaaagtctaatactttggaacctcgtcgtataattccaaagttgatatcgacatacgacccaaaggagattgacaaggataaggagaagttcatgttttcagctttcaggaattctgagaagagaaaagaacttgctcacgtcttgtcagactcccagaagtcagtactagcggcccaagatgaagtgcaatcctggttatctgccgatgtgcctgaaacttatgagtatggcaagccattcttgccaacttatcttatgaacaagctaccatgggaaatgagggtaatgcacgaatggtatatgaaggcatctaggaaaggtctcggtttcataagcgtcgccgtcccggaaggcgctttcatgagtggtcctaatgggatattttttatctctttccaagacctttacgccctctacaagctagataaaatggacgttaatctcgttgcggctttctgtcttatgcaattccacgaagctgatagaactggagcaaaggttggatacgtcgatccaacaagaatatgcaaaacacaacacaccgtagagctgagacaggactgcgagcaattggttggcaagaccccggaagaaaaggaagaatatgtgaagacattgcacaagaggaagaagctagaagtagcaacatacttggcaatagcaatgttggcgcacgccgacaaagatgtcttaatggtcccctaccagttcacagaccactacatattattccttgtatatccgaaagaccaattgatcatatcattggaccccgcacactatgacaaggagacatttatggaattcctcactattttgaatttagcacacaagtactaccgcaaaagaggtggaccagtacatattccatcccagaagaagttatccgtcaggactggctggccgtgctacaaacaaccaccaggaaccaacttgtgtggttattacgtgtgcgagatgctcagagtaaatgggaggtacaaaacaaccagtaaccgaatccccgaaatcccatatattgcacaacgattcaaccacactactatcttgaacgtggccgctgacctctgccgattcatccgtcgcgatgtctgcaacgcaagaggtgtcacgcctgagtcagcaagctttgccgatactggatatgaccccccgccaaaaaaatggaaagggatttgccaggttggcccatcgtttgaggccataagttgcaaccggaagtttatcggtgcacggtggtacatcgatgacgagattctaagtagcatatccgataacgaggttctttctcctagggatgtcgaaggccacggcacgcacacagcctcaacggctggcggcaacatcatccacaatgttagctttctggggctagctgcagggacagttcggggtggagcgccccgtgcacgattagccatatacaaggcctgttggtccggttatggctgctccggtgccaccgtgttgaaagccatggacgacgctgtctatgatggtgttgatgtcttatcactttctataggtggtacaaaagaagatgtgggaaccctacatgtcgtcgctaatggtatctcggttgtctacgctggtggaaacgatggtcccattgctcagacggtggagaaccaatcaccatggctagtaacggtcgctgcaaccaccattgatcggtccttgcctgtggttatcaccttgggaaacggcgaaaagttggtggcgcaatcctttgtcctcctggaaactgcaagtcagttcagtgagatacagaagtacacagacgaggaatgcaatgccaacaatattatgaacagcacggtgaaggggaaaatagccttctgcttcatgggagagatgttgaataataagcagcagacatcataccctgatgtcaccacggcagtggcagccaaaggaggcagagcaccggacattgctgcaccaggggtttcgattttagccgctgctcagattccatattacaaaggtgtttcctaccatttcgattctggaacatctatggcttgcccccatgtagctgggatcattgcggtgctcaagtccattcatccaaaatggtcacctgcggctctcaaatccgcaatcatgacaacagactactccatcccgctcgctggcgtgcaccagcgatcgggagagcaggtctccggaacctctgcctttgacgtcctgcaccgggagaaggcggcaataaggcactgtgattttactatggctgattttgccgatgcactgaggccggataaattcaccggtgtgcattttaagagatggcagatcagggtcactctgtggctgacagctatgaaatgcttctgggtgagtactggcaaacctgaaggagttcttactgctgaacagcagaagcaattcgaggaagccactactctatttgtgggatgcattcttagcgttcttggcgatcgtctggtcgaggtgtatatgcatatgaccgatgctaaggagttgtgggatgcactgaatactaaattcggtgctactgatgctagcaatgatctgtatatcatggagcagtttcatgactacaagatggctgacaaccgttctgtagtcgaacaggctcatgagatacaaaccatggctaaaagtttcggtactgcactcaaacacaagagacaggaatactccgttgaggggttgatagcgtctcttgatgttgaggagaaagctcgggaaaaagatgccgcgtctaagggcgatggtgggcagtccagcgccaatgttgtgcacaaggcccagaacaagagtaaggggaaatacaaagctcagcagaccaccaacttcaagaagcagaagaagaacaacaacaatcctaatcaggatgagaggacttgctttgtgtgtggccaagttggtcatctggctaggaagtgtccacagcgcaaggggatgaaggcacctgcagggcagacttctaagtctgctaatgtgaccattggcaacactggagatggaagcgggtatggtaatttacctactgttttttcagttaatcaatctactaattggtgggttgatactggggccaatgtcgcacggggttccaccgtcctaatggggaatgggtcacatgcttctgttcatggtgttggcacggtagatctgaagtttacttcgggaaagatcgtgcagctgaagaacgtgcagcatgtcccttctatcgacaggaatcttgttagtggctcccgtctgactagagacggatttaagttggtttttgagtctaataaagtagtcgtgtctaaacatggatattttattggtaaaggttatgagtgcggaggcctgttccgcttttccctttctgatttctgcaataagtctgtgaaccatatttgtggcagtgtggatgatgaggctaatgtttggcattcacgtttatgtcatattaattttggcttgatgtctcggctttccagcatgtgtttaattcctaagttttccattgtcaaaggttctaagtgccatagttgtgtgcaatcgaagcaacctcgcaagcctcacaaggctgccgaggagagaaacttggcaccactagaactcctacattcagatctttgtgaaatgaatggggtgttgacgaagggtggaaaacgatatttcatgacattcattgatgatgctactagattttgctatgtgtacttgttgaaaaagaaagacgaggctctagactattttaaaatttataaggcagaagttgaaaatcaacttgacagaaagataaaaaggcttaggtctgatcgtggtggagagtttttctcgaacgagtttgacttattctgtgaggaacatggcatcatacatgagaggacgcctccctattctcccgagtctaatgggattgctgaaaggaagaactgcacactgactgacttggtgaatgccatgttggacaccgcgggactgcctaaggcatggtggggggaggtattgttgacctcaaatcatgtgttaaacagagttcctaacagaaataaggacaaaacaccatatgagatatggattggtagaaaaccatcactttcttatttgcgcacatgggggtgcttggcgaaagtcaatgtaccaataacgaagaagcgcaaacttggacctaagactgtggactgtgtctttctgggatatgctcatcatagcattgcctatagatttttaatagttaaatccgaggtactggacatgcatgttggtataattatggagtctcgtgatgctaccttctttgagagctttttcccaatgaaggatacacatagtggttcgaaccaaccctctgaaataattcccagttcaatcataccaccagaacaaactgaacatacacatgaacttgtctctgaggaggatgtcagtgaagctcctcgaaggagtaagagacaaaggacggctaagtcttttggtgatgattttactgtgtacctcgtggatgacactcctaagtcaatttcagaagcatatgcatctcctgatgcagactactggaaggaggctgtccgtagtgaaatggattccattatcgctaacgggacttgggaggtgacagagcaaccctatgggtgtaaacctgtggggtgcaagtgggtgttcaagaagaagcttaggcctgacggtactattgaaaagtacaaggctcggcttgttgctaagggctatactcagaaagaaggcgaagatttctttgacacttactcacctgttgctagattgaccacaattcgtgtgctactttccctagcagcctcacatggtcttctcgttcatcaaatggacgttaagacagcttttcttaatggagagctggatgaggagatctatatggatcaacctgatgggtttgtagttgaaggctttggagtcaattatgcgtatccatgtgtgtattatcgccatggtgggggtcagggagttattttgtgcttgtatgttgacgacatactgatatttgggacaaaccttgaggtgataaatgaggttaaatcattcttgtctcaaaattttgatatgaaagatttgggagtagctgatgttatcttaaacattaagctaattagaggtgagaatgggattacactcttgcagtcccattatgtggaaaagatcttgaatcgctttggctacattgatagtaagccttttccaacaccttatgatcctagcttgttgcttcgcaagaacaagagaattgctaggaatcaactggaatactcccaaatcattggctcgttgatgtacctggctagtgcaactaggcctgatatctcctttgctgtgagcaagttgagccgatttacctctaatccgggagatgatcactggcgtgcgcttgagcgagtaatgcgctatctgaaaggtactgtggaattggggcttcactatactgggtatcctgcggtactggagggttatagtgattctaactggatctctgatgtggatgagatcaaagccactagtggatatgttttcacactgggtggtggtgctgtttcatggaggtcttgcaaacagacaattttgacgaggtcaaccatggaagcagagctaacggcactggatactgctactgttgaggcagaatggctgcgtgatctattaatggatctgcctgttgttgaaaaaccggtgccggctatccttatgaactgtgacaatcaaacgacatgtgaaaagacgattgaagtctgtcaggaaattaagaaactccggagttataacgttggattacatccaaacagcgagaaacctggcagatcccttcacgaagggactatcacgaaatgtgatagacaatgcatcgaaggagatgggtttgagacccatgtgagttatactatggtggtaacccagtctatgtga

SEQ ID NO: 23291 - DNA, 3969 bp, Oryza sativa
  Clone ID: TF_OsC1528_2320
atggggggatccggccgattcggccggatgcagccgcccgagcgctcgggcgagcaggggcgaacgacatgtgggtcgcgtcacccctctcaccacgaggcgagctcggcggccaggcaaggcgacgccatggaggcgagctcgacggcggcggctagggtgacgcgagctcggcggctagggcaagccggcgacgagagaggagacgagctcggcgacgggagaggagacgagctcggcgacgagaaaggagatgagccggcgacgaccggatctgggagggcaccggcgagagcgagcgacggcggccggggagagaggatacgaggtggcgagggcggcccggaggggaatattccccctagatgccggatggggggatccggccgattcggccggatgcagccgcccgagcgctcgggcgagcaggggcgaacgacatgtgggtcgcgtcacccctctcaccacgaggcgagctcggcggccaggcaaggcgacgccatggaggcgagctcgacggcggcggctagggtgacgcgagctcggcggctagggcaagccggcgacgagagaggagacgagctcggcgacgggagaggagacgagctcggcgacgagaaaggagatgagccggcgacgaccggatctgggagggcaccggcgagagcgagcgacggcggccggggagagaggatacgaggtggcgagtctacctcgtacgcggtacgtcgggtcgccggcagccactactccatcccgctcgccggcgtgcaccggcgatcgggagagcaggtctccggaacctctgccttcgacgtcctgcaccgggagaaggcggcaataagggtcactctgtggctgacagctatgaaatgcttctgggtgagtactggcaaacctgaaggagttcttactgctgaacagcagaagcaattcgaggaagccactactctctttgtgggatgcattcttagcgttcttggcgatcgtctggtcgaggtgtatatgcatatgaccgacgctaaggagttgtgggatgcactgaatactaaattcggtgctactgatgctagcaatgatctgtatatcatggagcagtttcatgactacaaaatggctgacaaccgttctgtagtcgaacaggctcatgagatacaaaccatggctaaggaactcgaactccttaagtgtgtcttacccgacaaatttgtggccgggtgcattattgcaaaactacctccatcttggagaagtttcggtactgcactcaaacacaagagacaggaatactccgttgaggggttgatagcgtctcttgatgttgaggagaaagctcgggaaaaagatgccgcgtctaagggcgatggtgggcagtccagtgccaatgttgtgcacaaggcccagaacaagagcaaggggaaatacaaagctcagcagaccaccaacttcaagaagcagaagaagaacaacaacaatcctaatcaggatgagaggacttgctttgtgtgtggccaagttggtcatctggctaggaagtgtccacagcgcaaggggatgaaggcacctgcagggcagacttctaagtctgctaatgtgaccattggcaacactggagatggaagcgggtatggtaatttacctactgttttctcagttaatcaatctactaattggtgggttgatactggggccaatgtacatgtttgtgctgacatctcattgttttcttcttatcaggtcgcacggggttccaccgtcctaatggggaatgggtcacatgcttctgttcatggtgttggcatggtagatctgaagtttacttcgggaaagatcgtgcagctgaagaacgtgcagcatgtcccttctatcgacaggaatcttgttagtggctcccgtctgactagagacggatttaagttggtttttgagtctaataaagtagtcgtgtctaaacatggatattttattggtaaaggttatgagtgcggaggcctgttccgcttttccctttctgatttctgcaataagtctgtgaaccatatttgtggcaaagttgaaaatcaacttgacagaaagataaaaaggcttaggtctgatcgtggtggagagtttttctcgaacgagtttgacttattctgtgaggaacatggcatcatacatgagaggacgcctccctattctcccgagtctaatgggattgctgaaaggaagaatcgcacactgactgacttggtgaatgccatgttggacaccgcgggactgcctaaggcatgtgaagctcctcgaaggagtaagagacaaaggacggctaagtcttttggtgatgatttcactgtgtacctcgtggatgacactcctaagtcaatttcagaagcatatgcatctcctgatgcagactactggaaggaggctgtccgtagtgaaatggattccattatcgctaacgggacttgggaggtgacagagcgaccctatgggtgtaaacctgtggggtgcaagtgggtgttcaagaagaagcttaggcctgacggtactattgaaaagtacaaggctcggcttgttgctaagggctatactcagaaagaaggcgaagatttctttgacacttactcacctgttgctagattgaccacaattcgtgtgctactttccctagcagcctcacatggtcttctcgttcatcaaatggacgttaagacagcttttcttaatagagagctggatgaggagatctatatggatcaacctgatgggtttgtagttgaaggtcaagaaggcaaagtgtgcaaattgttgaagtctttgtatggtctgaaacaagctcctaagcaatgtcatgagaaatttgacaaaacattgacatctgcaggctttgcagtcaatgaggcagataaatgtgtgtactatcgccatggtggggatgagggagttattttgtgcttgtatgttgacgacatactgatatttgggacaaaccttgaggtgataaatgaggctaaatcattcttgtctcaaaattttgatatgaaagatttgggagtagctgatgttatcttaaacattaagctaattagaggtgagaatgggattacactcttgcagtcccattatgtggagaagatcttgaatcgctttggctacattgatagtaagccttctccaacaccttatgatcctagcttgttgcttcgcaagaacaagagaattgctaggaatcaactggaatactcccaaatcattggctcgttgatgtacctggctagtgcaactaggcctgatatctcctttgctgtgagcaagttgagccgatttacctctaatccgggagatgatcactggcgtgcgcttgagcgagtaatgcgctatctgaaaggtactgtggaattggggcttcactatactgggtatcctgcggtactggagggttatagtgattctaactggatctctgatgtggatgagatcaaagccactagtggatatgttttcacactgggtggtggtgctgtttcatggaggtcttgcaaacagacaattttgacgaggtcaatcatggaagcagagctaacggcactggatactgctactgttgaggcagaatggctgcgtgatctattaatggatctgcctgttgttgaaaaaccggtgccggctatccttatgaactgtgacaatcaaacgacatgtgaaaagacgattgaagtctgtcaggaaattaagaaactccggagttataacgttggattacatccaaacagcgagaaacctggcagatcccttcacgaagggactatcacgaaatgtgatagacaatgcatcgaaggagatgggtttgagacccatattaaatcattatatgtctataatctcaacaggtcatcgcttgttactcttagaagttgccgcctactagacggcttggaggagttgcctagtgacctctctgagaagattgtggagaaggcctag

SEQ ID NO: 23292 - DNA, 4311 bp, Oryza sativa
  Clone ID: TF_OsC1528_2345
atgtgtatgaaacaagtgtatgtacattcgagtgacaaaaaccacatcctaatgcaacgatgtgaacatccaagggcagtataaaaggaggtgcagctgcgaggcattgacctgcactcccttcctcctagctcgaagtgagcaatcactcttgtgaaacttttgcagacgccagccatggcgatcaggggcatcccgtcctctcgcgagatgaccgtggacgacttcaagaactggctgaagcagttcgacaccgacaacgacggccggataagccggggcgagctccgggaggccatccgccgccgcggcggctggttctccggcctgaaagccggccgcgccgtccgccacgccgacagggacaacagcggcttcgtggacgagtccgagatcgagaacctcgtcgccttcgcccagaaaactctgggcatgaaggttactgcctggcactgtgattttactatggctgattttgccgatgcactgaggccggataaattcaccggtgtgcattttaagagatggcagatcagggtcactctgtggctgacagctatgaaatgcttctgggtgagtactggcaaacctgaaggagttcttactgctgaacagcagaagcaattcgaggaagccactactctctttgtgggatgcattcttagcgttcttggcgatcgtctggtcgaggtgtatatgcatatgaccgacgctaaggagttgtgggatgcactgaatactaaattcggtgctactgatgctagcaatgatctgtatatcatggagcagtttcatgactacaaaatggctgacaaccgttctgtagtcgaacaggctcatgagatacaaaccatggctaaggaactcgaactccttaagtgtgtcttacccgacaaatttgtggccaggtgcattattgcaaaactacctccatcttggaggagtttcggtactgcactcaaacacaagagacaggaatactccgttgaggggttgattgcgtctcttgatgttgaggagaaagctcgggaaaaagatgccgcgtctaagggcgatggtgggcagtccagtgccaatgttgtgcacaaggcccagaacaagagcaaggggaaatacaaagctcagcagaccaccaacttcaagaagcagaagaagaacaacaacaatcctaatcaggatgagaggacttgctttgtgtgtggccaagttggtcatctggctaggaagtgtccacaacgcaaggggatgaaggcacctgcagggcagacttctaagtctgctaatgtgaccattggcaacactggagatggaagcgggtatggtaatttacctactgttttttcagttaatcaatctactaattggtgggttgatactggggccaatgtcgcacggggttccaccgtcctaatggggaatgggtcacatgcttctgttcatggtgttggcacggtagatctgaagtttacttcgggaaagatcgtgcagctgaagaacgtgcagcatgtcccttctatcgacaggaatcttgttagtggctcccgtctgactagagacggatttaagttggtttttgagtctaataaagtagtcgtgtctaaacatggatattttattggtaaaggttatgagtgcggaggcctgttccgcttttccctttctgatttctgcaataagtctgtgaaccatatttgtggcagtgtggatgatgaggctaatgtttggcattcacgtttatgtcatattaattttggcttgatgtctcggctttccagcatgtgtttaattcctaagttttccattgtcaaaggttctaagtgccatagttgtgtgcaatcgaagcaacctcgcaagcctcacaaggctgccgaggagagaaacttggcaccactagaactcctacattcagatctttgtgaaatgaatggggtgttgacgaagggtggaaaacgatatttcatgacattgattgatgatgctactagattttgctatgtgtacttgttgaaaacgaaagacgaggctctagactattttaaaatttataaggcagaggttgaaaatcaacttgacagaaagataaaaaggcttaggtctgatcgtggtggagagtttttctcgaacgagtttgacttattctgtgaggaacatggcatcatacatgagaggacgcctccctattctcccgagtctaatgggattgctgaaaggaagaaccgcacactgactgacttggtgaatgccatgttggacaccgcgggactgcctaaggcatggtggggggaggcattgttgacctcaaatcatgtgttaaacagagttcctaacagaaataaggacaaaacaccatatgagatatggattggtagaaaaccatcactttcttatttgcgcacatgggggtgcttggcgaaagtcaatgtaccaataacgaagaagcgcaaacttggacctaagactgtggactgtgtttttctgggatatgctcatcatagcattgcctatagatttttaatagttaaatccgaggatacacatagtggttcgaaccaaccctctgaaataattcccagttcaatcacaccaccagaacaaactgaacatacacatgaacttgtctctgaggaggatgtcagtgaagctcctcgaaggagtaagagacaaaggacggctaagtcttttggtgatgatttcactgtgtacctcgtggatgacactcctaagtcaatttcagaagcatatgcatctcctgatgcagactactggaaggaggttgtccgtagtgaaatggattccattatcgctaacgggacttgggaggtgacagagcgaccctatgggtgtaaacctgtggggtgcaagtgggtgttcaagaagaagcttaggcctgacggtactattgaaaagtacaaggctcggcttgttgctaagggctatactcagaaagaaggcgaagatttctttgacacttactcacctgttgctagattgaccacaattcgtgtgctactttccctagcagcctcacatggtcttctcgttcatcaaatggacgttaagacagcttttcttaatggagagctggatgaggagatctatatggatcaacctgatgggtttgtacttgaaggtcaagaaggcaaagtgtgcaaattgttgaagtctttgtatggtctgaaacaagctcctaagcaatggcatgagaaatttgacaaaacattgacatctgcaggctttgcagtcaatgaggcagataaatgtgtgtactatcgccatggtgggggtgagggagttattttgtgcttgtatgttgacgacatactgatatttgggacaaaccttgaggtgataaatgaggttaaatcattcttgtctcaaaattttgatatgaaagatttgggagtagctgatgttattttaaacattaagctaattagaggtgagaatgggattacactcttgcagtctcattatgtggagaagatcttgaatcgctttggctacattgatagtaagccttctccaacaccttatgatcctagcttgtcgcttcgcaagaacaagagaattgctaggaatcaactggaatactcccaaatcattggctcgttgatgtacctggctagtgcaactaggcctgatatctcctttgctgtgagcaagttgagccgatttacctctaatccgggagatgatcactggcgtgcgcttgagcgagtaatgcgctatctgaaaggtactgtggaattggggcttcactatactgggtatcctgcggtactggagggttatagtgattctaactggatctctgatgtggatgagatcaaagccactagtggatatgttttcacactgggtggtggtgctgtttcatggaggtcttgcaaacagacaattttgacgaggtcaaccatggaagcagagctaacggcactggatactgctactgttgaggcagaatggttgcgtgatctattaatggatctgcctgttgttgaaaaaccggtgccggctatccttatgaactgtgacaatcaaacgacatgtgaaaagacgattgaagtctgtcaggaaattaagaaactccggagttataacgttggattacatccaaacagcgagaaacctggcagatcccttcacgaagggactatcacgaaatgtgatagacaatgcatcgaaggagatgggtttgagacccatagcattcttgaaggaactcacctttgtgagcttgactgttggtcgcagtccatgaagattttgggtgaatcttctaggaagcttactaaagacctaggagtatga

SEQ ID NO: 23293 - DNA, 6770 bp, Oryza sativa
  Clone ID: TF_OsC1528_2357
atggcggattcgacggcgaggacggtgaaggacgtgaaccctcatgagttcgtcaaggcctactccgcccacctcaagcgctccggcaagatggagctccctgagtgggttgacatcgtgaagactgcgaggttcaaggagctccctccttatgatccggactggtactacacgagggctgcctcgattgcaaggaagatctacctgaggcagggtattggtgtaggtggcttccagaagatctatggtggccgccagaggaacggctcacgccccccgcacttctgcaagagcagcggcgctatctcacgcaacatccttcagcagctgcagaagatgggcatcattgatgtcgacccgaagggtggaagactcatcacctcccagggaaggcgtgatctggaccaagtggccggaagagttgatgaatcaatcagagacaggaaagttgaagcaactggccagcaatcccagacgttagattcaacttggacggccaagatgcaccctaacgccctaccatctaatgatgcgttcatgctagttttcatctgtaatgtcatgatttatttatggaataaattaaatcattatatgcccataatctcaacaatccaaaaaccttattataggcactgtgattttactatggctggttttgccgatgcactgaggccggataaattcaccggtgtgcattttaagagatggcagatcagggtcactctgtggctgacagctatgaaatgcttctgggtgagtactggcaaacctgaaggagttcttactgctgaacagcagaagcaattcgaggaagccactactctctttgtgggatgcattcttagcgttcttggcgatcgtctggtcgaggtgtatatgcatatgaccgacgctaaggagttgtgggatgcactgaatactaaattcggtgctactgatgctagcaatgatctgtatatcatggagcagtttcatgactacaaaatggctgacaaccgttctgtagtcgaacaggctcatgagatacaaaccatggctaaggaactcgaactccttaagtgtgtcttacccgacaaatttgtggccgggtgcattattgcaaaactacctccatcttggaggagtttcggtactgcactcaaacacaagagacaggaatactccgttgaggggttgattgcgtctcttgatgttgaggagaaagctcgggaaaaagatgccgcgtctaagggcgatggtgggcagtccagtgccaatgttgtgcacaaggcccagaacaagagcaaggggaaatacaaagctcagcagaccaccaacttcaagaagcagaagaagaacaacaacaatcctaatcaggatgagaggacttgctttgtgtgtggccaagttggtcatctggctaggaagtgtccacaacgcaaggggatgaaggcacctgcagggcagacttctaagtctgctaatgtgaccattggcaacactggagatggaagcgggtatggtaatttacctactgttttttcagttaatcaatctactaattggtgggttgatactggggccaatgtacatgtttgtgctgacatctcattgttttcttcttatcaggtcgcacggggttccaccgtcctaatggggaatgggtcacatgcttctgttcatggtgttggcacggtagatctgaagtttacttcgggaaagatcgtgcagctgaagaacgtgcagcatgtcccttctatcgacaggaatcttgttagtggctcccgtctgactagagacggatttaagttggtttttgagtctaataaagtagtcgtgtctaaacatggatattttattggtaaaggttatgagtgcggaggcctgttccgcttttccctttctgatttctgcaataagtctgtgaaccatatttgtggcagtgtggatgatgaggctaatgtttggcattcacgtttatgtcatattaattttggcttgatgtctcggctttccagcatgtgtttaattcctaagttttccattgtcaaaggttctaagtgccatagttgtgtgcaatcgaagcaacctcgcaagcctcacaaggctgccgaggagagaaacttggcaccactagaactcctacattcagatctttgtgaaatgaatggggtgttgacgaagggtggaaaacgatatttcatgacattgattgatgatgctactagattttgctatgtgtacttgttgaaaacgaaagacgaggctctagactattttaaaatttataaggcagaagttgaaaatcaacttgacagaaagataaaaaggcttaggtctgatcgtggtggagagtttttctcgaacgagtttgacttattctgtgaggaacatggcatcatacatgagaggacgcctccctattctcccgagtctaatgggattgctgaaaggaagaaccgcacactgactgacttggtgaatgccatgttggacaccgcgggactgcctaaggcatggtggggggaggcattgttgacctcaaatcatgtgttaaacagagttcctaacagaaataaggacaaaacaccatatgagatatggattggtagaaaaccatcactttcttatttgcgcacatgggggtgcttggcgaaagtcaatgtaccaataacgaagaagcgcaaacttggacctaagactgtggactgtgtttttctgggatatgctcatcatagcattgcctatagatttttaatagttaaatccgaggtaccggacatgcatgttggtacaattatggagtctcgtgatgctaccttctttgagagctttttcccaatgaaggatacacatagtggttcgaaccaaccctctgaaataattcccagttcaatcacaccaccagaacaaactgaacatacacatgaacttgtctctgaggaggatgtcagtgaagctcctcgaaggagtaagagacaaaggacggctaagtcttttggtgatgatttcactgtgtacctcgtggatgacactcctaagtcaatttcagaagcatatgcatctcctgatgcagactactggaaggaggctgtccgtagtgaaatggattccattatcgctaacgggacttgggaggtgacagagcgaccctatgggtgtaaacctgtggggtgcaagtgggtgttcaagaagaagcttaggcctgacggtactattgaaaagtacaaggctcggcttgttgctaagggctatactcagaaagaaggcgaagatttctttgacacttactcacctgttgctagattgaccacaattcgtgtgctactttccctagcagcctcacatggtcttctcgttcatcaaatggacgttaagacagcttttcttaatggagagctggatgaggagatctatatggatcaacctgatgggtttgtagttgaaggtcaagaaggcaaagtgtgcaaattgttgaagtctttgtatggtctgaaacaagctcctaagcaatggcatgagaaatttgacaaaacattgacatctgcaggctttgcagtcaatgaggcagataaatgtgtgtactatcgccatggtgggggtgagggagttattttgtgcttgtatgttgacgacatactgatatttgggacaaaccttgaggtgataaatgaggttaaatcattcttgtctcaaaattttgatatgaaagatttgggagtagctgatgttatcttaaacattaagctaattagaggtgagaatgggattacactcttgcagtcccattatgtggagaagatcttgaatcgctttggctacattgatagtaagccttctccaacaccttatgatcctagcttgttgcttcgcaagaacaagagaattgctaggaatcaactggaatactcccaaatcattggctcgttgatgtacctggctagtgcaactaggcctgatatctcctttgctgtgagcaagttgagccgatttacttctaatccgggagatgatcactggcgtgcgcttgagcgagtaatgcgctatctgaaaggtactgtggaattggggcttcactatactgggtatcctgcggtactggagggttatagtgattctaactggatctctgatgtggatgagatcaaagccactagtggatatgttttcacactgggtggtggtgctgtttcatggaggtcttgcaaacagacaattttgacgaggtcaaccatggaagcagagctaacggcactggatactgctactgttgaggcagaatggctgcgtgatctattaatggatctgcctgttgttgaaaaaccggtgccggctatccttatgaactgtgacaatcaaacggtaattgtcaaagtgaatagttctaaggataatatgaaatcgtctagacatgtgaaaagacgattgaagtctgtcaggaaattaagaaactccggagttataacgttggattacatccaaacagcgagaaacctggcagatcccttcacgaagggactatcacgaaatgtgatagacaatgcatcgaaggagatgggtttgagacccatatctaatgatgcgttcatgctagttttcatctgtaatgtcatgacttatttatggaataaattaaatcattatatgcccataatctcaacagttctttcacatgacaaaacttgtggttatcaaagctctggacatctacagaagaacaaggaatctggcgatactgaaacagatccattgatgcctatccctgctgatatcgatttgccaatcttggaaaatatgccgaaaactaagaggggtggtgatgatctcgctagaagcttgcataagaacagaaaaacttgcaatggtggaagaactgactcattggcctcaggttgcttgcatggggaccctaatgaggatgtctggactgagctcaatgatgtggttaaatctaatttgtctaaaagtgtcgcgtcgcttagtttgcgcaatggtgtagctgtagaccgccaggggcgtcttacaaagttcctcacttctgcaagtttggtagagcttttggttagagctctcaatgatacaaacaaaaaccatggtgacttagagctcgaagtgtaccatgaaggcaatgaagtatgccagggttatttgactgattttgatttggatcacaatctggccatcgtcgaaatctggactgactttgatgttcatgttggacttctccaacatgcggtggaatttctgccccattgtaaggtaatagctatagggcgtgaaatcactggcaaactgatggccaggagggtgcagttaatggatgatttaagtgtatctgaagatagtgaagatcttgactgtaaaatcaaagaggcttgggaaggtgcaccacttttttcttttgatgggaactttgttggcatgaacctttttttggctatgggaagagcctttttcctgccatggggcactattcagaagcattgggcatccctgcaaaacaagacgggacttccagagtcaaacagtttgaaggtttataggtttggaacaagttccacagctgagaaatctaacagccatccagaagtaaacaacgatattctcgacccggagcagattcatatagactctatgggctatccaaagtttccaacacacatgtttgctgctttctgcaccactaacaactacgctataatgtatctatcaccagatgggatgattttggttaatactttcgaagagactttcggcgatctacgtggtgaaggtgtatggagtaaactcagtaaaaaatcttgttctaacatagaccgcagtgttgtcgcactagcttcattcagtggagagagaaggttttttgcatgcacaggcttttttgttgaatggaatggttctacagttattttgacatcagcaagcttggttagaagttctggcgatgagaacaagattgttgacaacttgaggattgaagtgttgcttccaaacaaacaacgcgtagaagggatgttacagcattgtaatcttcattacaatgttgctctagtcagtgtgggttaccgtgctcttcgcccagcacatggtcagcttgattggtggggcaagagtagtaaggtagtggctgtagggcgttgcttcaagtcaggtgcattgatggctgcaagtggaacggtaaccccctggacaggcacactcgattgcgacttcctcgaacgttcgtcatgtaaaatcacaaaggctgggattggaggccctgttgttactcttgatggggattgtattggtatgaacttctatgatacgagaataggaacccctttcctgtcgtgggaggtgattgttgatattgtagcatcctttgaggaaaaaaggtggccagtgcctatgccatattgatgccacccggactgtgtgtaggatgagtctgaagatgatgaagagttggggttttcatccacatttggctgcaagctgaagtacaattacataaatggagagaaaagcgtgttcttttagttgctgttagatgtagaagaaacctaacctgaacttgttgtcaatctcactatatcctaaagcctgaacttttatataggaaaaacaagtgaagccagaacttgttgtcaatctcactatatcctaaagcctgaacttttatgtaggaaaaaaaaaagttaagccagaacttgttgtcaatctcactatttacctgaacaacctttgtttgtaggcaacaatcagaaaaattccaagcaaaaagtatctctttgacaaggttcccc

SEQ ID NO: 23294 - DNA, 5703 bp, Oryza sativa
  Clone ID: TF_OsC1528_2368
atgcgcctcctcgttctcatgtgtctggtcatcgcggccgccatgcagatgcaggctgcatcaggagcgcctcccacggccgccaagcttgctcactgcctcaaatcctgcgggggcgccaacatctcctatccttacggcgttggggccggctgtttccgccccggcttcgagctcacttgcgaccattccaccaaacccccaaagctcctcttattgggtgttgccaccaacactaacaccaccaccaccaagatcgtggatcaatatagagatgggtatgttcaagcctatgtttctttcaacatagccaccacaccgggtgtgctcggcacctacaacaggacatgggagtccccagggagaatccttagcatcgggccggattattatgctttggtggctgtcggttgcggaattgaggtctacttggtcgaccctgatacggaagatatgctgggctattgcttcagcatgtgtactgacatggcgatgatgcacaaggaagcagaggggaaagcttgcagtggcatgggctgctgcgtcgtcaccttccggagacctgtccgggctttcagagtttccatcactcagagagaagcaacgcagcctttccaagttgctaatgctagtactatcaaggttttcttatcagaagagagtacgacctaccattacaattttacaataggagatctcctctccgatgagataaatgaaaccactgttgcatctacttcggcgtacctatcaacctttatcgcagaccaaccaaactgtacaatagcgcagaaggatcctgagcggtatgcttgtggtgataacaaatgtttggatgcggatgacgaaaatggaggctaccgttgtgcatgcatcaaatatactaatagcaatccctacctcgacggtgactgcgaccaagactactccatcccgctcgccggcgtgcaccagcgatcgggagagcaggtctccggaacctctgcctttgacgtcctgcaccgggagaaggcggcaataagatctaatgatgcgttcatgctagttttcatctgtaatgtcatgacttatttatggaataaattaaatcattatatgcccataatctcaacaatccaaaaaccttattataggcactgtgattttactatggctggttttgccgatgcactgaggccggataaattcaccggtgtgcattttaagagatggcagatcagggtcactctgtggctgacagctatgaaatgcttctgggtgagtactggcaaacctgaaggagttcttactgctgaacagcagaagcaattcgaggaagccactactctctttgtgggatgcattcttagcgttcttggcgatcgtctggtcgaggtgtatatgcatatgaccgacgctaaggagttgtgggatgcactgaatactaaattcggtgctactgatgctagcaatgatctgtatatcatggagcagtttcatgactacaaaatggctgacaaccgttctgtagtcgaacaggctcatgagatacaaaccatggctaaggaactcgaactccttaagtgtgtcttacccgacaaatttgtggccgggtgcattattgcaaaactacctccatcttggaggagtttcggtactgcactcaaacacaagagacaggaatactccgttgaggggttgattgcgtctcttgatgttgaggagaaagctcgggaaaaagatgccgcgtctaagggcgatggtgggcagtccagtgccaatgttgtgcacaaggcccagaacaagagcaaggggaaatacaaagctcagcagaccaccaacttcaagaagcagaagaagaacaacaacaatcctaatcaggatgagaggacttgctttgtgtgtggccaagttggtcatctggctaggaagtgtccacaacgcaaggggatgaaggcacctgcagggcagacttctaagtctgctaatgtgaccattggcaacactggagatggaagcgggtatggtaatttacctactgttttttcagttaatcaatctactaattggtgggttgatactggggccaatgtacatgtttgtgctgacatctcattgttttcttcttatcaggtcgcacggggttccaccgtcctaatggggaatgggtcacatgcttctgttcatggtgttggcacggtagatctgaagtttacttcggaaaagatcgtgcagctgaagaacgtgcagcatgtcccttctatcgacaggaatcttgttagtggctcccgtctgactagagacggatttaagttggtttttgagtctaataaagtagtcgtgtctaaacatggatattttattggtaaaggttatgagtgcggaggcctgttccgcttttccctttctgatttctgcaataagtctgtgaaccatatttgtggcagtgtggatgatgaggctaatgtttggcattcacgtttatgtcatattaattttggcttgatgtctcggctttccagcatgtgtttaattcctaagttttccattgtcaaaggttctaagtgccatagttgtgtgcaatcgaagcaacctcgcaagcctcacaaggctgccgaggagagaaacttggcaccactagaactcctacattcagatctttgtgaaatgaatggggtgttgacgaagggtggaaaacgatatttcatgacattgattgatgatgctactagattttgctatgtgtacttgttgaaaacgaaagacgaggctctagactattttaaaatttataaggcagaagttgaaaatcaacttgacagaaagataaaaaggcttaggtctgatcgtggtggagagtttttctcgaacgagtttgacttattctgtgaggaacatggcatcatacatgagaggacgcctccctattctcccgagtctaatgggattgctgaaaggaagaaccgcacactgactgacttggtgaatgccatgttggacaccgcgggactgcctaaggcatggtggggggaggcattgttgacctcaaatcatgtgttaaacagagttcctaacagaaataaggacaaaacaccatatgagatatggattggtagaaaaccatcactttcttatttgcgcacatgggggtgcttggcgaaagtcaatgtaccaataacgaagaagcgcaaacttggacctaagactgtggactgtgtttttctgggatatgctcatcatagcattgcctatagatttttaatagttaaatccgaggtaccggacatgcatgttggtacaattatggagtctcgtgatgctaccttctttgagagctttttcccaatgaaggatacacatagtggttcgaaccaaccctctgaaataattcccagttcaatcacaccaccagaacaaactgaacatacacatgaacttgtctctgaggaggatgtcagtgaagctcctcgaaggagtaagagacaaaggacggctaagtcttttggtgatgatttcactgtgtacctcgtggatgacactcctaagtcaatttcagaagcatatgcatctcctgatgcagactactggaaggaggctgtccgtagtgaaatggattccattatcgctaacgggacttgggaggtgacagagcgaccctatgggtgtaaacctgtggggtgcaagtgggtgttcaagaagaagcttaggcctgacggtactattgaaaagtacaaggctcggcttgttgctaagggctatactcagaaagaaggcgaagatttctttgacacttactcacctgttgctagattgaccacaattcgtgtgctactttccctagcagcctcacatggtcttctcgttcatcaaatggacgttaagacagcttttcttaatggagagctggatgaggagatctatatggatcaacctgatgggtttgtagttgaaggtcaagaaggcaaagtgtgcaaattgttgaagtctttgtatggtctgaaacaagctcctaagcaatggcatgagaaatttgacaaaacattgacatctgcaggctttgcagtcaatgaggcagataaatgtgtgtactatcgccatggtgggggtgagggagttattttgtgcttgtatgttgacgacatactgatatttgggacaaacattgaggtgataaatgaggttaaatcattcttgtctcaaaattttgatatgaaagatttgggagtagctgatgttattttaaacattaagctaattagaggtgagaatgggattacactcttgcagtctcattatgtggagaagatcttgaatcgctttggctacattgatagtaagccttctccaacaccttatgatcctagcttgtcgcttcgcaagaacaagagaattgctaggaatcaactggaatactcccaaatcattggctcgttgatgtacctggctagtgcaactaggcctgatatctcctttgctgtgagcaagttgagccgatttacctctaatccgggagatgatcactggcgtgcgcttgagcgagtaatgcgctatctgaaaggtactgtggaattggggcttcactatactgggtatcctgcggtactggagggttatagtgattctaactggatctctgatgtggatgagatcaaagccactagtggatatgttttcacactgggtggtggtgctgtttcatggaggtcttgcaaacagacaattttgacgaggtcaaccatggaagcagagctaacggcactggatactgctactgttgaggcagaatggttgcgtgatctattaatggatctgcctgttgttgaaaaaccggtgccggctatccttatgaactgtgacaatcaaacgacatgtgaaaagacgattgaagtctgtcaggaaattaagaaactccggagttataacgttggattacatccaaacagcgagaaacctggcagatcccttcacgaagggactatcacgaaatgtgatagacaatgcatcgaaggagatgggtttgagacccatagcattcttgaaggaactcacctttgtgagcttgactgttggtcgcagtccatgaagattttgggtgaatcttctaggaagcttactaaagacctaggacgacagcatcaaccacgaatcgagcagcaacaatccaatcaacaacgcagcaagcagcagtggtggtggcggccggcgggaggggacggattcggcggtggctcaagcaaatccgccgccggtggcaggttcggctgcggctcagcgcggaacagcgcaaggacgcctggtggtggtgaagactcgaagacggcggtgagatccatccccatccttctcgaagacgacgatggcggtggcacggattcggtggtggctcaagcaaatccgccgccggtggtagtctggcagtcgagggagcacattcaatggtggcggcgaggtcgtggtgagctcatcgcagcggtggacggcgggtccggctgcggctcggcgcggagcagcgcgaggatgcccagtggcggtgaagattcaaagacgcggtgagatccatccccattcttctcgaaaacgatgacggcggcgacacgaacaagactcgaagacctgttgtcgtcctcctcgagctcctgcgcacgactcggcctcgtcaagcttcctaaaccgatgccgttgccgtcgagctccagtcgccgtcctcgcagagatagagaaggg

SEQ ID NO: 23295 - DNA, 3474 bp, Oryza sativa; identical to SEQ ID NO: 15049
  Clone ID: TF_OsC1528_2073

SEQ ID NO: 23296 - DNA, 1983 bp, Oryza sativa; identical to SEQ ID NO: 15050
  Clone ID: TF_OsC359_7340

SEQ ID NO: 23297 - DNA, 1833 bp, Oryza sativa
  Clone ID: TF_OsC1713_4956
ttgcttctgactagcgctaggcttaacaggtaccgcatttgctccagtgaccacttggcgattggcatgtctgcttccttaacaggtactacagttgtaacagacaataactttcttacgctcgggttcttcatcttgtacttgatttcttggctgctgtgctggaacatccaaaggtacaatgccgatactggcctctgtcttgtcaactgatggctagggctgaaattgagcattgacaccttgtggtaatgcactcgctggagttggagctgttgcaacgcgggctataggattgcttcgggatgcatggatgacaattcgctgaggagcaagcttctgattgcagggagttgcgtggactgacgtgctggcagctatgtttctcggttttgggcacttgtcggcgaaatgacccattccttgacaattgaagcaacagatatcttcccggactcggcattttcttttctcattttgattcctctgtcctggcactggagttaggctgaaactgaaatcttggcgaggatttgtgttgccttgatgcttctctccattggaactggcgggttggttggccatcttcttcgtcagcagaaaactgaattgacaatcttttggtacatgatcagttccttcacaaaagaaacaagtgatcctgctcgttggacacctgtcgggtggatggtcttcctcacaatgaatgcatgtagtggcacacgagctggcaacatgaccgatttctccacaacgagagcatgccttacgtccatttcatcttcatcatctgaggagacttgatctgaatcttcactatcagacactctacctccattagctaaaagatgctctgtcaactgtggtgcacctcggaaggtatttcttctctgacgttttgtcattcctggtggaggccattctgtgctggtaatgatcatcttacggacttcatcttcggttcgcattgatgtttttcttttctgctgaggacactcccttgcatagtgcccttgctcatcacacataaaacaaatgatacttgcttcttttgagtcaacatgtggcacgtcaccctgggtccttcgggatgctggcggcatgctgacttgtggtgtgagtgcttggactgcctccaactgcacttgaggttgtatttgactcaggttcagaattggcgtctgatgctgctgtagtatctctataagcaatcggttctggttaatcaggtgttggactagtgtcacacaactggtgtctggtgcttcattcactcgggagcttgaggtaccaatgtcctgacttctgaccttattgcctttctcattgtcagccatctgttgcaaaggtttggagagggagagagggaaaacaaaggggagagacagattagaaactaaggataggaccttaacagatctaagtcttttgtcctgcttcacagctggcttcactgcttcctccacttcgctagcggatcctgcagtcttccggagcttcggcaaacaactgacgatgtcttcttcttcactgacctgaccatctagtacagcttgtcgcgaccgggaaaattgccttttcccgaacgctagtgtattaatccccgtcccaggaaaagccggggtacaccacacaaacatgatacaaaaggcacatctttattatgtcgataatatttacattattacaaaggcacttgaggcctacggccggaacctccgggacaggtcggtaggactgagcccctagcagcagggcaccaaccctgtgccatgacatctcgactaccgggccacagctcgtgtagccttcatttgtcctagagatgtccat

SEQ ID NO: 23298 - DNA, 3570 bp, Oryza sativa
  Clone ID: TF_OsC359_6495
agaaatacaatccccgaaatcaccgacgcttctgtaattcgcgccttcaagtccgtagcgccgccgccgccgcggattccgccgcatcccgtcgtctccgcgcgcattaaagagaggggaatcactccccgtgattccctctcccgtttcccccgattccccctctctctctccctcggattcgttcgaatcgtgcccgcattcgtcgccggcgcaatcaatggcggccgaaatccccgcggccggtttccttcctcctcggccgccttctctcccttccgacgctataaaatcgttgcccgagctccgctcttccgtttccgccgctcgccgctcgctctcgccgtcggatccgtgctcgcgccgtgctccgctctctccgccatcgccgccgagctccgttccgccgccgccgccgctccggacttcctccttactcggcgacccctccgtccgcttcgccgcgtcgccgtcgaccccgtccgccgctccgcttcgcccgtcgaccgtcggagcgccgccgtcatcgtcatcccgaaccgcgccgccgtcttcttccgctccggccgccgttctcgtcgtcgtcgttgtcccggggtgagccgaagaccgccgttcgctttcccccttccctcctctctctcgggcgccgctccgccgcgccggtggtcgccggcggtgaccatcggggcgcgggcgcgccgctcccgtcggccgtgccggcgaggccgcccttgggcgcgccctcgcggctgccaagtgggcccggccgtcagccgcccgcgcccgcgggtgcggctgacgcgcgggacccacggcgccgaccgccgccagccgcgtgcgcccggtccaccgtggaccgagcggctgacgcgtgggccccacccccgtggacccgggcaaatgaaggctacacgagctgcggcccgatggctgacaatgagaaaggcaataaggtcagaagtcaggacattggtacctcaagctcccgagtgaatgaagcaccagacaccagttgtgtgacactagtccaacacctgattaaccagaaccgattgcttatagagatactacagcaacaccagacgccaattctgaatttgagtcaaatacaacctcaagtgcagttggaggcagtccaagcactcacaccacaagtcagcgcaccgccaacatcccagaaggcccctcatgccatgccacatgttgacccaaaagaagcaagtatcatctgttttatgtgtgatgagcaagggcactatgcaaggaactgtcctcagcagaaaagaaaagcaccaatgcgaaccgaagatgaagtccgtaagatggtcattaccagcacagaatggcctccaccaggaatgacaaaacgtcagagaaggaattccttccgaggtgcacaacagttgacagagcatcttttagctaatggaggtagagtgtctggtagtgaagattcagatcaagtctcctcagatgaggaagatgagaaagaacttaaggcatgctctcgttgtggagaaatcggtcatgttgccagctcgtgtgcctctacatgcgttcattgtgaggaagaccatccacccaataggtgtccaacgagcaggatcacttgtttcttttgtgaaggaactgatcatgtaccaaaagattgtcgattcagttttctgctgacgaagaagatggccaaccaacacgcccgttccaacggagagaagcatcaaggaaacacaaatcctcgccaagattacagtttcagcctaactccagtgccaggacagaggaaacaaaatgagaaaagaaaatgccgagtccgggaagacatctgttgcttcaattgtcaaggaatgggtcatttcgccgacaagtgcccaaaaccgagaaacatagctgccggcacgtcagtccacgcgactccctgcaaccagaagcttgctcctcaacgaattgtcatccatacatcccgaagcagtcctatagcccgcgttgcaacagctccaactccaatgagtgcactaccacaaggtgtcaatgctcaatttcagccccagcaaagaattgtcgtagatggaagaagttgtgtctctccccgacctactccaggccgagccaagggcaatcaacatccggagggcgataccaagcagaagaccgtcatccgcttcaaccagcaatcagaaggaagcttctcctgcgggcccgcccgccgccctcgctgacgggtggggcccacctgtcatcgccttcctcccgccgctcccgccgctcgcccgtgccctagcgccgccgccgccgcggattccgccgcatcccgccgtccccgcgcgccataatgaggggggaatcattccccgcgattccctctctctttccccccgtttttccctctctctctccctcggattcgtccggaatcgctcccgcaaacctcgccggcgccatcaatggcggccgagatctccgcgcccgtttcctccctctccggccgcgctctccccctcccgacgctatataagcgttccccgtgctctccccctccgtttccgccactcgccgtctctcctccccgtcggaatcgagcccgcaccgtcgcaccttctctccgccgtcgccgccgagctccggttcgccgccgtcgtcgctccggacctcctccccactcggcgtcacctccatcggctttgccgcgtccccgtcgacctcggccacccctccgcttcgctcgccgaccgccagagcaccgtcgcccacgccgtcccgaaccgcgccgccgccttcctccgcttcggccgccgttcccgtcgtcgccgtcgacccggggtgagccgaagaccgccctttcgcttccctctcctctccgctctctcgggcgccgctccgccgcgccggtggtcgccggcggtgaccatcggggcgcggtcgtgccgcctcccgtcggccgtgccggcgaggccgccttcgggcgcgccctcgcggctgccaagtgggcccggccgtcagccgcccgcgcccgcgggtgcggctgacgcgtgggacccacggcgccgaccgccgccagccgcgtgctcccggtccaccgtggaccgagaggctgacgcgtgggccccactcccgtggacccggctagtcctgaacaaaaggacacggatagagatggatgaagtcgttgcgacgatggatatctctgaggcaaatgaaggctacgcgagctgcggctcgatcacgtttgatgtcattgagtttgacatagcatacaatgccatcattgggagaactgcactcgcgaagttcatggccgcatctcactatgcatatcaagtactcaagatgcccgagccgaagggaacaatcactattcaagggaacgcaaagctggcgctccaattcgacaagtggagccttgacatggtcgagcacactcctagcccacccgccacagctgagccacccaagaaagtgagcaaaacaaccaagacgccgaaaccagacggcgcaatcaaaattgttccactctccagcgccaaccccaacaagacagtcaagatcggggcatcactgaacaagaaatag

SEQ ID NO: 23299 - DNA, 3623 bp, Oryza sativa
  Clone ID: TF_OsC359_8282
ctcccgtgcccggctagctcccctccgctataaaatgggatccccttccaccgttctctcgttttagcctcctcccgcgtctccccgtggtcgcaccgcctcttcccaccgccctcctctctctcccgtgccgccggccacttccagccgcctccccctcatcgcccgtgcaccggtaggccgtgtcgtcgccatcctcggcatcgcaaccgcctcctctcccccagcctgccctccgtttcgcacggtgaccaccggaggcgcgtcctcgtcgacgtccagtggcgtcgccgccactacaccgcctccggccgcctcggctgccgcgcctgagcctcggtcggccgtgccgtcgcctccctcagctccgcggcgtcgtcctcatccccggccttaccatctcctcgcccgaatttcgcccgaacgccgtcgtccgcgccgcccctccctcgttctcgtcggcacccactccggcagccccttccgcctagccagtgcgccggccgacgtcgccgtctccaccttcgcgtcctcgccaacgtctcctccggtcggccgttcctctccgtcggctcgtcgtcccatggcgccgcctccgtcgtcggcaatgcagtggcgcgttccacgccgttctcgtctccgtgcagctgctgccggctgcccttgtcgtcctctcgtcgttcccgctcgtcgtcggccctcccttcgtcaagccgtgctcgttcgtcgcccgcgtttcgtcaagagtgcgtcgcagccctgtcgccgtcttcgtccttggctccgcgtcgtcaagcgttgcgccggctgcgtctcgcccatgtatcggtgtcggtagtcgttcgtatgtgcgtgtggtgaccgtgttagtgtgcccgctcggtagccgcgtggtttccacgtgtgcagcccgcgtggtgtctagtggagtacgtttgtcggccactcacctcggttgacacacggggtccgcttctgttgacccgtggaccgtctctgtgtacccggttttctttttatatactgttattgcttctttataggcttgtagctttgcttgtgtgcttcgtgtagcttctttcgttccggaggttcccgaagcgtggctcgtggtcgtcgccgaaggttcagaaggccgttctctctctccccctctattcaaactcctaaatggttgtaggctgggctcgaggtgcatggttttgctaggagcacctcggccaccataaggaccggtcttcgggcctctgttgcaaagcactaccgtactaaccatatgtctaatgggtaaggcttaactcggtgctcagtctagtcctgaacaaaaggacacggatagagatggatgaagtcgttgcgacgatggatatctctgaggcaaatgaaggctacgcgagctgcggctcggtaatcgagatgtctaggcaaatgaagactacacgggtcggtgcccgggctcaaccctggcctgcctgtcccgggataccggccgtaggcagggttgggtcggtacttttgttcacggctaggatgggtgaatggttatgtcacatctttacgacgggttccaaggccatggaatgcggagtaaagatgtgtcttgtgggttggcctgggttggcttgggacgagctgggacccaggtcgggttgccagttcggtccgaatcatcgtaggccttgggttaaggcagtactagatggtcaggtcagtgaagaagaagacatcgtcagttgttcgccgaagctccggaagactgcaggatctgctagtgaagtggaggaagcagtgaagccagctgtgaagcaggacaaaagacttagatctgttaaggtcctatccttagtttctaatctgtctctcccctttgttttccctctctccctatccaaacctttgcaacagatggctgacaatgagaaaggcaataaggtcagaagtcaggacattggtacctcaagctctcgagtgaatgaagcaccagacaccagttgtgtggcagtggtccaacacctgattaaccagaacaaattgcttatagagatactacagcagcatcggatgccaattttgaacccgagtcagatacaacctcaagtgcagttggaggcagtccaagcactcacaccacaagtcagcgcaccgccaacatcccagaaggcccctcatgccatgccacatgttgacccaaaagaagcaagtatcatctgttttatgtgtgatgagcaagggcactatgcaaggaactgtcctcagcagaaaagaaaagcaccaatgcgaaccgaagatgaagtccgtaagatgatcattaccagcacagaatggcctccaccaggaatgacaaaatgtcagagaagaaattcctcccgaggtgcacaacagttgacagagcatcttttagctaatggaggtagagtgtctggtagtgaagattcagatcaagtctcctcagatgatgaagatgagaagtctccccaaggttttaaccagaataaaatagaacttaaggcatgctctcgttgtggagaaatcggtcatgttgccagctcgtgtgcctctacatgcgttcattgtgaggaagaccatccacccgataggtgtccaacgagcaggatcacttgtttcttttgtgaaggaactgatcatgtaccaaaagattgtcgattcagttttctgctgacgaagaagatggccaaccaacccgtcagttccaacggagagaagcatcaaggaaacacaaatcctcgccaagattacagtttcagcctaactccagtgccaggacagaggaaacaaaatgagaaaagaaaatgccgagtccgggaagatatctgttgcttcaattgtcaaggaatgggtcatttcgccgacaagtgcccaaaaccgagaaacgtagctgccagcacgtcagtccacgcaaacccccgcaatcagaagcttgctcctcaacgaattgtcatccatgcatcccgaagcagtcctatagcccgcgttgcaacagctccaattccaatgagtgcactaccacaaggtgtcaatgctcaatttcagccccagccaccagctgacaagacagaggccagtatctgcgttgtacctttggaagttccaatacagcagctgagaaatcaagtacaagatgaagaacccgagtgtaagaaagttattgtttgttacaactgcactgaagaagggcattactccaaaaactgtccccaaccaaggcaaaatcgacctccacattaccgccaatttacacgaagcagacattccaatcgtattgtggtcactggagcaaacgccgtaccaaagagtgaaatcttcaactcggtatcagatgctacacggagtgaaaagtgcaagcaccggttaccaggttgacgccaaagatatgaatgataagaagttctagaaccgaagccccatcctcaaccaccgcagcctagtctgggtcagttagaagttcaaccagggacaagtcgggtgaagagaagattccatctgcaacaggagatcgagccaagcgttccagagtggagaagttttgttaggcaagttggttatagaagacggagcggaagaagtcagacaagaagagaagaccgcccaacctatcttcatgc

SEQ ID NO: 23300 - DNA, 2258 bp, Oryza sativa
  Clone ID: TF_OsC359_7790
agctttcccatcacgaacatgtttaactccttgatcacagtctgcgtcctgataatgcttgtgctcttcttgtaaggccatgacccgatccggtttagcatttgcaccatcttccttcacttgtaccgaaagtatgttcttcatagtcaattgcggcaggttgaattgagttgattgaggttgatcaagtagtccaccttggtcatcatgggcttcttgtggtctcacccgtgattcttgcacggaaggataacctttaagtatgcatgttcttgtgagcttggagccttcggcctagatccttcgggtaaccaaggaatcttcctggagtctccgaggtatccacccagagccttcgggctcgatggcatggtgatagatgagcttgattacaaatcgagcggtcttatcaaagcctttgattccacaataaaattttagcacattttggtccccaacaacattgggtccataaaggttagtcacaagagacttagacaccgaaatggcctttgtgctagtgtgtggcgaacaaatcaccctagtagcacaaatatcatttttggcattcctaagcaaattatgatcaaatgagagacttggcttaggaatgttacccatgggacaatttttaccaatatgtccctttgcccggcaattttatcaaagtcgacttttgcttctatattgcttttcggtttgtttgttgccggtttgcctctcacttgatgttttgcattgttcatccaatgtgcaaggagaccttgaggcaaagtgtcccgcttcagtgcacttgaagcacttgatgtgaggaatgtccttcttcttgctcaacttatttcctttcttccaagggcaatctctaacatgatgtcccactttcttgcacttgaagcaagtaatggaactcttgatcatcttttgatttcgttccctggtatgatcattgatggacttgatatccctttgatggatcttggtgcacgctacggttgatccctttctcaagcttattcaccaggccctcacggttttcttgagaaggtttgagcaatacacacaagtccatgatccatttgcttctcccttttgcctacacaatccaagtcacatatagtgctcagggacatgtttgcttgggggaaacaagggttagcacaagtgagattaacttgaacatgaggctcataggattttaccgttgcaattatcacctcatgagatacctctagcatagcatgagaatccacaagattcacatgagaacacaaaagttcatcatgtctttcttgtaaatccacatacttgttagtgatctcatcaagttgaaatttgagctcttgattttgcttcttcaaagatgctacacaagcaatagaattagtggcacaagcaaattcattttccaatttttcatacctcatagtcaatgaagaatgaaaatccttaagtttcttgtgttcttcggttagactcatgatttcttcattcttcttgatagtgcatgcttgttgcttttgaatggcttccatgaacttgatcaccattgttacatccttcttgctcaagtgatcaaactcggagtcaccatctacacccataaagcaagcataatcttcggaaatagaagatgagcatcttggtgaggtggattcttcacttgtccattagcgctcatttacttcttcctttaaaaggttagttccacatgtactataggaggtagagcatttatccatatcatcctcacacatatacttggggctaggtgagatgcatgagtcaacaacacaatgcaatatgacaatttcattatcggtgttgttggaatccaatgggagaattggatgatcgtcaaccttactcaccaattcattaccttcaatgtagtcatgtgttgatgataaggtggttgtgggatgattatcttgatcatcgaaggtagttacttgaggttcttcgcaatttggcgatgaagttgaacacttctcaaatggttcttccaaaaagagtacatcatcacatttggaatcatcacatttggacttgtcgtatctctccttgagagtggtccaaatgagatgagcatcttcaaacggcatgacggttttaaatacatcttcacttaaaacaccaaataaaacaatagtagcttgagcattgatatgcatgcatttctcttcctcttcaaatgatagctctttatcattaggaggagaaatgctcacatctacaactcgctctatttaaggacccat

SEQ ID NO: 23301 - DNA, 1167 bp, Oryza sativa
  Clone ID: TF_OsC12782_3
gaaaactgaaaaggtcagaatgttggtgattctaccagtgactctccaatggtgaagctgccaaaagcctgttgactcacagcacgaaaaaggaaagacaatcgaaaagcctgctaatcctaaagtaagtcgtggacagaagggcaagcttaagaagataaagagaagtatggagagcaggatgaagaagaaagagaaatccggatggctttacttgcgttctctggaagggcctcacaaaaggataaaccttcataagatgtagatggagccactgcagcttaatcaaaaccatcgactggtgaagatgacagatcaaaaatttgttataaatgcaaaaaatctggacatctttctcgtgattgccctgaaagtacatctgaggtggatcctgctgatgtcaatgttggtagagccaaagatggtatggatagaagcagcgcccctgctggtagcagcgttaccatggatgaagatgacatccatgagctcggtgatgaagagaaagagaagttaattgatttggactacctaactggaaatccactgccaagtgatattttgctatatgctgtaccagtttgtgccccttacaacgcattgcaggcatacaaatatcgtgtgaagattaccccgggaactgcaaagaaaggaaaagctgccaaaactgcaatgagtttgttcctgcacactgctgacgccacaaaccgtgagaaggagctaatgaaggcatgcacggaccctgaattggttgctgccattgtagggaatgccaagatcaccgcacctggcctcactcaactgaagcagaagcagaaacagaaggggaaaaaatctgcaaaagaaaactagttcaaagctatcagagaccaccccgttttgtcaagaaaagtatttttctctgcagaaacaatgcaaatgttttggtatgttgtcaggcgcatttggatggaggtgtcacatggattggccctcattcttgtaaagtttaaacatctctttggcattcatagccataggacaggatataatgtaaacagatacggcagaacattggaaccgattgacaagcttcatacgcttacaaagggacgctgagtccccttttggtgtgtcttgtgatgtatgaaagctacaaaaaaaaaatcatagatttcactttagcac

SEQ ID NO: 23302 - DNA, 2861 bp, Oryza sativa
  Clone ID: TF_OsC1713_5550
ctagagaagggtgaagttgttcctaagacttgcatctggcatttgtaactcattgatcctacgtccgcttgaacgggtccatcctgtaacagcttccaaggttagggagttcccaagagtctcgggaacgttgctctgcttgttgatcttcgatggtggaggggcaactatcttgtcagctgtaacgggtaggatcttcttgcccgtggggttaccgagcggtgatttgtcgatgggcctccagattggagcaataccaggtgcattgctagaactgacaacagttgggcgacccggtgctgacaacacttgctgcgggtgctgacgaaggagcgtaccgcctctttgtagctgtagcgagctgttgttctcctggcattgcttaccctgctggcgttggtgttgtaggcttgaaacgattgccggtggaacaatgcgacctttgacggtgcccttgacgataatccgttggggcggaggttgcacattcaggtgtcgtttggtgtcgtgggcagtgctggtaacttgtgaatcacgacgaactgcctttgctgctcttggaagaggacaatcactgaaacgatgtcctggcttacgacagttgcgacataatcgacttgcttggtcttggggtgcaggcttctgattatgcactttggcagctgaaacgggaacaagcagaggcttatgaacatccttggtgacgttgcttcttccatggttggcttccactggagctggagttagagaaagagcagaaggattgtgaccgctgttgtcgattgtcattggttgacgaatgggttgcacggttgtcccttgttctttcttggtcttagctatgaccgcgttcaactgacagtccttaggcacatgatcacagcggcaggtggggaggcataaactagcagtgtgtccgactatcccacatctagcacatgctttgaacttcaactctctttccctgaaactgtcaagggtcgcatcatcattgtcatcattatcatcatcgttgtcgtcatcgtcgtcagcagaaaaccgttctcgcttgggtatccttgctgcatcttcaggagtaaattctgaactggtgatgatgatggtcctgccattatccatcttccatatcactgtcctattcgctccagagttgcgctgcaaagtaccatccttcttgtcggtagactgacttggagcttggttactccctgggcactgcttctcgtctttttcaggtgacctggcgaacaccttccatggacagttccttacataatgaccttgctcaccacagtcataacaggtagcacttactttcctttggtctgacgttgacttggctgtcgttatcttcggggatcttgaccgcattttgacaggggtcttcggtgccgatattgggaactcttgatcatcgcggaacgacgactttgaactgatcttctcgctccttgcacgaagcttgcatgcctgcaggtcgactctagaggatccccttagctccaatcaaagagagatctcgtacagcattcgagtttgacggcaaacatgatccaaaccgtgaagacccagattctctggactttaagatcatgaaggagaggatgtacaagatattctcaaatgccattgtcgtcagttattcgcatctgctgccagtcgtgccatataatgcattcaatcctcctccgctggtcaatccaagcgaccagcccccgactggaaaccagtcggcagaagcagaaaccgcaacaaaccaagagcccccgactggcaatcagtcggaagtaggtccagatcaagaaattcctgaagttgaagttcaggctacaacttcccagagaccggacgctggtaacgacccaacgcctgggtctccagataaagggcaaggatcacctcacgctcaaccggaaatcacctcaggaccactaggcggtgacagagatgaaatccctcgcataaaggcagctgctgactctcgtccccccatcttaatcaaatggtgggacgagaacttgcaacctgcaggcattgtcataaatcgacagaaagaagacgaagaggtgcgccagttgaagaaagcactcggagaagctacccgcattgtaaatagaatccatctccgtaatgaggccaaaaccacaactttagaaaagctggttcctcatttagggacccttgaagcggttagggatcagctacacgaagccaaagagcttgccaaaaagacagagcatgatctaagggaccggattacccaactccaggattcgaactttgaactaagtggctcatcaaaagtgcaagctgccaagatagctcaactggagaaacgaattcaagccttagaaaataacaaggcagaattggctgcacaaagggactcggctttgaaggaggttgaagaccgcaagatcaagtcccaagcccagttcgacgtcctggttggcaagatcaaaagacttgaaggagccagggatgaggtcgccaatgctgctaccccgcttgtccaggcaatgttctataataacaatggcccgagtagattcgatgcttccgaagtgtttgacaagctgagaatcgcttcggacacctatttcaagaacattagagaagccggaagcatgggagcaggtttagcgttagcaatgaccaaatccctgtaccctaagatcgatattgatactgttgatggttttgcggacgggacaagcgaagaggctgcccttgatcttatcaacgacgctcaaaaagcagccgacaagattgctggtgacgtcgtagatcggtttcaggataccgaccttaggccgactggtaacaataactctgatgatgagaagactgatactgattaa

SEQ ID NO: 23303 - DNA, 6097 bp, Oryza sativa
  Clone ID: TF_OsC359_8424
gtcgctcacccagggatctcgctctgtcacggagtatctgcatgagttcaattgtctggctcgttatgctccagaagatgtgcgcaatgatgaagagtgccaggagaagttcttggaaggacttaatgatgagctttcttatccactcatggctggagattatcctgatttccagaagttagtggataaggctattcgtcaggaggacaaatacaatcgcatggaacagaagaaacgccggattgctcaattcaagacacaaccgggaaataatcaaaggccgcgtcttactttaggaccccagtccatgccacatggaggttcttcgtctgttgttcgtccgcggcgtcagttcttcaacaacaatgctggcaacaacatccgcaatctagctccacgccctgttgcagtttcgacacagcaacagcctgccaagagggagcaaggcagcaagcccgtagtgtgcttcaactgtggagacccaggacattatgctgacaagtgtccgaagccccgacgcgtgaaggttgtccctgcccagagcaactctaccgcaccagcatcaaaggcccgtatcaatcatgttgctgctgcagaagctcaagacgctccagatgtgattttggtccgggagtatcccgatgtgttcccagatgatttacctgaaaggatacatcagaccgagttcatcaccatggggagctccggatattaccggaggtttatagagaatttttccaagattgctaagcccatgacacgactgcttcagaaagatgtgaagtacaagtggtcggaagaatgtgagcagagttttcaagagttgaaaagtcgcttgatatcagctcctattttgattttacctgatccaaagaagggtttccaagtgtattgcgatgcatccaaacttgggttaggttgtcttctaatgcaagatggaaaggtggttgcctatgcatctcgtcagttacgtccgcatgagaagaactaccctactcatgatcttgagttagctgtagtagttcatgcgttgaaaatttggcgtcattatcttttcggtactcgtacagaggtatataccgatcacaagagtttaaagtatatctttactcagccggatctgaacatgagacaacggagatggttggaactaattaaggattatgacataggaattcattatcacccgggaaaggctaatgttgtagcagacgctcttagtagaaaaggctattgcaatgctacggaaggacgacagctgccattggaattatgcaaggaatttgaaagattaaatttgggaattgtcagtagaggtttcgttgcagccttagaagcgaagcccactctaattgatcaagttagagaagcccaaattaatgatcctgatattcaagagatcaagaaaaatatgagaagaggaaaagctatcggtttcttggaggatgagcacggaactgtatggttgggtgagagaatctgtgtccccgacaacaaagatttaaaagatgcaattctgaaagaagctcatgatactttatactccattcaccctggtagtactaagatgtaccaggatctcaaggaaagattttggtgggcaagtatgaagcgtgaaatcgcagaatacgtagcagtatgtgatgtttgtcagcgagtcaaggcagaacatcagaaacccgccggtttgttgcagcctttgaagattcctgaatggaagtgggaagaaatcggtatggattttatcactggtttacccagaacgtcatcagagacaacctattccggaagtcgcttagcggaattgtacatggcaaggattgtgtgtttgcatggcgtccctaagaaaatagtgtctgatcgaggcagtcagtttacctcaaatttttggaagaaacttcaggaagagatgggttctaagctgaactttagtactgcttatcatccgcagacagacggacaaaccgaaagggtgaatcagattttagaagacatgttgagagcttgtgctttagatttcgatggaagttgggataagaatctaccttatgcagaattttcgtacaacaacagttatcaagctagtcttcagatggctccttacgaagcactgtatggtcggaagtgtcgcactccgcttttgtgggatcaaacgggagaacgtcaggttttcgggacggatatcctaagggaagcagaagaaaaggtaaagatcattcaagaaagattgcgagtggctcaatctcgtcataagagttatgccgacaatcgccgcagagatctaagttttgaaggagattatgtgtatcttcgtgtcacgcctcttagaggagttcatcgtttccacaccaaaggaaaattggcaccgcgttttgtgggaccttataagattgtcagtaaaagaggagaggttgcttatcagttggagttacctcaatctttggcaggagtccataatgtgttccatgtgtcgcaattgaaaaagtgtttaagggtacctaccgaagaagctaatctcgaacagatagaagtccaagaggatctgacctatgttgagaaaccaatcctcgctccagccgtgcgccgccgccgttccagacgtcgccgtcgctcgggaagaccgccgtcgtggtcgccaagtatgccgcgctacaagcctgagtacttgtttggtgttgagggttttgtccaggagttgcgtacaatgtcctttgtcattggatttgggactgcccctttttatgcccagattcctcatgatcgtcatgaagagaagtgccgagtcaaagtcaccttgaacagtaatagtgaagatatcccctcagtgatgttcaaagctggaggaagaaactacatccatgcatgtcaggaagtggcaaggatcgccataggagagcttcgcgatcgctacagtgatcaattggccgacactgagtatcgctaccatcctcgtcaaccacagggaagtgaccgtggcagttaccttgagactgaaggaattgagaatgatgctaccacaaggcatttggtggagatgctgtgggctatggatgaaagtcgtgcggagattgtgttagcagctcaagatcgtgaagaccggaatcgtggtaagatttgcaagctagaagacaaagtggatcgtttggagaaggaactagctgtattgaagggagaagcaccaccgcagaaggccaggattcgtctcaccgcaaggaagagagctctatttgtccctcgctatcaattggcgccaaaggttcgtgtggtggagaaagaagttgccccaaccctagcagatcctccggtcatcatcatggtgaacactcgcagcaacgggaatggccccagtaacaataacaacggagagaatcccactcttgctcaagttcttgctcaacagacacagctaatgaacatgatgatgcagcaactccagaaccagcaaaaccaaggaaataaccatgcacctccccagaacaagttagcagaatttcttcgtgtgaggccgcctgttttctctagcaccactaatcctgttgaagctggtgattggctgcatgccatagagaagaagttggatttgcttcagtgcactgatcaggagaaggtctcatttgcatcacatcagttgcatggccctgcctctgaatggtgggatcacttccgtctgaacaggactactgctgaacctatcacttggcttgaattcaccgctgctttccggaagacgcatataccatcgggagtggtgtctctcaagaagaaggaattcaggtcgctcactcagggatctcgctctgttacggagtatttgcacgagttcaatcgtcttgctcgttatgctccggaagatgtgcgcaatgatgaagagcgccaggagaagttcttggaaggacttaatgatgagctttcttacccactcatgactggggattatcatgatttccagaagttagtggataaagctattcgccaggaggaaaatgctggcaacaacatccgtaatcaagctccacatcctgttgcagctccagcacagcaacaacctgccaagagggagcaaggcagcaagcccgtggtgtgtttcaactgtggagacccaggacattatgctaacaagtgtccgaagccccgacgcgtgaaagttgtccctgtccagagcaactctactgtaccagcatcaaaggcccgtgttaatcatgttgctgctgcagaagctcaagatgctccagatgtgattttgggtacgttccttgttaacttagttcctgcaacagtgcttttcgattctggtgctacacattcattcttatctatgagttttgcgggaaatcatgggatggaagtagaagatcttagacgtcctttgatggttagtaccccaagtaatcaagcactctctttgcaacgtagcccctctgtcagaatagaaattcaaggagtaccattcctggccaatcttatcttgttagaatccaaagaccttgatgtcatcctagggatggactggttagccagacataaaggtgtgatagactgtgctaacagaaaagtaactctcaccagcaatgatggtcgagttgtaactgttcatgcattgtcttctgagtctttaaggtcaagactgaaccagataactttggaagagatttctatagtccgggagtatcccgatgtgttcccatatgatttacctggggatcctctagagtcgacctgcaggcatgcaagcttggatgactgtcagtatggacttcatagagggactgcctaagtcaggcaaatatgacacaatcatggtagtcgtggacaaattttccaagtttgctaaatttatccctcttgcacacccttttactgcttatacagttgcttaggcatttatccagcaggtgtatgatgtctttgggatgcctcaggttatcatttctgtcagagacaggatttttactagtgctttctagcaggagctgttcaaactagcggatgtcaaacttaacatgagctcttcttaccatccacaaaccgatggacaaactgagcgcttaaccagtgtttggaaggtttcctcagatgcacagttcactttgctccatctaaatggtccagttggctgtcccaggctcaacactggtataacacctcctaccacaatgtgctgaataaatctccatatgaggtcttgtttgccagaaagcctacacattttggccttgtggatgtgggtgcaagtacagtgccggatgtgcagctttggctccaagagagagctcatatgaatgaacttttacatcaacaattactaagggctcaacagaggatgaaaagtcaggctgataagaagcgttctgagaggcaatttgctgttggagatcgagtttatctgaaattgcaaccatttgtacagatgtctgttgcccgaagatcttgtcagaaactgagctttcggtattttggaccgtatacagtgttggaaagggttggcgctgttgcttaccgcttggatttacctgctactagtcagatacatccggtggtgcatgtttccttactcaaggcggcaatcaaaccaggcacccaggtcagttctgatctccctctcaactattctgacgaacaatctaccattcagcctgaagcggttcttcgtcgaagtctgattaaacgtggcaagagtgttgttccctgtgggctgatcaagtggattggcatgcctgaggagctggctacttgggagaaccttgtggactatggtgaacttgtggggttcgtcggccgggaagaagggcgcaaagatgcaatccttggtgcaccgccgccgcagcagcttgcacgacgcgcacggcgacccagtggcggcggcggcggcaacgacaacgtgggagaaggagacgcgcctctgctgtggggatcggctccgacggcggattgctacctctccgcccgctgccgcgctgctccgcccctttggcttcgagcgccgtcgctccacccgccgccacccaatccgcccctttggcttcgcgcgtcgttgctccgccctgctggctttcgccagcctgcgccgtcgccccgccggctttgggcgcatcgccat

SEQ ID NO: 23304 - DNA, 720 bp, Oryza sativa
  Clone ID: TF_OsC1713_4880
gtcgcttcggtctcgactcctcgtctcctcggccgccgccgccgccgccgccgccgagcagaggcgatctccacccgcgagcagcggcgccgtcgccggtgtgctgcttctcccgtcggaccctcgccggtgagcacacttcaagatgcctcgctatgatgaccgtgatcgctacgatgaccgttacggcggcaacacgaggctgtacgtaggtcgtctttcctcgcgcacccggacccgggaccttgaagaccttttcggcagatatgggagagtgcgatatgtggatatgaagcacgagtttgcatttgttgaatttagtgatgctcgggatgctgatgaggcaaggtacaacctggatggtcgggactttgatggaagccgcatgattgttgagtttgctaaaggggttccacgtggccctggaggatcacgtgaatatatgggcagaggaccaccacctggttctggccgctgctttaactgtgggattgatgggcactgggcccgtgactgcaaagctggagactggaaaaacagatgctatcggtgtggagacaggggccatatagaaagggactgccgggaaacagcccttaagaaatctccaaagcgttgggaaagaagcttactcaagaatcccccatcccccctccgttcccgttgggggtaaggaaaccccgttgggtttggaacccttcccggccagggaaccccgtt

SEQ ID NO: 23305 - DNA, 1632 bp, Oryza sativa; identical to SEQ ID NO: 14895
  Clone ID: TF_OsC359_7855

SEQ ID NO: 23306 - DNA, 469 bp, Oryza sativa
  Clone ID: TF_uC-osflcyp173f05b1
gagagtcatccatggcttccaccgtcgccctcaagggccgcccgctcgccaccctcctcaggcagctcctcgccgccgacgcgccgcccgccgccaccgggaggcccgtcgccgccgctcccgccgcctccgggaagcccgtgaccgcccccgccgccgcgaccgccaccaacgccgcctcccgccgcctgtacaacaccgagggcgcgccgctccgccgctacgacgtcgtcgacgagtccggcaccgacagcggcgacgagtacgacgccaccgctacggcggtgaccgcggctacggcggcggcggcggcggctacggcgggggcgaccgcggctacggaggcggcggcgggtacggcggcggcggcggaggcagccgcgcgtgctacatgtgcggcgaggagggccacatggccagggactgctcccagggaggaggcggcggcggtggctaccgtggtggtggc

SEQ ID NO: 23307 - DNA, 4692 bp, Oryza sativa; identical to SEQ ID NO: 15217
  Clone ID: TF_OsC359_6303

SEQ ID NO: 23308 - DNA, 3186 bp, Oryza sativa; identical to SEQ ID NO: 15216
  Clone ID: TF_OsC359_6670

SEQ ID NO: 23309 - DNA, 2241 bp, Oryza sativa
  Clone ID: TF_OsC359_6534
ttaagctttctcatcatgaacatgtttaactccttgatcacagtctacgtcctgatagtgcttgtgctcttcttgtaaggccatgacccgatctggtttagcatttacaccatcttccttcggaagcatgttcttcatgttcttcatagtcaattgcggcaggttgacttgagttgattgaggttgatcgagtagtccaccttggtcatcatggacttcttgtggtctcacccgtgattcttgcacagaaggataacctttaagtatgcatgttcttgtgagcttggagccttcggccttgatccttcgggtgaccaaggaatcttcctggagtcttcggggtatccacctagagcctccgggctcgatggcatggtgatagatgagcttgattgcaaatcgagcggtcttaccgaagcctttggttccacaataaaattttagcacattttggtccccaacaacattgggtccataaaggttagtcacaagagacttaggcacccaaatggcctgtgggctagtgtgtggtgaacaaatcaccctagtagcacaaatgtcatttttggcattcctaagcaaattataatcaaatgagagacttggcttaggaatgttacccttgggacaatttttaccaatatgtccctttgcccagcaattatagcaaagtcgacttttgcttctatattgcttttcggtttgcttgttgccggtttgcctctcacttgatgttttgcattgttcatccaatgtgcaaggagaccttgaggcaaagtgtcccgcttcggtgcacttgaagcacttgatgcgaggaatgtccttcttgctcaacttatttcctttcttccaagggcaatctctaacatgatgtcccactttcttgtacttgaagcaagtaatggaactcttgatcatcttttgatttcgtcccttggtatgagcattgatggacttgatatccctttgatggatcttggtgcacaccacggttgatcccttctcaagcttattcaccatgccctcacggttatcttgagaaggttgagcaatgcacacaagtccataatacatttgcttctcccctttgcctacacaatccaagtcacatgtagtgctcggggaaagattttctttggagcaacaagtgttagtacaagtaataagatcaacttgaacatgaggctcataggatttcaccgttgtaattatcgcctcatgagctacctctagcatggcatgagaatctacaagattatcatgagaacacaaaagttcatcatgtctttcttgtaaatccacatacttgatagtgatctcctcaagttgagatttaagctcttgattttgcttctccaaagatgctacacacacaatagaattagtggcacaagcaaattcactttccaattttttatacctcataatcaatgaagaacgaaaatccttaagtttcttgtgttctttggttagactcatgatttcttcattcttcttaatgaggcatgcttgttgcttcttaatgatctccatgagctttatcacaattgttatgtccttcttgctcaagtgatcaaactcgaagtcaccatcttttcccataaagaaagcatgatctttggaaatagaagatgagcatcttggtgaggtggattcttcacttgtccattggggctcatttacttctcccttcaaaaggttagttccacaagtactataggaagtagagcatttatccatatcatcctcacacatatacttggggctaggtgagatgcatgagtcaacaacacaatgcaatatgacaatttcattatcagtgttgttggaatccaatgggagaattggacgatcgtcaaccttactcaccaattcattgccttcaatgtagtcatgtgttgataaggtggacgtgggatgattatctggatcatcgaaggtagtcacttgaggttcttcgcaatttggtgatgaagttgaacattcctcaaatggttcttccaaaaagagtacatcatcacatttggacttgtcatatctctccttgagtgtggtccaaatgagatgagcatctttaagcggcatgatggttttaaatacatcttcactcaaaacactaaataaaacattagtagcttgagcattgagatgtatgcatttctcttcctcttcagatgatagctctttatcattaggaggagaaacgctcacatctacaactcgctctatttgaggacccat

SEQ ID NO: 23310 - DNA, 1967 bp, Oryza sativa
  Clone ID: TF_OsC359_7816
atggatgaagtcgggcgtcgatggacattctccagggcaaatgaaggctacacgagctgcggcccggtagtcgagatgtcatacggcggagggttggtgcccaatgctaggggctcatttctacctgcctgtcccgggtatcccggccgtaggtaggattgggtcggtacttttgttcacggctaggatgggtgaagggttatgtcacatgtttacgatgggtttcaaggccatggaatgcggagtaaagatgtgttttgtgggttggcctgggttggcttgggacgagctgggacccaggtcgggttgccagttcggtccgaatcatcgtaggccttgggttaaggcagtactaggtggtcagctttgcgaagaagaagatgtcgtcagttgtttgccgaagctccggaagactgcaggatccgctagcgaagcgaaggaagcagtgaagccagctgtgaagcaggacaaaagacttagatctgttaaggtcctatccttagtttctaatctggctctcccctttgttttccctctctccctctccaaacctttgcaacagatggctgacaatgagaaaggcaataaggtcagaagtcaggatattggtacctcaagctcccgagtgaatgaagcaccagacaccagtcgtgtgacactggtccaacacctgattaaccagaaccgattgcttatagagatactacagcagcatcagacgccaatgctgaacctgaatcaaatacaacctcaagtgcagttggaggcagtccaagcactcaccccacaagtcagcatgccgccagcatcccgaaggacccatgatgacgtgccacctgttgacccaaaagaagcaagtaacatttgctttacgtgtgatgagcaagtgcactatgcaagggagcgtcctcagcagaaaagaaaaacaccaatgcgaaccgaagatgaagtccgtaagatgatcattaccagcacagaatggcctccaccaggaatgacaagacgtcagagaagaaataccttccgaggtgcaccacagttgacagagcatcttttagctaatggaggtagagtatctgatagtgaagattcagatcaagtctcctcagatgatgaagatgaaatggaacgtaaggcatgctctcgttgtggagaaatcggtcatgtcgccagctcgtgtgccactatatgcgttcattgcgaggaagaccatccacccgacaggtgtccaacgagcaggatcacttgtttcttttgtgaaggaactgatcatgtaccaaaagattgtcaattcagttttctgctgacgaagaagatggctaaccaacccgccagttccaacggagagaagcatcaaggcaacaccaatcctcgccaagattacagtttcagcctaactccagtgccaggacagaggaatcgaaatgagaaaagaaaatgccgagtccgggaagacatctgttgcttcaattgtcaaggaatgggtcatttcgccgacaagtgcccaaaaccgagaaacatagctgccggcacgtcagtccacgcaactccctgcaatcagaagcttgctcctcaacgaattgtcatccatgcatccccgaagcagtcctatagcccgcgttgcaacagctccaattccaatgaatgcactaccacaaggtgtcaatgctcaatttcagccccagccaccagctgacaagacagaggccagtatctgcgttgtacctttggaaattccaatacagcagctgagaaatcaagtacaagatgaagaacccgagtgtaagaaagttattgtttgttacaactgcagtgaagaagggcattactccgaaaactgtccccaaccaaggcaaaatcgacctccacattaccgccaatttacacgaagcagacattccaatcgtattgtggtcactggagcaaacgccgtacccgtaaggcctcgtgataatcagaacccatag

SEQ ID NO: 23311 - DNA, 3360 bp, Oryza sativa
  Clone ID: TF_OsC30033_1
cccgggctgcaggaatcgcacgaggccccccctcctttttttttttttttttttttttttttttttttttttttttttgggagtttttttttttttttttttttacaagattgcagacaaggacaatatactttttaaggtagcgatacaaagtccagatcacaaggttccctgcccagtggacattggaggtaataaaggcataaacataaggcaggtttaacaactatacacgatacaccgatgccatccaagatgaacaaaatcaagatgctgctgctgctgctgcttcttcccttgcaaaatacttcagtagccaccaacaaaggattgcctattgtaaccccttgatgctgcaacattattcccatatgtctggtgctgggcgccagtagactgccctggacaatctctagcgaagtgcccaggctgtttacatttgaaacactccgagccaccagtagactgcactggacagtctctagaaaagtgcccaggctgtttacatttgaaacactccaagccaccagtggactgccctggacagtctctagcatagtgcccgggctgtttacatttgtaacactccgagctgccgttgccagcgatggagttgtagttacccatggagcttccaccggctgatgtttcctgcatatccatatctgcacccacatggcagatctgggcgctgtgcccatttgctccacaaatgctgcatgtctgcaagtttcgtgttgctgctagtggagtagacatcccggcgcttatactcgcttgctgcccaaactgattcacgccaccagtattcatggcataggcattgctagatgtaggcgcaccgtgaccgcctaccggatcggtgaaaccagcattaggggcaagatcactttgcccctttgggtccagtaaaaggttgtcaatcgctccaagtaggacgttgctctcttttgatgggtccagtttttcaaccttgacagcggtgcatttcaagctttgctcatcattgtaggtttcttccttgaccttcagtttgaatagatatagatgccaccggaccccttctatgatctctgcaaattgtgcatcatcttggtcgacatttcttatcgagaaaagttctcctgccttgcgaccaaaaatctgctcacctgcctcatcgaacgcactagcataggtactaccagtgtggtcttggatctggaacctaagcatgtacctatattcaggattttgaaaactctcatcacatcggtcacaatgccacatcccatcaccattatttattgcctttttattacactgcctcccgacgggcaagagctttgggcaagctggataacaaaaactctcagtagtcacatgggagattgcagccttaacagtgatccagtctggcttctctaatcgtcccaaattttcatccttgatctgtgcaattgttttgcgggcatcagtccggcccatattaagcatttctcgagataaagaaatgcaaggagcagtttttccttctgtcatgtaccactgcctcagcctttccacctcaggaaagtctggatttataattaactgggttgaaccaattgtgctcactgatttgccattaaaatcacccacacgggcacctttaaaagcaattatagggttcgaaccagaatcacactgcaactgcaactgctgaccctcagcatcacagaagtttccccataatgttacttcaatgctccggccagacaagtccttcagttgaatagaccttttccgggtttcagtgccgatcttcctcattattgttgcagaagggctaactgatgtaacaacaccaagtaaatcaacaatggtctcgttagccatattctctagttcgctgatctgccggaaattgtactgcagcctggggatgctgttatcatcatcagagcaaacctcgacagttgataacccgatatccagagttatttcataatcatggttcaaagtgttatacttcttctgggcgggcttcagtgatcctctagatatcaaatacaccctaccaacctcaatttggccaaaaaacttatcagccgattctttccagcattgtgcacgaatttctccaccttgtgcatcaagaagatcaaacgagaaaactgttcctgaactcctggcattgctccaatgcctgatatcagactttgctgtcacccttgccttgattgtccacttaggctggtatggattcaacgcggtaattgggatgatacgagttgcagagtcattcctagaggcaggccctctattcatatacactggaggtggctgctgatatgaaggacgtgaaggctgcccataagcattgccaggagggccaaagactccacccgaagcaggagctgcaaacctttggttttgattagggttcaacgaggacagctgagatgtaggctgcatcgtgttggcattcattgtgttcagctgagatgtaggctgcatcgtgttggcattcattatgttcagctgagatgtaggctgcatcatgttggcattcgttgtgttctgtgctgatattgcaccgtaagagccaacagcagaaacatttgcaggaccaggttcaactgtcctgccaatagaagaacccaacattccttgagcactattataaggtccaccatatgaactgttgctagcagcctgctctgcccttggcgcaacggaggggcccagcatgcttgcgccaccagaataggttccattattggtttgagccacactggcctgtaagttagggtcttgctccttagttagactctttggttcatagtgtttagggttcccaattacaatgcagtcattttgcagaacatcaagtttcacaacaataataatcctagccagcaaattagttgcaagttgaaacatatttgcaggttgaatatttgtcgacattggacaactgctaacaatagaaccccaaagtgataaaatctcgttggatgaaacatgacaaagataaaagcgcatcttccttagaaccttctcactgtcccccatgttgacataaagactactgtgcgaattagatcttttaccctggatggtgttgcacatgaagtcggtgagctggacgacggtgccggggcggagcgtggcgtccttgacgagggggttgagggcggtggcgagcatggactgctgcgtgttgacgccgtcggagagcatcatccggaagcgctcggcgggcttgggcgtgggcggcgcgttcttggtggtgacgggccgcacgtccaccacctgcagcaccggctggatcgtccccgtcccgtccgggtgctccgctatcgcctgcaccgcccccggcgtcagctgcggctccat

SEQ ID NO: 23312 - DNA, 1890 bp, Oryza sativa
  unsure (1)..(1890): unsure at all n locations
  Clone ID: TF_OsC1528_1764
atgtcgatcgaggaggcgttaggtcgcctcaaggtcgtcgatggtgatgagccacggcctctctcggggcccatcaccatcggcgggaagctccatctcactcgggagcagtgggaggcctctcanggtgacgggaggaagggggagtcatcttccccgacaggcggccataagccgcgcaaggcgcggggaggtgtccagctacgaggcgcccagggcgttgccaccggcaaccacaagccggcacgagatgacacctgccgcaactgtggcaagcttggccattgggccaaagactgtcgacagccacgacgcggccaggcccacgtcgcacgggtggaggaggaagagccggctctgctcctagctcacgcaagcatcgagctacctccagcggcaccggccgcagcggctttcctccaccttgatgagccgaaggtactcgtctccctctgcgacggctccagcaacgacaaggctgatgggtggtacctcgacaccggcgccacccatcacatgaccggccgacgggagttcttcaccgagttcgactccagcgtccgaggcaccgtcaagttcggggacgcctccggcgtggagatcaagggtgttggctccgtcaccttcaccgccaagtccggtgagcacaggctgctcaccggagtctactacatccccgcgttgaggaattctatcatcagcgtgggacagctggatgagaacggctcacgcgtgttggtcgaggacggactcatgaggatttgggatcgccgtcgtcgccttcttgccaaggtaaccagaggcactaatcgactctacatctgttgatnnnnnnnnnnnnnnnnnnnnnnnnnnnnnnnnnnnnnnnnnnnnnnnnnnagatcccaccacggcgcggagggagaagaccggggcgccctggtccgcgtcgctaacggcgggctcctcgtccgcgagctcgatgccgtcgatgaagaagatgcggcggcagacccggttatggcccctggagtagggttcgttgcagttgtagcagaggccgaggcgacgacgttcggcctgttccgccggcgagaggcgcttggcctggttgggcgcaccccgcggaggtggagccgggagcgcggccacgggcggcgcaggcagcgccaggggagccggtgccgcaggcaggggcgcgcgcgccgccgggggaggcagtggtgcgcgctgtgcggcctggagcaggggcggctgggggcgctccaactccatcaactctacctggcgggcgagactcatcgcggcggcgagggactccgggttgtggagacggacggcgtggctgagcggagcgaggaggccgccggtgaagagttgcacgcgctgagattcatccagccgtcccgcgcgaggcaagagcgcctggaatcggttggcgtactcctccacggtcccggtacggcggcactcagagagctcgaacagcggtgcggaacggaggggaggcccgaaccggaggttcaggagctcctttaagcgcccccaggtgggagtgccctcgtcctcctggagctggttgaaccagagttgcgcgacctcgtccaggttgtaggacgccatccacacgcgctcctccgccatggtgcgatgttggcggaagtacgagtcgcacttgttcaggaagagcatcggatcggtggtgccatcgaaacggggaaagtcccacttcttgtgcttcgggggctgatcaaaatcccgcgcgccgtctggccgagggccgccgccgccggtgcccgacgacgaagcagacttctccttcagggccgccatatcagcttccatggcggacatcttcgtggagatggacttcagggactccaggacgtcggcgattgttggttcagtcat

SEQ ID NO: 23313 - DNA, 4915 bp, Oryza sativa
  Clone ID: TF_OsC1528_2096
tcagagccacactttcctgtaggctaaacatctcttgttccaccccttcccaagctcggttgagctctcagccagcagcagcagcagcaccggttgctcctccttcccctttcccttccccctctccacacagcagccccccggaggtgcgccatgtccgacgctcggtctcagcgttcggtcgcctcgagcactcggcgtcagcaggacgccaagctcgccgcagcagaagagcgcaggcgagcaacggctcagaccgctgcagcagcagcgaaggcggccagactggcggcagcggagttggcagcagccagggcggaggcggaggcggaggcggcggaagatgcggcacgtgcggcggaggtagaggttgagaccttgcgcagcagcatcaacggctccatcgccggcgacatcaccgctgacagggagcttgaggagctggcaagaggaagggcacgggagcgagcagagcggtgggcagcagcccacctccacggcggcggcggcggcccaagggaccgcgcgcccgccgacgggaacccagacgggcgcgggcgtgccggcggcagcccggagcccgcacgcggccctcgcaggcggcacggctccctctcccctgaccggcgccatggtcaccacggcgtccagacggtggtcagggattttggtcccggcggtgggtgggcctaccctcaccaaaaccaactacatcgagtgggccgcggtgatgagggtgaggctccaggtgcggcacatgtgggaggcagtccggtacggtgacgtcgactacgacgaggatcggcgggcactggatgccctcatcgctgcagttccgcccgagatgcagttctcgctttcccagaagcggactgccaaggaggcctgggacgccatcgctgcggcacgcatcggcagcgaccgcgcccgcaagtccacactgcaggcactccgcaaggagtgggagaacctggccttcaagccaggtgaggatgttgatgactttgctctccgtctcaacactctcttgcaaaaaatggtgcagtacggcgacgacacctacgacgaggagagagctgtcgagaagctcttccgctgcgtccctgagaagtacaggcagatcgctcgctcgattgaatctctgctggacctctccacgatgtcgatcgaggaggcgttaggtcgcctcaaggtcgtcgatggtgatgagccacggcctctctcggggcccatcaccatcggcgggaagctccatctcactcgggagcagtgggaggcctctcagggtgacgggaggaagggggagtcatcttccccgacaggcggccgtaagccgcgcaaggcgcggggaggtgtccagctacggtgggcgcgaagacgtgccgagggtggcgcccgcagaggcgcccagggcgttgccaccggcaaccacaagccggcacgagacgacacctgccgcaactgtggcaagcttggccattgggccaaagactgtcgacagccacgacgcggccaggcccacgtcgcacgggtggaggaggaagagccggctctgctcctagctcacgcaagcatcgagctacctccagcggcaccggccgcagcggctttcctccaccttgatgagccgaaggtactcgtctccctctgcgacggctccagcaacgacaaggctgatgggtggtacctcgacaccggcgccacccatcacatgaccggccgacgggagttcttcaccgagttcgactccagcgtccgaggcaccgtcaagttcggggacgcctccggcgtggagatcaagggtgttggctccgtcaccttcaccgccaagtccggtgagcacaggctgctcaccggagtctactacatccccgcgttgaggaattctatcatcagtgtgggacagctggatgagaacggctcacgcgtgttggtcgaggacggactcatgaggatttgggatcgccgtcgtcgccttcttgccaaggtaaccagaggcactaatcgactctacatcctcagcgcgcaagtcgcacatccagtttgcctcgccgctcgtcgggacgacgaggcgtggcagtggcacgagcgcttcgggcacctccactttgaggccctgaagcagctcagtgccaaggagatggtgcgaggcatgccgtgccttgaccacgtggagcagctctgcgacgtctgcgtggtgacaaagcagcggcggctcccctttccccagcagacgagcttccgagccaaggagcggctcgggctcgtgcacggggacttgtgtggcccagtgacaccggccacaccaggaggacgacgttatttcctgctgctcgtcgacgacctctcccgctacatgtgggtgatggtcctcggcagcaagggagaggctgcggacgccatcaggcatgcgcaggctgcagcagaggcggagtgcggccgcaagctgcgcgtgctgcgcaccgacaacggcggcgaattcacggcggctgaattcgcgtcgtactgcgctgatgagggcattcagcgccactacaccgcgccgtacagcccacagcagaacggcgtcgtcgagcggcgcaaccagacggttgtggggatggctcgggccctcctcaagcagagggggatgccggccatcttctggggggaggcggtggtgacggccgcctacatcctcaaccgctcgcctaccaaggccctcgatggcaggacaccgtacgaggcttggcatgggcgcaagccggcggtctcccacctgcgggtcttcggctgcctcgcgttcgccaaggagcttggccacatcggcaagctcgacgacaggagcaccccaggggtgttcatcggctacgcggagggctcgaaggcctaccgcatcctcgacccggagacacagcgtgtgcgcattacgcgcgatgttgtgttcgacgaagggcgagggtgggtatgggacaaggcggtggatgatggttcgactccgacgtacgacgacttcaccatcgagtacgtccacttcgagggagctgggggagtaggcagctcttcttcaccgagcgtgtctaccccagtccccgagcctccaccgactccaacaccaacacaccctcgggccacgacttcgactacgacgagctcttcgtcgacaccaccccagccggtgtccccacacgctccagcaccaacagccactcctccgggcacgtctactccgacgccagctcgtgttgagcgcagcccggtggagttcgttactccgctctcccacgacggggagcgcatcgacgcgtaccatgacggcgagcagctacggtaccgtacgatggaggatcttctcggcgaccagccggtgccgggactggtgcctcgcaacctggaggcgcagttgcaccttgcgtgcgacgacggtgagcctcggtcttttgcagaggccgagaaacacgcggcatggcgtgccgcgatgcagtcggagatggacgcggttcaggagaaccgcacctgggagcttgctgacctccctcgtggtcaccgcgcgatcacccttaagtgggtgttcaagctgaagagggatgaagccggagccatcgtcaagcacaaggctcgcttggtggcacgcggtttcgtgcagcaggaggggatcgactacgacgatgccttcgctcccgtggcacggatggagtccgtgcgactccttgcgctggctgctcaggaaggctggggcgtccatcacatggacgtcaagtcggcgtttctaaacggcgacttgaaggaggaggtctacgtgcaccagccgccgggatttgtgatccccggcaaggagggcaaggtgctacgcctgcacaaggccctctacggcttgcggcaggcaccgagggcgtggaatgccaagttggattccacgctcaaggggatgggcttcgagcaaagcccgcacgaggcggccatctaccggcggggcaatggaggaaatgccttgctggtgggtgtctacgtcgacgacttagtgatcaccggcaccaaggatgcagaggtcgcggcgttcaaggaggagatgaaggccaccttccagatgagtgatctggggcctctctccttctacctggggatcgaagtgcaccaggacaactccgggatcacgcttcgacagaccgcctacgccaagcgcgtcgttgagctggctgggctcaccgattgcaacccagctctcactccgatggaggagagactgaagctgagccgcgacagcacagcggaggaggtggatgctacacagtaccgacgtcttgtggggagccttcgctacctcacccacacacggccggacttggccttctccgtcggctacgctgtgaagaggatcatccgctacgttgcggggactctcgaccacggtctctactacccgaggtgtcctggcaaggcacacttcgtcgggtacagcgacagcgaccacgccggcgacatcgacaccagcaagagcacgagcgggattctcttcttcctcggcgagtgcctcgttagctggcagtcaatcaagcagcaggtggtggccctgtccagctgcgaggccgagtacatggcggcatccgccgcttcgacccaggcgctctggcttgctcgactgcttagtgatctcctcggcagagatactggagcggtggagctcagggtggatagcaagtccgctctggccctggcaaaaaaccccgtttttcacgaacggagcaagcacatccgagtgaggtatcatttcatccgaagctacttggaggaagggagcatcaaggcgagctacatcaacaccaaggaccagcttgcggatttgctcaccaaaccccttaggaggatcaagttccttgagctttgctcccggatcgggatggctcaactctcccacaagacagcgcacaagacttag

SEQ ID NO: 23314 - DNA, 5481 bp, Oryza sativa
  Clone ID: TF_OsC1528_2299
cttttttttttttttttttttttttttttttttttttttttttaaacaggtaatggtatagattcatggaactcgacaaggcggaacaatcatatccatagttccatacaacggatggacctctgcactctcttcactatacagaggatttctactgcttaacaactctcagttacccaatcctccaaaatggatatgggatcatcagcttatagcagcatgagtccactcgaatgcgatctttccttcaagcagctcgcctaagccgactatgtctaaatgacaggtttcctcttttggtgtatcaacagctatcaaggacccaaaacaaaccgctacaagggttcaaagggtagggagtaaaaaagaaaaagaagatgtcaacctatcaagtatcatatcaaccagtaagagctcagttttccttccatttgttgacatacttgaggaataacatcgaagggttatcccttggttgggcctgtacacgagaggatcgccgcagtgcagcctcttggagtagcattttctgggtgacgtccttcgttcttttttccaaagcattgcttatcgtattataaaacttatcaagctgccgtttcagggctctctcccttatgcctttaacatttaacgatccaataagcgcatcaagctcttccttagtgctgtagtaaccccattctttggaatctgcactttcgacaaaaagtcgtccttcatgcatctcttgttccaccccttcccaagctcggttgagctctcagccagcagcagcagcagcagcaccggttgcccctccttcccctttcccttccccctctccacacagcagccccccggaggtgcgccatgtccgacgctcggtctcggcgttcggtcgcctcgagcactcggcgtcagcaggacgccgagctcgccgcagcagaagagcgcaggcgagcaacggctcagaccgctgcagcagcagcgagggcggccagactggcggcagcggagttggcagcagccagggcggaggcggaggcggaggcggcggaagatgcggcacgtgcggcggaggtagaggttgagaccttgcgcagcagcatcaacggctccatcgccggcgacatcaccgctgacagggagcttgaggagctggcaagaggaagggcacgggagcgagcagagcggtgggcagcagcccacctccacggcggcggcggcggcccaagggatcgtgcgcccgccgacgggaacccagacgggcgcgggcgtgccggcggcagcccggagcccgcacgcggccctcgcaggcggcacggctccctctcccctgaccggcgctatggtcaccacggcgtccagacggtggtcagggactttggtcccggcggtgggtggcctaccctcaccaaaaccaactacatcgagtgggccgcggtgatgagggtgaggctccaggtgcggcacatgtgggaggcagtccggtacggcgacgtcgactacgacgaggatcggcgggcactggatgccctcatcgttgcagtcccgcccgagatgcagttctcgctttcccagaagcggactgccaaggaggcctgggacgccatcgctgcggcacgcatcggcagcgaccgcgcccgcaagtccacactgcaggcactccgcaaggagtgggagaacctggccttcaagccaggtgaggatgttgatgactttgctctccgtctcaacactctcttgcagaagatggtgcagtacggcgacgacacctacgacgaggagagagctgtcgagaagctcttccgctgcgtccctgagaagtacagacggatcgctcgctcgatcgaatctctgctggacctctccacgatgtcgatcgaggaggcgttaggtcgcctcaaggtcgtcgatggtgatgagccacagcctctctcggggcccatcaccatcggcgggaagctccacctcactcgggagcagtgggaggcctctcagggtgacgggaggaagggggagtcatcttccccgacaggcggccgtaagccgcgcaaggcgcggggaggtgtccagctacggtgggcgcgaagacgtgccgagggtggcgcccgcagaggcgcccagggcgttgccaccggcaaccacaagccggcacgagacgacacctgccgcaactgtggcaagcttggccattgggccaaagactgtcgacagccacgacgcggccaggcccacgtcgcacgggtggaggaggaagagccggctctgctcctagctcacgcaagcatcgagctacctccagcggcaccggccgcagcggctttcctccaccttgatgagccgaaggtactcgtctccctctgcgacggctccagcaacgacaaggctgatgggtggtacctcgacaccggcgccacccatcacatgaccggccgacgggagttcttcaccgagttcgactccagcgtccgaggctccgtcaagttcggggacacctccggcgtggagatcaagggtgttggctccgtcaccttcaccgccaagtccggtgagcacaggctgctcaccagagtctactacatccccgcgttgaggaattctatcatcagcgtgggacagctggatgagaacggctcacgcgtgttggtcgaggacggactcatgaggatttgggatcgccgccgtcgccttcttgccaaggtaaccagaggcactaatcgactctacatcctcagcgcgcaggtcgcacaaccagtttgcctcgccgctcgtcgggacgacgaggcgtggcagtggcacgagcgcttcgggcacctccacttcgaggccctgaagcagctcagtgccaaggagatggtgcgaggcatgccgtgcctcgaccacgtggagcagctctgcgacgtctgcgtggtgacgaagcagcggcggctcccctttccccagcagacgagcttccgagccaaggagcggctcgagctcgtgcacggggacttgtgtggcccagtgacaccggccacaccaggaggacgacgttacttcctgctgctcgtcgacgacctctcccgctacatgtgggtgatggtcctcggcagcaagggagaggctgcggacgccatcaggcatgcgcaggctgctgcagaggcggagtgcggccgcaagctgcgcgtgctgcgcaccgacaacggcggcgaattcacggcggctgaattcgtgtcgtactgcgctgatgagggcattcagcgccactacaccgcgccgtacagcccacagcagaacggcgtcgtcgagcggcgcaaccagacggttgtggggatggctcgggccctcctcaagcagagggggatgctggccatcttctggggggaggcggtggacaccgtacgaggcttggcatggcgcaagccggcggtctcccacctgcgggtcttcggctgcctcgcgttcgccaaggagcttggccacatcggcaagctcgacgacaggagcaccccaggggtgttcatcggctacgcggagggctcgaagacctaccgcatcctcgacccggagacacagcgtgtgcgcattgcgcgcgatgttgtgttcgacgaagggcgagggtgggtatgggacaaggcggtggatgatggttcgactccgacgtacgacgacttcaccatcgagtacgtccacttcgagggagctgggggaccggtgtccccacacgctccagcaccaacagccactcctccgggcacgtctactccgacgccagctcgtgttgagcgcagcccggtggggttcgttactccgctctcccacgacgaggagcgcatcgacgcgtaccatgatggcgagcagctacggtaccgtacgatggaggatcttctcggcgaccagccggtgccgggactggtgcctcgcaacctggaggcgcagttgcaccttgcgtgcgacgacggtgagcctcggtcctttgcaaaggccgagaaacacgcggcatggcgtgccacgatgcagtcggagatggacgcggttcaggagaaccgcacctgggagcttgctgacctccctcgtggtcaccgcgcgatcacccttaagtgggtgttcaagctgaagagggatgaagccggagccatcgtcaagcacaaggctcgcttggtggcacgcggtttcgtgcagcaggaggggatcgactacgacgatgccttcgctcccgtggcacggatggagtctgtgcgactcctccttgcgctggctgctcaggaaggctggggcgtccatcacatggacgtcaagtcggcgttcctaaacggcgacttgaaggaggaggtctacgtgcaccagccgccgggatttgtgattctcggcaaggagggcaaggtgctacgcctgcacaaggccctctacggcttgcggcaggcaccgagggcgtggaatgccaagttggattccacgctcaaggggatgggcttcgagcaaagcccgcacgaggcggccatctaccggcggggcaatggaggaaatgccttgctggtgggtgtctacgtcgacgacttagtgatcaccggcaccaaggatgcagaggtcgcggcattcaaggaggagatgaaggccaccttccagatgagtgatctggggcctctctccttctacctggggatcgaagtgcaccaggacaactccgggatcacgcttcgacagaccgcctacgccaagcgcgtcgttgagctggctgggctcaccgattgcaacccagctctcactccgatggaggagagactgaagctgagccgcgacagcacggcggaggaagtggatgctacacagtaccggcgtcttgtggggagccttcgctacctcacccacacacggccggacttggccttctccgtcggctacgtcagtcggttcatgcagcgaccgacgacggagcaccagcaggctgtgaagaggatcatccgctacgttgcggggactctcgaccacggtctctactacccgaggtgtcctgacaaggcacacttcgtcgggtacagcgacagcgaccacgccggcgacattgacaccagcaagagcacgagcgggattctcttcttcctcggcgagtgcctcgttagctggcagtcaatcaagcagcaagtggtggccctgtccagctgcgaggccgagtacatggcggcatccgccgcttcgacccaggcgctatggcttgctcgactgcttagtgatctcctcggcagagatactggagcggtggagctcagggtggataacaagtccgctctggccctggcaaagaaccccgtttttcacgaacggagcaagcacatccgggtgaggtaccatttcatccgaagctacctggaggaagggagcatcaaggcgagctacatcaacaccaaggaccagcttgcggatttgctcaccaaaccccttgggaggatcaagttccttgagctttgctcccggatcgggatggctcaactttcccacaagacggcgcacaagacttag

SEQ ID NO: 23315 - DNA, 6053 bp, Oryza sativa
  Clone ID: TF_OsC1528_2355
atggacaacctgtcagagccactgctcgcagagatcatcaagaggattgccaagacaagtgatcgtaactctctttcccttgtgtcgaagcagctctacactatcgacgcggagcaaagggatgctatccatgttggctgtggtcttcacccggcaactgaagctttggcatcactatgctcccggttccctaatttgtggaaagtagtgattgattactctggttggatatctatccacgggaagcagttggacaaccaagggctccttgtgctttcgtctcactgctcttcactgaccgatctcacattaaacttctgctcctatatcgatgattctggtattggctatctggcttattgcaagaaactaaggtctttcaggctgaactttgcaccagcaataagttcaagagggcttctctcggtggcagttggttgcaagagtctttgtactttccaccttgttgattgcatgaaagtaggaagtgtggagtggctggagtaccttggcagggccggatcattggaagaacttgtggtaaaggattcagccccccggaggtgcgccatgtccgacgctcggtctcggcgttcggtcgcctcgagcactcggcgtcagcaggacgccgagctcgccgcagcagaagagcgcaggcgagcaacggctcagaccgctgcagcagcagcgagggcggccagactggcggcagcggagttggcagcagccagggcggaggcggaggcggaggcggcggaagatgcggcacgtgcggcggaggtagaggttgagaccttgcgcagcagcatcaacggctccatcgccggcgacatcaccgctgacagggagcttgaggagctggcaagaggaagggcacgggagcgagcagagcggtgggcagcagcccacctccacggcggcggcggcggcccaagggatcgtgcgcccgccgacgggaacccagacgggcgcgggcgtgccggcggcagcccggagcccgcacgcggccctcgcaggcggcacggctccctctcccctgaccggcgccatggtcaccacggcgtccagacggtggtcagggattttggtcccggcggtgggtggcctaccctcaccaaaaccaactacatcgagtgggccgcggtgatgagggtgaggctccaggtgcggcacatgtgggaggcagtccggtacggtgacgtcgactacgacgaggatcggcgggcactggatgccctcatcgctgcagttccgcccgagatgcagttctcgctttcccagaagcggactgccaaggaggcctgggacgccatcgctgcggcacgcatcggcagcgaccgcgcccgcaagtccacactgcaggcactccgcaaggagtgggagaacctggccttcaagccaggtgaggatgttgatgactttgctctccgtctcaacactctcttgcagaaaatggtgcagtacggcgacgacacctacgacgaggagagagctgtcgagaagctcttccgctgcgtccctgagaagtacaggcagatcgctcgctcgattgaatctctgctggacctctccacgatgtcgatcgaggaggcgttaggtcgcctcaaggtcgtcgatggtgatgagccacggcctctctcggggcccatcaccatcggcgggaagctccatctcactcgggagcagtgggaggcctctcagggtgacaggaggaagggggagtcatcttccccgacaggcggccataagccgcgcaaggcgcggggaggtgtccagctacggtgggcgcgaagacgtgccgagggtggcgcccgcagaggcgcccagggcgttgccaccggcaaccacaagccggcacgagacgacacctgccgcaactgtggcaagcttggccattgggccaaagactgtcgacagccacgacgcggccaggcccacgtcgcacgggtggaggaggaagagccggctctgctcctagctcacgcaagcatcgagctacctccagcggcaccggccgcagcggctttcctccaccttgatgagccgaaggtactcgtctccctctgtgacggctccagcaacgacaaggctgatgggtggtacctcgacaccggcgccacccatcacatgaccggccgacgggagttcttcaccgagttcgactccagcgtccgaggcaccgtcaagttcggggacgcctccggcgtggagatcaagggtgttggctccgtcaccttcaccgccaagtccggtgagcacaggctgctcaccggagtctactacatccccgcgttgaggaattctatcatcagcgtgggacagctggatgagaacggctcacgcgtgttggtcgaggacggactcatgaggatttgggatcgccgtcgtcgccttcttgccaaggtaaccagaggcactaatcgactctacatcctcagcgcgcaggtcgcacatccagtttgcctcgccgctcgtcgggacgacgaggcgtggcagtggcacgagcgcttcgggcacctccacttcgaggccctgaagcagctcagtgccaaggagatggtgcgaggcatgccgtgccttgaccacgtggagcagctctgcgacgtctgcgtggtgacaaagcagcggcggctcccctttccccagcagacgagcttccgagccaaggagcggctcgggctcgtgcacggggacttgtgtggcccagtgacaccggccacaccaggaggacgacgttatttcctgctgctcgtcgacgacctctcccgctacatgtgggtgatggtcctcggcagcaagggagaggctgcggacgccatcaggcatgcgcaggctgctgcagaggcggagtgcggccgcaagctgcgcgtgctgcgcaccgacaacggcggcgaattcacggcagctgaattcgcgtcgtactgcgctgatgagggcattcagcgccactacaccgcgccgtacagcccacagcagaacggcgtcgtcgagcggcgcaaccagacggttgtggggatggctcgggccctcctcaagcagagggggatgccggccatcttctggggggaggcggtggtgacggccgcctacatcctcaaccgctcgcctaccaaggccctcgatggcaggacaccgtacgaggcttggcatgggcgcaagccggcggtctcccacctgcgggtcttcggctgcctcgcgttcgccaaggagcttggccacatcggcaagctcgacgacaggagcaccccaggggtgttcatcggctacgcggagggctcgaaggcctaccgcatcctcgacccggagacacagcgtgtgcgcattacgcgcgatgttgtgttcgacgaagggcgagggtgggtatgggacaaggcggtggatgatggttcgactccgacgtacgacgacttcaccatcgagtacgtccacttcgagggagctgggggagtaggcagctcttcttcaccgagcgtgtctaccccagtccccgagcctccaccgactccaacaccaacacaccctcgggccacgacttcgactacgacgagctcttcgtcgacaccaccccagccggtgtccccacacgctccagcaccaacagccactcctccgggcacgtctactccgacgccagctcgtgttgagcgcagcccggtggagttcgttactccgctctcccacgacggggagcgcatcgacgcgtaccatgacggcgagcagctacggtaccgtacgatggaggatcttctcggcgaccagccggtgccgggactggtgcctcgcaacctggaggcgcagttgcaccttgcgtgcgacgacggtgagcctcggtcttttgcagaggccgagaaacacgcggcatggcgtgccgcgatgcagtcggagatggacgcggttcaggagaaccgcacctgggagcttgctgacctccctcgtggtcaccgcgcgatcacccttaagtgggtgttcaagctgaagagggatgaagccggagccatcgtcaagcacaaggctcgcttggtggcacgcggtttcgtgcagcaggaggggatcgactacgacgatgccttcgctcccgtggcacggatggagtccgtgcgactccttcttgcgctggctgctcaggaaggctggggcgtccatcacatggacgtcaagtcggcgtttctaaacggcgacttgaaggaggaggtctacgtgcaccagccgccgggatttgtgatccccggcaaggagggcaaggtgctacgcctgcacaaggccctctacggcttgcggcaggcaccgagggcgtggaatgccaagttggattccacgctcaaggggatgggcttcgagcaaagcccgcacgaggcggccatctaccggcggggcaatggaggaaatgccttgctggtgggtgtctacgtcgacgacttagtgatcaccggcaccaaggatgcagaggtcgcggcgttcaaggaggagatgaaggccaccttccagatgagtgatctggggcctctctccttctacctggggatcgaagtgcaccaggacaactccgggatcacgcttcgacagaccgcctacgccaagcgcgtcgttgagctggctgggctcaccgattgcaacccagctctcactccgatggaggagagactgaagctgagccgcgacagcacagcggaggaggtggatgctacacagtaccgacgtcttgtggggagccttcgctacctcacccacacacggccggacttggccttctccgtcggctacgtcagtcggttcatgcagcgaccgacgacggagcaccagcaggctgtgaagaggatcatccgctacgttgcggggactctcgaccacggtctctactacccgaggtgtcctggcaaggcacacttcgtcgggtacagcgacagcgaccacgccggcgacatcgacaccagcaagagcacgagcgggattctctttttcctcggcgagtgcctcgttagctggcagtcaatcaagcagcaggtggtggccctgtccagctgcgaggccgagtacatggcagcatccgccgcttcgacccaggcgctctggcttgctcgactgcttagtgatctcctcggcagagatactggagcggtggagctcagggtggatagcaagtccgctctggccctggcaaaaaaccccgtttttcacgaacggagcaagcacatccgagtgaggttgatgtcattacatacagtacactcatcgatggatattgcttggcaggtaagatggatgaagcaatgaagttactttctgacatggtctcagttgggttgaaacctgatactgttacttatagcactttgattaatggctactgtaaaattagtaggatggagaatgcattatctcttttcaggcagatggtgtgcaatggtgttagtcctaatattatcacgtataacatagttcttcaaggtttatttcagactggacaaactcgtgctgctaaagaaatctatgtcaggattatcaaaaggggaatacagcttgaaattagcacatgcaacatagtccttcaaggactttgcaaaaataatctcactggtgaggcacttcagatgtttcagaatctatgtttgatggatgtaaagcttgagactagaactttcaatataatgattggttccttgcttagaagtggcagaaaggatgaatcaaaggatttgtttgctgctctctcggcaaatggtttagcaccggatgttgtgacctataccttaatgattgaaaatctcatagaagatggcttgctcgaagagtctgataatctatttctttcaatggagaagaatggctgtgttcctaactcccgtatgcttaattgcatcgtcagaaagttacttcagaaaggggagataggcagggctggtgtttatctgtccaaaattgataaaaatgacttctcccttgaagcttccactgctgagttactgattttgctggtttcaagtgggaagtacaatcaacatatgaagggtctccctgagaagtaccactcctttgtgaaatccagggctgtttga

SEQ ID NO: 23316 - DNA, 4458 bp, Oryza sativa
  Clone ID: TF_OsC359_8265
atggccggagagagaaaggagaaggttggcttcggcggttatgcctcaaatagcaaggcataccgggtctacaataagaacaaaggtattgtggaagaaaccgccgatgttcaatttgatgagactaatggctcccaagaggggcacgagaatttggatgatgtaggtgatgaaggcttgatgagagctatgaagaacatgtctattggagatgtcaagcctattgaagtggaagacaagccatccacctccactcaagatgagccatctacttccgctacgccaagtcaagctcaagttgaggtggaggaggagaaggcacaaaatccacctatgccaccaaggatacacaccgctctttccaaggatcacccaattgaccaagtgttgggtgacattagtaagggtgttcaaactcgatctcgtgtcgcttcgatttgtgaacattactcgtttgtttcttgtcttgagcaaaaacaagtagatgaagctctttgtgatccggattggatgaatgctatgcatgaagagctcaacaactttgcaagaaacaaggtgtggactttggttgaaagacctagagaccacaatgtcatagggacaaagtgggtctttaggaacaaacaagatgagaacgggttggtggtgagaaacaaggcaaggttggtggcacaaggtttcacacaagttgaaggtttggactttggtgaaacttttgcccccgtggcaagacttgaggctattcgcatccttcttgcatttgcatcatgctttgatataaaactatttcaaatggatgtgaaaagtgcttttctaaatggtgaaattgccgaacttgtctttgttgaacaacttcccggttttgaagatcctaaaaatcctaaccacgtttacaaactctcaaaagctctttatggtttaaaacaagctcctagggcttggtatgaaagattgagagattttcttttgtcaaaggttttcaaaattggaaaagttgacaccaccctttttacaaagatcattggtgatgatttctttgtgtgtcaaatttatgttgatgacatcatattcggttttactaatgaggtattttgcaagaaatttggtgatatgatgtctaggaaatttgagatgtccatgattggagagttgagcttcttccttggacttcaaatcaagcaactcaaggatgggacgttcgtgagccaaaccaagtacatcaaggatctacttaaaaggtttagcttggaggatgcgaagcccatcaagacacctatgacaaccaatgggcatctcgaccttcatgagggagctatgcctccccgcactcgtcgtgatcgtcgtgagcccacgcccgatcccgtcagtgagaatgaggaatcaagcggagatgagtatgttcaaagtgaggatgaaaatatggaaaatgttgagggggatgaggtggaagagcaacaacaattcaagcggaagaaggccacgctaagcctacccgaccgtcgggagcgcaaccgcctgtgccgcctcgaccgtgcgccggccggccgcgccgtcgcctcctccagcgtcgccgctaccccctccaccccggcctgccctccgtttcccgcggagacccccggagctacgtttccgccgtcgcccttccctttcctccgcaccggccgcctccagccgcctctatctccctgcctgagcgccggtcaacgtcgccaccacctccctcggctccgcgacgccgccctcatccccggcatcacctcctcctcgcccgaagctcgccggagtggcctcctcgccggcgtccagtggcgtcgccaccacttctccgtctccggccggctgctgttcgtcgccggtacgccgaccgacgtcgccgtctcctccgttgacgtcgcagcgtcgccctccaccccggcctgccctcggtttcaccggaacgtcgccgcgaacatctccgtccgcctcgccggagttgtttggccgcccgtccctcctcgcccgtgcaccggtcggccacacctccaccacctccggcatcgcagcggcaaggtcgtcctcggcatcgtttcccctccatccaaacccctccgcggtccatcatcgtcgtctccgatcgttctcgtcgtcgacgtcccatcggtcgcccggctcgtcgtctcgcggcgccgcctccgtcgtcggcaccgcagcggcgtggtcctcgccgtcctcgtccccgtgcagccgctgccggctgtcctcgtcgcctcctcgccggtcccggtcgtcgtcgtcgtcgtcgtcctctcgtcgttcccggtcgtcgtggcccccatcatcgtcttcgtcctcggctccgcgtcgtcaagtctcgtgccggccgtgtctcgccttcgttcaaggatcgccgccgaagtcgttccctcgccgtccgtctccgccgcgccgttcgtcgttgtcgttcccacgcctcgtcgcgtggtgctttcgtcgttccggaggttcccgaagcgtggtttgcggtcgtcgccgaaggttcggaaggccgttctctctgagcaaggcaaggcaaatgaaggctacacgagctgcggcccggtagtcgagatgtcatggcagagggttggtgccctgctgctaggggctcagtcctgcctgcctgtcccggaggttccggccgtaggtgggattgggtcggtactcttgtttatggctaggatgggttgggaactatgtcacgtcttccgtccgtataccgtggtgaataagcctaacatacatcataacagcaaaagacttagatctgttaaggtcctatccttagtttctaatctgtctctcccctttgctttccctctctccctctccaaacctttgcaacagatggctgacaatgagaaagacaataaggtcagaagtcaggacattggtacctcaagcccccgagtgaatgaagcaccagacaccagttgtgtgacactggttcaacacctgattaaccagaatcgattgcttatagagatactacagcagcatcagacgccaattctgaacctgagtcaaatacaacctcaagtgcagttggaggcagtccaagcactcacaccacaagtcagcatgccgccagcatcccgaaggacccatggtgacgtgccacatgttgactcaaaagaagcaagtatcatttgttttaggtgtgatgagcaagggcactatgcaagggagtgtcctcagcagaaaagaaaaacacccatgcgaaccgaagatgaagtccgtaagatgatcattaccagcacagaatggcctccactaggaatgacaaaacgtcaaagaagaaataccttccgaggtgcaccacagttgacagagcatcttttagctaatggaggtagagtgtctgatagtgaagattcagatcaagtctcctcagatgatgaagatgaaatggaacgtaaggcatgctctcgttgtggagaaatcggtcatgttgccagctcgtgtgccactacatgcgttcattgtgaggaagaccatccacccgacaggtgtccaacgagcaggatcacttgtttcttttgtgaaggaactgatcatgtaccaaaagattgtcaattcagttttctgctgacgaagaagatggccaaccaacccgccagttccaatggagagaagcatcaaggcaacacaaatcctcgccaagattacagtttcagcctaactccagtgccaggacagaggaatcaaaatgagaaaagaaaatgccgagtccgggaagatatctgttgcttcaattgtcaaggaatgggtcatttcgccgacaagtgcccaaaaccgagaaacatagctgccggcacgtcagtccacgcaactccctgcaatcagaagcttgctcctcagcgaattgtcatccatgtatcccgaagcagtcctatagcccgcgttgcaacagctccaactccagcgagtgcattaccacaaggtgtcaatgctcaatttcagccccagccatcagttgacaagacagaggccagtatcggcattgtacctttggatgctccagcacagcagccaaggaatcaagtacaagatgaagaacctgagcgtgagaaagttattgtctgttacaacgcactaacccttctctgcaccgacggcctcagcaaagaattgtcgtcgatggaagaagttgtgtctctccccgacctactccaggccaagcgaagggcaatcaacctccggagggcgataccaagcagaagaccgttattcgcctcaaacagcactcagaaggaagcttctccggtgaataatagcaatatgcagtcctatcacatcatcacagaaccaatcaaggatgatgcagtcactagaacaatgcccgctatatctctccagaatcaaaatgagcagccacgcttgtggttttcagttcgctacctatcattgtgcagtcgaaagtttgcagcaatcatgtaa

SEQ ID NO: 23317 - DNA, 2996 bp, Oryza sativa
  Clone ID: TF_OsC359_7197
atgtcgtggcagagggttggtgccctgctgcttggggctcagtcctgcctgcctgtcccggaggttccggccgtaggcgggattgggtcggtactcttgtctatggctaggatgggttggaaactatgtcacgtcgtccgtctgtataccgtggtgaataagcctaacatacatcataacagcaaaagacttagatctgttaaggtcctatccttagttcctaatctgtctctcccctttgttttccctctctccctctccaaacctttgcaacagatggctgacaatgagaaaggcaataaggtcagaagtcaggacattggtacctcaagctcccgagtgaatgaagcaccagacaccagttgtgtgacactggtccaacacctgattaaccagaaccgattgcttatagagatactacagcagcatcagacgccaattctgaacctgagtcagatacaacctcaagtgcagttggaggcagtccaagcactcacaccacaagtcagcatgccgccagcatcccgaaggacccatggtgacgtgccacatgttgactcaaaagaagcaagtatcatttgttttatgtgtgatgagcaagggcactatgcaagggagtgtcctcagcagaaaagaaaaacaccaatgcgaaccgaagatgaagtccgtaagatgatcattaccagcacagaatggcctccaccaggaatgacaaaacgtcagagaagaaataccttccgaggtgcaccacagttgacagagcatcttttagctaatggaggtagagtgtctgatagtgaagattcagatcaagtctcctcggatgatgaagatgagaagtctccccaaggtttcaaccagaataaaatggaacgtaaggcatgctctcgttgtggagaaatcggaactgatcatgtaccaaaagattgtcaattcagttttctgctgacgaagaagatggccaaccaacccgccagttccaacggagagaagcatcaaggcaacacaaatcctcgccaagattacagtttcagcctaactccagtgccaggacagaggaatcaaaatgagaaaagaaaatgccgagtccgggaagatatctgttgcttcaattgtcaaggaatgggtcatttcgccgacaagtgcccaaaaccgagaaacatagctgccagcacgtcagtccacgcaactccctgcaatcagaagcttgctcctcagcgaattgtcatccatgcatcccgaagcagtcctatagcccgcgttgcaatagctcaaactccagcgagtgcattaccacaaggtgtcaatgctcaatttcagccccagccaccagttgacaagatagaggccaatatcggcattgtacctttggatgttccagcacagcagccaagaaatcaaaattggaaccacccagcaggggcaaccaacgttcaagtacctacagtccagcaacagtgcaagttatcagaatttctcaaaactgagcctccaacctttgccattgccgtcgatcctatggaagccagtgattggttgcgcatagtcgagaagaagctggggttgattcagtgcacagaccaggagcgggttgtcttcgcaactcatcagttggttgcactggcttcagaatggtgggatagctacgaagcatcacggccagaaggacataccatcacctgggacgagttttcatctgtattcaagagatcacatgttcccgcaggaatgatcacactgagaaaacgagagttccgctacctgaagcaagaagatttgaccgtcacagagtacctgcacgagttccatcgtttggctcactatgcaccagaagatgtggaaaatgatgaagaccaacaagagaagtttctccaggggttaaaagatgagatcgcagtgcaactactcctagaggaatatgaagattttgagaaacttgtggacaaagccatacaactcgaaagtgagcataatcggatgaagaactgtaagagaaggattgtcagcatcccagtatttccatgtggtaaccaaagacagcgcactgagccacttcagatcaccggatcttctattgcgcatcaagagtttccgccccaagaagatggacccaatgcagacaacaacattagcaatactaatgatgatgatgataccaccaacaaccatgcttcttgccccattagtgaccactcgaatcgagcgtgcaatgtcaacatcattcaccaagatgtcgacgatagtatcaatgatggcacccaaaatgacaaccctagcagttgtgactctgagaaagactccgatggtgatagcaactatggtaccactgatgccaatgttagcaaggatttccagccaccaattccaactccaagtcagaatgatcgtccccagacggatagctcagcaaagaagacgttgatttgctacaattgcaaagaactagggcattactcgagggactgcctgcaaccaaggcaaagtcgacctccacattaccgccaatttacacgaagcagacatcccaatcgtattgtggtcactggagcaaacgccgtacccgtgaggcctcgtgcaacaaccgtcagtctagcttttgatgaaccacttgaaggttctctgaaaggcagcaggctcaagtaccacattgtcaccagaagcatccacaactcttggagtgaagagtacttggttgacaaagttcaaaaggtgattgatagaagataccagcaaagcgaccatcggggcgcgggcgcgccgcctcccatcggctgtgccggcgtggccgccttcgggcgcgccctgcggctgccatgtggggcccggccgtcagccgcccgcgccctcgggtgcggctgacgcgtgggacccacggcgccggccggtgtgagccgggtggacccggtccaccgtgggccgtgaggctgccgcgtgggccccactcccgtggacccggtccgcgcgcccctccccttcggctgacgcaataaatccat

SEQ ID NO: 23318 - DNA, 2169 bp, Oryza sativa
  Clone ID: TF_OsC359_8051
tttttatgtattgttattgcttctttatagggtttagctttgcttgtgtgcttcgcgtagctcctgtcgttccggaggttcccaaagcgtggttcgtggtcgtcgccgaaggatcggaaggccgttctctctaagcaaggcaatctagtcctgaacaaaaggacacggatagagatggatgaagtcgttgcgacgatggatatctctgaggcaaatgaaggctacgcgagctgcggctcggtaatcgagatgtctaggcaaatgaagactacacgggtcggtgcccgggctcaaccctggcctgcctgtcccgggataccggccgtaggcagggttgggtcggtacttttgttcacggctaggatgggtgaagggttatgtcacatctttacgacgggttccaaggccatggaatgcggagtaaagatgtgtcttgtgggttggcctgggttggcttgggacgagctggaacccaggtcgggttgccagttcggtccaaactatcgtaggccttgggttaaggcagtactagatggtcagctttgcgaagaagaagatgtcgtcagtcgtttgccgaagctccggaagactgcaggatccgctagcgaagcgaaggaagcagtgaagccagctgtgaagcaggacaaaagacttagatctgttaaggtcctatccttagtttctaatctgtctctcccctttgttttccctctctccctctccaaacctttgcaacagatggctgacaatgagaaaggcaataaggtcagaagtcaggacattggtacctcaagctcccgagtgaatgaagcaccagacaccagttgtgtgacactagtccaacacctgattaaccagaaccgattgcttatagagatactacagcagcaccagacgccaattctgaacttgagtcaaatacaacctcaagtacagttggaggcagtccaagcactcacaccacaagtcagcgcaccgccaacatcccagaaggcccctcatgccatgccacatgttgacccaaaagaagcaagtatcatctgttttatgtgtgatgagcaagggcactacgcaaggaactgtcctcagcagaaaagaaaagcaccaatgcgaaccgaagatgaagtccgtaagatgatcattaccagcacagaatggcctccaccaggaatgacaaaacatcagagaagaaattccttccgaggtgcacaacagttgacagagcatcttttagctaatggaggtagagtgtctgatagtgaagattcagatcaagtctcctcagatgatgaagatgcgaagtctccccaagattttaaccagaataaaatagaacttaaggcatgctctcgttgtggagaaatcggtcatgttgccagctcgtgtgcctttacatgcgttcgttgtgaggaagaccatccacccgataggtgccctatgagcaggatcacttgtttcttgtgtgaaggaactgatcatgtaccaaaagattgtcaactcagttttctgctgacgaagaagatggccgaccaacacgcccattctaatggagagaagcatcaaggaagcacaaatcctcgccaagattacagtttcagcctaactccagtgccaggacagaggaaacaaaatgagaaaagaaaatgccgagtccgggaagatatccgttgcttcaattgtcaaggaatgggtcatttcgccgacaagtgcccaaaaccgagaaacatagctgccggcacgtcagtccacgcaactccctgcaatcagcagcttgctcctcaacgaattgtcatccatgcatcccgaagcagtcctttagcccgcgttgcaacaactccaattccaatgagtgcactaccacaaggtgtcaatgctcaatttcagccccagccaccagctgacaagacagaggccagtatctgcgttgtacctttggaagttccaatacagcagctgagaaatcaagtacaagatgaagaacccgagtgtaagaaagttattgtttgttacaactgcagtgaagaagggcattactccaaaaactgtccccaaccaaggcaaaatcgacctccacattaccgccaatttacacgaagcagacattccaatcgtattgtggtcacgggagcaaacgccgtacccgtaaggcctcgtgttaatcagaaccca

SEQ ID NO: 23319 - DNA, 5976 bp, Oryza sativa; identical to SEQ ID NO: 15258
  Clone ID: TF_OsC359_5604

SEQ ID NO: 23320 - DNA, 1470 bp, Oryza sativa
  Clone ID: TF_OsC46300_1
atgagcaacagcgccgccacctccacctacgcggagagcgtcgcgtcctgccgcgctcccgctcccgccacccccagggcccccccacgccgccgtgaggcgccacttcgacttcgccgccggcgacggcgttatatgttggattttctggatgcatgtgtatattttctcaagcatgcgagagtacatgaggaaagaaatgcaaatattctgtttggtgtggagaagctgatatttgtccaaatgccacagcctgcttatatgagccatcctaaaccaaatcctcatgtttttagcagcccatgcagtcctgttgtgttcaacagtcctagcaatcatttagctggttctacaactcctacaccgaacaatctccaagtttttaatggtccaagaaaccctcatgtgtccaacagtcctagcaatcatttagctggttctacaactcctacaccaaacaatctccaagtttttaatgctccaggaaaccttcatgtgtcccacagtccaaacaatcatcgatctggtgctacaactccagttaacgctaatccccctgcagcccgtgtagtgttcaacagtcctagcaatcatttagctggttctacaactccatagacggaacaatctccaagtttttaatggtccaagaaaccctcatgtgtccaacagtcctagcaatcatttagctggttctacaactcctacaccaaataatctccaagtttttaatgctccaggaaaccttcatgtgtccaacagtccagacaatcatcgatctggtgctacaactccagttaacgctaatccccgtggttacctgaatacgatgagtggccatttgacatcgtcaacaatgatgttgtatgcagtggcttcttgccaactgctgagcctacactaagagatggtatagttgctggggaatcaccaagtacgcagcacctgtcaaatgctacgactgaagcgaaaacaccaacaaaatcgcccattatgccgccacctcatggtagcgggagccccttcactcctcggtcgaacccctgctaccgatgtggtgaagacgggcactggtccaggaactgccctaagccggcttcgagcccacttaactctccttgctacaactgcggcaagcttgggcactggagagcaagaggtgggctcctacggtgtttgtccatcatctgctttgttaatcacttcttacatgaatgcaaagtgcagacctgttactgctacaactgctactttgctcctttcttcttcagtatgatgaactggaaggcgatcggctgccgttctctgaatctttctctgaaatttttcctcgagagtttctttcagagatggtccagccctctgccgttcattcggtcagaaactgaaacctgggatgatgatcgttgcagagacttgaccaggacatacgaggacaagaagaagaacaccaatcgatggatggattga

SEQ ID NO: 23321 - DNA, 5382 bp, Oryza sativa
  Clone ID: TF_OsC1528_1763
atgaagaccctgcagggattaattccccactactccatcccgctcgccggcgtgcaccggcgatcgggagagcaggtctctggaacctctgccttcgacgtactgcattgggagaaggcggcaataaggtttttgggaagcgcttcgcgcgactgctccctgttcgtccgcgacggctcgccttcctctccgctcgcgtgcttcgcgccttcgtcgacgctcgcaaccgcgagtagttcctgccgagcaaccggtctttccgccacctcgaagcaattcgaggaagccactactctctttgtgagatgcattcttagcgttcttggcgatcgtctggtcgaggtgtatatgcatatgatcgacgttaaggagttgtgggatgcactaaatactaaatttggtgctactgatgctagcaatgatctgtatatcatagagcagtttcatgactacaagatggctgacaaccgttctgtagtcgaacaggctcatgagatacaaaccatggctaagaaactcgaactccttaagtgtgtcttacctgacaaatttgtggccgggtgcattattgcgaaactacctccatcgtggagaagtttcggtacggcactcaaacacaagagacatgaatactccgttgaggggttgatagcgtctcttgatgttgaggagaaagctcgggaaaaagacgccgcgtctaagggcgatggtgggcagtccagtgccaatgttgtgcacaaggcccagaacaagagcaaggagaaatacaaaactcaacagaccaccaacttcaagaagcagaagaagaacaacaacaatcctaaccaggatgagaggacttgctttgtgtgtgggcaacctggttatctggctaggaagtttccacggcgcaaggggatgaaggcacctgcagggcagacttctaagtctgctaatgtgaccattggcaacactggagatggaagcgggtatggtaatttacctactgtcgcacggggttccaccgtcctaatggggaatgggtcacatgcttctgctcatggtgttggcacggtagatctgaagtttacttcgggaaagatcgtgcagctgaagaacgtgcagcatgtcccttctatcgacaggaatcttattagtggctcccgtctgactagagacggatttaagttggtttttgagtctaataaattagtcgtgtctaaacatggatattttattggtaaaggttatgagtgcggaggcatgttccgcttttccctttctgatttctgcaataagtctgtgaaccatatttgtggcagtgtggatgatgaggctaatgattggcactcacactactggaaagaggctgtccgtagtgaaatggattccattatcgctaacgggacttgggaggtgacagagcgaccctatgggtgtaaacctgtggggtgcaagtgggtgttcaagaagaagcttaggcctgacgcctcatatggtcttctcgttcatcaaatgtacgttaagacaacttttcttaatggagagctggatgaggagatctatatggatcaacctgatgggtttgtagttgaaggctttgcagtcaatgaggcaaataaatgtgtgtactatcgccatggtgggggtgagggagttattctgtacttggatgttgatgacatactgatatttgggacaaaccttgaggtgataaatgagtcccattatgtggagaagatcttgaatcgctttggctacattgataactactccatcccgctcgccggcgtgcaccggcgatcgggagagcaggtctccggaacctctgccttcgacgtcctgcaccgggagaaggcggcaataagggtcactctgtggctgacagctatgaaatgcttctgggtgagtactggcaaacctgaaggagttcttactgctgaacagcagaagcaattcgaggaagccactactctctttgtgggatgcattcttagcgttcttggcgatcgtctggtcgaggtgtatatgcatatgaccgacgctaaggagttgtgggatgcactgaatactaaattcggtactactgatgctagtaatgatttgtatatcatggagcagtttcatgactacaagatggctgacaaccgttctgtagtcgaacaggctcatgagatacaaaccatggctaaggaactcgaactccttaagtgtgtcttacccgacaaatttgtggctgggtgcattattgcaaaactacctccatcttggagaagttttggtactgcactcaaacacaagagacaggaatactccgttgaggggttgattgcgtctcttgatgttgaggagaaagctcgggaaaaagatgccgcgtctaagggcgatggtgggcagtccagtgccaatgttgtgcacaaggcccagaacaagagcaaggggaaatacaaagctcagcagaccaccaacttcaagaagcagaagaagaacaacaacaatcctaatcaggatgagaggacttgctttgtgtgtggccaagttggtcatctggctaggaagtgtccacagcgcaaggggatgaaggcacctgcagggcagacttctaagtctgctaatgtgaccattggcaacactggagatggaagcgggtatggtaatttacctactgtcgcacggggttccaccgtcctaatggggaatgggtcacatgcttctgttcatggtgttggcacggtagatctgaagtttacttcggaaaagatcgtgcagctgaagaacatgcagcatgtcccttctatcgacaggaatcttgttagtggctcccgtctgactagagacggatttaagttggtttttgagtctaataaagtagtcgtgtctaaacatggatattttattggtaaaggttatgagtgcggaggcctgttccgcttttccctttctgatttctgcaataagtctgtgaaccatatttgtggcagtgtggatgatgaggctaatgtttggcattcacaagttgaaaatcaacttgacagaaagataaaaaggcttaggtctgatcgtggtggagagtttttctcgaacgagtttgacttattctgtgaggaacatggcatcatacatgagaggacgcctccctattctcccaagtctaatgggattgctgaaaggaagaaccgcacactgactgacttggtgaatgccatgttggacaccgcgggactgcctaaggcatgtgaagctcctcgaaggagtaagagacaaaggacggctaagtcttttggtgatgatttcactgtgtacctcgtggatgacactcctaagtcaatttcagaagcatatgcatctcctgatgcagactactggaaggaggctgtccgtagtgaaatggattccattatcgctaacgggacttgggaggtgacagagcgaccctatgggtgtaaacctgtggggtgcaagtgggtgttcaagaagaagcttaggcctgacgcctcacatggtcttctcgttcatcaaatggacgttaagacagcttttcttaatggagagctggatgaggagatctatatgtatcaacctgatgggtttgtagttgaaggctttgcagtcaatgaggcagataaatgtgtgtactatcgccatggtgggggtgagggagttattttgtgcttgtatgttgacgacatactgatatttgggacaaaccttgaggtgataaatgagtcccattatgtggagaagatcttgaatcgttttggctacattgataataagccttctccaacaccttatgatcctagcttgttgcttcgcaagaacaagagaattgctaggaatcaactggaatactcccaaatcattggcttgttgatgtacctggctagtgcaactaggcctgatatctcctttgctgtgagcaagttaagccgatttacctctaatccgggagatgatcattggcgtgcgcttgagcgagtaatgcgctatctgaaaggtactgtggaattggggcttcactatactgggtatcctgcggtactggagggttatagtgattctaactggatctctgatgtggatgagatcaaagccactagtggatatgttttcacactgggtggtggtgctgtttcatggagctcccagcgacgacagcgcttggtcctggcgagccgtcgccatcgcgcctgtacctgcttcctgccgctccggctcccggcgccgacacgttcctcccgcctcgccgccatcaacaagccgacgccgacgccggccttcccgcgcctccccgccgtcatggcaccggtcctcgagcgccctcatggcgtcgccgtcctcaccgcgttcctcccgcctcgccgccaccgccaagccgacgtcggatttgtacttgggaggagctcgccggcctccccgcgcctctgccatgcttccccactgcggcggcggcggccgccaccgccgccgctgtcgcggcgccgcccccctcctctcccgtctcgcgtcggctaccttgcagataagcggatctaccatgggggctatagggtctcgagcctccacttccggtattcccctcctactagttcttcttggatttgccaggcggtgacgtggtcgccccgtcgctggatggcggagcaaactatgaacaaagcacttttaggcggcgactcgttgaggacagcctcgcggatgagcaagggcaggatggacaacggcggcgacgacagcgcgtcaaccggcaaactctctcctcgccgcctccatccccacctccctcccgttgccgcggtctctgtcttccgctcctccctcgccctggatgggagtttcgtcgaagcggcgccctcttcctccacctcgccaccaccgttcccctccagctcccccttcgctctgcccctatggtcctgccaccgacgcccctccccgctcgcgtgtgccgacctcgtcgaccggggtgacttcaacagggcacaccacgtcgcggcgtgccgtgctcgccgccgccgacccttggggagaggatacaaggaaggccatagcggcgacgaaggcatgacgaagacaaaagaggccatggcggcgcccgaccgcgattctgacatgtgcgacacatgcgggtcccacgccgagtcagctgttacgtcggacaataccggggtcaaaaccaccgaatggcctaaagtgaacggcgctgcagcggcggcgcacttcgctagagggcggagcgaagaggcacacggacgggcattcggcgagtgggcataccgctgcagggttcaggagctcaaggctcctcttggatcgttggtggtggctttgaaatcgagcaacgagagcacgtccgtgctgttcccagcgatcgtcgtgcaacgaatgcttccagttccatag

SEQ ID NO: 23322 - DNA, 7920 bp, Oryza sativa
  Clone ID: TF_OsC1713_5306
atgtctggagttgccgccgccgctgctggaggagatggcggaggtggtgcgccgccgacaggagccggagctggtgcgccaggaggtgccgtgaacgacaacaacaacggaggcaattctgcctcaccatccagcggagagccattctcggggacattttcggtagttggctttgctgctgcactgaaaccacatgcttttgatggttcaaactataagagatggaaagcacgtgcactattgtggttgacagcgatgcagtgcttctatgtttcacggggcaaacgaagtgaaccacctctttctcctgaggaagaggctaagttcgaggcttcggattgcctgttccgtggagcattgatcagtgtactcgctgacaacatagtggacgtgtacatgcacatgccttctgggaaggacatgtgggatgcacttgaggccaagttcggagtttctgacgccggcagtgagttgtatgtcatggagcagttctatgactataaaatggtcgatgaccgttctgtagtagaacaagctcatgagattcagatgctggctaaggaacttgagaacaacaactgtgaattgccggacaagtttgtggcgggtggcattattgccaaactaccaccttcttggtcggactttgccacttctctaaagcacaagagacaagagttcagtgtttctgatctcattggctctttgggtgttgaggagaaggcgagggcaaaagacgtccggggcaaaaaggttgagggaggttctagtgccaatatggtacagaagaagaaccctcatgcatcccacaacaacaagaaagtcaagcttgatgtcaaacccaaggctgcaaccaattttaagaagaaaggcaagggaaaggcaaagggagactgctttgtgtgtggcaagtctgagcattgggccaaggactgtccagagcgcaaagacaggaagtctgccaacatggtcattagcgagggcggaggaacatcggggtatggtaaaatattacctacagttctctctgtttttcattcacctgattggtgggtggacactggtgctaatattcatgtcgggagaggttcctccttgttgatgggaaatgggtcgcttgcggctgttcatggtgttggtacggtcgatctgaagtttacttcgggaaagaccgtgcagctgaagaacgtgcagcatgtcccttcaataaagaagaatctagttagcggctctctattgtgtagagaaggttttagacttgtgtttgagtccaataaatgtgtcgtatctaaatatgggacttttgttggaaaaggttatgacagcggaggcttgttccgcttttctttgaatgacatgtgtaataatcataatgctgtgaaccatattagcgagaatgatgagtctaatgtgtggcattcacgactctgtcatatgaatttcggttgtatgacgcgcttagctaacatgagtttaattccaaaattcactttggtcaaaggttccaagtgccatacttgcgttcaatcgaaacaacctcgcaagcctcacaaggcatctgaggcgaggaatttggcacctctagaacttgttcattccgatttgtgcgaaatgaacggcgtgttgactaaagggggaaagaaatatttcatgacactgatagatgattgcactagattttgctatgtgtatctattgaaaacaaaggatgaggcattgcattactttaaaatctataaagctgaggtagaaaaccaacttgaaaggaaaatcaaacggttgaggtctgatagaggtggggagtatttttccaatgagtttgcatccttttgcaaagagtttggaattattcatgagaggacgcctccctattcaccccaatcaaatggggtggccgaaagaaagaaccgtactctaactgagatggtgaatgccatgttagacactgcggggctttccaaggaatggtggggtgaggcagttttgactgcgtgtcatgtcctgaataaaattccaatgaagtataaggaagtaacaccattcgaggaatgggaaaggaagaaattaaatctctcatacctacgaacatggggctgtttggccaaggtaaatatacctatagccaaaaagcggaaacttggaccaaatactgttgattgtgtgtcccttggttatgctatccacagtgtgggttatagattcttaatagtaaactctggagtacccgacatgcatgttggtacaattcttgagtccagagatgctacattctttgagaatgaatttcctatgaaacatacacctagcacttctagtaaagaaactgtcatgccccatgagcactttgcaccgatagaacacaatgatcaaacgcctgaggaaaatcctgaggaggacaacattgtagatactcgcaagagtaagagacaaagggttgcaaaatcctttggagatgactacattgtatacctcgtggatgacactccaagaaccatagaagaggcatattcatctcctgacgctgactactggaaggaagcagtacgcagtgaaatggactcgattatgtctaatggtacttgggaagtcgttgagcgtccatatgggtgcaagcccgtaggatgcaaatgggttttcaagaaaaagcttaggcctgatggtacaatcgaaaagtacaaggcaaggcttgtggccaagggttatacccaaaaggaaggcgaggacttcttcgacacatactcaccaattgctcgcttgaccacgattcgagtactacttgctctggcagcctctcatggtcttctcgtccatcagatggacgttaagacagctttcttaaacggagagctggaggaggagatctatatggatcaaccagacgggtatgtactagaatgtcaggagggaatggtgtgtaaactgttgaaatccttgtatggcctcaagcaagcacctaagcaatggcatgagaagtttgacaccacgcttacatctgcaggctttgttgtgaacgaagctgacaaatgtgtatactatcgctatggtgggggagaaggggtgatcttgtgcttatatgtcgatgacatattgatctttgggaccagccttaatgtgattgaggaggtcaaagactatctgtccaagagttttgaaatgaaggatttgggagaggctgatgttattcttaacatcaaactacaaagaggagatgagggtgggattacacttgtgcaatcccactatgtggacaaggttttgagtcgctttggatatagtgactgcaagccagctcctactccttatgatcccagcgtgctattaaggaaaacccgaagaatagcaagggatcaactgagatactctcaaatcattggttcattgatgtacttggctagcacaacgaggcctgacatctcatttgttgtaagcaagctgagccggtttgtctcaaatctgggagatgatcattggcaggctctagaaagagtaatgcgctatctaaagggcactatgagctatggaattcattataccgggtatccaaaagtactagaagggtatagtgactcaaactggatatctgatgctgatgagataaaagccacaagtggatatgtgttcacacttggaggtggcgctgtttcagcactagatactgcgacagttgaggccgagtggcttcgtgaactcctgatggatttgccggtggttgaaaaaccagtgccagctatcctaatgaaggcagtccagtaccagtcaaggttctgagtgaaacctaaatagggagttattggaggctccctgttgactggttgaggtgggggtcggaatgctacacgcgcgcgcgtgcgcgccgggctgaggccgagggcgtgggcgtgggcgaaggcgaggcgaggcgtggctggctggcggcggcgtgcgtgcgtcacgtcggttcccacgactgcctctctctcctgatagataaggaggccgcgagtccgatctattctgatcgcttgcttctttcccggtgttagttcctcctcctccgcgcctgtactgttctcgcttcctcgcttctgatctcttgcacgcacgagagattggaagtagcagtgcctccgaaaccacaccttcgcctgagatctacaccgggtaagcgggtgatcaggtttttggggagtacctcccgcacgactgctcgccatgtctggagttgccgccaccgctgctggaggagatggcggaggtggtgcgccgccgccgggagctggagccggaggtggtgcgccaggaggtgccgcgaacgacaacatcaacggaggcaattctgcctcacaatccagcggagggccattctcgggtgtactcgctgacaacatagtagacgtgtacatgcacatgccttctgggaaggacatgtgggatacacttgaggccaagttcggagtttctgacgccggcagtgagctgtatgtcatggagcagttctatgactacaagatggtcgatgaccgttctgtagtagaacaagctcatgagattcagatgctggctaaggaacttgagaacaacaactgtgcgttgccggacaagtttgtggcgggtggcattattgccaaactaccaccttcttggtcgaactttgccacttctctaaagcacaagagacaagagttcagtgtttctgatctcattggctctttgggtgttgaggagaaggcgagggcaaaggacgtccggggcaaaaaggttgagggaggttctagtgccaatatggtacagaataagaaccctcatgcatcccacaacaacaagaaagtcaagcctgatgtcaaacccaaggctgcaaccaactttaagaagaaaggcaagggaaaggcaaagggagactgctttgtgtgtggcaagtctgggcattgggccaaggactgtcctgagcgcaaagacaggaagtctgccaacatagtcattagcgagggcggaggaacatcggggtacggtaaaatattacctacagttctctctgtttttcactcacctgattggtcgcttgcgtcttttcatggtgttggtacggtcgatctgaagtttacttcgggaaagaccgtgcagctgaagaacgtgcagcatgtcccttcaataaagaagaatctagttagcggctctctattgtatagagaaggttttagacttgtgtttgagtccaataaatgtgtcgtatctaaatatgggacttttgttggaaaaggttatgacagcggaggcttgttccgcttttctttgaatgacatgtgtaataatcataatgctgtgaaccatattagcgagaatgatgagtctaatgtgtggcattcgcgactctgtcatgtgaatttcggttgtatgacgcgcttagctaacatgagtttaattccaaaattcactttggtcaaaggttccaagtgctatacttgcgttcaatcgaaacaacctcgcaagcctcacaaggcatctgaggcgaggaatttggcacctctagaacttgttcattccgatttgtgcgaaatgaacggcgtgttgactaaagggggaaagaaatatttcatgacactgatagatgattgcactagattttgctatgtgtatctattgaaaacaaaggatgaggcattgcattactttaaaatctataaagctgaggtagaaaaccaacttgaaaggaaaatcaaacggttgaggtctgatagaggtgggcagtatttttccaatgagtttgcatccttttgcgaagagtttggaattattcatgagaggacgcctccctattcaccccaatcaaatggggtggccgaaagaaagaaccgtactctaactgagatgatgaatgccatgttagacactgcggggctttccaaggaatggtggggtgaggcagttttgactgcgtgtcatgtcctgaataaaattccaatgaagcataaggaagtagcaccattcgaggaatgggaaaggaagaaattaaatctctcatacctacgaacatggggctgtttggccaaggtaaatgtacctataaccaaaaagcggaaacttggaccaaatactgttgattgtgtgttccttggttatgctattcacagtgtgggttatagattcttaatagtaaactctggagtacccgacatgcatgttggtacaattcttgagtccagagatgctacattctttgagaatgaatttcccatgaaacatacacctagcacttctagtaaagaaactgtcatgccccatgagcactttgcaccgacagaacacaatgatcaaacgcctgaggaaaatcctgaggaggacaacattatagatactcgcaagagtaagagacaaagggttgcaaaatcctttggagatgactacattgtatacctcgtggatgacaccccaagaaccatagaagaagcatattcatctcctgacgctgactactggaaggaagcagtatgcagtgaaatggactcgattatgtctaatggtacttgggaagtcgttgagcgtccatatgggtgcaagcccgtaggatgcaaatgggttttcaagaaaaagcttaggcctgatggtacaatcgaaaagtacaaggcaaggcttgtggccaagggttatacccaaaaggaaggcgaggacttcttcgacacatactcaccagttgctcgcttgaccacgattcgagtactacttgctctggcagcctctcatggtcttctcatccatcagatggacgttaagacagctttcctaaacggagagctggaggaggagatctatatggatcaaccagacgggtatgtactagaaggtcaggagggaatggcgtgtaaactgttgaaatccttgtatggcctcaagcaagcacctaagcaatggcatgagaagtttgacaccatgcttacatttgcaggctttgttgtgaacgaagctgacaaatgtgtatactatcgctatggtgggggagaaggggtgatcttgtgcttatatgtcgatgacatattgatctttgggaccagccttaatgtgattgaggaggtcaaggactatctgtccaagagttttgaaatgaaggatttgggagaggctgatgttatttttaacatcaaactacaaagaggagatgagggtgggattacacttgtgcaatcccactatgtggacaaggttttgagtcgctttggatatagtgactgcaagccagctcctactccttatgatcctagcgtgctattaaggaaaaaccgaagaatagcaagggatcaactgagatactctcaaatcattggttcattgatgtacttggctagcgcaacgaggcttgacatctcatttgctgcaagcaagctgagccggtttgtctcaaatccgggagatgatcattggcaggctctggaaagagtaatgcgctatctaaagggcactatgagctatggaattcactataccgggtatccaaaagtactagaagggtatagtgactcaaactggatatctaatgctgatgagataaaagccacaagtggatatgtgttcacacttggaggtggcgctgtttcctggaattcttgcaagcagaccatcttaacgaggtcaacaatggaagcagaacttacagcactagatactgcgacagttgaggccgagtggcttcgtgaactcctgatggatttgccagtggttgaaaaaccagtgccagctatcctaatgaactgtaataatcaaacagtgattattaaaatgaacagttcaaaggacaacatgaagtcatctaggcacatcaagagaagactgaaatccgtcagaaagcagaaaaactccggagtgatagcattggactatgtccaaactgctagaaatctggcagatcagtttaccaaggggctaccacgtaatgtgatagaaagtgcatag

SEQ ID NO: 23323 - DNA, 1218 bp, Oryza sativa
  Clone ID: TF_OsC10527_1
tcacaggtaccggctatcagtatctgtggctgttccatgagcccaaagtagaagaggacttgacatggctggagacggtactagaaccacaatttgcggtggggcaatcacgggaccagtgcccgctcttaccacacttgaaacacgcatcgggagagcttgcagaagtaaatgttctcccacctttgtcaggataaggatctgaagattgatttgggcagtcctttgcccaatggttctcttgcccgcatttgaagcaggcggaggagctcctcttgctgggaatttggccacttgaagcaacatcagtatgatattgtgttgaagcttgcagtggagcagctgtcctaagctgttgttcatcacaccacttgaaatagccacaagagctacctccctggagatatgtcccgatcgtacattaagaaagagatatgaaatgccctgattagctgggcaacgataaaactgccttccaacattctttcctgtctttgtggtgagaattaagcaagctccagcaccacaggggcaaagcatatgcgcaactgatgtatctgactgaaaaacagtattgccactgacatttgcaggacctggagatgggttatcacaccactcaaagtagttgcaacctccattgtcccgcatggggcacctgtagaacttgcggcccggattcctgggcgtgttggatgtgagcactaggcaactcccggcgccgcaggggcaagccttctcctccaccgccccacccgcgtccccatacccaccaccccctcctccgcttccaccaaaggccccgcctcctcctccgccgccagtagctggcacggattgcgggcattctcttgcccagtggcaagagtccccgcacttgaagcacgcgccgcccctcgcgacctgcgcgccgccgctgccgctgccgctacctggggtggctagggtttgggacccaccgggacgcttgcgcgcctggctcagcgtctcctgctgctgcttccaggcggagctgtggcttcccttgagcgcggccaggtagggcccctcggggacggcggcggggggaggagtggccgaagtcggtgacgaggaggtcgacgaggtcatggagaggcggcggcgcttggaggagtcggaggaggccagcgccgcttcctccgtggccgctacggcgaggaggaaggcctcgtcctcctcctcgtcggggaaggacat

SEQ ID NO: 23324 - DNA, 1185 bp, Oryza sativa
  Clone ID: TF_OsC1713_3594
ctactgctgctttgaaactggtggctgagctgtatcccttgagaacgcaactcttgaagacgcaactggcactgcattggctcctgtgacgacaatgttgttgacctgaccttgcggctgctgatgctttgacttcggacactctcttgcaaagtgacctggcttgtaacagttgaaacatacctgctgctcccttccactactgttattctcttgagactgatcctgctgaactggcaccggttgattagcttgctcgatgtttacttcattgctttcattagtctctgattcgatctcaccaccgatgttcaactgttgcgactgtccttgaccagcggaaaaagattcaccaatttggagtggctcgatacgctgtctctggcgactaccttgtgcctcctggaaaacagtcattttccttttacggttatccatcctgttcttcttgtcttccagtcgaattgctttgtcaaccaactcctgaaaatcctcatagtcatgagagatcaacataactgacagctcatcctttaagccttccaagaacttctcctgcctttcctcgtcagtacgcacatcttctggagcatagcgagctagacgattgaactcatgaagatattccgtcacggtacgatccttttgcttaagtgcccggaactcacgcttcttcaaagcaacaacacctgcaggtatatgtgtcttcttgaatgcttcagtgaactccgcccaagtgattggttgtccttctgctctgttcatccggaaatgatcccaccattccgaagcagatccttgcaactgatgtgaagcgaaaacaactttctcctgatccgtgcactggagcaattccaacttcttctcaacagcgtgcaaccaatcacctgcttccactgggttggtagtgctagagaaggtaggtggcttcacacgaagaaaatcaactaacttgttctggggcggcggaggattgacattgttgttcccttgctggttctgcatttgttgcactaacaggttgatcaattgggtctgttgagccagcacttgagcaaaggttgggttctcttcattgttattgtttccacttccactggcgcgagtgttcaccatcttaaccaggttaccactgatctggtgtgtgtagttcattatattgttcaagttgattaagcaagcaac

SEQ ID NO: 23325 - DNA, 1116 bp, Oryza sativa
  Clone ID: TF_OsC1713_4029
ctactgccgctttgaaactggtggctgagttgtaacacttgaagacacaactcttgaagacgcaactggcactgcattggctcctgtgacaacaatgttgttaacctgaccttgcggctgctgatgcttcggcttcggacactctcttgcaaagtggcctggcttgtaacagttgaaacatacctgctgctcccttccactactgttattctcttgagactgaccttgctgaactagcaccggctgattagcttgctcgatgttaacttctttgctttcattagtctctaatttgatctcaccaccgatgttcaactgttgcgactgtcctggaccagcgggaaaagattcaccaatttggagtggcttgatacgctgcctctggctactaccttgtgcctcctggaatacagtcattttccttttacggttatccatcctattcttcttgtcttcaagtcgaattgctttgtcaaccaactgctgaaaatccacatagtcatgggagattaacgtaactgacagttcatccttcaaaccttccaaaaacttctcctgcctttcctcgtcagtgcgcacatcttctggagcataacgtgccagacgattgaactcatgaagatactctgccacggtatgatccttttgcttcaaagccctaaactcacgcttcttcaaagcaacaactcctacaggtatgtgtgttttcttgaatccttcagtaaactcttcccaagtgattggttgtccttctgctctgttcatccggaaatgatcccaccattctgatgcaggtccttgcaactgatgtgaagcgaacacgactttctcctgatctgtgcactggagcagttccaacttcttctcaatagtgtgcaaccaatcacctgcttccactgggttggtagtgctagaaaaggtaggtggcctcacaagaagaaaatcagctaacttgttctgcggcagtggagcattgttgttcccttggttaagctggttctgcatctgctgtatcatcatattcattaactgagtctgttgagccagaacttgagcaagagttgggttcccttcattgttattgttttcacttccactggcgcgagtgttcaccat

SEQ ID NO: 23326 - DNA, 1536 bp, Oryza sativa
  Clone ID: TF_OsC1713_4126
ctactgctgccttgaaactggtggctgagttgtaacacttgaagacacaactcttgaagacgcaactggcactgcattggctcctgtgacaacaatgttgttgacctgaccttgcggctgctgatgctttggcttcggacactctctagcaaagtggcctggcttgtaacagttgaaacatacctgctgcttccttccactactgttattctcctgagactgatcctgctgaactggcaccggctgattagcttgctcgatgttaacttcattgctttcattagtctctgatttgatctcaccaccgatgttcaactgttgcgactgtccttgaccagcggaagaagattcaccaatttggagtggcttgatacactgcctctggctactaccttgtgcctcctggaatacagtcattctccttttacggttatccatcctgttcttcttgtcttcaagtcgaattgctttgtcaaccaactcctgaaaatcctcatagtcatgagagatcaacataactgatagctcatcctttaagccttccaaaaacttctcctgcctttcctcgtcagtacgcacatcttctggagcatagcgagctagacgattgaactcatgaagatattccgtcacggtacgatccttttgcttaagtgcccggaactcacgcttcttcaaagcaacaacacctgcaggtatgtgtgtcttcttgaatgcttccgtgaactccgcccaagtgattggttgtccttctgctttgttcatccggaaatgatcccaccattctgatgcaggtccttgcaactgatgtgaagcgaaaacaactttctcctgatccgtgcactggagcagttccaacttcttctcaatagtgtgcaaccaatcacctgcttccactgggttggtagtgctagaaaaggtaggtggcctcacacgaagaaaatcagttaacttgttctgcggcggtggagcattgttgttcccttggttgagctggttctgcatctgctgtatcatcatgttcattaactgagtctgttgagccagaacttgagcaagagttgggttcccttcattgttattgtttccacttccattagcacgagtgttcaccatcggtgaccaaagaagcggcggagaagcaacggacggcgacggcgacgaggaggaagcggcggaaaccttcgggttgacgacggcgatgaagctccggcggtctccggcgacggcgaaggggcggacgaggacggcgacgaccttgcgaacccgacggcggtcttcccgagcgacggcgacggctgaaacgacggcggcgcacggctggagcggcggcggcgacggcgaagctagggcacacggcgctagagctcttccgacgacgagaggcgaaggcgagggtggcgacgggtagaggagagctcgggggtccttaaataggtgcaaggaggcggcggcgaaggcccacggcggcggagacggcgaaggaaagctcggcttggagagaggaaaaccgatccgattcgaactcgaatccat

SEQ ID NO: 23327 - DNA, 1032 bp, Oryza sativa
  Clone ID: TF_OsC1713_4695
ctactgccgctttgaaactagtggctgagctgtaacacttgaagatgcaactcttgaagacacaactggtactgcattggctcctgtgacgacaatgttgttgacctgaccttgcggctgctgatgcttcggcttcggacactctcttgcaaagtggcctggcttgtaacagttgaaacatacctgctgctcccttctactactgttattctcccgagactgatcctgctgaactggcatcggctgatttatttgctcgatgttaacttcattgctttcattagtctctgatttgatctcaccagcgatattcaactgttgcgactgtccttgaccagcggaagaagattcaccaatttggagtggcttgatacgctgcctctggctactaccttgtgcctcctggaatacaatcattttccttttacggttatccatcctgttcttcttgtcttcaagtcgaattgctttgtcaaccagctgctgaaaatcaacatagtcatgggagattaacgtaactgacagttcatcctttaagccttccaagaacttctcctgcctttcctcgtcagtacgcacatcttgcttcttcaaagcaacaactcctacaggtatgtgtgtcttcttgaatccttcagtaaactcttcccaagtgattggttgtccttctgctctgttcatccggaaatgatcccaccattctgatgcaggtccttgcaactgatgtgaagcgaaaacaactttctcctgatccgtacactggagcagttccaacttcttctcaacagcgtgtagccaatcacctgcttctactgggttggtagtgctagaaaaggtaggtggccttacacgaagaaaatcagttaacttgttctgcggcggtggagcattgttgttcccttggttgagctggttctgcatctgctgtatcatcatgttcattaactgagtctgttgagccaggacttgagcaagagttgggttcccttcattgttattgtttccacttccactggcgcgagtgttcaccat

SEQ ID NO: 23328 - DNA, 1116 bp, Oryza sativa
  Clone ID: TF_OsC1713_4813
ctactgctgctttgaaactagtggctgagctgtaacacttgaagacgcaactcttgaagacgcaactggcactgcattggctcctgtgacgacaatgttgttgacctgaccttgcggctgctgacgcttcggcttcggacactctcttgcaaagtggcctggcttgtaacagttgaaacatacctgctgctcccttccactagtgttattctcctgagactggtcctgctgaactggcaccggctgattagcttgctcgatgttaacatcattgctttcattagtctctgatttgatctcaccagcgatgttcaattgttgcgactgtccttgaccagcggaagaagattcaccaatttggagtggcctgatatgctgcctctggctactaccttgtgcctcctggaatacagtcattctccgtttacggttatccatcctgttcttcttgtcttcaagtcgaattgctttgtcaaccagctgctgaaaatcaacatagtcatgggagatcaatgtaactgacagttcatccttcaggccttccaggaacttctcctgcctttcttcgtcagtacgcacatcttctggagcataacgtgccagacgattgaactcatgaagatactctgccacggtatgatccttttgcttcaatgtcctgaactcacgcttcttcaaagaaacaactcctacaggtatgtgtgtcttcttgaatgcttccgtgaactccacccaagtgattggttgtccttctgctctgttcatccgaaaatgatcccaccattctgatgcaggtccttgcaactgatgtgaagcgaaaacaactttctcctgatccgtgcactggagcagttccaacttcttctcaatagtgtgcaaccaatcacctgcttccactgggttagtagtgctagaaaaggtaggtggcctcacacgaagaaaatcagctaacttgttctgcggcggtggagcattgttgttcccttggttgagctggttctgcatctgctgtatcatcatgttcattaactgagtctgttgagccagaacttgagcaagaattgggttcccttcattgttattgtttccacttccactggcgcgagtgttcaccat

SEQ ID NO: 23329 - DNA, 1702 bp, Oryza sativa
  Clone ID: TF_OsC1713_5276
ctaatcacgaaaaacattgctcaacccgcccataaccgcgggcacggctattcgaatagttttactctggccagaggtgtaccacattcctggatcataatcacccccctcaaaaaccagaggcatggactccccagcgactcccgtgggcttatctccgccacttctcagtctggtgctcggctcacgggagagggcgacgatgacgtcggcgatgacgtcaccaccggcggcggcggctcggcggctcggacggcgcacgctcgctggcgaacggcggcgcggtgaccaaaggagcggcggaggagcaacggacggcgacggcgacgaggttgaaacggcggcggagatcgggtcgacggcggcgatggtgctccggcgatcttcggcgatggcgaagcggcggacgaggacggcgacgacttggcgatcccgacggtggccttcccgagcgacaacgacgaccggaacggcggcggcgcacggctggagcgacggcggcgacggcggcgcgaagctgaccttgcggctgctgacgcttcggcttcggacactctcttgcaaagtggcctggcttgtaacagttgaaacatacctgctgctcccttccactactgttattctcttgagactgatcctgctgaactggcaccggctgattagcttgctcgatgttaacttcattgctttcattagtctctgatttgatctcaccaccgatgttcaactgttgcgactgtccttgaccagtagaaaaagattcaccaatttggagtggcttgatacgctgcctctggctactatcctgtgcctcctggaaaacaatccttcctctcttacgattgtccatcctgttcttcttgtcttccagtcgaattgctttgtcaaccaactcctgaaaatcctcatagtcatgagagatcaacataactgacagctcatcctttaagccttccaagaacttctcctgcctttcctcgtcagtacgcacatcttctggagcatagcgagctagacgattgaactcatgaagatactctgccacggtatgatccttttgcttcaaagccctaaactcacgtttcttcaaagcaacaacacctgcaggtatgtgtgtcttcttgaatgcctcagtgaactccgcccaagtgattggttgtccttctgctctgttcatccggatgtgatcccaccattctgaagcagatccttgcaactgatgtgaagcgaaaacaactttcttctgatccgtgcactggagcaattccaacttcttctcaacagcgtgcaaccaatcacctgcttccactgggttggtagtgctagagaaggtaggcggcctcacacgaagaaaatcagctaacttgttctgcggcggcggaggattgacattgttgttcccttgctggttctgcatttgttgcactaacatgttgatcaattgggtctgttgagccagcacttgagcaagggttgggttctcttcattgttattgtttccacttccactggcgcgagtgttcaccatctctcgccggccaaccccaaccgccattgccgcccacgtcgccgcaaaatccggcgccctcccgcacccgagctcgcatccaacgacgtgggcacgatcccctccacgtcctccaccattttccccgctcgtcccacaaaaaccggcgccgaccgagccaccaccaccccccat

SEQ ID NO: 23330 - DNA, 4571 bp, Oryza sativa
  Clone ID: TF_OsC1713_5360
ccccttttattattgccgaattcatgtttcgacagttggcgcgccaggtaggggttgcgtcgagtttcctatcaacgagcgcgatggaatcaatttcatgagtcgccgacttcgctttcgctttgggagttttcacttcaatgttgttgacctgaccttgcagctgctgatgcttcggcttcggacactctcttgcaaagtggcctggcttgtaacagttgaaacatacctgctgctcccttccactactgttattcacttgagactgatcctgctgaactggcaccagctgattagcctgctcgatgttaagttcatcattagactgcctctggctactaccttgtgcctcctggaatacagtcattctccttttacggttatccatcctgttcttcttgtcttcaagtcgaattgctttgtcaaccaactcctgaaaatcctcatagtcatgagagatcaacataactgatagctcatcctttaagccttccaaaaacttctcctgcctttcctcgtcagtacgcacatcttctggagcatagcgagctagacgattgaactcatgaagatattccatcacggtacgatccttttgcttaagtgcccggaactcacgcttcttcaaagcaacaacacctgcaggtatgtgtgtcttcttgaatgcttccgtgaactccgcccaagtgattggttgtccttctgctttcttctcaatagcgtgcagccaatcgcctgcttccactgggttggtagtgctagaaaaggtaggtggcctcacacgaagaaaatcagttaacttgttctgcggcggtggagcattgtagttcccttggttgagctggttctgcatctgctgtatcatcatgttcattaactgagtctgttgagccagaacttgagcaagagttgggttcccttcattattattgtttccacttccattagcacgagtgttcaccatctattgcagataggaggagataggaggagaggggttacctagtatagttacacactcatcaatgaactactccaatgatgggaatgcaaccatacctacacacaagcaagcaacaagcgttctaccctactaactattcttcaaagacactttggcggcataggttctaaggtaggatccaaacttcattccatcttgaccacttggcacttcggttcttcctcgatccacttgactgacctccataagtagacctcattaacatcttctagtttcaacaactagttttagaactactcaagttgaaagcaggaggggagaggatgataaaatgatttatagagaattctagagaaggaagaaaggaaaattttcacacatcatgttttcggaaaattagtccttaaggtttgaccatttggcttatcctacagtcgagatggctctgataccaacttgtcacgcccggaaattcactagtaatttccgaacttatttgtgcataaaatcctcgtccaggaatcagccgaggtacacaaattgacaatttaatatacagattcatcaaattaactaaaacgataaatacttacttatgaggcacttagtcctcaccaagaagaaaattgcagcggaaaaataaaatctagcgaagctccggctccactcccacaggcagctcaactggggtataagccaaacgtcttctccttcgcaacttgtcttcaactgaggttgattgattattgcaaggtgagcatatgacatactcagcaagccacacagcaaatatgcaacactgtacccacaagacacagccccacatcatgtcaccatgtgcctcagtaccaccacggtacctcggaaaggggctgtgacagtaccccttgcataacacaatccaccgcagcgcaccattcctggatcataatcacccccttataaaacaaggcatggactccccagcgacccccgtgggcttatgtagaggacgacgcggcgaactcaccggtgaccaaaacggcggcggaagaccaacggacggcggcggcgacgaggaggaagcggcgaagctcttcgggtcgacgacggcgacggcgctccgacggtcttcggcggcggcgaagcggtggacggggacggcgacgacttggcgaacccgatggtggcgacagcgaccgacgacggcggctgcaacggcggcgcggcgcggctgaaccgacggcaacgacggcggcgactagggctacgcggaggcggcgctagacgcgacggcaggctaaggcaaaggaggcgacggattaattatcttgatttcaaagattttggatttagaaatattccaattggtccaccaccaagaatctctgtttggaaaggcggaatgataaaagagtattcaaaaatggatgaatgcaaaacaggagattttggaaagcgaccactcattgatgacatttccacagtttgcaagtggttcacaagagaactttctgacacaacatacggaaaaaatgcacaactagctgccaaggttttggattgcgtctacatgtcaaaagcaagcctattcacacaaaaagatagcaccataacaagagaagagaagagtagagaagagaagatcaaggagggaagaaagcagggtggcagcaatgtagcacataatggtaatgccccacccctagaacaaaaccacccaaacaacactgatgtctgttcccaactaccaaagacaccacaaacaaaatcaactgtagagcatgaaacaaagtctaacatcaacaacaccagcactagcaaaggagcaccccctacagagaatgttatatgttcccaactacaaaccacaccaccatcaaaacaaactgaacaagaaaactcaaagtcaaacagcaacaaggacaacgcttgcaaagaaacgcagtatgcagataaaaaagcatccagtaaggactttgtttgtagtcagcaatcaaacaactctgtggcatccaggactagagctaagatattacattcagcatcccctttgtcggttgtatcaattagcccatcgaaaaaaaattcttctgaccaaaagattcgcaaagcagtaaggaaacagcccttaaaagcaacacaacctatcagtactcaaccagacaaggaagaatcaaacaaggatggtcttttcgtggaacctatctgtactataccagccaaaaaggaggagaagcagatagacattgttttagaaaacacctcaaattttagaaaacagatgaaactagagcatacaggcacaaacatcatggacattgaacatagcagcattcaggtgacgcagggggagaggtacatgaacacacccaaaacatgcataaacaataaagttggagttcaacatttatcagcaaacttcactgcaaacatggggaataggaggcttgagggacagcactgtgatgaaaacgagtaccaagatgacttcgcagaattcttatatgaagaggaaccatcagataacatcgatatggttgaacaacgtgcgcaaccacaaataaacaatgagcaaagtagccctcaaacaccactgcacataaacattacttctgcaaggacacctgctacaaaaaagagttcacaatcatcacctaatatagaagaaagacaatattcaatgacaagaatcatcgactcactaaatgcttctggcaactgttctggtaccagacacaatctttatcgccctaaaagaattgtacatccaagtaaatacaagagctcaccatatgacaactacacacggcaccaaaccatctcggcagctgaactcaatcactacaacaacatactcagcattggtgagacgcaacaatataaaaataaatttgcagttctaatggacaatgtaaaagtcacatggtcatcattgtctaaatatttatcaccaaggggagtggtggatacatatgtcctcaacgcgtatgccaagaagattgccaacgaccagaataacaaagaaaatgaatacatgaatttttacttcttccacagaagtagtgtttatttcttgaagaattgggaaggtgctggaaaagaggaagactatgaaaattgcgcaagacaagcgtttacacttgctaggaacaagaaacctctgcactactatgacttgcttattttcccatgcctgtatgacaatcattggtttgtgtttactgtggacatcaaggggcatcactttgtcttcctggactccatttatgatgaaaacagcaaatatcataagaaaattcaagggctactgataccaggattcattgcaatgtgggaagaattctcagatgtggagaaagactttagtaaatttgatatccaatacccacaaattactcgccaaaacaatgggcatgattgcggaatctacgctatgaagtgtatggaatggtggaacccaaggatgcacttgaaagatatgatcagaccagaatatatcccaaacatgaggaagcaaattgcaaatgacctattgttctcagaatacaattcacaagaagaagcaaaaatactagctagaagcttcaatccaacaaagcatggaaaatatgcaaggcaacagtga

SEQ ID NO: 23331 - DNA, 639 bp, Oryza sativa; identical to SEQ ID NO: 15271
  Clone ID: TF_OsC359_7027

SEQ ID NO: 23332 - DNA, 1255 bp, Oryza sativa
  Clone ID: TF_OsC8494_1
agactcggtcactgtggaacaatggcgtaaacaaccagtgctacaagcatgaagcatgtacatcagaatatcagattctttcagcaccaagcctcaagttcagcaaaacaccattgcacatgctattcaggcagtagcacaataacaacagagttgtgctgattactgtgccatgtaatacatccatcacaggggtcgacaggtgcaatgcaatgcaagggaataacaagcgaagatgcaggtaactgagttgagtatgtagctggttgcttgctagctatgccggctgcgaggcgcgagcacgcgccgctgctgccctctccaaggccctgagccggtttgcctccatgcgcgccctctgctcttcggtcagctgaatcttgcccggttggttctgcgcttctcgtggtggatcatcttgtggtttcgcttcctttggagccatggccggtgtggtttcctcggctgttcctccaacagctgggatttgtggctcatcagcttccttattgtagatttcattaaggagatcttcttgcatgggatccacatcgttgctttcgaccggtatgtctatatcttcttgcacctggtccacgccatggttttcggtcgccggaacttcagtcccaaaaattgggtcttcagctgtggctccatctggttcgccctctgggatgacttcgaccggcggttcatgcagtagggtaggatctccccctctggcaaccctgtccctcagttcagaaacgcatctcctaacacggttactagcccccactttctcgacttttcgcacaaactgatcaaaggagtaataaggaatcaagcgagagtgccagtctgtgtatagcttgatcagattaccaagatcctctacctcgtggccggggcgggcgcggggtttgaaggccttggggaagtagcggaggacgaagccaaggccgtcatcggagagcagcaagtccggagtgagcttgggccgcgtcgccctctccttcttcttcttcttaccctgcgcctggccgccactcccgtcctccccttctgccgccgccgccgccgcggcactcttcccgaacctcggcctcgggtaaggggcgaagcgggaggcgctgggtttggggttggggttagggttagggttgtcggtggatgcagcgccggcgccggcgggctcggaggggcagtcgcgggaccagtggcccggacggccgcacttgtagcagccggtgggcaccgccgccgccatcca

SEQ ID NO: 23333 - DNA, 1068 bp, Oryza sativa; identical to SEQ ID NO: 15273
  Clone ID: TF_OsC359_5800

SEQ ID NO: 23334 - DNA, 1014 bp, Oryza sativa
  Clone ID: TF_OsC338397_1
atggaccaatcgacatcgaaaaacaagaattcctccaatctacaagacccccaaaatatgggaataaaccagcccatgctactctttgaagatcctccccaagcttccaggaacaaaggacgagtccaagcctcactaaagcctgaagactacaccatcaatctgaatcacctaaagcaatattcttcgaatgaaaggtgccacctgactccagcaaaacgaaggataaatgtcacgtgttatagatgtggcgaggaaggacattgtgccttggattgccctaagaaaaagctaggaaatggacaagtaaggaatatacctcgacacccaaaaaggaaaatgagggcaggaataccaccaaaaccgatgccacattcactctatccaaaacctatgtatcagcaatttcgtagacaaggaactacaccacattggtggaagggaaaacggaaaagaaaagcgtcatcacgaataacatatgctgaacttgacctcagtaaaatgggaatagaaatcggtgatttgcctgaagatgttgaagagctacaactatggcaacgaaagagagatggctgttgtttttcttgtggacaatttggacattatgcgataggctgtactcaagacaccaatgaagaacaagaaacactgccctcacagatcggcccggaagagcatagagttccagacccatccaaagaagtttcgaagattaaggcatgtagtcgttgcggagagataggacactacggtagtaattgcattactcaatgcccctactgtgacgaagaccatccaaacggagaatgcccaacaacgaagatcacgtgcttcctctgcgaaaagacggatcatgtgccccaagattgtcaactaagtccgttgctgaccaagacggcggaagtacaaagagtgtcgcttcgcttcgcccatcgactcatgacatccagaagccacgaagacccgggatttcctacttttgatttgcatgtttgtttgtcgaacaatatttaa

SEQ ID NO: 23335 - DNA, 449 bp, Oryza sativa
  Clone ID: TF_LIB3432-017-P1-K1-C3
cggacgcgtggccgctcatcatcttttgggtctagggacagcagcaggagcttcagtggtgcttgcttcaactgtggcgaaagcgggcaccgagcatcagactgcccaaacaagtagatggtagaaacccagggcatttgcactggtcacactttaatggaccaaggattgaaaaagtggaattcagagaatccatggtctggctacaagccaatctcagttgcatggacagttgatgtgccaaatgttctcgcattcgtgaaggaactcctcatggctccatgagcgattttacgcctatttcttgtgcttttggatacacaagcaaatttgacaaatacagagttgtgattagatcctggaaaccggaagctttctattcccctatgaataagaagatattggtgttttgatttcttgagttcaagtctggtggctcaaaacaacct

SEQ ID NO: 23336 - DNA, 3590 bp, Oryza sativa
  Clone ID: TF_OsC11468_1
atggcttccctcctcacgctcccctccctctccctctccaaccctagcgcctccgccgccgccgcgggagccggagcggcgccgtctctgcgcctccgcgccgccttccgctgctgggcgctgcggcgcgcgggcggcggccggtgggcggccgcgggggccatcgcgtcgcccaactcggtgctcagcgagcacgcgttcaagcggctgcagctcagcgacgaggaggaggaggaggaggagggggcctacgggagtgacgaggagggggtcgaggcggtgggtggcggggagggggacgaggacgagctcgccattgccaggctcggcctgcccgagcagctcgtatccacgctcgagaagcgcgggattacccacctgttccccatccaggtttcggtattaggcggagacagcgagggaattggtgttagtgtaggatttgttggggggatgagttcgtggacagttagggctgtattgattccagctcttgacggccgtgacctgattgctagagcaaagacaggaaccgggaagacgctagccttcggcattcccatgatcaagcaattaatggaggaggatgatggacggagtgtgaggcgaggtcgtattcctcgtgttttggttctagcacctactagggagttagccaagcaagttgagaaggaaataaaagaatcagcacccaagctcagtacagtctgtgtttatggaggtgtctcatataatgtccagcagaacgcactctcccgtggtgttgatgttgttgtaggaacacctggtcgcattattgatttgataaatggcggaagtcttcagttgggagaagttaagtacttggtccttgatgaggctgaccaaatgcttgcagttgggtttgaggaggatgtggaaacgatattacaacagctaccagctgagaggcaaagcatgctcttctctgccaccatgcctggttgggtgaagaaattatctaggcgatacttgaacaatcctttgacaattgacttggtcggcgatcaagatgaaaaacttgctgaaggaatcaaactttatgctatcccgctcacatctacatcgaagcgcactgttcttagtgatctcattacggtgtatgcaaagggtgggaaaaccattgtgttcaccaagacgaaaagggatgcagacgaggtatcattagcactgacaaacagtattgcttcggaggcactgcatggtgatatttcacagcatcagcgtgagaggacactaaatggttttcgtcaagggaaatttactgttctcgtagcaaccgatgttgctgcccgtggtcttgatataccgaatgttgatttgattatccattatgaattgcccaatgatccagagacttttgttcatcgttctggacgcactggccgagctgggaaagcaggaactgcaatcttgatgttcacaaacagccagagaaggacagttagatcacttgagcgtgatgttggatgcagatttgacttcataagtcctccagcaattgaggatgtgctggagtcctctgctgaacatgtcatagctactttaagaggtgtgcacacggagtcgattcagtacttcattccagcagctgaaagactgcaagaagaattaggacctaatgctcttgcttctgcattggcacatctgagtggattttctcagccaccctcttcacgttctcttatcagtcatgagcagggatgggtgactttgcaactaactagagatccaggatatggaagggggttcttttctcctagatctgttactggctttctgtctgatgtttcttcagctggatatctgctgatgaagttggcaaaattttccttacagcagatgagaaggttctttcgatttacctgaggagcgtggttggcattaacataacaactcaagtctgttttacagttacgaaccttcttgcgtcaggaaactcaaaagggaagcatgcacagttcttatgtgacatgtgccagttctatagagactggcatgccgaatccgatggctttgatggaattttcctccatgatcctgtgagcttcactgccctagttcaccctgagtacttcacgttcaagaagggtgttgtgagagtagaaacccagggcatttgcactggtcacactttaatggaccaaggattgaaaaagtggaattcagagaatccatggtctggctacaagccaatctcagttgcatggacagttgatgtgccaaatgttctcgcattcgtgaaggaactcctcatggctccatgagcgattttacgcctatttcttgtgcttttggatacacaagcaaatttgacaaatacagagttgtgattagatcctggaaaccggaagctttctattcccctatgaataagaagatatggttgttttgatttcttgagttcaagtctggtggctcaaaacaacctggttccacctaagaacagaataaggactggtttgttctgggctagtaggcatcagacctgaggaccaaaacaatctgttatcttattatatgtaataggaggattagaagtttgcttcctagctacaagcaaaatatatgtagtaaattgaaattctgcatacgaaagacagcattattacaaactgtttcagacatttgtgccacagatatacatttcaaattcggaaacaaaataaaaaaaaaaaagctacctgcattacaggatgatggtcctgctactgatagttatggccgattctcaaactcggaccggggtttcaggaacagacggtccaggggtggtggctcaagaggcgggcggggtggttgggactctgatggtgaagacagatttcgccgtggtggcaggagcttcagatctgacaatgatagttggtcagatgatgactttggtggcgggagaagatcgaaccgttcgtcatcctttggtggccgcgggtcatcttacggcagtcgtagctcgtcatcctttggtggccgctcatcatcttttgggtctagggacagcagcaggagcttcagtggtgcttgcttcaactgtggcgaaagcgggcaccgagcatcagactgcccaaacaagtagatggtagaaacaacactcttccctgccgctcgggagttgctccttctgggcttgatcatttccaacaagcggctggactattcaacacatgccaaggaacaccaaagcccagtcccccttcatctgatccatacatgcccaacactattgcctgacgaagattttgcactggttagtacagctctgtgtcgtcattccgtcgtgaagattttggcacgctgaccaccaaaggagagccttctgttcatttatatgtaatacgggttttacagggacgttaaatttttgttaccacctgggagttctcaataggatgttaagattaaatgaaccgtgtgtacagctcgttcctacacgactggactggctgatgccatcagaaactgttcgcgccaattagaatcactgtccaatgtcaaacaactttacaaaaaaaaaaaaaaaaaagttggcaccggggccccaccaagaaacctgcagcccgggggatccacta

SEQ ID NO: 23337 - DNA, 3060 bp, Oryza sativa
  Clone ID: TF_OsC1713_4507
ccagagggggaacttcataaactcaacttctatcccatgatttcccgcaaaactcatggataagaatgaatgtgtagcaccagaatcgaaaagcactgttgcaggaactaagttaacaagaaacgtacccaaaatcacatctggagcatcttgagcttctgcagcagcaacatgattgacacgggcctttggcgctggtgcggtagagttgctctgggcagggacaaccttcacacgtcgaggcttcggacacttgtcagcgtaatgtcctgggtctccacagttgaaacacaccacgggcttgctgccttgctccctcttggcaggttgttgctgtgtcgaggctgcaacaggacgtggagcttgattacggatgttgttgccagcattgttgttgaagaactgacgctgcggacgaacaacagacgaagaacctccctgtggcatagactggggtcctaaagtaagacgcggcttctgattattcccctgttgtgtcttgaattgagcaatccggcgtttcttctgctccatgcgattgtatttgtcctcctggcgaatagccttatccactaacttctggaaatcatgataatctccagtcatgagtgggtaagaaagctcatcattaagtccttccaagaacttctcctggcgctcttcatcagtgcgcacatcttccggagcataacgagccagacgattgaactcgtgcagatactccgtaactgagcgagatccctgggtgagcgacctgaattccttcctcttgagagacaccactcccgatggtatatgcgtcttccggaaagcagcggtgaattcaagccaagtgataggttcagcagtagtcctattcaggcggaagtgatcccaccattcagaggcagggccatgcaattggtgtgatgcaaatgagaccttctcctgatcagtgcactgaagcaaatctaacttcttctcaatagtgtgcaaccaatcacctgcttccactgggttagtagtgctagaaaaggtaggtggcctcacacgaagaaaattagctaacttgttctgcggcggtggagcattgttgtttccttggttgagctggttctgcatctgctgtatcatcatgttcattaactgagtctgttgagccagaacttgagcaagagttgggttatcttcattattattgtttccacttccacggctcacgggagacggggacgatgacgtcagcgatgacgtcaccaccggcggcggcggctcggcggctcgacagctcggacggcgcaagctcaccggcgaacggcggtgcttcggcacgaacggagcccttttcgcctcctccgctcgttttcgccgctccccggccgccccctcgctcgttgggccgacgccgccatcaccgttgtagtggtcgtccttcccgcgtcgggatttaatacgcaaaatagtctggaaatttgggttaaatttctgggcgtgacaaagtggtatcagagccaactcgactttgttaaaccgtggaggataaaccgtcagcttcgtgtctgttcggaagtcaagtcaagcatcaagcttcatgcagcaaagagcgggaagcagatggtcagtgtgaggggcaatttcaacggatcaggatcccgtcagtttcatggatcaactcagctcaattctataagcttcccacgtcaacctctcaaagatcagccacaatcccaagtcatggctaatcagactcagacagtggaagagttgttacagcagatgcgacgtcggtaccagatctatctgatgcagcagatgcaacggcaatgtcaggagccgcgtcaagtccaccagccacaaatgcaagtccaggtgccagcccggaacctgaatcagagtcaggagttcccaatatcggcacctaagacccctgtcaaaatgatgtccagatccccgaagataacttcagccaactcaccgtcggaccaaaggaaaataagtgctacctgttatgactgtggtgagcaaggtcattatgtaaggaactgtccatggaaggtgtttgccaggtcacctgaaaaagacgagaagcagtgcccagggagtaaccaagctccaagtcagtctaccgacaagaaggatggtactttgcagcgcaactctggagcgaataggacagtgatatggaagatggataatggtaggaccatgatcatcaccggttcagaatttactcctgaagacgcagcaaggatacccaagcgtcggagaggaagaaataccttccgaggagcgcgtcagctaacccgtcatctcataaagtacggtccacccagacccgaagatgatgaatcaggagaacggttttctgctgatgacaatgacgacaacgatgatgataatgatgacaatgatgatgcgacccttgacagtttcagggaaagagagttgaagtgcaaagcatgtgctagatgtgggatagtcggacatactgctagtttatgcctccccacatgtcgctgtggtgaatacacccattactcagatgcatgccctttgaggaaggtcacatgtttcttgtgtgaaggaacagatcatgtgcctaaggactgtcagttgaacgcggtcctagctatgaccaagaaagaacaaggggcaaccgtgcaacccattcgtcaaccaatggtggtcgacaacaacagtctcaacccttctactctttcaccaaccacagctccagtggaagccaaccttggaagaagcaacgtcgccagggatgttcatgaatcactatgtgttccagtttcagctgccaaagtgcataatcagaagcctgcaccccgagacccagcaagtcgattctgtcgcaactgtcgtaagccaggacatcgtttcagtgattgtcctcttccaagagcagcaaaggcagttcgtcgtgattcccaagttaccagcactgcccatgacaccaatcgacacctgaatgtgcaacctccgcctcaacggattatcgtcaagggcaccgtcaaaggtcacattgttccaccggccatcgtttcaagcctacagcaccagcaccagtag

SEQ ID NO: 23338 - DNA, 5491 bp, Oryza sativa
  Clone ID: TF_OsC1517_1418
ctaagggagcagctccgggaactcggcgcggagaagatcttctcgctcccaggttgcctcatcttcagaatggttgctccattggactttgtagaacttgatggtcttccttcgagtctgacgttctgcctcttcaagaaccttgatcagtctttccttgtaggtcagattcttttccagctcgatattacccagggaaacttgctcttcttcaggtaactcaagctgataagccacttcgccacgtctggcggttatgaggtaggggccgatgtagcggggtgctaacttgccggacatcccaaacctcctcataccacggagaggtgatacccgcaggtacacatgatctccttttccgaactcaaggtcacgcctccgattgtcagcgtaattcttttggcggttctgtgctgtctttaaacgttctcggatcagcttaacttgttcttttgctgccttgagtatgtcaggaccgaataccagcgcttcgcctacctcattccagcacaagggggtgtggcactttcttccgaacattgcctcattcggcgacatctgaatactggcctggtaactgttgttgtatgagaactcagcatacggcaaacaacgatcccaagtgccttcgaaatccagggcacacgcacgtagcatgtcttctaggatttggtttactctttctgtctgaccatcggtctgcggatggtaagctgtactaaaatttagatcggttccgagagcttcatgcaactgtttccagaaccttgaggtgaactgagtgcctcggtctgacacgatcttcttgggacagccgaatctacatacgacatgggtcatgtagagttctgctagtttctttccatcaaaggtagttttcactgccacgaaatgagctgatttcgtgagtcgatccacgattacccagatggagtcgtacccgctaggggttcttggcaaaccggtgatgagatccattccgatttcttcccatttccactcgggaattggtaggggctgtagcagaccagctggcctctgatgctctgccttgactctttggcaaatgtcacacaaggctacgtattctgtgacatctcgcttcattccagcccaccagaagtatgccttgatatcttggtacatcttcgtacttcctggatgaatggagtaggcggactcatgagcttcctttaggatgagatctcttaattccttcttggccggtacacagatgcgtggaccgcaccaaactgtgccttgatcgtctatggagaaattggtgtctttcttctcctgtattctttttattaactcttttatcccttcgtcgtctttctgagcttcccggatttgcgactctagggtaggctgtactgtcaagctggcagggacacctgactgtaccacggtcagcctcaacttctccaattctctgcacaggcgatcttggtcaggccgtatttgagctacattgcaataggccttgcgacttagcgcatcagcgaccacgttggctttaccggggtgataatgaattccaagatcgtaatccttgattagttccaaccatcttctctgcctcatatttaactcagtctgagtgaagatgtacttaagacttttgtgatcggtgtatacttcacatctgttcccgattaaatagtgcctccagatcttaagagcatgaaccacggctgccaactcgagatcatgggtgggatagttgacttcatgaggcctgagctgcctggatgcataggccacaacctttcgttcttgcattaggacacatcctaagccttgtcttgatgcatcacagaagatctcaaaatcttttcggatatctggcaaggtgagaactggggcagtggtcaaccttttcttcatttcttgaaagctgccttcacatgctgcagaccattgaaatttcttttccttctttaatagctcggtcataggtctggctagcttagagaatccttcaatgaatcttcgataatatccagctaagccaaggaagctgcggatctctgacacattcttgggcgggttccaagcaagtacagccttaaccttgctgggatctacttcgacaccgttggaggagatcatgtgtccaagaaatgctactcggtctaaccagaattcgcattttgagaatttagcgagtagttgatgatccctgagcttttccattatcagcctcaggtgttcagcatgttcttcctcattcttggagtatatcaggatgtcatcgatgaacaccacgacaaattggtccaggtattccatgaagattttgttcattaagttcatgaagaatgctggagcattggtgagtccgaaggacatcactgtgaactcatatagaccataacgcgttgagaaagtggtcttcgggatatcttcagatctgatttccagttggtggtaacctaatctcaagtcaattttggagaaaactcttgctccttttagttgatcgaacaaatcgtcaatccgtggcaatgggtacttgttatttatagttacttcattcagggctctacagtcgattaccattctctcagagccatccttctttttaaccagaagcactggggctccccaaggggatgagctaggtcgcacataacctttactctccaattcttcgatttgtcttttgacctctgctaactcattagctgccatttggtagggtctttttgcaattggtgcggtgcctggtgccagttctatcgcgaactcaatctctcggtctggtggcatactcgttaattcttctgggaatacgtcgggatattcacagactacgggcaccgactccaaggaggtgacttgtaaacaggttaggatagaccgacttgcggtaggggtgttagaggtaaagcggacttgctttcctccaggtccttgcaaggtgatggacttttcggcacaatctatctgtcctttgtgcttagctaaccaatccatccgtaggatgatgtccaagttttgcgagtctaggactatcggtttggctaggaagtcaacttcctcagttctaaggttaacttccgggcatatttgagttgcccttatattcctcccaggggaatgtactatcataggtacacgtaaattttgggttttccaaccatttcttttcacaaaagcttgtgatatgaaagaatgagaagctcctgaatcaaatagaactattgcgggtatggagttgacagagaacatacccatcacaatgtctggagcatcctgagcggtctcagcttgaatgtggttcactcggcctcgaccaaagctgttggaagcacgagaaccttgtccacttgcctgagagctaggacgagactgagctgccgctggagtaggagttctggcagtgctgccattagcatgcccggagttggtgttggtaggattctgagggcactctctggcatagtgacccatctggttgcaccggaaacactgaactgctgacggtccctgcggtgacttgaaagaggtaacactgtttggcgcagtagtgccactaggggcacgctgctgtggccgaggtgccggacggttcatctgaggacgaggggcgtagcctggctggcagttagcctgagtgaccgactggtggtattgcatgggttgaccaaagcgagggcgaggtgcgcctcgggaagaattcccctgatggttagacctgcgtttcttgtattcttcggtggtctcctttctggcatcctcaagtagaagtgctgcgattcccttcaagaacttcctgatctttttcttgtctgtgtccacttcctcaggggcataccgagccaacttgttgaactgacttaggtactcattgacactgttgttgccttgcttgagcctgttaaattcctctttcttcatatcaatggtgctttcaggcacatgagctgcacggaaagccgtagcaaactcatcccaagcaatgttagtgggtttagggtgtgcattgcagtaattctcccaccaatctgcagcaggtcctcttagctggtgagaggcgtagagcgtcttctcaacaggagtacactgcactaagttgagttttctatcaacatccttcagccaatcgtcagcctcgacgggctcgacggtctaagagaactctggcggacgagacctcagaaagtctgtcagcttggatctattgttgcccatgtgagggtggtcatttccatgcgcattatgctggaagccggctatggctgcggctaatccttgcaagatctgtgtctgaactgccatcaagtgttgcatgttgttttccacatgaggtagggaggggatgcgttcttctccagaattatgactggcagcacggtgagagcagtgagactgttccacctctgcattacgggaagctgtgtgatgcgagcggttgctgcggtggggttgctcaacttctgcattgcgggaagcagtacggtgcgaacggttgctgtggtgagactgctgattagctgactcatgatttgcttctggctcaactctaccttcctcaaaaccgaagcgggctcctgtagtcggctcctcagtcgaagaaacatcgatcggctgacgcgaagggaccagcggaacctatcgagggccggcagcagcacgggccgctggcagtgggggagctgggtagtcgaagcggaacacagtggaagaaccaacaacacgcttccgcgcagtgcggataaagcgtgggccacggcgggaggaagcaactggggtatgtccggggtgtagaaggggctaactgggtgtgggtaggggaagtacactggtgagtatggcgcacgcgagctgggggagtgcgggctgagccgcgagagctgtgggaggacaggtggctggcgtggcagaggcggcctgagtcccaagagacagtgtcaactaaggtgacaccctcctcggccagacgggcctccagagcggcgtagcggcgggcaagggagcggtaagcctcaaggagtaggtcgtgctgagtggcctgagcctccgaaagctcaaccatgcgagtcagcactggctgagactcgctgtacggacaagggtacctggcgtctgtgtggccggaaggaaggcgtgggagctgccggaaggcagagcccccgagacggtgggcgatctggagagtgggcctggccacagtgaagtggtgtgggcgaaggccagctccgtgtatacctccacgagggtaaaggtacaccgaaagctcacagcgagggggaacacggtccacggagtaccccgtgtactcgggacacgagaagccaaggaagcgggcgaggtcacgaagctgagcgacgtggtgaccctcaccaaaaccgtgggaactgaagctggcgttcactgccatttgttaatcgataccagtcccaggaaacagtgctggtatcacaggaagacagaatatcacagcaacagtggtctctttattacagagtaggagtacagtcat

SEQ ID NO: 23339 - DNA, 1122 bp, Oryza sativa
  Clone ID: TF_OsC82075_1
gccgccgccgaccactctcctccgcgtccgcctcgtcgccggctagggttccacgggttcttgcccgccccgcccgccgcccgcctcgcgggctgcgcaggcaaaatgtctcggtatgttgaccctaatgaccgttacgaaccacgtggtcgtaacagcaggttgtatgtgggccatatttctctacgtacaagggcagaggatcttgagaacctgttcagcagatatgggagggtgcgatttgtggatctgaagaatgaatatggctttgttgagtttagtgatccccgggatgcaaatgatgcgaggcttgatcttgatggccgaaagtatgatgggagtgacatcattgttcagtttgcaagaggggtcgaacgtggtcttggaggttctcgtggatataaagccagacccgcacatggttctgaccactgcttcaactgtgggatggaggggcactggcaccgtaactgcactgctggtgactggacaaataggtgctatggctgtggagagaggggtcatatattaagggaatgcaagaacagccccaaggatctcaagcaagagagaggctactcaaggtcccgttcacctcgtcgcagaaggagcccaagctatggcaagagtggacccccttctcattggggtagccatggtgctgatcgtgaggaaaggcttcattcaagaagggatggccgcggttacagccgcagccctcggcgccatgattcgccttccaatcagagaaaccacagccctaggcgctatgctttaccctccaatgagagatatgatggcactaggcgctacgcctcgccttcttatgggagagaccgcagtcccgggggcaatgctttgccagccaatgggagaagccacaacctcacatcagatggcatgaacccttcaccaagggagagagatgatcagaatgggagccacaggagaggtgacaacgattacctgcccagtaagagagatgatcagaatgggagctacaggagaggtgacagcgattacctctccagggagagagatgattacctgtccagggggagagatgatcagaatgggagccacaggagaggtgacagcgattacctgtcccgcgaccgttga

SEQ ID NO: 23340 - DNA, 2259 bp, Oryza sativa
  Clone ID: TF_OsC359_7473
ttcctggttggtttcctctctcacctcaatccctgtaacagatgtttaacagagaaaaaggaaagaatgtcagcgggtatgcctccagtaactcaagttttcaactcaatccgccactggcctcaagagagttaacaagggcacaccctcggtccattccaagcatgctgcttagttcacagctaccattagttggaagtcaagaccaaaatcagtatgtgtttgatcgagcgtttgccacccaggtcaatgagcttccaatgctagaagaggatgtccccttttgtcacgattgtagagagcaaggacactatgccctgaattgtccatgggtatatgtcaaagaagccccttcctttggttcagcagggcagacatcgctaaaccagcctcctcgcaccaagtcaagcttgcagcctagtgtgcaaagtgaagagcccaatggagacaatccattgaatcctagaaaatgctttcctcctagcctttcgtaccacgtggggtcacgtactaagcaagccaaaggcaagaagagtaagaatcaaaagagaaaagcaccgatgcgaactgaagaagaagtacgtaagatgactattaccagcacagaatggcctccaccaggaatgacaaggcgtcagagaagaaataccttccgaggtgcaccacagttgacagagcatcttttagctaatggaggtagagtgtctgatagtgaagattcagatcaagtctcctcagatgatgaagatgaaatggaacgtaaggcatgctctcgttgtggagaaatcggtcatgtcgccagctcgtgtgccactatatgcgttcattgtgaggaagaccatccacccgacaggtgtccaacgagcaggatcacttgtttcttttgtgaaggaactgatcatgtaccaaaaaattgtcaattcagttttctgctgacgaagaagatggctaaccaacccgccagttccaacggagagaagcctcaaggcaacaccaatcctcgccaagattacagtctcagcttaaaaccagtgccaggacagaggaatcaaaatgagaaaagaaaatgccgagtccgggaagatatctgttgcttcaattgtcaaggaatgggtcatttcgccgacaagtgcccaaaactgagaaacatagctgccagcacgtcagtccacacaactccctgcaatcagaagcttgctcctcagcgaattgtcatccatgcatcccgaagcagtcctatagcccgcgttgcaacagctccaactccagcaggcgcattaccacaaggtgtcaatgctcaatttcagccccagccagcagttgacaagacagaggccagtatcggcatcgtacctttggatgttccagcacagcagccaagaaatcaagtacaagatgaagaacccgagcaagaccatccaccaggggagtgtcccactcgcaaggtgacatgttttctgtgcgaaggaacaaaccatgtgcccaaggattgccaactcagtgtgttgttgaccaagaccgcagaaatccaacgaacgaccctacgattgtctcgtcagctagtcagctccaacaacaacatcgatgatatcatccacagcaccaatgctcctcttgctccacctaactctgcaataaatcatggcaataatacctacagcactaaccattctctgcaccgacagccccagcaaagaattgtcgtcgatggaagaagttgtgtctctccccgacctactccaggccaagcaaagggcaatcgacctccggagggcgataccaagcagaagaccgtcatccgcttcaaccagcaatcagaaggaagcttctcctgtgaatgatagcattatgcagtcctatcacatcatcacagaaccaatcaaggatgcagtcactagaacaataccagctatatctctccagaatcaaaatgagcagccatgtttgtggtttccagttcgctacttatcatggtgtaatcgaaagtttgcagcaatcattggtgacttgtatgaggttgactccgaagatatgaatcatgagaagttcgggaacggaagcatcattgaactaccgcaacctagtctgagtcagccaaaaggtgcaccctggtccaagtcaggtgaagagaagattccatccgcaacaggaggtcaagccaagcagttccgagtggtgaagttttgctggaagtttgtcaagacgcaacggaagaagtcagacaagaagagaagaccgcccaacctatcttcttgctag

SEQ ID NO: 23341 - DNA, 2200 bp, Oryza sativa
  Clone ID: TF_OsC359_7487
ctctcttcctctttcaaaacccgtaaaacctgttttccggtgggatttgggtgcatcccagttgtgggaagtagcaccccggccaatataaggattaagctcgggcctctgttgcaaagcagtaccgtactaaccacatgtctaatgggtaaggcttatctcggtgctcagtctagtcctgaacaaaaggacacagatagagatggatgaagtcgttgcgacgatggatatctctgaggcaaatgaaggctacgcgagctgcggctcggtaatcgagatgtctaggcaaatgaagactacacgggtcggtgcccgggctcaaccctggcctgcctgtcccgggataccggccgtaggcagggttgggtcggtacttttgttcacggctaggatgggtgaagggttatgtcacatctttacgacgggttccaaggccatggaatgcggagtaaagatgtgtcttgtgggttggcctgggttggcttgggacgagctggaacccaggtcgggttgccagtttggtctgaatcatcgtaggccttgggttaaggcagtactagatggtcaggtcagtgaagaagaggacatcgtcagttgtttgccgaagctccagaagactgcaggatctgctagtgaagtggaggaagcagtgaagccagctgtgaagcaggacaaaagacttagatctgttaaggtcctatccttagtttctaatctgtctctcccctttgttttccctctctccctctccaaacctttgcaacagatggctgacaatgagaaaggcaataaggtcagaagtcaggacattggtacctcaaactcccgagtgaatgaagcaccagacaccagttgtgtggcagtggtccaacacctgattaaccagaacaaattgcttatagagatactacagcagcatcggatgccaattttgaacccgagtcagatgcaacctcaagtgcagttggaggcagtccaagcactcacaccacaagtcagcgcaccgccaacatcccagaaggcccctcatgccatgccacatgttgacccaaaagaagcaagtatcatctgttttatgtgtgatgagcaagggcactacgcaaggaactgtcctcagcagaaaagaaaagcaccaatgcgaaccgaagatgaagtccgtaagatgatcattaccagcacagaatggcctccaccaggaatgacaaaacatcagagaagaaattccttccgaggtgcacaacagttgacagagcatcttttagctaatggaggtagagtgtctgatagtgaagattcagatcaagtctcctcagatgatgaaggtgcgaagcctccccaaggttttaaccagaataaaatagaacttaaggcatgctctcgttgtggagaaatcggtcatgttgccagctcgtgtgcctctatatgcgttcattgtgaggaagaccatccacccgacaggtgtccaacgagcaggatcacttgtttcttttgtgaaggaactgatcatgtaccaaaagattgtcgattcagttttctgctgacgaagaagatggccaaccaacccgccagttccaacggagagaagcatcaaggaaacacaaatcctcgccaagattccagtttcagcctaactccagtgccaggacagaggaatcaaaatgagaaaagaaaatgccgagtccgggaagatatctgttgcttcaattgtcaaggaatgggtcatttcgccgacaagtgcccaaaaccgagaaacgtagctgccagcacgtcagtccacgcaaacccccgcaatcagaagcttgctcctcaacgaattgtcatccatgcatcccgaagcagtccgatagcccgcgttgcaacagctccaactccaatgagtgcactaccacaaggtgtcaatgctcaatttcagccccagccaccagctgacaagacagaggccagtatctgcgttgtacctttggaagttccaatacagcagctgagaaatcaagtacaagatgaagaacccgagtgtaagaaagttattgtttgttacaactgcaatgaagaagggcattactccaaaaactgtccccaaccaaggcaaaatcgacctccacattaccgccaatttacacgaagcagacattccaatcgtattgtggtcactggagcaaacgctgtacccgtgaggcctcgtgttaatcagaacccatag

SEQ ID NO: 23342 - DNA, 7907 bp, Oryza sativa
  Clone ID: TF_OsC359_7990
atggtggcagagtatctgatagtgaagggtcagatcaagtctccttggatgatgaagatgagtctccccgacatctcggcgaggaagagatggaatcaaaggcatgcacccgttgcggggaaattgaacacgttgctagcatgtgtctcacactctgcactcattgtgaagaagaccatccaccaggggagtgtcccacccgcaagctccaacagcaacatcgacgatatcatccacagcaccaatgctcctcctgctgcacctgaccctgcaataaatcatagcgataataccttcagcaccaaccattctctgcaccgacagcctcagcaaagaattgtcgtcgatgaaagaagttgtgtctctccccgacctactccaggccaagcaaagggcaatcaacctccggagggcgataccaagcggaagaccgttattcgcctcaaccagcaaccagaaggaaacttctcctccctccgtttcgcgggaaagcaccggagacgcgtcctcgccggcaaaacagtggcgttgccgccactgttccacctccggccgccactgtcgcgtttcccgtgcgccggccgacgtcgccaccacctccctcggctccgcgacgccgccctcatccccggcatcacctcctcctcgctcgaagctcgccggagtggcctccacgtcggcgtccagtacctccccgcctccggccggctcctgtacgtcgccggtacgccgatcgacgtcgccgcgttgtcctctcctccagctgctcctctgtttcgccggaacaccgtcgcccgtgctggcctctccatcctcatcgtcgccgacgtcccttcggccgcccgttcatcctcgccggctcgtcgtctcgcggcgccgcctccgtcatcgtcatcgctgcggcgtgttccacgccatcctcgcattcgtgcagccgctgccggctgccctcgtcgcctcctcgccggccccggtcgtcgtcgtcgtcgtcctctcatcattcccggtcgtcgtggcgttcgtccctccgtcgagccgttctcatccgtcgtccgcatcagtcaagcaagccgcggcagccccgtcctcgtcttcgtcctcagctccgcgtcgtcaagccttgtgccagccgcgtctcgccttcgtccaaggatcgccgccgaagtcgttccctcgccgttcgcctccgtcgtccccgagctgtctccgccgcgcccgttcgtcgttgtcgtccccacgcctcgtcgcgtggtggtaaggatccctctccctcgctgccccgtcctcgtcctttcggtgtcgcccgtgctcgttgtgcggttgtcggccccggtacccgtgtaccggtgtcggtagtcgttcacgcgtgcgggtggtgaccgtgtagtgtccgcgttagtgtgcccgctcggtgtctagtggagtccgtttgtcgaccactcgcctcggttgacacacagggtccgcttccatcgacccgtggaccgtctctgtgtacccggttttctttttatgtattgttattgcttctttgtaggcttgtagctttgcttgtgtgcttcgcgtagctttcgtcgtcccggaggttcccgaagcgtggttcgtggtcgtcgccgaaggttcggaaggccgttccctctctcttcctctttcaaaacccctaaaacctgttttcggtggggtttgggtgcatgccagttgtgggaagtagcaccccggccactataaggattaagctcgggcctctgttgcaaagcactaccgtacttccacatgtctagtgggtaaggcttagtttgtggctcagtctggtcataaacaaaagtacacggatggagatggatgaagtcgggggtcgatggacattctccagggcagatgaaggctacacgagctgcggcccggtagtcgagatgtcatggcacagggccggtgtcctgctgctaggggctcagtcctgcctgcctgtcccgggggttccggccgtaggtaggattgggtcggtactcttgtctatggctaggatgggttggaaactatgtcacgtcttctgtctgtataccatggtgatggccggcagcgtcacccgtcgtggtttggacatgactggcttcgtcttggagctgcggggcatgtgcgtggtcctggggtatccgcatggagtggactaccaggccaggccgcttccggagcaggagggtgacgatgcagagccccacgctggttgggaggttactgcagtgatcctctctggctctcccgagcggacttcactggcagtcaccgcgggtggagattccttccccgccgcttgccagagcgccgctctcctcgccatcggcactcttcaccagcgctacccggacgagttgcagcactcgccctatcgctaccaccctcgtcgcggaggagcccgcgactacgccaccttccgggatgctagctcggaggatgacgctaccatcgtgcacctggcgcgcatggtggaggcgtacgacgcggctcgtatcgacttccatcagatggtgcgccgtgggatggtcgagaacaacttgaagatcctggagctgcgtcaggagaacctgcagctccagaaggacctggacgcggtggaggcgcagctgcatcagctcaagatcgcccagggagaggtctgtcgccccaagcgccgccgcgtctgccgcagccagaagatcaccgcccgcaagagcacctccaggcccgagcttgttcgtcagtccctggcgtggacctgcttcatcgagacccctcgtgccgagcccgcgcccgtggttccccaggagggggaaacctccggcgttggtagcacggaggatgcgctgttgctcaccttccgtcctggcccatcgcagcggagaagtgctaacaccggtgatggcaaccaactcgaaggcagcaaccacaaccaccagggcaacccacctccacctcctcctccgcctccaccaccaccaccagataccaacgccattctcacccaaatcctcgcccagcaggccaacatgatgactgctttcctccaccacctccaaaatccgccacaacataatgctccaccaccacctccccaacactctaaactcgctgagttcctccgcatccgcccacctaccttctctagttccaacaaccccgtggatgcgttggattggttgcatgccgtggggaaaaagctagacattgtgcagtgcagcgatgaggagaaagtcatcttcgccgcccaccagctgcaggggcccgcatctctatggtgggaccatttccaggctacgcagccagaggggcaacctatcacttgggctcgcttcaccgccgctttccggagaacccatgtgcccgccggagtcgtggcccttaagaaaagggagttccgagagttgaagcagggcaaccgctccgtgatggagtatttgcatgagttcaacaacctggcccgttacgctccggaggatgtgcgggaagatgaggagaagcaagagaatttcttggcaggaatggaccctgagctgtccgtccgtctagtctccggggactatccggatttccaacgtctggtggacaagagcatctgcttggaagccaagcacaaggaactggagtcgcacaagcgccgcttggcgaatttccgcaatcaacagggtgccaaccaaagggtccgctacaccaatccctatccagggggatcctcctcgcagcagcagcagcagcaacctcgccccgcgcctcgacctcaattcgtggtgcgcgtcccacagccgcagcagcagcagaatcaacaagggactcgtgcgccccgtccacctacgccaactgtgcagcctggtcaaggccgcagggacgctcaaggtccgcagcgtctgtgcttcaactgcttcgagcccgggcactttgcggataaatgcccaaagccgaggcgccagcaaggccaagcgcctccccgctccaacaatggtgggaaggatgtcattcggggtcgtgtgaaccacgtgacggccgaggacgtgctgacaactccagacgtcatcgttggtacgttcctcattcattccatccctgctaccattttgttcgactctggagcttcccactcgtttatatctgtgccattcgtggggagaaatcagttgggggtagaaaggcttaggaaccctctgctcatcaccacccctggaggggttatgacagcaaagtattatagccctgccgtccctatagaaattcaggggattccttttccctcggatctgattctgctagacaccaagaacttggatgtgatccttgggatgaattggttggctcaattccaaggagtagtggattgcgcgagacgcaccgtcactctgtaccgagggccggaacaaccggttgttttctttgcatccccaacctctgtcagaagttcagaactgcatcagattggactgtcagaaatccccatcgtcagagagttcagagatgtgtttccggaagaactacccggtatgctgcccaagcgagagattgagttccggatagatcttgctccaggaaccactcctctgtacaagcgaccctaccgtatggcagcaaatgaactggccgaagtcaagaaacagttggaagagttgaaagaaaaggggtatatacgcccgagtacttccccctggggtgctcctgtgatttttgtggagaagaaagacaagacgaagaggatgtgcgttgactacagagctctcaatgaagtcaccatcaaaaacaagtaccctcttccccgaatcgatgatctgttcgatcagcttaaaggtgccactgtattctccaagatcgatcttcgttccggatatcaccaattacgtattcgtgaagaagatattcctaagaccgcattcaccacgcgatacggactgtatgaattcacggtgatgtcgttcggtttaaccaatgcacctgccttcttcatgaacttaatgaacaaagtgttcatggaatacttggataagtttgtcgtggttttcattgatgacattctgatatactcacaatcagaggaagatcatcagcaccatctccgtctggtgttgggaaagttgcgtgaacatcaattgtatgccaaacttagcaagtgtgagttctggttgtccgaagtcaaattcttagggcacgtgatatctgctaaaggagttgctgtggaccccgaaacagtgaccgctgtcaccgattggaagcaacccaagacagtcactcaagtccgcagtttcttaggtttggcaggatactaccggaggttcatcgagaacttctccaaaatcgctcgacccatgacacagttgttgaagaaagaagagaagtttgtgtggagcccgcaatgtgaaaaggcgttccaaactctcaaagaaaagctggtttcctcaccagtgctaatcttgccagatactcgcaaggatttcgtggtgtattatgatgcttcgcgccaaggattggggtgcgtgctcatgcaggacggtcatgtggtggcctatgcctcacgccagctacggcctcatgaaggcaattaccctacccatgatttggagttagccgctgtggttcatgctctaaaaatctggcggcactatctcattgggaatcgctatgaaatatatactgatcataagagtttgaaatacatcttcacccagtcggatctgaatcttcggcaaaggagatggttagaactcatcaaggattatgatgtgggaagtcactatcatcctggtaaggccaacgtggtcgccgacgccctaagtcgaaaaagccattgcaacactcttaacatccgtggcgttccacccgaacttaatcaacagatggaagccctgaacctaagcatagttggtcgcggatttttggctgcgttggaagccaagcccaccttgctcgatcaaatccgcgaggctcagaagaatgacctggacatgcatggactcctcaggaatatgaaacagggtaaagccgctggtttcacagaggatgaacacggaaccctatggaacggaaatcgggtatgcgttccagataacagagaacttaaacagctgatacttcaggaagctcacgaaagtccttattccatccaccctggcagtacgaagatgtatctagacttgaaggagaaatactggtgggttagtatgaagcgagaaattgcagagttcgtggccctttgtgatgtgtgccagcgtgtcaaggaagagcaccaacgaccggccgggcttctccaacctctccaagtaccggaatggaaatgggatgaaattgggatggatttcatcaccggacttccaaaaacccaaggtggatatgattctatatgggtagttgtggatcgattaaccaaggtagcccgatttattcctgtgaagaccacctatggagggaacaaactagccgagctctacttcgctaggatcgtgagtctccatggcgttcccaagaaaatcgtatctgatcggggaagccaattcacctctcacttttggaagaagctccaagaagagctgggtacccgattaaatttcagcaccgcgtatcacccgcagacagatggacagaccgagcgtctaaatcagattctagaagatatgcttcgcgcatgtgtcctagatttcgggaagacctgggataagagtctcccctatgccgagttctcctacaataacagctatcaagccagcatacaaatggcaccctatgaagcgttgtatgggcgcaagtgccggacaccgctattgtgggaccaagctggcgaaagccaagtgttcgggaccgatatcctgagagaagctgaagcgaaggtcagaaccattcgggataatctaaaggtggcacagtcccggcagaaaagttatgcagataaccgtcgccgtgatctggaattcgcagtggatgactttgtgtatcttcgggtcacgccattgcgaggtgtacacaggtttcagacaaagaggaagctcgcacctcggtatgtgggtcctttccgtatcattgctcggcgcggagaagtcgcatatcggctggagctgcccgcctctttgggcaacgtgcatgatgtgttccatgtgtcgcaactcaagaaatgtcttcgagtgccatccgagcaggccgactcagagcaaattgaagttcgcgaagacttgacctatgtggagaggccagtgaaaatcctggacaccatggaacgcgggaccaggaaccgggtaatccgtttttgcaaggtccagtggagcaaccacgccgaagaagaagctacctgggagcgtgaagacgagctcgtcccgcttcggcatcgcctccttcggctccgccgcgtcctcgccgacctcgtccactcctccgtttcgcccgccgaccgccggaacaccgccgtcctcgtcgacccgagccgcgccgccgccttcctccactccggtcgtcgttctcgccgtcctcgtcgacccggggtgagccgtggaccgcccctttcgcttcccccttccctcccctctctcgggcgccgctccgctgcgtgcgtgatgcccggcggcgaccatcggggcgcgggcgcgccgcctcccgtcggccgtgccgcgaggccgccttcgggcgcgccccgcggctgccaggtggggcccggccgtcagccgcccgcgccctcgggtgcggccggtccgcgcgcccctcccctcggtcggtccgaatcccagaaccctggcctccacctgcgctccggcgccgccgccgccgccgtggacgcccttctgctcctcctccggctgagcctcctgctcgtgctcgccgccgccggcctcgcgcgcagccacctcctgctcgcgctccacgccgccgccctcgcgctccctccccgaccgcgtccacctccgcgccat

SEQ ID NO: 23343 - DNA, 7605 bp, Oryza sativa
  Clone ID: TF_OsC359_8313
agctttcccatcacgaacatgtttgactctttgatcacagtctacgtcctgatagtgcttgtgctcttcttgtaatgccatgacccgatccggtttagcatttgcaccatcttccttccaaaagcatgtcttcatgttcttcatagacaattgtggtaggttgacttgagttgattgaggttgatcaagtagtccaccttggtcatcatggacttcttgtggtcacacccgtgattcttacacggatggataacatttaagtatgcatgttcttgtgaacttggagcctctggcctagatccttcgggtgaccaaggaatcttcccggagtctccggggtatctttccagagcctccgggctccaatgcatggtgatagatgagcttcattgcaaatcgagcggtcttaccgaagcctttggttccactataaaattttagcacattttggtccccaacaacattgggtccataaaggttagtcacaagagacttagacacccaaatggcctttatgctagtgtgtggcgaacaaatcaccctagtagcacaaatatcatttttggcattcctaagcaaattatgatcaaatgagagacttgtcttaggaatgttacccatgggaaaatttttaccaatatgtccctttgcccggcaattatagcaaagtcgacttttgcttctatattgcttttcggtttgcttgttgccggtttgcctctcacttgatgttttgcattgttcatccaatgtacaaggagaccttgaggcaaagtgtcccacttcggtgcacttgaagcacttgatgtgaggaatgtctttcttcttgctcaacttatttcctttcttccaagggcaatctctagcatgatgtcccactttcttgcacttgaagcaagtaatggaactcttgatcatcttttgatttcgtcccttggtataagcattgatggacttgctatccctttgatggatcctggtgcaagccacggttgatccctcctcaagattcttcaccatgccttcacagttatcttgagaaggttgagcaatgcacacaagtccatgatctatttgcttctcccttttgcctacacaatccaagtcatatatagtgctcggggaaatatttgcttgggcgcaacaagggttagtacaagtaagatcaacttgaacatgaggctcgtaggattttaccgttgcaattatcacctcatgagatacctctagcattgcatgagaatccacaagattctcatgagaacacaaaagttcatcatgtctttcttgtaaatccacatacttgttagtgatctcatcaagttgagatttgagctcttgattttgcttctccaaagatgctacacaagcaatagaattagtggcacaagcaaattcattttccaatttttcatacctcatagtcaatgaagaatgaaaatccttaagtttcttgtgttcttcggttagactcatgatttcttcattcttcttgatagtgcatgcttgttgcttctcaatggcttccatgagcttgatcaccattgttatatccttcttgctcaagtgatcaaactcggagtcaccatcttcactcataaagcaagcataatcttcggaaatagaagatgagcatcttggtgaggtggattcttcacttgtccattggtgcttatttacttctcccttcttcaatgtagtcatgtgttgatgataaggtggttgtgggatgattatcttttctcctttggaaatatcggctaaatcggtttggaatgtgtttgattcgagttcgaatcggatcggtctctttccttcaaaccccgatctttccttctcgtcgccggccgccgtgggccttcttcgtcgcctcctagcccctttaaaaggacccccaagctcttctctacccgccgccaccttcgccttcgcctctcgtcgtccgtagcgccatagcgccgcgtagccctagcgccgccgtcgccgccgtcgctccagtcgtgcgccgccgccgttctagacgtcgccgtcgctcgggaagaccgccgtcgtggtcgccgtcgcgtcgccgtcctcgttcgccctttcgccgtcgccgaagatcaccggagcgccatcgccgccgtcgacccgaagaccgccgccgctttcttcgtcgtcgccgtcgccgtccgttggtcttccgccgctcctttggttaccggtgagttcgccgcgtcgcgctctacccgttggtgctctccgttcgtgccgaagtgccgccgttcgccggcgagcatgcgccgcccgagccgccgagccgccgccgccggtggtgacgtcaccgccgacgtcatagtcgtcctcttccgtgagccggtcgtggacccgatcgatctcggccgtccgttttggatggatcgatctcggccgtccgttcgcgtgaaccgccgcccgtgcgcccggtccaccgaaaccctagccgctgacgcaataaaccctcttttccgtgccaaccacaagccagcatgggcaacggctttatcttttgtatagcatggttcattgcggggcaccagactgagaagtggcggagataagcccacgggggtcgctggggagtccatgcctctggtttttgagggggtgattatgatccaggaagctcctggtttggaatggttaattcctggtttggaggtagaactgtgcagccgggatggttgttcagaatggttgggcctatacaacaggatgccgcgctacaagcatgagtacctgtttggtgttgagggttttgttcaggagttgcgtacgatgtcctttgtcattggatttgggactgcccctttttatgctcagattcctcatgatcgtcatgaagaaaagtgccgagtcaaagtcaccttgaacagcaatagtgaagatgtcccctcagtgatgtttgaagctggaggaaggaactacatccatgcatgtcaggaggtggcaaggatagccataggagagctccgtgatcgctacagtgatcagttggccgacaccgagtatcgctaccatcctcgtcaaccccagggaagtgaccgtggcagctacctagagattgaaggaattgagaatgatgctaccacaaggcatttggttgagatgttgtgggctatggatgaaagtcgtgcggagactgtgttagcagcccaagatcgtgaagatcggaatcgtggtaagatttgcaagctagaagacaaggtggatcgtttggaaaaggaattagccgcattgaagggagaagcaccaccgcagaaggccaggattcgtctcaccgcaaggaagagagctctatttgtccctcgctatcaattggcgccaaagatggtgaatactcgcagcaatgggaatggccccaaccaccccaataacaataacaatggagagaacccaactctggcccaagttcttgctcaacagactcagctaatgaacatgatgatgcagcaatttcagaatcagcagaaccaaggaaataaccatgtacctccccagaacaagttagcagaatttcttcgtgtgaggccgcctgttttctctagcaccactaatcctgttgaagctggtgattggctgcatgccatagagaagaagttggatttgcttcaatgcactgatcaggagaaggtctcatttgcatcacatcagttgcatggccctgcatctgaatggtgggatcacttccgcttgaataggattaatgctgaacctatcacttggcttgaattcgccgctgctttccggaagacgcatataccatcgggagtggtgtctcttaagaagaaggagttcaggtcgcttactcagggatctcgctctgtcacggagtatttacatgagttcaatcgtcttgctcgttatgctccggaagatgtgcgcaatgatgaagagcgccaggagaagtttttgggaggactcaatgatgagctttcttatccactcatgggaggttcttcatctgttgttcgtccgcaacgtcagttcttcaacaacaatgctggcaacaacatccgcaatcaagctccacgccccgttgcagctccaacccagcaacagcctaccaagagggagcaaggcagcaagcccgtggtgtgtttcaactgtggagacccaggacattatgctgacaagtgtccgaagccccgacgcgtgaaggttgtccctgcccaaaataactctgctgtaccagcatcaaaagcccgtgtcaatcacgtcgctgctgcagaagctcaagatgctccagatgtgattttgggtacgtttcctgttaactcagttcctgcaacagtgcttttcgattctggtgctacacattcatttttatcaatgagttttgcgggaaataatgggatggaagtagaagatcttagacgtcctttgatggttagtaccccgagtaatcaagcactctctttgcaatgtagcccctctgtcagaatagaaattcaaggaataccctttctagccaatcttatcttgttagaatccaaagaccttgatgtcatcctagggatggactggttagccagacatagaggagtgatagactgtgctaacagaaaagtaactctcaccagtaatgatggtcgagttgtaactgttcatgcattgtcttcggagtctttaaggtcaagactgaaccagataactttggaagagattcctatagttcgggaatatcccgatgtgttcccagatgatttacctggtatgccgccaaaaagggatatagagttcagaatagatcttgtacctggaacaactccgatccataagagaccttatagaatggcagccaatgagttggcagaagtcaaaaggcaagtagatgatttgcttcagaaaggatacatcagaccaagttcatcaccatggggagctccagttatttttgtggaaaagaaagaccatacccagaggatgtgtgtggactatcgtgcattaaacgatgtgactatcaagaataagtatccgctaccccgaattgatgatttgtttgatcagcttaaaggtgccactgttttctccaaaatagatcttcgatcagggtatcaccagttgagaatcaaagaggaagatatacccaagaccgcttttaccactaggtatgggttgttcgaatgtactgttatgtcttttggacttaccaatgcccccgctttcttcatgaacttgatgaataaagtatttatggaatacctagacaagttcgtggtggtctttattgatgatattcttatctactcccgaaccaaagaagagcatgaagaacatcttcgccttgctttggagaagctacgagaacatcaactgtatgctaagtttagcaagtgtgaattttggttgtctgaagtgaagttccttggtcacgtcatctcagcaggaggagttgccgtcgatcctagtaacgtggaatctgtaaccaactggaaacaaccaaagacagtttcagagattcgcagtttccttggcctcgcaggatattatcggaggtttatagagaatttttccaagattgctaagcccatgactcgattgcttcagaaagatgtgaagtacaagtggtcagaagaatgtgagcaaagttttcaagagttgaaaagccgcttaatatcagctcctattttgattttgcctgatccaaagaagggttttcaagtgtattgcgatgcatccaaatttgggttaggttgtgtcctgatgcaagatgggaaggtggttgcctatgcatctcgtcagttacgtccgcatgagaagaactaccctactcatgatcttgagttagctgcagtagtacatgcgtttaagatttggcgtcattatcttttcggtactcgtacagaggtgtacaccgatcataagagtttaaagtatatctttactcagccggatctgaacatgagacaaaggagatggttggaattaattaaggattatgacatgggaattcattatcacccgggaaaggctaatgttgtagcagacgctcttagtaggaaaagctattgcaatgctacggaagggcgacagttaccattggaattatgcaaggaatttgaaagattaaatttgggaattgtcagtagaggtttcgttacagccttagaagcgaagcccactctaattgatcaagttagagaagcccaaattaatgatcctgatattcaagagatcaagaagaatatgagaagaggaaaagctatcggtttcttggaggatgagcaaggaactatatggttgggcgagagaatctgtgtccctgacaacaaagatttaaaggatgcaattctgaaagaagctcatgatactttatactccattcaccctggtagtactaagatgtaccaggatctcaaggaaagattttggtgggcaagtatgaagcgtgaaatcgcagagtacgtagcagtatgtgatgtttgtcagcgagtcaaggcagaacatcagaaacctgccggtttgctgcagcctttgaagattcctgaatggaaatgggaagaaatcggtatggattttatcactggtttacccagaacgtcatcaggccatgattctatttgggtaatagtcgatagacttaccaaagtggctcattttattccggtaaagacaacttattccgaaagtcggttggcagaattgtatatggcaaggattgtgtgttcgcatggcgtccctaagaaaatagtgtctgatcgaggcagtcagtttacttcaaatttttggaagaaacttcaggaagagatgggttctaagctgaactttagcactgcttatcatccacagacagacggacaaaccgaaagggtgaatcagattttggaagacatgttgagagcttgtgctttagatttcggtggaaattgggataagaatctaccttatgcagaattttcgtacaacaacagttatcaagctagtatacagatggctccttacgaagcactgtatggtcggaagtgccgcactccgcttttgtgggatcaaacgggagaacgtcaggttttcgggactgatatcctgagggaagcagaagaaaaggtaaagatcattcaagaaagattgcgagtggctcagtctcgtcataagagttatgccgacaatcgccgtagagatttgagttttgaagaaggagattatgtgtatcttcgtgtcacgccttttcgaggagttcatcgttttcacaccaaaggaaaattagcaccgcgttttgtgggaccttataagaacgttagtagaagaggagaggttgcttatcagttagagttacctcaatctttggcaggagtccataatgtgttccatgtgtcgcaattaaagaagtgtttaagagtacctaccgaagaagctaatcttgaacagatcgaagtccaagaggatctgacctatgttgagaaaccaatccgtatcttggaaacaaatgagagaagaaccaggaatcgagttatccgtttttgcaaagttcaatggagtaatcattcggaagaagaatcaacttgggaacgagaagatgaattgaagtcagctcatccgcatctattcgccagttcttccgaatctcgaggacgagattctgtttaa

SEQ ID NO: 23344 - DNA, 2752 bp, Oryza sativa
  Clone ID: TF_OsC1528_1709
tcagaccaccgccgttgcggtggttcctttctctcctggcaccggcatgtcgtgcactccatccaggagtgtgagcgcccgcagaccggcgatgacatgcaacggaagcggtgtgtcgaaggactttgcataagcctccaccaccgcatccacgaccggttcacccggggtgagcagccccatctcctccatgaggcgcacttctgcgcgcttagacaccggcaccgacgagaagcgcgccttacggccgctccgccgcgacggcatctgcaccaccttgcgtccgcaccccttcgtcttggccgcgccgggcggcgccagctcgagcggcgcctgcaggatgatcggcggctgcagctgcgagaacagaggagataagacgaccttttcacgttcaccttctcctccgtggatgggctgagtctggaccgtggcctggtgttgctcctcgcagtcggcctgctgcaccagggtgggctggtctcctgtggaagcttgggcctcgtcatctccagtggactgagcgaggaggtccatcttgggggcctgctgcgcatctgggacgagatggcccatcttctcctggcccaactcagctgccgacgccaccttatcctctcccagtatcggttcttccccacccgtcctcttcgtctcgttctccgcctcccgtgaagacttgggagcgatctctgccaggagcggcagcatcgggtcgtggtccccctggtcatctgagaaggggagcaggggtgaggagcataggatcttgatcagagggtcaggaagactcacgagagcgtcgactggctgctggtcgccatcagcctggccactaacagcgaccaccttggtcgtcgcgccgcctgcatcgccggtgccgtcctgaccgcgaggagtcaaggagcttggggagcgcgtgcgacgggatctgcagcggcaggagcatcgggagctgtgcctggttcgtgagcggccttggcacccatcgccgtgcgctcgctggcggccggaaggatgcggcgtgcggctccagtgccgcgccccttccgccgcccgcgactcaaccgaccagtcccttccaatgatgacatcgcgcagcgagcggcggcgtggtggaatatcctcagcgtggcgccgccgcccgttgtcatcctcatcatcctctgggtcttctcttctctgcggcagtgccctgcatccccgcctcactgccgcccgttgccgaggaggctgggttccgtcggcgcagcccaggtaccactggaaggtgcgcaccgtgggtatcgggcctcccgaatcagacgagtccgaggagggaagtccgctcacgccggaagaaggcgagcagggcggatggggcggtcctggagtccagtcctccatctcgtccagatggactatgacatgcggcagcctccccctcggcggtggcgcgatctcgtccggaagcggcggtgtgatgccggaggtgacacgcccagcttccggcgggaagaaggtggagatcactattcgtggcaggaggtcaggattccgcatccacatccagcatgagaagatggccatgttctgccgctgaaccgactcatgctcgatgcgatcgaagaggcagatgggacccatgacgccctccaatcccgccctgttccatgcgtactgcggcaatccctccaggcagagccgcacgcgaaaccaccagttcgggtggtgcacatgcctgtcggcgctccatggcgtgatggtgaaccttcctccatccagagtgatgaagcctctccgcgttgccgcggcctgcccctctgggaaatcgaagaagacgaagaaatcttccgggtgatggcgcgtcactcgcaggtccgagatggggatcccaacctgctgggtcagtgcacgtgccacctccctaggggacgtctcctgtccctcaacctcggccgagatgagtgcgccatgaaagcgaaggcgctccagctcgtgctgcatgagctccgtcatcggcaccgttgcatagccgaccgccggccgttgattcggtagaccaggtatgtgatccatggtcaccgttggcttgtgcaaacgatggaaaaccgaaccagggcgggtcgttgttggttgctgttggttcttgctgggaagcggtgggaagatgagttgggattgaatggagggggcttgcttggggaaggtgaggcgggagtgaatgggttgctttgatttgtttgggcagcggaaggagatgtgtccactgcgtctacaagtatagcagcggatgggatccctgcaagctgctgcctggtgatctgaagcgaggcagcggaagcacttgccgtgcaagatctccttgaatttttctctgagatttagtggattgaaggaggcagctgggcgattgaagacggcctgagaggttgacgaagaaggattttggcgcttccgccaccaaaactttggttttaccgcttgccattttgatgaaagatattgttcttctgcctcgatttgaaacttgcttgtagctctcgccggggctacgattatcgactttaatgttgcttttcctctggctttcttctctgcatcttcctcttgtgccttttcgggagggggcgtaatggcgctccgtccctcaggtttcacccccactcctcgcaaggcagcgggcagtcccctctcgtgcctaggtgaatctggaagccgcataggacgtcgcagggcccatccaaactccatcacgcccacccttgcctag

SEQ ID NO: 23345 - DNA, 1818 bp, Oryza sativa; identical to SEQ ID NO: 15336
  Clone ID: TF_OsC359_5999

SEQ ID NO: 23346 - DNA, 3141 bp, Oryza sativa
  Clone ID: TF_OsC359_8126
acacctcccaactctaagctatcaattgaggctccccgtggaccggcattgtcagtacctcattctcccggtggagctgatatggacttggcagatatagctcaaagcttggctccaataaagaccacaatagcgccgccgccgccgcggattccgccgcatcccgccgtccccgcgcgcattaaagagggggaaattattccccgcgtttccctcccccgtttcccccgatttcccctctctctctccctcggatccgtccggattcatcccgtaatcctcgccggcgacatctatggagcccgagatccccgcgcccgtttccttcctctccggccgcgttctccccctctcggtgctatataattgctccccgagctccgctcttccgtttcccgccgctcgccgctcgctctcgccgtcggatccgtgctcgcgccgtgctcctctctctccgccgtcgccgccgaccttcggttcgccgccgacgtcgctccggtcctccgcccgactcggcgacacctccatccgcttcgccgtatcgccgtcgacctcgtccgcgcctccgtttcgctcgccgaccgtcggagcgccgccgtcatcgtcatcccgagccgcgccgccgcgtttctccactccgttcgtcgtctccgccgtcctcgtgtctcggggtgagccgtggaccgtcccttccgtttccccctcctctccgctctctcgggcgctgctccgccgcgccgatggtcgccggcggtgaccatcggggcgcgggcgcgccgctcccgtcggccgtgccggcgaggccgccttcgggcgcgccctcgcggctgccaggtgggcccggccgtcagccgcccgcgcccgcgggtgcggctgacgcgcgggacccacggcgccgaccgccgccagccgcgtgcgcccggtccaccgtggaccgagaggctgacgcgtgggccccacttcccgtggacccgggcaaatgaaggctacacgagctgcggcccgatggctgacaatgagaaaggcaataaggtcagaagtcaggacattggtacctcaagctcccgagtggatgaagcaccagacaccagttgtgtgacactggtccaacacctgattaaccagaaccgattgcttatagagatactacagcagcatcagacgccaattctgaacctgagtcaaacacaacctcaagtgcagttggaggcagtccaagcactcacaccacaagtcagcatgccgccagcatcccgaaggacccatggtgacgtgccacatgttgacccaaaaggagcaagtaacatttgctttatgtgtgatgagcaagggcactatgcaagggagcgtcctcagcagaaaagaaaaacaccaatgcgaaccgaagatgaagtccgtaagatgatcattactagcacagagtggcctccaccaggaatgaccagacgtcagagaagaaataccttccgaggtgcaccacagttgacagagcatcttttagctaatggaggtagagtgtctgatagtgaagattcagatcaagtctcctcagatgatgaagatgaaatggaacgtaaggcatgctctcgttgtggagaaatcggtcatgtcgccagctcgtgtgccactatatgcgttcattgcgaggaagaccatccacccgacaggtgtccaacgagcaggatcacttgtttcttttgtgaaggaactgatcatgtaccaaaagattgtcaattcagttttctgctgacgaagaagatggctaaccaacccgccagttccaacggagagaagcatcaaggcaacaccaatcctcgccaagattacagtttcagcctaactccagtgccaggacagaggaatcaaaatgagaaaagaaaatgccgagtccgggaagatatctgttgcttcaattgtcaaggaatgggtcatttcgccgacaagtgcccaaaaccgagaaacatagctgccggcacgtcagtccacgcagctccctgcaatcagaagcttgctcctcagcgaattgtcatccatgcatcccaaagcagtcctatggctcgcgttgcaacagctccaactccagcgagtgcattaccacaaggtgtcaatgctcactttcagccccagcaaagaattgtcgtcgatggaagaagttgtgtctctccccgacctactccaggccaagcaaagggcgataccaagcagaagaccgtcatccgcttcaaccagcaatcagaaggaagcttctcctgtgaagagaagattccatccgcaacaggaggtcaagccaagcagttccgaaaggtaaagatttgctggaagtttgtcaagacgcaacggaagaagcgggcccgcccgccgctctcgctgacgggtggggcccacctgtcatcgccttcctcccgccgcgcccgccgccgcgcccgtgccctagcgccgccgccgccgcggattgcgccgcatcccgccgtccccgcgcgcattaaagagaggggaattactccccgcgtttccctctcccgattccccctcttttccctctctctctccctcggattcgtccggattcatcccgcgaagttcgccggcgtcttcaatggcgcccgagatctccgcgcgcggtttcctctctccccggccgcgctctccccctcccgttgctatatattcgatccccgtgcttcgctcttccgtttccgccgctcgccgctcgctctcgccgtcggattcgtgctcgcgccgtgctcctctctctccgccgtcgccgtcgaccttcggttcgccgccgacgtcgctccggtcctccgcccgactcggcgccacccccatcggcttcgccgagtggttgccgaccccgtccgccgctccgcttcgcccgccgactgccggagcaccgtcgccctcggcatcccgaaccgcgccgtcgccttcctccgctccggttcgccgccgccgtcgctccggtcttcctcccggctcggcgccacctccctcggcatcgccgcatcgccgtcgacctcgtccgcgcctccgtttcgctcgccgaccgtcggagcgccgccgtcatcgtcatcccgagccgcgccgccgtctttctccgctccgtccgccgtttccgccgccttcgctgcctcggggtga

SEQ ID NO: 23347 - DNA, 2674 bp, Oryza sativa
  Clone ID: TF_OsC359_7561
gaatctgagttgcttgttcgtgcgccgccgccgccgccgattccgccgcatcccgccgtccccgcgcgcaataaagtggggggaatcattccccgtgattccctctccgttttcccccgcttttccctctctctctccctcggattcgttcggatttaatcccgcaagtttcaccggcgtcattgatggagccgagatctccgcggccgattcctccctctccggccgctctctccctctcccgacgctatataattgttccccgtgcctccctcctccgtttccgccactcgccgctcgctctccccgtcggattcgtgctcgcgccgtcctcctctctctccgccgtcgccgccgagctccggttcgccgccgccgtcgctccggacttcctcccgactcggcgtcacctccatcggcttcgccgcgtcgtcgtcgacctcgtccgctcctccgtttcgcccgccgaccgccggagcaccgtcgtcctcgccgtcccgaaccgcgccgccgctttcctccactccggtcgtcgtttccgccgtcctcgtcgtcccggggtgagccgtggaccgcccctttcgcttccctctcttctccgctctctcgggcgccgctccgccgcgccggtggtcgccggcggtgaccatcggggcgcgggtgcgccgcctcccgtcggccgtgccggcgaggccgccttcgggcgcgccccgcggctgccaagtggggcccggccgtcagccgcccgcgctcgcgggatgtttaacagagaaaaaggaaagaatgtcagcgggtatgcctcaagtaactcaagttttcaactcaatccaccactggcctcaagagagttaaccagggcacacccttggtccattccaagcatgctgcttagttcacagctaccattagttggaagtcaagaccaaaatcagtatgtgtttgatcgagcgtttgccacccaggtcaatgagcttccaatgccagaagaggatgtccccttttgtcacgattgtagagagcaaggacactatgccctgaattgtccatgggtatatgtcaaagaagccccttcctttggtttagcagggcagacatcgctaaaccagcctcctcgcaccaagtcaagtttgcagcctagtgtgcaaagtgaagagcccaatggagacaatccattgaatcctagaaaatgctttcctcctagcctttcgcaccacgtggggtcacgtactaagcaagccaaaggcaggaagagtaagaatcagaagagaaaggcaccgatgcgaactgaagaagaagtacgtaagatgactattaccagcacagaatggcctccaccaggaatgacaaaacgtcagagaagaaataccttccgaggtgcgccacagttgacagagcaacttttagctaatggaggtagagtgtctgatagtgaagattcagatcaagtctcctcagatgatgaagatgagaagtctccccaaggtttcaaccagaataaaatggaacataaggcatgctctcgttgtagagaaatcggtcatgttgccagctcgtgtgccactacatgcgttcattgtgaggaagaccatccacccgacaggtgtccaacgagcaggatcacttgtttcttttgtgaaggaactgatcatgtaccaaaagattgtcaattcagttttctgctgacgaagaagatggccaaccaacccgccagttccaacggagagaagcatcaaggcaacacaaatcctcgccaagattacagtttcagcctgactccagtgccaggacagaggaatcaaaatgagaaaagaaaatgccgagtccgggaagatatctgttgcttcaattgtcaaggaatgggtcatttcgccgacaagtgcccaaaaccgagaaacatagctgccggcacgtcagtccacgtaactccctgcactcagaagcttgctcctcagcgaattgtcatccatgcatcccgaagcagtcctatagcccgcgttgcaacagctccaactccagcgagagcattaccacaaggtgtcaatgctcaatttcagccccagccatcagttgacaagacagaggccagtatcggcattgtacctttggatgttccagcacagcagccaaggaatcaagtacaagatgaagaacctgagcaagaccatccaccaggggagtgtctcacccgcaggtgacatgttttctgtgtgaaggaacaaaccatgtgcccaaggattgccaacttagtgtgttgttgaccaagaccgcagaaatccaacgaacaactctacgattgtctcatcagctagtcagctccaacaacaacatcgatgatatcatccaccgcaccaatgctcctcttgctccacctaactttgcaataaatcatggcaataataccttcagcaccaaccactctctgcatcgacagcctcagcaaagaattgtcgtagatggaagaagttgtgtctctccccgacgtgaaatgggtaacttgtatgaggttgactccaaagatatgaactatacgaagttctggaactgaagccccatcttcaagtgccgcaacccagacgaagtcagctaaaggttcaaccagggacaagtcaggtgaagagaagattccacgataagttcttccagggcatcccgcgaaccggtccttaattgccat

SEQ ID NO: 23348 - DNA, 1773 bp, Oryza sativa
  Clone ID: TF_OsC1713_3496
atggaggagaaaccgtcaacttcatgtctgttcggaagtcaagtcaagtcaagcctcaagcttcatgcaaggagcgagaagatcagttcaaagtcgtcgttccgcgaagatcaagagtcacgtcaatgtcacccaccgcaggtgccagatcagatgccagcccggaacccgaatcagagtcagagtcaggagttcccaatatcggcaccgaagacccctgtcaaaatgctgtccagatccccgaagataacgacagccaagtcatcgtcagaccaaaggaaagtaagtgctacctgttatgactgtggtgagcaaggtcattatgtaaggaactgtccatggaaggtgttcgccaggtcacctgaaaaagacgagaagcagtgcccagggagtaaccaagctccaagtcagtctaccgacaagaaggatggtactttgcagcccaactctggagcgaacaggaaggtgacatggaagatggataatggcaggaccatgatcatcacaagttcagaatttactcctgaagacgcagcaaggatacccaagcgtcagagaggaagaaataccttccgtggagcacgccagctaacccgacatctcataaagtacggttcgcccagacccgaagatgatgaatcaggagagcagttttctgctgatgacgatgatgatgatactgatgacgatgatgatacgacccttaacagtttcatggaaagaggattggagttcaaagcatatcatgtgcctaaggactgtcagttaaacgcggtcatagctaagaccaagaaagaacaagggacaaccgtgcaacccattcgtcaaccaatgacaatcgacaacagcggtcacaatccttctgctcttcctccaactctagttccagtggaagccaaccatggaagaagcaacgtcaccaaggatgttcataagtctctgcttgttcccgtttcagctgccaaagtgcataatcagaagcctgcaccccgagaccaagcaagtcgattctgtcacaactgtcgtaagccaggacatcgtttcagtgattgtcctcttccaagagcagcaaaggcagttcgtcgtgattcacaagttaccagcactgcccatgacaccaatcgacacctgaatgtgcaacctccgccccaacggattatcgtcaagggcaccgtcaaaggtcacattgttccaccagcaatcgtttcaagcctacagcaccaacgccagcagcgtaagcaatgccaggagaacaacagctcgctacagctacaaagaggcggtacgccccttcgtcagcacccgcggcaagtgttgtcagcaccaggtcgcccaactgttgtcagttctagcaatgcacctcgtattgctccaatctggaggcccatcgacaaatcaccgttcggtaaccccacgggcaagaagatcctacccgttacagctgacaagacagttgcccctccaccatcgaagatcaacaagcagagcaacgttcccggtcatacctacccccactccgccagagacagaggcgacgtgggggcacggccgcccgttcaatcggacgtgaccggcaacaggccggtcacagattggtcacctccgattgacgtggcctgggtcccctccccgttcgctccccccgccacatggcaattgggcgagggcctcggggcgaggcagtgcgagggcccgaggggcacgacgtggcaccccgaggccctccggccgcttctgcgactcgcgaggtgcgggagtagggccaggctgtag

SEQ ID NO: 23349 - DNA, 4950 bp, Oryza sativa
  Clone ID: TF_OsC1713_4665
ttactgtggcaactggtggatatcactcctgcgatatatggaaaccgctaatccgatcagatctctctcacttgctttccatctctggtgttcttcctcctccgcgcgtctgtgctgcctctgttctgcctccccacttctgatcgcttgcgtgcacgagagatcggaacgagcagggcctccggaaccacaccttcgcttgagatctgcatcgggtaggcggatgatcaggtttttggggagtgcttccacacgactgctctcgtcgtccaccatgtctgcacctggagccactgccgacgcacctggagccactgccgtccctggagatggcacgccgggagccggagccgctgcgaacgtcaacatcaacgtaggcagtcctacctcacaatccagcggagggacattctcgggagatgctacattctttgagaatgaatttcccatgaaatatacacctagcacttctagtcaagaaactgtcataccccatgagcactttgcaccgatagaacacaatgatcaaacgcctgagggaaatcctcaggaggacacaattgtagatactcgtaagaggcctccggaaccacaccttcgcctgagatctgcaccgggtagacgggtgatcaggtttttggggagtgcttccgcacgactgctctcgacttttgctctgttcgtcatcgtctcgtcgtccaccatgtctgcacctggagccgctgccgccgcacctggagccgccgccgccgctggcgccgctgccgccgtcctagagatagcacgccaggagccggagccgctgcgaacgtcaacgtcaacagaggcagttctgcctcacaatctagcggagggccattctcggggtatatctttctcctgctgttaactcattcgttcatacctctgttagtcatgttagtcgcaattctattgcgttcttggtatgtgcatgatgcttattataccttaagcatgctcctggttatgctacatttcatcactagatcaccccacattgttcatgccatgattattatcttaacattttggattaaaatatgccgatatatgactatatttccaacaatccaaaaacctgatgggtcattttcggtagttggctttgctgctacactgaaaccacatgcatttgatggttctaactataagaggtggaaagcacgtgcactattgtggttgacagcgatgcaatgcttctatgtttcatggggcaaacgaagtgaaccacctctctctcctaaggaagatgttaagtttgaagcttcaaattgcctgttccgtggagcattgatcagtgtactcgctgacaacatagtggacgtgtacattcacatgccttccgggaaggacatgtgggatgcacttgaggccaagttcggagtttccgacgccggcagtgagctatatgtcatggagcagttctatgactacaagatggttgatgaccgttctgtagtagaacaagctcatgagattcagatgctggctaaggaacttgagaacaacaactgtgagttgccagacaagtttgtggcgggtggcattattgccaagttgccaccttcttggtcagactttgccacttctctaaagcacaaacaagagtttagtgtttctgatctcattggctctttgggtgttgaggagaaggcgagggcaaaggacaaccggggcaaaaaggttgagggaggttctagtgccaatatggtacagaagaagaaccctcatgcatcccacaacaacaagaaagtcaagcttgatggcaaacccaaggctacaaccaattttaagaagaaaggcaagggaaaggcaaaggaagactgctttgtgtgtggcaagtctgggcattgggccaaggactgtcctgagcgcaaagaaaggaagtctgccaacatggttattagcgagggcggagaaacatcggggtaaggtaaaatattacctacagttctctctgtttttcactcacctgattggtgggttgatactggtgctaatattcatgtatgtgatgacgggagaggttcctccttgttgatgggaaacgggtcgcttgcggctgttcatggtgttggtacggtcgatctgaagtttacttcgggaaagaccgtgcaactgaagaacgtgcagcatgtcgcttcaacaaagaagaatcttgttagcggctctctattgtgtagagaaggttttagagttgttttttgaatcctataaatgtgtcgtatctaaatatggaacttttattggaaaaggttatgacagcagaggcttgttccacttttctttggatgatatgtgtaataatcataatgttgtgaaccatattagcgagaatgatgagtctaatgtgtggcattcgcgactctgtcatgtgaatttcggttgtacgacgcgcttagctaacatgagtttaattccaaaattcactttggtcaaagtttctaagtgccatacttgtgttcaatcgaaacaacctcgcaagcctcacaaggcatttgaggcgaggaatttggcacttctagaacttgttcattccgatttgtgcgaaatgaacggcgtgttgactaaagggggaaagaaatatttcatgacactgatagatgattgcactagattttgttatgtgtatctattgaaaacaaaggatgaagcattgcattactttaagacctataaagctgaagtagaaaaccaacttgaaaggaaatcaaacggttgaggtctgatagaggtggggagtatttttccaatgagtttgcatccttttgcgaagagtttggaattatccatgagaggacgcctccctatccaccccaatcaaatggggtggccgaaagaaagaactgtactctaactgagatggtgaatgccatgttagacactgcggagctttccaaggaatggtggggtgaggcagttttgactgcgtgttatatcctgaataaaattccaatgaagtataaggaagtgacaccattcgaggaatgggaaaggaaaaaattaaatctctcatacctacgaacatggggctgtttggccaaggtaagtgtacctatagccaaaaagcgaaaacttagaccaaatactgttgattgtatgttccttggttatgctatttacagtgtgggttatagattcttaatagtaaactctggagtacctgacatgcgtgttggtacaattattgagtccagagatgctatattctttgataatgaatttcccatgaaacatacacctagcacttctagtcaagaaactgtcataccccatgagcactttgcaccgatagaacacaatgatcaaacgcctgagggaaatcctgaggacaacattgtagatactcttaagagtaagagacaaagggttgcaaaatcctttggagatgactatattgtatacctcgtggataacaccccaagaaccatagaagaggcatatttatctcctgacgctgactactggaaggaagcagtacgcagtgagatggactcgattatgtctaatgatacttgggaagtcgttgagtatccatatgggtgcaagcctgtaggatgtaaatgggttttcaagaaaaagcttaggcctgatggtacaattgaaaagtacaaggtaaggcttgtggccaaggattatacccaaaaggaaggcgaggattttttcgacacatactcactagttgctcgcttgaccacgattcgattactacttgctctggcagcctctcatggtcttctcgtccatcaaatggacgttaagacagctttcctaaacggagagctggaggaggagatctatatggatcaaccagacgggtatgtactagaaggtcaggagggaatggtgtgtaaactgttcaaatccttgtatggccttaagcaagcacctaaacaatggcatgagaagtttgacactacacttacatctgcaggctttgttgataacgaagctgacaaatgtgtgtactatcgtcatggtgggggagaaggagtgatcttgtgcttatatgtcgatgacatattgatcttttggaccagcctcaatgtgattgaggaggtcaaggactatctgtccaagagttttgaaatgaaggatttgggagaggctgatgttattcttaacattaagctaccaagaggatatgagggtgggattacacttgtgcaatcccactatgtggacaaggttttgactcctactccttatgatcccagcgtgctattaaggaaaaaccgaagaatagcaagggatcaactgagatactctcaaatcattggttcattgatgtacttggctagtgcaacgaggcctaacatctcatttgctgtaagcaagctgagccggtttgtctcaaatccgggagatgatcattggcaggctctggaaagagtaatgcgctatttaaagggcactatgagctatggaattcactataccgggtacccaaaagtactagaagggtatagtgactcaaactggatatctgatgctgatgagataaaagccacaagtggatatgtgttcacacttggaggtggcgctgtttcctagaagtcttacaagcagaccatcttaacgaggtcaacaatggaagcagaactcacagcactagatactgcgacagttgaggccgagtggcttcgtgaactcctgatggatttgccggtggttgaaaaaccagtgtcagctatcctaatgaactgtgataatcaaatagtgattattacagtgaacagttcaaaggacaacatgaagtcatctaggcatatcaagagaagactgaaatctgtcagaaagtagaaaaactccggagtgatagcattggactatgtccaaacggctaataatctggcagatcagtttaccaaggggctaccacgtaatgtgatagacagtgcatcgaggaaaatgggcttgatacccacc

SEQ ID NO: 23350 - DNA, 4731 bp, Oryza sativa
  Clone ID: TF_OsC22235_2
atggatactacgtcacttccctgccacgagctcattgagggtaccccatctcatccactgcacatgtgctcctacctccttgatgccacaggttggggagaagggcaacaaggtaggaggaggtcgtcggcaagccaaaatatgaccggtgagaggctaacccatcgtgtggagtctgttatgagggtatccgagtttagctcgttgcccgcgtcttgtgctgggagctcggatcacgtcgtgtggttgtggggatggacgcagctagagcatggcgtgagaagtggtcttggtggtttagccacacgatcgctggggaaattcctaacaattggtatcagagcacggtttaggaagtggactcgtgaccgcgcattggaaggcgtcttcatgccgcgtcgtcgctcgtcgtcaccgatcgtgcgcactcctcatgactccggcggccgcgccacgggcagcggcgggggtgaccgcgggctggtgatccaccgcgtggtgaaagaaggaggcggctcggtgaactacccgctgctgaccaagaccaactacaacgactgggcgctactgatgaagatcaagctgcaggctcgctgcctgtgggcggcgatcgagcccgacggcgtggacgtccctctgcatgaggaccggatggctcttgacgctatctgcagtgccgtgccgccggagatgattggcaccctggcgaccaaagcgtcggcccgggaagcctgggaatgcatcaagacaatgcgagtcggcaacgaccggattcgcaaggcgagtgcacagaaagtgcgcgctgagtatgaatcgcttgcgttccgcggtgacgagaccgtggaagatttcgctctacggctcacaaccatcgtcaaccagcttgcaaccctcggtgatcctgaacctgctgataaagtcgtcgaaaagtaccttcgggtagctcgtcccaggttcaatcaactcatcttgtctattgaaactcttctcgatatctctactctgtccatggaggaagttactggcagactgaaagccgctgaggattctgggcaatcctcgtcgcacaccgccggtgggaagctgtacctaactgaggaggagtgggctgaacgtcagaagaagaaggatcaagaggcaaagcggggtgactcgggcggctctggcggccgcggcaagcgccgtggcgggagagggcgcactggtggcggcgggactgcgagccccgagagcacgaactctggttcggcgcgcaagggagacaaatgccgaaattgcggcaaacttgggcactgggcgaaggactgcaggagcaagtccaagcgcgaagaacaggctcacgtcgcccaggaggatgaagaagagcacaccttgatgttgctcaccggcggccgcgttgacacggtcgacgcggcggcgccggagggcgacacgcccacaccgccccaccaagccgtggtggaactcgtggagatgaaagtatttgcagcgctcgacgacgcggctgaccatgatcccgggcgctggattatggattccggcgcgtcaaaccatatgacgggcagcaggatggcgttcgccgacctcgacacgaacatcaccgggaacgtgcgactcggcgatggatccgtggtccggatcgcaggacggggcacaattctctttgcctgcaagaatggtgagcaccgcactctgtcgaacacctattatcttccccgtcttgctgccaatattatcagcattgggcaattggatgagaccggcttcaaagtgctggcggaggatggcatcatgcgggtctgggatgagcagcggcgtctgcttgcccggatccctcgcaccccagggcgactgtacatgcttgacatcaacctggcgcgcccggtctgtttggcggcacacgccgacgaagacgcgtggcgctggcatgctcgcctcgggcacataaacttcagggcgctctgcaagatgggcaaggaggagctggtacgtggtctaccatgtttgtcgcaggttgatcaggtctgtgaggcctgtctcgccgggaaacaccggaggtcgccgttcccgcggcaggcactttgccggtctgacgagccgctggcgctgctacatggagatctctgtggaccgatcacgccggcgacacccagtggcaaccgctatttccttctactcgtcgacgactacagccggtacatgtgggtcgccctcctctccaccaaagatgcggcgccggctgccatcaagcgtattcaggcggcggcagaaaggaagagtggacgcaagctccgcgcgttgcggacggatcgcgggggagaattcacgtctacacagttcgccgagtactgcgccgagctgggaatgcggcgcgagctcacggcgccctactctccgcaacagaacggcgttgtcgagcggcgaaaccaatccgtggtgggcacggcgcggagtatgctcaaggcgaaggggctgccaggtatgttttggggagaggcgataaataccgccgtgtatctgctcaacaggtcgtcgtccaagggtatcggcggcaagaccccgtacgcgctgtggaacggcgttccgccggccgtgcaccatctgcgcacgtttgggtgtgtggcacacgtgaagacgaccaccccgaacctgaagaaactggatgacaggagtcgtccaatgatctttgtcggctacgagccggggtccaaggcgtatcgcgcctatgatccggctactcggcgtgttcacatctcccgtgacatcgtcttcgacgaagcggcccagtgggactgggatgctgaggcggccgctgatctcgacaccgacttcgtcgttgagtacaccacggtgtaccatcctggctcgctgtcaggaacacgccaagacgctggggagccgcctgctcgatcttcatcatcgccgcgaacgccatcagactcaccgacagccggccgaacaccttcggtgcatggcgatgcgccggcggttgattttgtgtcgccaccaactggagcagctgctaatcttgatgcagaccacgacgacgcaccactccgtttccgcacgatggacaatgtgctggggccggccatgctgccaggtctcgctaatcgtgaggtccaggaagagctgatgatggtgagcggagaagaaccggcaacgttcgctcaagctgaacgcgacgaggattggcgtcgggcaatgctcgatgaaatctcttcgatagaggagaacaagacctggaggctcgtcgatctgccttcgggacatcggccaattgggctgaaatgggtgtataaactgaagaaagatgctcagggcgtcgtcgtcaaacacaaggcgagattggtggcaaagggctacgtgcagagggctggaattgactttgatgaggtattcgctcctgttgctcgtcttgattctgttcgtttgttgctcgctctcgctgcgcaggaaggttggatggtgcatcatatggacgttaaatcagcgttcctcaatggggaactgattgaggaggtgtatgttgttcagccaccggggtttgagatcgatggacaggagaacaaggtttacaggcttgataaggcgctgtatggtcttcgccaagcacccagagcttggaacaccaagctagactgcacactgaagaaacttggcttcaagcagagcccgttggagcatgggctgtacgcgcgcggcgatggcagtgggcgactgctcgtcggtgtgtatgtggatgatctggtaattgtcgggggtgacagtggcatgatcaagggattcaaagagcagatgaaggctgaatttaagatgagtgatcttggtcctttgagtttttatcttgggatcgaggtacatcaagaagctggaatcatcactttaaagcaagcagcgtatgcgtcgcgtattgtggagaaggctgggctcaccggctgcaacccctgtgcaacaccgatggaaccacgtctaaagctgagcaaggaaagtgcaggatcgctagttgatgcgacagaatacagaagtctagtgggaagcttgcgctatctggtgaacacccgaccagaccttgcatattcggttggttatgtcagtcgtttcatggagaaacccacggacgaacacttggcggcagtgaagcgcatcataaggtatgttgctggtaccattcatcttgggtgccgctatgtgaaggaaggtgaaggaggactgcagggttacagtgacagtgatatggctggagacattgacactcgcaagagcaccacaggagtaattttctttctcggcaaaaatcctgttagctggcagtctcaaaaacagagagttgtagcactctcctcctgtgaatctgagtatattgcagctgcaacagctgcatgccagggcatttggcttgcccggctcctcggtgacctcaggaatgcagcaactgaagtcgtcgatctcagggtggacaaccaatccgctctggccctgatgaagaaccctgtttttcacgatcgaagtaagcacattcaaacaaaatttcatttcattcgtgaagccgtggagaatggggaaatcacaccgagttacatcggcacagaagggcaacttgcagatatcctgacgaagccgctttctcgaatcaagtttcaggagctgcgggaacaaattggcttagccacagtacgcatgcgttgtgtcgtctggtttcctgctagcgatcgctggggaaattcctaa

SEQ ID NO: 23351 - DNA, 5216 bp, Oryza sativa
  Clone ID: TF_OsC22235_3
cggaattcccgggtcgacccacgcgtccgcatcttgggtgccgctatgtgaaggaaggtgaaggaggactgcagggttacagtgacagtgatatggctggagacattgacactcgcaagagcaccacaggagtaattttctttctcggcaaaaatcctgttagctggcagtctcaaaaacagagagttgtagcactctcctcctgtgaatctgagtatattgcagctgcaacagctgcatgccagggcatttggcttgcccggctcctcggtgacctcaggaatgcagcaactgaagtcgtcgatctcagggtggacaaccaatccgctctggccctgatgaagaaccctgtttttcacgatcgaagtaagcacattcaaacaaaatttcatttcattcgtgaagccgtggagaatggggaaatcacaccgagttacatcggcacagaagggcaacttgcagatatcctgacgaagccgctttctcgaatcaagtttcaggagctgcgggaacaaattggtatgtttcctgtataatcggcacatcaagcttagggagagttttgttagcagtaatcttgtgtgccacggttagttagttgattagttatctgcatgtttccgtttttttttcgaataaacgcatgggaaaagaacttctgggcgcgacaccacggcactccggagcacgctccaagcgccgccgcagccgacatcgtcgtcgttccgaccaccgtagaccaaaccaagccgagccgtcgcgccaacgtcttctctgttagcagtaatcttgtgtgccacggtttagccacacgatcgctggggaaattcctaacaattggtatcagagcacggtttaggaagtggactcgtgaccgcgcattggaaggcgtcttcatgccgcgtcgtcgctcgtcgtcaccgatcgtgcgcactcctcatgactccggcggccgcgccacgggcagcggcgggggtgaccgcgggctggtgatccaccgcgtggtgaaagaaggaggcggctcggtgaactacccgctgctgaccaagaccaactacaacgactgggcgctactgatgaagatcaagctgcaggctcgctgcctgtgggcggcgatcgagcccgacggcgtggacgtccctctgcatgaggaccggatggctcttgacgctatctgcagtgccgtgccgccggagatgattggcaccctggcgaccaaagcgtcggcccgggaagcctgggaatgcatcaagacaatgcgagtcggcaacgaccggattcgcaaggcgagtgcacagaaagtgcgcgctgagtatgaatcgcttgcgttccgcggtgacgagaccgtggaagatttcgctctacggctcacaaccatcgtcaaccagcttgcaaccctcggtgatcctgaacctgctgataaagtcgtcgaaaagtaccttcgggtagctcgtcccaggttcaatcaactcatcttgtctattgaaactcttctcgatatctctactctgtccatggaggaagttactggcagactgaaagccgctgaggattctgggcaatcctcgtcgcacaccgccggtgggaagctgtacctaactgaggaggagtgggctgaacgtcagaagaagaaggatcaagaggcaaagcggggtgactcgggcggctctggcggccgcggcaagcgccgtggcgggagagggcgcactggtggcggcgggattgcgagccccgagagcacgaactctggttcggcgcgcaagggagacaaatgccgaaattgcggcaaacttgggcactgggcgaaggactgcaggagcaagtccaagcgcgaagaacaggctcacgtcgcccaggaggatgaagaagagcacaccttgatgttgctcaccggcggctgcgttgacacggtcgacgcggcggcgccggagggcgacacgcccacaccgccccaccaagccgtggtggaactcgtggagatgaaagtatttgcagcgctcgacgacgcggctgaccatgatcccgggcgctggattatggattccggcgcgtcaaaccatatgacgggcagcaggatggcgttcgccgacctcgacacgaacatcaccgggaacgtgcgactcggcgatggatccgtggtccggatcgcaggacggggcacaattctctttgcctgcaagaatggtgagcaccgcactctgtcgaacacctattatcttccccgtcttgctgccaatattatcagcattgggcaattggatgagaccggcttcaaagtgctggcggaggatggcatcatgcgggtctgggatgagcagcggcgtctgcttgcccggatccctcgcaccccagggcgactgtacatgcttgacatcaacctggcgcgcccggtctgtttggcggcacacgccgacgaagacgcgtggcgctggcatgctcgcctcgggcacataaacttcagggcgctctgcaagatgggcaaggaggagctggtacgtggtctaccatgtttgtcgcaggttgatcaggtctgtgaggcctgtctcgccgggaaacaccggaggtcgccgttcccgcggcaggcactttgccggtctgacgtgccgctggcgctgctacatggagatctctgtggaccgatcacgccggcgacacccagtggcaaccgctatttccttctactcgtcgacgactacagccggtacatgtgggtcgccctcctctccaccaaagatgcggcgccggctgccatcaagcgtactcaggcggcggcagaaaggaagagtggacgcaagctccgcgcgttgcggacggatcgcgggggagaattcacgtctacacagttcgccgagtactgcgccgagctgggaatgcggcgcgagctcacggcgccctactctccgcaacagaacggcgttgtcgagcggcgaaaccaatccgtggtgggcacggcgcggagtatgctcaaggcgaaggggctgccaggtatgttttggggagaggcgataaatactgccgtgtatctgctcaacaggtcgtcgtccaagggtatcggcggcaagaccccgtacgcgctgtggaacggcgttccgccggccgtgcaccatctgcgcacgtttgggtgtgtggcacacgtgaagacgaccaccccgaacctgaagaaactggatgacaggagtcgtccaatgatctttgtcggctacgagccggggtccaaggcgtatcgcgcctatgatccggctactcggcgtgttcacatctcccgtgacatcgtcttcgacgaagcggcccagtgggactgggatgctgaggcggccgctgatctcgacaccgacttcgtcgttgagtacaccacggtgtaccatcctggctcgctgtcaggaacacgccaagacgcttgggagccgcctgctcgatcttcatcatcgccgcgaacgccatcagactcaccgacagccggccgaacaccttcggtgcatggcgatgcgccggcagttgaatttgtgtcgccaccaactggagcagctgctaatcttgatgcagaccacgacgacgcaccactccgtttccgcacgatggacaatgtgctggggccggccatgctgccaggtctcgctaatcgtgaggtccaggaagagctgatgatggtgagcggagaagaaccggcaacgttcgctcaagctgaacgcgacgaggattggcgtcgggcaatgctcgatgaaatctcttcgatagaggagaacaagacctggaggctcgtcgatctgccttcgggacatcggccaattgggctgaaatgggtgtataaactgaagaaagatgctcagggcgtcgtcgtcaaacacaaggcgagattggtggcaaagggctacgtgcagagggctggaattgactttgatgaggtattcgctcctgttgctcgtcttgattctgttcgtttgttgctcgctctcgctgcgcaggaaggttggatggtgcatcatatggacgttaaatcagcgttcctcaatggggaactgattgaggaggtgtatgttgttcagccaccggggtttgagatcgatggacaggagaacaaggtttacaggcttgataaggcgctgtatggtcttcgccaagcacccagagcttggaacaccaagctagactgcacactgaagaaacttggcttcaagcagagcccgttggagcatgggctgtacgcgcgtggcgatggcagtgggcgactgctcgtcggtgtgtatgtggatgatctggtaattgtcgggggtgacagtggcatgatcaagggattcaaagagcagatgaaggctgaatttaagatgagtgatcttggtcctttgagtttttatcttgggatcgaggtacatcaagaagctggaatcatcactttaaagcaagcagcgtatgcgtcgcgtattgtggagaaggctgggctcaccggctgcaacccctgtgcaacaccgatggaaccacgtctaaagctgagcaaggaaagtgcaggatcgctagttgatgcgacagaatacagaagtctagtgggaagcttgcactatctggtgaacacccgaccagaccttgcatattcggttggttatgtcagtcgtttcatggagaaacccacggacgaacacttggcggcagtgaagcgcatcataaggtatgttgctggtaccattcatcttgggtgccgctatgtgaaggaaggtgaaggaggactgcagggttacagtgacagtgatatggctggagacattgacactcgcaagagcaccacaggagtaattttctttctcggcaaaaatcctgttagctggcagtctcaaaaacagagagttgtagcactctcctcctgtgaatctgagtatattgcagctgcaacagctgcatgccagggcatttggcttgcccggctcctcggtgacctcaggaatgcagcaactgaagtcgtcgatctcagggtggacaaccaatccgctctggccctgatgaagaaccctgtttttcacgatcgaagtaagcacattcaaacaaaatttcatttcattcgtgaagccgtggagaatggggaaatcacaccgagttacatcggcacagaagggcaacttgcagatatcctgacgaagccgctttctcgaatcaagtttcaggagctgcgggaacaaattggtttagccacagtacgcgtgcgttgtgttcgtctggtttcctgctag

SEQ ID NO: 23352 - DNA, 659 bp, Oryza sativa
  Clone ID: TF_rsicem_14574.y1.abd
ggaattcggcacgaggcatcatctcctttacctctgtacgcatataatcagagaaggagctagctcctggatgtatggaacaaaaacacatcactccaccctctgttgctgctgcactactgaattctcatcgctagtttctgcacgtacagaaccagcgagagcaggcctccgaaaccatgccccgctgcgacgtttgcacggacgggcgagcgatcaggattttagggagcgcaaggcgtgactgctcactgttcgtttgcttcatcttcttcttggtaccgtcagtgagagcaaggactgcatccacaatagcaaccaatggcgagaaaggtggcaccgatggagcggagaacatcaacaccaacggtggcaactacaacaataatgcctcatcctcaggagcgttctctaggtcgagggaggttctagcgccaatttggtgtagaagaagaaccctcatgcatcccacaacaacaacaacaatgtcaaacctgacatcaaacccaaggctacaaccaattttaagaagaaaggcaagagaaaggcaaagggcaactgctttgtgtgtggtaagcctgggcattaggccaaggattgtcctgagcgcaaggacaaaaagtctgcaaacatggtcattatcgagggcggaggaacat

SEQ ID NO: 23353 - DNA, 6101 bp, Oryza sativa
  Clone ID: TF_OsC1517_1130
ctaagggagcagctccgggaactcggcgcggagaagatcttctcgctcccaggttgcctcatcttcagaatgattgctccattggaccttgtagaacttgacggtcttccttcgagtctgacgttctgcctcttcaagaaccttgatcggtctttccttgtaggtcagattcttttccagctcgatattacccaggggaacttgttcttctagaactcgaagacatttctttaactgggatacgtggaatacgttgtgcacatctgcgagaccttcaggtaactcaagttgataagccacttcgccacgtctggcggttacgaggtaggggccgatgtagcggggtgctaacttgccggacatcccaaacctcataccacggaggggtgatacccgcaggtacacatgatctcctttttcgaactcaaggtcacgcctccgattgtcagcgtaatttttctgacggttctgcgctgtctttaagcgttctcggattagcttaacttgttcttctgctgacttgagtatgtcaggaccgaataccagcgcttcgcccacctcattccagcacaagggagtgcggcactttcttccgaacattgcctcattcggcgacatctgaatgctggcctgataactgttgttgtatgagaactcagcatacggcaaacaatgatcccaagtgccttcgaaatccagggcacacgcacgtagcatgtcttctaggatttggtttaccctttctgtctgaccatcggtctgcggatggtaggccgtactaaaatttagatcggttccgagggcttcatgcaactgcttccagaaccttgaggtgaactgagtgcctcggtctgacacaatcttcttgggacagccaaatctacatacgacatgggtcatgtagagttctgctagtttctttccatcaaaggtggttttcactggcacgaaatgagctgatttcgtgagtcggtccacgattacccaaatggagtcgtacccgccaggggttcttggcaaaccggtgatgaaatccattccgatctcttcccatttccactcgggaatcggtaggggttgcagcagaccagctggcctctgatgttctgccttgactctttggcaaatgtcacacaaggctacgtattctgcgacatctcgcttcattccagcccaccagaagtatgccttgatatcttggtacatcttcgtacttcctggatgaatggagtaggcggactcatgagcttcttttaggatgagatctcttaactcctttttggccggtacacagatgcatggaccgcaccaaactgtgccttggtcgtctatggagaaatcggtgtctttcttctcttgtattctttttattaactcctttatcccttcgtcgtctttctgagcttcccggatttgcgactctagggtaggctgtactgtcaagctggcagggacacctgactgtaccacggtcagcctcaacttctccaattctctgcacaggcgatcttggtcaggccatatttgagctacgttgcaatagactttgcgacttagcgcatcagcgaccacgttagctttactggggtgataatgaattccaagatcgtaatcttcacatctgttcccgattaaatagtgcctccagatcttaagagcatgaaccacagctgccaactcgagatcatgggtgggataattgacttcatgaggcctgagctgcctggatgcataagccacaacctttcgttcttgcattaggacacatcctaagccttgtcttgatgcatcacagaagatctcgaaatgctttcggatatctggcaaggtgagaactggggcagtggtcaaccttttcttcatttcttgaaagctgtcttcacaggctgcagaccattgaaatttcttttccttctttaacagctcggtcatgggtctggctagtttagagaatccttcaatgaatcttcgataatatccagctaagccaaggaagctgcgaatctctgacacattcttgggcgggttccaagcaagtacagcttcaaccttgctgggatctacttcgacaccgttggaggagatcacgtgtccaagaaatgctactcggtctaaccagaattcgcatttcgagaatttagcgaatagtcgatgatctctgagcttttccattatcagcctcatgtgttcagcatgttcttcctcattcttggagtatatcaggatgtcatcaatgaacaccacgacaaactggtccaggtattccataaagattttgttcattaagttcatgaagaatgctggagcattggtgagtccgaaggacatcactgtgaactcatatagaccataacgcgttgagaaagcggtcttcgggatatcttcagatctgattttcaattggtggtaacctgatctcaagtcaatctttgagaaaactcttgctcctttaagttgatcgaacaaatcgtcaatccgtggcaacgggtacttgttctttatagttacttcattcagggctctatagtcgattaccattctctcagagccatcctttttcttaaccagaagcactggggctccccaaggagatgagctaggtcgcacataacctttactctccaattcttcgatttgtcttttaacttctgctaactcattagctgccattcggtagggtctttttgcaattggtgcggtgcttggcgccagttctatggcgaactcaacgtcgggatattcacagactatgggcaccgactccaaggaggtgacttgtaaacaggttaggatagaccgacttgcggtaggggtgttagaggtaaagcgggcttgctttcctccaggtccttgcaaggtgatggacttttcggcacaatctatctgtcccttgtgcttagccaaccaatccatccctaggatgatgtccaagctttgcgagtctaggactatcggtttggctaggaagtcaacttcctcaattctaaggttaacttccgggcatatttgagttgcccttatattgctcctaggggaatgtactatcattggtacacgtaaattttgggttttccaaccatttcttttcacaaaagcttgtgatatgaaagaatgggaagctcccgaatcaaacagaactattgcgggtacggagttgacagagaacatacccatcacaacgtctggagcatcctgagcggtttcagcttgaatgtggttcatccggcctcgaccaaagttgttggaagcacgagaaccttgtccacttgcctgagagctaggacgagactgagctgccgctggagtaggagttctggcagtgctgccattagcatgccctgagctggtgttggtaggattctgagggcactgtctggcatagtgacccatctggttacaccggaaacactgaactgctgacggtccctgcggtgacttgaaagaggtaacactgtttggcgcagtattgccactaggggcacgctgctgtggctgaggtgccggacggttcatctgaggacgaggggcgtagcctggctggcggttagcctgagtgaccgactggtggtattgcatgggttgaccgtagcgagggcgaggtgcgcctcgggaagaatttccctgatggttagacttgcgtttcttgtattcttcggtagcctcttttctggcatcctcaagtagaagtgccttgttgatcatatgttgaaaagtggggaagtcatgagcaagcaactggagtctcattccaactgcgatccctttcaagaatttcctgatcttcttcttgtctgtgtccacttcctcaggggcgtaccgagccaacttgttgaacatgcttaggtactcattgacactgctgttgccttgcttaagtctgttgaattcctctttcttcatgtcaatagtgctttcaggcacatgagctgcacggaaagccgtagcaaactcatcccaagcaatgttagtgggttcagggtgtgcattgcagtaattctcccaccaatctgcagcaggtcctcttagctggtgagaggtgtagagcgtcttctctaccggagtacactgcactaagttgagttttctatcaacatctttcagccaatcgtcagcctcgacaggctcgatggtctgagagaattctggcggacgagacctcagaaaatctgtcagcttggatctattgttgctcatgtgagggtggccatttccatgcgcattatgctgaaaaccggctacggctgcggctaatccttgcaagatttgtgtctgaactgccattaagtgctgcatgttgttttccacatgaggtggggaagggaggcgttcttctccagaattgtgactggcagtgcggtgagagcggtgggactgttccatctctgcattacgggaagctgtgcgatgcgagcggttgatgcggcggggttgctcaacttctgcgttgcgggaagcagtacggtgcgaacggttgctgtggtgagaccgctcattagctgactcatgattttcttctggctcaactctaccttcctcaaaaacgaagcgggctggtgcacgagctgcacggcgggggcggctagccatctgtcgagggccgacagcagcaagggccactggcggtgggggagctgggtagtcgaaacggaacacggtggaagaaccaacaacacgcttccgcgcagtgcggataaagcgtgggccacggcgggacgaagcaactggggtgtgtccgggggtgtaggaagggctaactgggtttgggtagggggagtacactggtgagtacggcgcacgcgagctgggggagagcgggccactgggagtgcgggcagagccgcgggagctatgggaggacaggtggatggcgtggcagaggcggcctgagtcccaggagacagtgtcaactgaggtgacaccctcctcggccagacgggcctccaaagcggcgtagcggcgggcaagggagcggtaagcctcaaggagtaggtcgtgctgagtggcctgagcctccgaaagctcaaccatgcgagtcagcactggctgagactcgctgtacggacaagggtacctggcgactacgtggccagaaggaaggcgtggaagctgccggaaggcggagcccccgagacggtggctgtagtcgtgggccaggcgacgaagcgcagtccaggagaggtcctggtactcgatctggagagggggcctggccacggtgaagtggtgtgggcgaaggccagctccgtgtatacctccacgagggtaaaggtacacagagagctcacagcgagggggaacacggtccacggagtaccccgtgtactcgggacacgagaagccaaggaaacgggcgaggtcacgaagctgagcgatgtggtgaccctcaccaaaaccgtgggaactgaagctggcgttcactgccatcgtagctggcttgctcctggaagaactcctcatctgcaggatccgcttcatcttcttcagcaactgagggggggattacttatatagagcaagggtgattaacctctgcagagggggtacactttacccacacgacattactaacccggatcacccagcccgtggggatcagccacgtcgggagacctccaagctttcatgacaaggcatttccaaagccgacacaggtttaccatatgccgacgagaggggtcccagaccaacaacagttttacccaagatgtttatcatattttaagtttgaaggcgaccgtcgatactcgcacagagtgcacgaataccgaagcgtgactgggtggctataagggaacatggccgaggtggcgccgacgtggcgcctacgtggcagccatgcgggccggcgggaggtagacgacgacgccggccggaacggacggcggacgacagcggcgagcggcggagcgaaccacggcgatacaggcaaaagcgagcacaccgggtggttgcacgagacgaggggagacgagccaacggctcggattcgccggagggagcttgacggcggcgaattgcggcggcggcaaccggcggcgagggaaggggaaacggcgacgaggtcacgaggggccgattcctggcggcgagagcatctacgg

SEQ ID NO: 23354 - DNA, 3600 bp, Oryza sativa
  Clone ID: TF_OsC1517_1149
ttagactttgtagagcttgatggtcttccttcgagtctgacgttctgcctcttcaagaaccttgatcggtctttccttgtaggtcagattcttttccagctcgatattacccaggggaacttgctcttctggaactcgaagacatttctttaactgggatacgtggaacacgttgtgcacgtttgcgagaccttcaggtagctcaagctgataagccacttcgcaccgtctggcggttatgaggtaggggccgatgtagcggggtgctaacttgccggacatcccaaaccttctcataccacggaggggtgatacccgcaggtacacatgatctcctttttcgaactcaaggtcacgcctccgattgtcagcgtaattcttctgacggttctgtgctgtcttcaaacgttcccgtatcagcttaacttgttcttctgctgacttgagtatgtcaggaccgaataccaatgctttgcccacctcattccagcacaatggggtgcggcactttcttccgaacattgcctcattcggcgacatctgaatgctggcctgataactgttgttgtatgagaactcggcatacggcaaacaacgatcccaagtgccttcgaaatccaaggcacacgcacgtagcatgtcttctaggatttggtttaccctttcggtctgaccatcggtctgcggatggtaggctgtactaaaattcagaaccttgaggtgaactgagtgcctcggtctgacacaattttcttgggacagccaaatccaaatggagtcgtacccgttgggggttcttggcaaaccggtgatgaaatccattccgatctcttcccatttccactcgggaatcggtaggggttgcagcagaccagctggcctctgatgttccgccttgactctttggcaaatgtcacacagggctacgtattctgcgacgtctcgcttcattccagcccaccagaagtatgccttgatatcttggtacatcttcgtacttcctgggtgaatggagtaggcggactcatgagcttcctttaggatgagatctcttaactccttcttggccggtacacagatgcgtggtccgcaccaaactgtgccttgatcgtctatggagaaatttgtgtctttcttttcctgtattctttttattaattcttttatcccttcgtcgtctttctgagcctcccggatttgcgactctagggtaggctgtactgtcaagctggcagggacacctgactgtatcacggtcagtcttaacttctccaattctctgcacaggtgatcttggtcaggccgtatttgagctacattgcaataggccttgcgacttagcgcatcagcgaccacgttggctttaccaggatgatagtggattccaagatcgtaatccttgattagttccaaccatcttctctgtctcatatttaactcggtctgagtgaagatatacttaagacttttgtgatcggtgtatacttcacatctgttcccgattaaatagtgcctccagatcttaagagcatgaaccacggctgccaactcgagatcatgggtgggataattggcttcatgaggcctgagctgcctggatgcataggccacaaccttttgttcttgcattaggacacatcctaagccttgtcttgatgcgtcacagaagatctcgaaatattttcggatatctggcaaggtgagaactggggcagtggtcaactttttcttcaattcttggaagctgtcttcacaggcgttggaggaaatcacgtgtccaagaaatgctactcggtccaaccagaattcgcatttcgagaatttagcgaatagttgatgatctctgagcttttccattatcagcctcaggtgttcagcatgttcttcctcgttcttggagtatatcaggatgtcatcgatgaacaccacgacaaactggtctaggtattccatgaagattttgttcattaagttcatgaagaatgctggagcattagtgagtccgaaggacataactgtgaactcatatagaccataacgcgttgagaaagtggtcttcgggatatcttcagatctgattttcagttggtggtaacctgacctcaagtcaatttttgagaaaactcttgctcctttaagttgatcgaataaatcgtcaatccgtggcaacgggtacttgttctttatagttacttcattcagggctctatagtcgattaccattctctccgagccatcctttttcttaaccagaagtactggggctccccaaggggatgagctaggtcgcacataacctttactttccagttcttcgatttgtcttttaacttctgctaactcattagctgccatttggtagggtctttttgcaattggagctgtgcctggtgccagttctatggcgaactcgatctctcggtctggtggcattcttgttaattcttccggaaatacgtcgggatattcacagactatgggcaccgactccaaggaggtgacttgtaaacaggttaggatagaccgacttgcggtaggggtgttaggggtaaagcggacttgctttcctccaggtcccatcacaacgtctggagcatcctgagcggtttctgcttgaatgtgattcacacggcctcgaccaaagttgttggaagcacgtgaaccttgtccacttgcctgagagctaggacgagactgagctgccgctggagtaggagttctggcagtgctaccattagcatgccctgagttggtgttggtaggattctgaggacactgtctagcatagtgacccatctggttgcaccggaaacactgaactgctgacggtccctgcggtgacttgaaagaggtaacactgttaggcgcagtatcgctactaggggcacgctgctgtggctgaggtgccggacggtttatctgaggacgaggggcgtagcctggctggcggttagcctgggtgaccgactggtggtattgcatgggttgaccgtagcgagggcgaggtgcgcctcgggaagaatttccctgatggttagacttgcgtttcttgtattcttcggtagcctcttttctggcatcctcaagtagaagtgccttgttgatcatatgttgaaaagtggggaagtcatgagcaagcaactggagtctcattccaactgcgattcctttcaagaatttcctgatcttcttcttatctgtgtctacttcctcaggggcgtaccgagccaacttgttgaactgacttaggtactcattgacactgctgttgccttgcttaagtctgttgaattcttctttcttcatgtcaatagtgatttcaggcacatgagctgcacggaaagccgtagcgaactcatcccaagcaatgttagtgggttcagggtgtgcattgcagtaattctcccaccaatctgcggcaggtccacttagttggtgagaggcgtagagcgtcttctcaacaggagtacactgcactaagttgagttttctatcaacatctttcaaccaatcgtcagcctcgacgggctcgacggtctgagagaactctggcggacgagacctcagaaagtctgtcagcttggatctgttgttgcccat

SEQ ID NO: 23355 - DNA, 4515 bp, Oryza sativa
  Clone ID: TF_OsC1517_1275
ctaagggagcagctccggaaactcggcgcggagaagatcttctcgttccctggttgcctcatcttcagaatgattgctccattggactttgtagaacttgatggtcttccttcgagtctgacgttctgcctcttcaagaaccttgatcggtctttccttgtaggtcagattcttttccagctcgatactacccaggggaacttgctcttctggaactcgaagacatttctttaactgggatacgtggaacacgttgtgcacatctgcgagaccttcaggtagctcaagctgataagccacttcgccacgtctggcggctatgaggtaggggccgatgtagcggggtgctaacttgccggacatcccaaaccttctcatacctcggaggggtgacacccgcaggtacacatgatctccttttttgaactcaaggtcacgtctccgattgtcagcgtaatttttctgacggttctgcgctgtcttcaagcgttctcggatcagcttaacttgttcttctgctgacttgagtatgtcaggaccgaataccagggcttcgcccacctcattccagcacaagggggtgcggcactttcttccgaacattgcctcatttggcgacatctgaatactagcctggtaactgttgttgtatgagaactcagcatacggcaaacaacgatcccaagtgccttcgaaatccaaggcacacgcacgcagcatgtcttctaggatttggtttaccctttctgtctgaccatcggtctgtggatggtaggccgtactaaaatttagatcagttccgagagtttcatgcaactgcttccagaaccttgaggtgaactgagtgcctcggtccgacacaattttcttgggacagccaaatctacatacgacatgagtcatgtagagttctgccagtttctttccatcataggtggttttcactggcacgaaatgagctgatttcgtgagtcggtccacgattacccaaatggagtcatacccgcagggggttcttggcaaaccggtgatgaaatccattccgatctcttcccatttccactcgggaattggtaggggttgtagcagaccagctggcctctggtgctctgccttgactctttggcaaatgtcacacaaggctacgtattctgcgacgtctcgcttcattccagcccaccagaagtatgccttgatatcttggtacatcttcgtacttcctggatgaatggagtaggcggactcatgagcttcctttaggatgagatctcttaactccttcttggccggtacacagatgcgtggaccgcaccaaactgtgccttgttcgtctatggagaaattggtgtctttcttctcccgtattctttttattaactcttttatcccttcgtcatctttctgggcctcccggatttgtgattctagggtaggctgtactgtcaagctggcagggacacctgactgtaccacggtcagccttaacttctccaattctctgcacaggtgatcttggttaggccgtgtttgggctacattgcaataggccttgcgacttagcgcatcagcgaccacgttagctttaccgggatgataatgaattcccagatcgtaatccttgattagttccaaccatcttctctgtctcatatttaactcggtctgtgtgaagatatacttaagacttttgtgatcggtgtatacttcacatctgttcccgattaaataatgcctccagatcttaagagcatgaaccatggctgccaactcgagatcatgggtgggataattgacttcatgaggcctgagctgcctggatgcgtaggccacaacctttcgttcttgcattaggacacatcctaagccttgtcttgatgcgtcacagaagatctcgaaatcttttcggatatctggcaaggtgagaactggtgcagtggtcaaccttttcttcatttcttgaaagctgtcttcacaggctgcagaccattgaaatttcttttctttctttaacagctcggtcataggtctggctagcttagagaatccttcaatgaatcttcgataatatcccgctaagccaaggaagctgcggatctctgacacgttcttgggcgggttccaagcaagtacagcttcaaccttgctgggatctacttcgacaccgttggaggaaatcacgtgtccaagaaatgctactcggtccaaccagaattcgcatttcacgacaaactggtccaggtattccatgaagattttgttcattaagttcatgaagaacgctggagcattggtgagtccgaaggacattactgtgaactcgtatagaccataacgcgttgagaaagcggtcttcggaatatcttcagatctgattttcaattggtggtaacctgacctcaagtcaatttttgagaagactcttgctcctttaagttgatcgaataaatcgtcaatccgtggcaacgggtacttgttctttatagttacttcattcagggctctatagtcgattaccattctctcagagccatcctttttcttaaccagaagcactggggctccccaaggggatgagctaggtcgcacataacctttactctccaactcttcgatttgtcttttgacttctgctaactcattagtcgttaattcttctggaaatacgtcaggatattcactgactatgggcaccgactccaaggaggtgacttgcaaacaggttaggatagaccgacttgcggtaggggtgttaggggtaaagcggacttgctttcctccaggtccttgcaaggtgatggacttttcggcacaatctatctgtcctttgtgcttagccaaccaatccatccctaggatgatgtccaagctttgcgagtctaggactatcggtttggctaggaagtcaacttcctcaattctaaggttaacttccgggcatatttgaattgcccttatattcctcccaggggaatgtactatcattggtacacgcaaattttgggttttccaaccgtttcttttcacaaaagcttgtgatatgaaagaatgggaagctcctgaatcaaatagaactattgcgggtacggagttgacagagaacatacccatcacaacgtctggagcatcctgagcggtttcagcttgaatgtgattcacacgtcctcgaccaaagtggttggaagcacgagaaccttgtccacttgcctgagagctaggacgagactgagctgccgctggagtaggagttctggcggtgctgccattagcatgccctgagttggtgttggcaggattctgaggacactgtctagcatagtgacccatctggttgcaccggaaacactgaactgctgacggtccctgtggtgacttgaaagaggtaacactgtttggcgcagtattgccactaggggcacgctgctgtggcggaggtgccggacggtttatctgaggacgaggggcgtagcctggctggcggttagtttgagtgatcgactggtggtattgcatgggttgaccgtagcgagggcgaggtgcgcctcgggaagaatttccctgatggttagacttgcgtttcttgtattcttcggtagcctcttttctggcatcctcaagcagaagtgccttgttgatcatatgttgaaaagtggggaagtcatgagcaagcaactggagtctcattccaactgcgattcccttcaagaatttcctgatcttcttcttatcggtgtctacttcctcaggggcgtaccgagccaacttgttgaactgacttaggtactcattgacactgttgttgccttgcttaagtctgttgaattcttctttcttcatgtcaatagtgctttcaggcacatgagctgcacggaaagccgtagcaaactcatcccaagcaatgttattgggttcaggatgtgcattgcagtaattttcccaccaatctgcggcaggtcctcttagctggtgagaggcgtagagcgtcttctcaacaggagtacactgcactaagttgagttttctatcaacatctttcaaccaatcgtcagcctcgacgggctcgacggtctgagagaactctggcggacgtgacctcagaaagtctgtcagcttggatctattgttgcccacgtgagggtggccatgcacattatgctgaaaactggctatggctgtggttagtccttgcaagatttgtgtctgaactgccattatgtgttgcatgttgttttccacatgaggtggggaagggaggcgttcttctccagaattgtgactgacagtgcagtgagagaggtgagactgctccatctctgcatcacgggaaactgtgcgatgcgagcggctgctgcggcggggttgctcaacctctgcgttgcgggaaacagtacggtgcgaacggttgctgcggtgagactgctcattagctgattcatgatttgcttctgcttcaactctaccatcttcaaaaccaaagcgggctggtgcacgagctgcacggcgggggcggctagccat

SEQ ID NO: 23356 - DNA, 5547 bp, Oryza sativa
  Clone ID: TF_OsC1517_1307
ctaagggagcagctccggaaactcggcgcggagaagatcttctcgttcccaggttgcctcatcttcagaatgattgctccattggactttgtagaacttgatgatcttccttcgagtctgacgttctgcctcttcaagaaccttgaacggtctttccttgtaggtcagattcttttccagctcgatattacccaggggaacttgctcttctggaactcgaagacatttctttaactgggatacgtggaacacgttgtgcacatctgcgagaccttcaggtagctcaagctgataagccacttcgccacgtctggcggttatgaggtaggggccgatgtagcgggctgctaacttgccggacatcccaaacctcctcataccacggaggggtgatactcgcaggtatacatgatctcctttttcgaactcaaggtcacgcctccgattgtcagcgtaattcttctgacggctctgtgctgtcttcaaacgttctcggatcagcttaacttgttcttctgctgacttgagtatgtcaggaccgaataccagtgcttcgcccacctcattccagcacaagggagtgcggcactttcttccgaacattgcctcattcggcgacatcttaatgctggcctgataactgttgttgtatgagaactcagcatacggcaaacaacgatcccaagtgccttcgaaatccaaggcacacgcacgtagcatgtcttctaggatttggtttaccctttcggtctgaccatcggtctgcggatggtaggctgtactaaaatttagatcagttccgagggcttcatgcaactgcttccagaaccttgaggtgaactgagtgcctcggtctgacacaattttcttgggacagccaaatctacatacgacatgggtcatgtagagttctgctagtctctttccatcataggtggttttcactggcacgaaatgagctgatttcgtgagtcggtccacgattacccaaacggagttgtacccgctgggggttcttggcaaaccggtgatgaaatccattccgatctcttcccatttccactcgggaatcggtaggggttgcagcagaccagctggcctctgatgctctgccttgactctttggcaaatgtcacacaaggctacgtattctgcgacatctcgcttcattccagcccaccaaaagtatgccttgatatcttggtacatcttcgtacttcctggatgaatggagtaagcggactcatgagcttcctttaggatgagatctcttaactccttcttggccggtacacagatgcgtggaccgcaccaaactgtgccttgatcgtctatggagaaattggtgtctttcttctcctgtattctttttattaactcttttatcccttcgtcatctttctgagcctcccggatttgcgattctagggtaggctgtactgtcaagctggcagggactcctgactgtaccacggtcagccttaacttctccaattctctgcacagatgatcttggtcaggccgtatttgagctacattgcaataggccttgcgacttagcgcatcagcgaccacgttggctttaccaggatgatagtggattccaagatcgtaatccttgattagttccaaccatcttctctgcctcatatttaactcggtctgggtgaagatatatttaagacttttgtgatcggtgtatacttcacatctgttcccgattaaataatgcctccagatcttaagagcatgaaccacggctgccaactcgagatcatgggtgggataattgacttcatgaggcctgagctgcctggatgcataggccacaacctttcgttcttgcattaggacacatcctaagccttgtcttgatgcgtcacagaagatctcaaaatcttttcggatatctggcaaggtgagaactggtgcagtggtcaaccttttcttcatttcttgaaagctgtcttcacaggctgcagaccattgaaatttcttttccttctttaacagctcggtcataggtctggctagcttagagaatccttcaatgaatcttcgataatatcccgctaagccaaggaaactacggatctctgacacgttcttgggcgggttccaagcaagtacagcttcaaccttgctgggatctacttcgacaccgttggaggaaatcacgtgtccaagaaatgctactcgatctaaccagaattcgcatttcgagaatttagcgaatagttgatgatctctgagcttttccattatcagcctcaggtgttcagcatgttcttcctcgttcttggagtatatcaggatgtcatcgatgaacaccacgacaaactggtccatgtattccatgaagattttattcattaagttcatgaagaatgctggagcattggtgagtccgaaggacataactgtgaactcatatagaccataacgcgttgagaaagcggtcttcgggatatcttcagatctgattttcagttggtggtaacctgacctcaagtcaatttttgagaaaactcttgctcctttaagttgatcgaataaatcgtcaatccgtggcaacgggtacttgttctttatagttacttcattcagggctctatagtcgattaccattctctcagagccatcctttttcttaaccagaagcactggggctccccaaggggatgagctaggtcgcacataacctttactttccagttcttcgatttgtcttttaacttctgctaactcattagctgccattcggtagggtctttttgcaattggagctgtgcctggtgccagttctatggcgaactcaacctctcggtctggtggcattctcgttaattcttctgggaatacgtcgggatattcacagactatgggcaccgactccaaggaggtgacttgtaaacaggttagaatagaccggcttgcggtaggggtgttaggggtaaagcggacttgctttcctccaggtccttgcaaggtgatggacttttcggcacaatctatctgtcctttgtgcttagccaaccaatccatccctaggatgatgtccaagctttgcgagtctaggactatcggtttggctaggaagtcaacttcctcaattctaaggttaacttccgggcatatttgagttgcccttatattcctcccaggggaatgtactatcattggtacacgcaaattttgggttttccaaccatttcttttcacaaaagcttgtgatatgaaagaatgggaagctcctgaatcaaatagaactattgcgggtacggagttgacagagaacatacccatcacaacgtctggagcatcctgagcggtttcagcttgaatgtgattcacacgtcctcgaccaaagtggttggaagcacgagaaccttgtccacttgcctgagagctaggacgagactgagctgccgctggagtaggagttctggcggtgctgccattagcatgccctgagttggtgttggtaggattctgagggcactgtctagcatagtgacccatctggttgcaccggaaacactgaactgctgacggtccctgtggtgacttgaaagaggtaacgctgttaggcgcagtattgccactaggggcacgctgctgtggctgaggtgccggacggtttatctgaggacgaggggcgtagcttggctggcggttagcctgagtgaccgactggtggtattgcatgggttgaccgtagcgagggcgaggtgcgcctcgggaagaatttccctgatggttagacttgcgtttcttgtattcttcggtagcctcttttctggcatcctcaagcagaagtgccttgttgatcatatgttgaaaagtggggaagtcatgagcaagcaactggagtctcattccaactgcaattcccttcaagaatttcctgatcttcttcttatctgtgtctatttcctcaggggcgtaccgagccaacttgttgaactgacttaggtactcattgacactgctattgccttgcttaagtctgttgaattcttctttcttcatgtcaatagtgctttcaggcacatgagctgcacggaaagccgtagcaaactcatcccaagcaatgttagtgggttcaggatgtgcattgcagtaattctcccaccaatctgcagcaggtcctcttagctggtgagaggcatagagcgtcttctcaacaggagtacactgcactaagttgagttttctatcaacatctttcaaccaatcgtcagcctcgacgggctcgacggtctgagagaactctggcggacgtgacctcagaaagtctgtcagcttggatctattgttgcccacgtgagggtggccatttccatgcgcattatgctgaaaactggctatggctgtggttagtccttgcaagatttgtgtctgtactgccattatgtgttgcatgttggtttccacatgagatggggaagggaggcgttcttctccagaattgtgactggcagtgcggtgagactgttccatctttgcatcacgggaaactgtgcgatgcgagcggctgctgcggcggggttgctcaacctctgcgttgcgggaaacagtacggtgcgaacggttgctgtggtgagactgctcattagctgattcatgatttgcttctgcttcaactctaccatcttcaaaaccaaagcgggctggtgcacgagcggcatggcgggggcggctagccatctgtcgagggccggcagcagcacgggccgctgacggtgggggagctgggtagtggaaacggaacacggtggaagaaccaacaacacgcttccgcgcggtgcggataaagcgtgggccacggcgggaggaagcaactggggtgtgtccgggggtgtaggaagggctaactgggtgtgggtagggggagtacactggtgagtacggcgcacgcgagctgggggagcgcgggccactgggagtgcgggcagagccgcgggagctgtgggaggacaggtggctggcgtggcagaggcggcctgagtcccaagagatagtgtcaactgaggtgacaccctcctcggccagacgggcctccaaagcggcgtagcggcgggcaagggagcggtaagcctcaaggagtaggtcgtgctgagtggcctgagcctccgaaagctcgaccatgcgagtcagcactggctgagactcgctgtacggacaagggtacctggcgtctgagtggccagagggaaggcgtggaagctgccggaaggcggaacctccgagacggtggctgtagtcgtgggccaggcgacgaagcgcagtccaggagaggtcctggtacgcgatctggagagtgggcctggccacagtgaagtggtgggggcgaaggccagctccgtgtatacctccacgggggtaaaggtacaccgagagctcacagtgagggggaacacggtccacggagtaccccgtgtactcgggacacgagaagccaaggaaacgggagaggtcacgaagctgagcgacgtggtgaccctcaccaaaaccgtgggaactgaagctggcgttcactgccat

SEQ ID NO: 23357 - DNA, 5208 bp, Oryza sativa
  Clone ID: TF_OsC1517_1333
ctaagggagcagctccgggaactcggcgcggagaagatcttctcgctcccaggttgcctcatcttcagaatggttgctccattggactttgtagaacttgatggtcttccttcgagtctgacgttctgtctcttcaagaaccttgatcggtctttccttgtaggtcagattcctttccagctcgatattacccagggggacttgctcttctggaactcgaagacatttctttagctgggatacgtggaacacgttgtgcacatctgcgagaccttcaggtagctcaagctgataagccacttcgccacgtctggcggttatgaggtaggggccgatgtagcggggtgctaacttgctggacatcccaaaccttctcataccacggaggggtgatacccgcaggtatacatgatctcctttttcgaactcaaggtcacgcctccgattgtcagcgtaattcttctgacggctctgtgctgtcttcaaacgttctcggatcagcttaacttgttcttctgctgacttgagtatgtcaggaccgaataccagtgcttcgcccacctcattccagcacaagggagtgcggcactttcttccgaacattgcctcattcggcgacatcttaatgctggcctgataactgttgttgtatgagaactcagcatacggcaaacaacgatcccaagtgccttcgaaatccagggcacatgcacgtaacatgtcttctaggatttggtttaccctttcagtctgaccatcggtgtgcggatggtaggccgtactaaagtttagatcggttccgagggcttcatgcaattgtttccagaaccttgaggtgaactgagtgcctcggtctgacacaatcttcttgggacagccaaatctacatacgacatgggtcatgtagagttctgctagtttctttccatcaaaggtggttttcactggcacgaaatgagctgatttcgtgagtcggtccacgattacccagatggagtcgtacccgctaggggttcttggcaaatcggtgatgaaatccattccgatctcttcccatttccactcgggaatcggtaggggttgcagcagaccagctggcctctggtgctctgccttgactctttggcaaatgtcgcacagggctacgtattctgcgacatctcgcttcattccagcccaccagaagtacgccttgatatcttggtacatcttcgtacttcctggatgaatggagtaggcggactcatgagcttcctttaggatgagatctcttaactccttcaaactgtgccttgatcgtctatggagaaattggtgtctttcttctcctgtattcctttttattaattcttttatcccttcgttgtctttctgagcctcccggatttgcgactctagggtaggctgtactgtcaagctggcagggacacctgactgtaccacggtcagccttaacttctccaattctctgcacaggtgatcatggtcaggccgtatttgagctacattgcaataggccttgcgacttagcgcatcagcgaccacgttggctttaccaggatgataatggattccaagatcgtaatccttgattagttccaaccatcttctctgtctcatgtttaactcggtctgtgtgaagatatacttaagacttttgtgatcggtgtatacttcacatctgttcccgattaaatagtgcctccagatcttaagggcatgcaccacggctgccaactcgagatcatgggtgggataattgacttcatgaggcctgagctgcctggatgcataggccacaacctttcgttcttgcattaggacacatcctaagccttgtcttgatgcatcacagaagatctcgaaatcttttcggatatctggcaaggtgagaactggggcagtggtcaaccttttcttcatttcttgaaagctgtcttcacaggatgcagaccagtgaaatttattttccttctttaacagctcggtcataggtctggctagcttagagaatacttcaatgaatcttcgataatatccagctaagcctaggaagctgcgaatctctgacacattcttgggcgggttccaagcaagtacagcttcaaccttgctgggatctacttcgacaccgtgggaggagatcacgtgtccaagaaatgctactcgatctaaccagaatttgcatttcgagaatttagcgaatagttgatgatctctgagcttttccattatcagccttaggtgttcagcgtgttcttcctcattcttggagtatatcaggatgtcatcgatgaacaccacgacaaactggtccaggtattccataaagattttgttcattaagttcatgaagaatgctggagcattggtgagtccgaaggacattactgtgaactcatatagaccataacgcgttgagaaagcggtcttcgggatatcttcagatctgattttcagttggtggtaacctgacctcaagtcaatttttgagaaaactcttgctcctttaagttgatcgaataaatcgtcaatccgtggcaacgggtacttgttctttatagttacttcattcagggctctatagtcaattaccattctctcagagccatcctttttcttaaccagaagcactggggctccccaaggggatgagctaggtcgcacataacctttactctccaactcttcgatttgtcttttaacttctgctaactcattagctgccattcggtagggcctttttgcaattggagccgtgcctggtgccagttctatagcgaactcaatctctcggtctggtggcatactcgttaattcttctgggaatacgtcgggatattcacagactatgggcaccgactccaaggaggtgacttgtaaacaggttaggatagaccgacttgcggtaggggtgttaggggtaaagcggacttgctttcctccaggtccttgcaaggtgatggacttttcggcacaatctatctgtcctttgtgcttagccaaccaatccatacctaggatgatgtccaagctttgcgagtctaggactatcggtttggctaggaagtcaacttcctcaattttaaggttaacttccgggcatatttgagttgcccttatattccttccaggggaatgtactatcattggtacacgtaaattttgggttttccaaccatttcttttcacaaaagcttgtgatatgaaagaatgggaagctcctgaatcaaacagaactattgcgggtacggagttgacagagaacatacccatcacaacgtctggagcatcctgagcggtttcagcttgaatatggttcacacgtcctcgaccaaagtggttggaagcacgtgaaccttgtccacttgcctgagagctgggacgagactgagctgtcgctggagtaggagttctggcagtgctgccattagcatgtactgagttggtgttggtaggattctgaggacactgtctggcatagtgacccatctggttgcaccggaagcactgaactgctgacggtccctgtggtgacttaaaagaggtaacactgtttggcgcagtattgccactaggggcacgctgctgtggctgaggtgccggatggttcatctgaggacgaggggcgtagcctggctggcggttagcctgagttaccgactggtgatattgcatgggctgaccgtagcgagggcgaggtgcgcctcgggaagaatttccctgatggttagacttgcgtttcttgtattcttcgatagcctcttttctggcatcctcaagtagaagtgccttgttgatcatatgttgaaaggtgggaaagtcatgagcaagcaactggagtctcattccaactgcgatccccttcaaaaatttcctgatcttcttcttgtctgtgtccacttcctcaggggcgtaccgagccaacttgttgaacatacttaggtactcattgacactgctgttgccttgcttaagtctgttgaattcttctttcttcatgtcaatagtgctttcaggcatatgagctgcacggaaagccgtagcaaactcatcccaagcaatgttagtgggttcagggtgtgcattgcagtaattctcccaccaatctgcagcgggtcctcttagctggtgagaggcgtagagcgtcttctcaacaggagtacactgcactaagttgagttttctatccacatctttcagccaatcgtcagcctcgacgggctcgacggtctgagagaactctggcggacgagacctcagaaagtctgtcagcttggatctattgttgctcatgtgagggtggccatttccatgcgtattatgctgaaaaccggctatggctgcggctaatccttgcaagatttgtgtctgtcgagggccggcagcagcacgggccgctggcggtgggggagctgggtagtggaaacggaacacggtggaagaaccaacaacacgcttccgcgcggtgcggataaagcgtgggccacggcgggaggaagcaactggggtgtgtccgggggtgtaggaagggctaactgggtgtgggtagggggagtacactggtgagtacggcgcacgcgagctgggggagcgcggaccactgggagtgcgggcagagccacgggagctgtgggaggacaggtggctggcgtgacagaggcggcctgagtcccaggagatagtgtcaactgaggtgacaccctcctcggccagacgggcctccaaagcggcgtagcggcgggcaagggagcggtaagcctcaaggagtaggtcgtgctgagtggcctgagcctccgaaagctcaaccatgcgagtcagcactggctgagactcgctgtacggacaagggtacctggcgtctgagtggccagaaggaaggcgtggaagctgccggaaggcggagcctccgagacggtggctgtagtcgtgggccaggcgacgaagcgcagtccaggagaggtcctggtacgcgatctggagagtgggcctggccacggtgaagtggtgtgggcgaaggccggctccgtgtatacctccacgggggtaaaggtacacagagagctcacagtgagggggaacacggtccacggagtaccccgtgtactcgggacacgagaaaccgaggaaacgggcgaggtcacgaagctgagcgacgtggtgaccctcaccaaaaccgtgggaactgaagctggagttcactgccat

SEQ ID NO: 23358 - DNA, 5571 bp, Oryza sativa
  Clone ID: TF_OsC1517_1376
ctaagggagcagctccgggaactcggcgcggagaagatcttctcgctcccaggttgcctcatcttcagaatgattgctccattggactttgtagaacttgacggtcttccttcgagtctgacgttctgcctcttcaagaaccttgatcggtctttccttgtaggtcagattcttttccagctcgatattacccaggggaacttgctcttctggaactcgaagacatttctttaactgggatacgtggaacacgttgtgcacatctgcgagaccttcaggtaactcaagctgataagccacttcgccacgtctggcggttatgaggtaggggccgatgtagcggggtgctaacttgccggacatcccaaacctcctcataccatggagaggcgatacccgcaggtatacatgatctcctttttcgaactcaaggtcacgcctccgattgtcggcataactcttctgacggttctgcgctgtctttaaacgttctcggatcagcttaacttgttcttctactgccttaagtatgtcaggaccgaataccagcgcttcgcccacctcattccagcacaagggagtgcggcactttcttccgaacattgcctcattcggcgacatctgaatgctggcctgataactgttgttgtatgagaactcctcatacggcaaacaacgatcccaagtgccttcgaaatccagggcacacgcacgtagcatgtcttctaggatttggtttaccctttcggtctgaccatcggtctgcgggtggtaggccgtactaaaatttagatcggttccaagggcttcatgcaattgcttccagaaccttgaggtgaactgagtgcctcggtctgacacaatcttgttgggacagccaaatctacacacgacatgggtcatgtagagttctgctagtttctttccatcaaaggtggttttcactggcacgaaatgagctgatttcgtgagtcggtccacgattacccagatggagtcgtacccgctaggggttcttggcaaaccggtgatgaaatccattccgatctcttcccatttccactcgggaatcggtaggggttgcagcagaccagctggcctctgatgttctgccttgactctttggcaaatgtcacacaaggctacgtattctgcgacatctcgcttcattccagcccaccagaagtatgccttgatatcctggtacatcttcgtacttcctggatgaatggagtaggcggactcatgagcttcctttaggatgagatctcttaactccttcttggccggtacacagatgcgtggaccgcaccaaactgtgccttgatcgtctatggagaaattgatgtctttcttctcctgtattctttttattaactcttttatcccttcgtcgtctttctgagcttcccggatttgcgactctagggtaggctgtactgtcaagctggcagggacacctgactgtaccacggtcagcctcaacttctccaattctctgcacaggcgatcttggtcaggccgtatttgagctacattgcaataggccttgcgacttagtgcatcagcgaccacattagctttaccggggtggtaatgaattccaagatcgtaatccttgattagttccaaccatcttctctgcctcatatttaactcggtctgagtgaagatgtacttaagacttttgtgatcggtgtatacttcacatctgttcccgattaaatagtgcctccagatcttaagagcatgaaccatggctgccaactcgagatcatgggtgggataattgacttcatgaggcctgagctgcctggatgcataggccacgacttttcgttcttgcattaggacacatcctaagccttgtcttgatgcatcacagaagatctcaaaatcttttcggatatctggcaaggtgagaactggggcagtggtcaaccttttcttcatttcttgaaagctttcttcacaggctgcagaccattgaaatttcttttccttctttaacagctcggtcataggtctggctagcttagagaatccttcaatgaatcttcgataatatctagctaagccaaggaagctgcgaatctctgacacattcttgggcgggttccaagcaagtacagctctaaccttgctgggatctacttcgacaccgttggaggagatcacgtgtccaagaaatgctactcggtctaaccagaattcgcatttcaagaattttgcaaatagttgatgatctctgagtttttccattatcagcctcaggtgttcagcatgttcttcctcattcttggagtatatcaggatatcatcgatgaacaccatgacaaactggtccaggtattccataaagattttgttcattaagttcatgaagaacgctggagcattggtgagtccgaaggacattactgtgaactcatatagaccataacgcgttgagaaagcggtcttcgggatatcttcagatctgattttcagttggtggtaacctgatctcaagtcaatttttgagaaaactcttgctcctttaagttgatcgagcaaatcgtcaatccgtggcaacgggtacttgttctttatagttacttcatttagggctctatagtcgattaccattctctcagagccatcctttttcttaaccagaagcactggggctccccaaggggatgagctaggtcgcacataacttttactctccaattctttgatttgtcttttaacttctgctaactcattagctgccattcggtagggtctttttgcaattggtgcagtgcctggcgccagttctatggcgaactcaatctctcggtctggtggtatactcgttaattcttctggaaatacgtcggggtattcacagactatgggcaccgactccaaggaggtgacttgtaaacaggttaggatagaccgacttgcggtaggggtgttagaggtaaagcggacttgctttcctccaggtccttgcaaggtgatggacttttcggcacaatctatctgtcctttgtgcttagccaaccaatccatccctaggatgatgtccaagctttgcgagtctaggactatcggtttggctaggaagtcaacttcctcaattctaaggttaacttccgggcatatttgagttgcccttatattcctcccaggggaatgtactatcattggtacacgtaaattttgggttttccaaccatttcttttcacaaaagcttgtgatatgaaagaatgagaagctcctgaatcaaacagaactattgcgggtacggaattgacagagaacatacccatcacaacgtctggagcatcctgagcggtctcagcttgaatgtggttcactcggcctcgaccaaagttgttggaagcacgtgaaccttgtccacttgcctgagagctaggacgagactgagctgccgctggagtaggagttctggcagtgctgccattagcatgccctgagttggtgttggtgggattctgagggcactgtctggcatagtgacccatctggttgcaccggaaacactgaactgctgacggtccctgtggtgacttgaaagaggtaacactgtttggcgcagtattgccactaggggcacgctgctgtggctgaggtgccggacggttcatctgaggacgaggggcgtagcctggctggcggttagcctgagtgaccgactggtggtattgcatgggttgaccgtagcgagggcaaggtgcgcctcgggaagaatttccctgatggttagacttgcgtttcttgtattcttcggtagcctcttttctggcatcctcaagtagaagcgctgcgattcctttcaagaatttcctgatcttcttcttgtctgtgcccacttcctcaggggcgtaccgagccaacttgttgaacatacttaggtactcattgacactgctgttgccttgcttaagtctgttgaattcttctttcttcatgtcaatagtgctttcaggcacatgagctgcacggaaagccgtagcaaactcatcccaagcaatgttagtgggttcagggtgtgcattgcagtaattctcccaccaatctgcagcaggtcctcttagctggtgagaggcgtagagcgtcttctcgaccggagtacactgcactaagttgagttttctatcaacatctttcagccaatcgtcagcctcaacgggctcgacggtctgagagaactctggcggacgtgacctcagaaaatctgtcagcttggatctattgttgctcatgtgagggtggccatttccatgcgcattatgctgaaaaccggctacggctgcggctaatccttgcaagatttgtgtctgaactgccattaagtgttgcatgttgttttccacatgaggtggggaagggaggcgttcttctccagaattgtgactggcagtgcggtgagagcggtgagactgttccatctctgcattacgggaaactgtgcgatgcgagcggctgctgcggcggggttgctcaacttctgcgttgcgggaagcagtacggtgcgaacggttgctgtggtgagactgctcattagctgactcatgattttcttctggctcaactctaccattttcaaaaccaaagcgggcccctgtggtcggctcctcagtcgaagaaacgtcgatcggctgacgcgaagggaccggcggaacctgtcgagggccggcagcagcacgggccgctggcggtgggggagctgggtagtgaaaacggaacacggtggaagaaccaacaacacgcttccgcgcggtgcggataaagcgtgggccacggcgggaggaagcaactggggtgtgtccgggggtgtaggaagggctaactgggtgtgggtagggggagtacactggtgagtacggcgcacgcgagctgggggagcgcgggccactgggagtgcgggcagagccgcgggagctgtgggaggacaggtggctggcgtggcagaggcggcctgagtcccaagagacagtgtcaactgaagtgacaccctcctcggccagacgggcctccagggcggcgtagcggcgggcaagggagcggtaagcctccaggagtaggtcgtgctgagtggcctgagcctccgaaagctcaaccatgcgagtcagcactggctgagactcgctgtacggacaagggtacctggcgtctgagtggccagaaggaaggcgtggaagctgccggaaggcggagcccccgagacggtgggcgatctggagagtgggcctggccacggtgaagtggtgtggacgaaggccagctccgtgtatacctccacgggggtaaaggtacacagagagctcacagtgagggggaacacggtccacggagtaccccgtgtactcgggacacgagaagccaaggaaacgggcgaggtcacgaagctgagcgacgtggtgaccctcaccaaaaccgtgggagctgaagctggcgttcactgccatctgttaatcgataccagtcccaggaaatagtgctggtatcacagggagacagaatatcacagcaacagaagtctctttattatagagtagaagtacagtcat

SEQ ID NO: 23359 - DNA, 5085 bp, Oryza sativa
  Clone ID: TF_OsC1517_1403
ctaagagagcagctccggaaactcggcgcggagcagatcttctcgttcccaggttgcctcatcatcagaatgattgctccattggactttgtagaacttgatggtcttccttcgagtctgacgttctgcctcttcaagaaccttgatcggtctttccttgtaggtcagattcttttccagctcgatattacccaggggaacttgctcttctggaactcgaagacatttctttaactgggatacgtggaacacgttgtgcacatctgcgagaccttcaggtagctcaagctgataagccacttcgccacgtctggcagttatgaggcggggtgctaacttgccggacatcccaaaccttctcataccacggaggggtgatacccgcaggtacacatgatctcctttttcgaactcaaggtcacgcctccgattgtcagcgtaattcttctgacggttctgtgttgtcttcaaacgttctcgtatcagcttaacttgttcttcttctgacttgagtatgtcaggaccgaataccagtgcttcgcccacctcattccagcacaagggggtgcggcactttcttccgaacattgcctcattcggcgacatctgaatgctggcctgataactgttgttgtatgagaactcggcatacggcaaacaacgatcccaagtgccttcgaaatccaaggcacacgcacgtagcatgtcttctaggatttggtttaccctttcggtctgaccatcggtctgcggatggtaggctgtactaaaattcagatcagttccgagggcttcatgcaactgcttccagaaccttgaggtgaactgagtgcctcggtctgacacaattttcttgggacagccaaatctacatacgacatgggtcatgtagagttctgctagtttctttccatcataggtggttttcactggcacgaaatgagctgatttcgtgagtcggtccacgattacccaaatggagtcgtacccgctgggggttcttggcaaaccggtgatgaaatccattccgatctcttcccatttccactcgggaatcggtaggggttgcagcagaccagctggcctctgatgctctgccttgactctttggcaaatgtcacacaaggctacgtattctgcgacatctcgcttcattccagcccaccaaaagtatgccttgatatcttggtacatcttcgtacttcctggatgaatggagtaagcggactcatgagcttcctttaggatgagatctcttaactccttcttggccggtacacagatgtgtggaccgcaccaaactgtgccttgatcgtctatggagaaattggtgtctttcttctcctgtattctttttattaactcttttatcccttcgtcatctttctgagcctcctggatttgcgattctagggtaggctgtactgtcaagctggcagggactcctgactgtaccacggtcagccttaacttctccaattctctgcacatatgatcttggtcaggccgtatttgagctacattgcaataggccttacgacttagcgcatcagcgaccacgttggctttaccaggatgatagtggattccaagatcgtaatccttgattagttccaaccatcttctctgcctcatatttaactcggtctgtgtgaagatatatttaagacttttgtgatcggtgtatacttcacatctgttcccgattaaataatgcctccagatcttaagagtatgaaccacggctgccaactcgagatcatgggtgggataattgacttcatgaggcctgagctgcctggatgcataggccacaacctttcgttcttgcattaggacacatcctaagccttgtcttgatgcatcacagaagatctcgaaatcttttcggatatctggcaaggtgagaactggtgcagtggtcaaccttttcttcatttcttgaaagctgtcttcacaggctgcagaccattgaaatttcttttccttctttaacagctcggtcataggtctggctagcttagagaatccttcaatggatcttcgataatatcccgctaagccaaggaagctgcggatctctgacacgttcttgggcgggttccaagaaagtacagcttcaaccttgctgggatctacttcgacaccgttggaggaaatcacgtgtccaagaaatgctactcgatctaaccagaattcgcatttcgagaatttagcgaatagttgatgatctctgagcttttccattatcagcctcaggtgttcagcatgttcttcctcgttcttggagtatatcaggatgtcatcgatgaacaccacgacaaactggtccaggtattccatgaagattttgttcattaagttcatgaagaatgctagagcattggtgagtccgaaggacataactgtgaactcatatagaccataacgcgttgagaaagcggtcttcgggatatcttcagatctgattttcagttggtggtaacctgacctcaagtcaatttttgagaaaactcttgctcctttaagttgatcgaataaatcgtcaatccgtagcaacgggtacttgttctttatagttacttcattcagggctctatagtcgattaccattctctcagagccatcctttttcttaaccagaagcattggggctccccaaggggatgagctaggtcgcacataacctttactttccagttcttcgatttgtcttttaacttctgctaactcattagctgccattcggtagggtctttttgcaattggagctgtgcctggtgccagttctatggcgaactcaatctctcggtctggtggcattctcgttaattcttctaggaatacgtcgggatattcacagaccatcacaacgtctggagcatcctgagcggtttcagcttgaatgtgattcacacgtcctcgaccaaagtggttggaagcacgaggaccttgtccacttgcctgagagctaggacgagactgagctgccactggagtaggagttctggcggtgctgccattagcatgccctgagttggtgttggtaggattctgagggcactgtctagcatagtgacccatctggttgcaccggaaacactgaactgctgacggtccctgtggtgacttgaaagaggtaacactgtttggcgcagtgttgccactaggggcacgctgctgtggcggaggtgccggacggttcatctgagggcgaggggcgtagcctggctggcggttagcctgagtgaccgactggtggtattgcatgggttgaccgtagcgagggcgaggtgcgcctcgggaagaatttccctgatggttagacttgcgtttcttgtattcttcggtagcctcttttctggcatcctcaagcagaagtgccttgttgatcatatgttgaaaagtggggaagtcatgagcaagcaactggagtctcattccaactgcgatccccttcaagaatttcctgatcttcttcttgtctgtgtccacttcctcaggggcgtaccgagccaacttgttgaacatacttaggtactcattgacactgctgttgccttgcttaagtctgttgaattcttctttcttcatgtcaatagtgctttccggcacatgagctgcacggaaggccgtagcaaactcatcccaagcaatgttagtgggttcagggtgtgcattgcagtaattctcccaccaatctgcagcaggtcctcttagctggtgagaggcgtagagcgtcttctcaacaggagtacattgcactaagttgagttttctatcaacatctttcaaccaatcgtcagcctcgacgggctcgacggtctgagagaactctggcggatgtgacctcagaaaatctgtcagcttggatctattgttgcccacgtgagggtggccatttccatgcgcattatgctgaaaactggctatggctgtggttagtccttgcaagatttgtgtctgtactgccattatgtgttgcatgttgttttccacatgaggtggggaagggaggcgttcttctccagaattgtgactggcagtgcggtgagagcggtgagactgttccatctctgcattacggaaaactgtgcgatgcgagcggttgctgcggtggggttgctcaacctctgcgttgcggaaaacagtacggtgcgaacggttgctgtggtgagactgctcattagctgattcatgatttgcttctgcttcaactctaccatcttcaaaaccaaagcgggctggtgcacgagctgcacggcgggggcggctagccatcggtgggggagctgggtggcggaaacggaacacggtggaagaaccaacaacacgcttccgcgcagtgcggataaagcgtgggccatggcgggaggaagcaactggggtgtgtccgggggtgtaggaagggctaactgggtgtgggtagggggagtacactggtgagtacggcgcacgtgagctaggggagcgcgggccactgggagtgcgggcagagccgcgggagctgtgggaggacaggtggctggcgtggcagaggcggcctgagtcccaggagatagtgtcaaccgaggtgacaccctcctcggccagacgggcctccaaagcggcgtagcggcgggcaagggagcggtaagcctcaaggagtaggtcgtgctgagtggcctgagcctccgaaagctcgaccatgcgagtcagcactggctgagactcgctgtacggacaagggtacctggcgtctgagtggccagaaggaaggcgtggaagctgccggaaggcggaacctccgagacggtggctgtagtcgtgggccaggcgacgaagcacagtccaggagaggtcctggtacgcgatctggagagtgggcctggccacagtgaagtggtgggggcgaaggccagctccgtgtatacctccacgggggtaaaggtacacagagagctcacagtgagggggaacacggtccacggagtaccccgtgtactcggaacacgagaagccaaggaaacgggcgaggtcacgaagctggacgacgtggtgaccctcaccgaaaccgtgggaactgaagctggcgttcaccgccat

SEQ ID NO: 23360 - DNA, 5553 bp, Oryza sativa
  Clone ID: TF_OsC1517_1411
agggagcaggtccgggaactcggcgcggagaagatcttctcgctcccaggttgcctcgtcttcggaatgattgctccattggactttgtagaacttgatggtcttccttcgagtctgacgttctgcctcttcaagaaccttgatcggtctttccttgtaggtcagattcttttctagctcgatattacccaggggaacttgctcttctggaactcgaagacatttctttaactgggatacgtggaacacgttgtgcacgtctgcgagaccttcaggtagctcaagctgataagccacttcgccacgtctggcggttatgaggtaggggccgatgtagcggggtgctaacttgccggacatcccaaaccttctcataccacggaggggtgatacccgcaggtacacatgatctcctttttcgaactcaaggtcacgcctccgattgtcagcgtaattcttctgacggttctgtgctgtcttcaaacgttctcgtatcagcttaacttgttcttctgctgacttgagtatgtcaggaccgaataccagtgctttgcccacctcattccagcacaagggggtgcggcactttcttccgaacattgcctcattcggcgacatctgaatgctggcctgataactgttgttgtatgagaactcggcatacggcaaacaacgatcccaagtgccttcgaaatccaaggcatacgcacgtagcatgtcttctaggatttggtttaccctttcggtctgaccatcggtctgcggatggtaggctgtactaaaattcagatcagttccgagggcttcatgcaactgcttccagaaccttgaggtgaactgagtgcctcggtctgacacaattttcttgggacagccaaatctacatacgacatgggtcatgtagagttctgctagtttctttccatcataggtggttttcactggcacgaaatgagctgatttcgtgagtcggtccacgattacccaaatggagtcgtacccgttgggggttcttggcaaaccggtgatgaaatccattccgatctcttcccatttccactcgggaatcggtaggggttgcagcagaccagctggcctctgatgttccgccttgactctttggcaaatgtcagacagggctacgtattctgcgacgtctcgcttcattccagcccaccagaagtatgccttgatatcttggtacatcttcgtacttcctgggtgaatggagtaggcggactcatgagcttcctttaggatgagatctcttaactccttcttggccggtacacagatgcgtggtccgcaccaaactgtgccttgatcgtctatggagaaatttgtgtctttcttctcctgtattctttttattaattcttttatcccttcgtcgtctttctgagcctcccggattcgcgactctagggtaggctgtactgtcaagctggcagggacacctgactgtaccacggtcagtcttaacttctccaattctccgcacaggtgatcttggtcaggccgtatttgagctacattgcaataggccttgcgacttagcgcatcagcgaccacgttggctttaccaggatgatagtggattccaagatcgtaatccttgattagttccaaccatcttctctgtctcatatttaactcggtctgagtgaagatatacttaagacttttgtgatcggtgtatacttcacatctgttcccgattaaatagtgcctccagatcttaagagcatgaaccacggctgccaactcgagatcatgggtgggataattggcttcatgaggcctgagctgcctggatgcataggccacaaccttttgttcttgcattaggacacatcctaagccttgtcttgatgcgtcacagaagatctcgaaatctttttggatatctagcaaggtgagaactggggcagtggtcaaccttttcttcaattcttggaagctgtcttcacaggctgcagaccattgaaatttcttttccttctttaacagctcggtcataggtctggctagcttagagaatccttcaatgaatcttcgataatatccagctaagccaaggaagctgcggatctctgacacgttcttgggcgggttccaagcaagtacagcttcaaccttgctgggatctacttcgacaccgttggaggaaatcacgtgtccaagaaatgctactctgtccaaccagaattcgcatttcgagaatttagcgaatagttgatgatctctgagcttttccattatcagcctcaggtgttcagcatgttcttcctcgttcttggagtatatcaggatgtcatcgatgaacaccacgacaaactggtctaggtattccatgaagattttgttcattaagttcatgaagaatgctggagcattggtgagtccgaaggacataactgtgaactcatatagaccataacgcgttgagaaagcggtcttcgggatatcttcagatctgattttcagttggtggtaacctgacctcaagtcaatttttgagaaaactcttgctcctttaagttgatcgaataaatcgtcaatccgtggcaacgggtacttgttctttatagttacttcattcagggctctatagtcgattaccattctctccgagccatcctttttcttaaccagaagcactggggctccccaaggggatgagctaggtcgcacataacctttactttccagttcttcgatttgtcttttaacttctgctaactcattagctgccattcggtagggtctttttgcaattggagctgtgcctggtgccagttctatggcgaactcgatctctcggtctggtggcattcttgttaattcttccggaaatacgtcgggatattcacagactatgggcaccgactccaaggaggtgacttgtaaacaggttaggatagaccgacttgcggtaggggtgttaggggtaaagcggacttgctttcctctaggtccttgcaaggtgatggacttttcggcacattctatctgtcctttgtgcttagccaaccaatccatccctagaatgatgtccaagctttgcgagtctaggactatcggtttggctaggaagtcaacttcctcaattctaaggttaacttccgggcatatttgagttgcccttatattccttccaggggaatgtactatcattggtacacgcaaattttgggttttccaaccatttcttttcacaaaagcttgcgatatgaaagaatgggaagctcccgaatcgaacagaactattgcgggtacggagttgacagagaacatacccatcacaacgtctggagcatcctgagcggtttcagcttgaatgtgattcacacggcctcgaccaaagttgttggaagcacgtgaaccttgtccacttgcctgagagctaggacgagactgagttgccgctggagtaggagttctggcagtgctgccattagcatgccctgagttggtgttggtaggattctgaggacactgtctagcatagtgacccatctggttgcaccggaaacactgaactgctgacggtccctacggtgacttgaaagaggtaacgctgttaggcgcagtattgccactaggggcacgctgctgtggctgaggtgccggacggtttatctgaggacgaggggcgtagcctggctggcggttagcctgagtgaccgactggtggtattgcatgggttgaccgtagcgagggcgaggtgcgcctcgggaagaatttccctgatggttagacttgcgtttcttgtattcttcggtagcctcttttctggcatcctcaagtagaagtgcgttgttgatcatatgttgaaaagtggggaagtcatgagcaagcaactggagtctcattccaactgcgattcctttcaagaatttcctgatcttcttcttgtctgtgtccacttcctcaggggcgtaccgagccaacttgttgaactgacttaggtactcattgatactgctgttgccttgcttaagtctgttgaattcttctttcttcatgtcaatagtgctttcaggcacatgagctgcacggaaagccgtagcgaactcatcccaagcaatgttagtgggttcagggtgtgcattgcagtaattctcccaccaatctgcggcaggtcctcttagttggtgagaggcgtagagcgtcttctcaacaggagtacactgcactaagttgagttttctatcaacatctttcaaccaatcgtcagcctcgacgggctcgacggtctgagagaactctggcggacgagacctcaaaaagtctgtcagcttggatctgttgttgcccatgtgagggtggccatttccatgcgcattatgctgaaaactggctatggctgtggttagtccttgcaagatttgtgtctgaactgccattaagtgttgcatgttggtttccacatgaggtggggaagggaggcgttcttctccagaattgtgactggcagtgcggtgagagcggtgagactgttccatctctgcatcacgggaaactgtgcgatgcgagcggctgctgcggcggggttgctcaacctctgcgttgcgggaaacagtacgatgcgaacggttgctgtggtgagactgctcattagctgattcatgattttcttctggctcaactctaccatcctcaacaccaaagcgggctggtgcacgagctgcacggcggggacggctagccatctgtcgagggccggcagcagcacgggccgctggcggtgggggagctgggtagtggaaacggaacacggtggcagaaccaacaacacgcttccgcgcagtgcggataaagcgtgggccacggcgggaggaagcaactggggtgtgtcctggggtgtaggaagggctaactgggtgtgggtagggcgagtacactggtgagtacggcgcacgcgagctgggggagcgcgggccactgggagtgcgggcagagccgcgggagctgtgggaggacaggtggctggcgtggcagaggcggcctgagtcccaagagatagtgtcaactgaggtgacaccctcctcggccagacgggcctccaaagcggcgtagcggcgggcaagggagcggtaagcctcaaggagtaggtcgtgctgagtggcctgagcctccgaaagctcgaccatgcgagtcagcactggctgagactcgctgtacggacaagggtacctggcgtctgagtggccagagggaaggcgtggaagctgccggaaggcggaacctccgagacggtggctgtagtcgtgggccaggcgacgaagcgcagtccaggagaggtcctggtacgcgatctggagagtgggcctggccacagtgaagtggtgggggcgaaggccagctccgtgtatacctccacgggggtaaaggtacaccgagagctcacagtgagggggaacacggtccacggagtaccccgtgtactcgggacacgagaagccaaggaaacgggagaggtcacgaagctgagcgacgtggtgaccctcaccaaaaccgtgggaactgaagctggcgttcactgccat

SEQ ID NO: 23361 - DNA, 5556 bp, Oryza sativa
  Clone ID: TF_OsC1517_1425
ctaagggagcaggtccgggaactcggcgcggagaagatcttctcgctcccaggttgcctcgtcttcggaatgattgctccattggactttatagaacttgatggtcttccttcgagtctgacgttctacctcttcaagaaccttgatcggtctttccttgtaggtcagattcttttccagctcgatattacccaggggaacttgctcttctggaactcgaagacatttctttaactgggatacgtggaacacgttgtgcacatctgcgagaccttcaggtagctcaagctgataagccacttcgccatgtctggcggttatgaggtagggaccgatgtagcggggtgctaacttgccggacatcccaaaccttctcataccacggaggggtgatactcgcaggtacacatgatctcccttttcgaactcaaggtcacgtctccgattgtctgcgtaatttttctgacggttctgcgctgtctttaaacgctctcggatcagcttaacttgttcttctgctgacttgagtatgtcaggaccgaataccagggcttcgcccacctcattccagcacaagggggtgcggcactttcttccgaacattgcctcattcggcgacatctgaatgctggcctgataactgttgttgtatgagaactcagcatacggcaaacaacgatcccaagtgccttcgaaatccaaggcacacgcacgtagcatgtcttctaggatttggtttaccctttccgtctgaccatcggtctgtggatggtaggccgtactaaaatttagatcagttccgagggcttcatgcaactgcttccagaaccttgaggtgaactgagtgcctcgatccgacactattttcttgggacagccaaatctacatacgacatgagtcatgtagagttctgctagtttctttccatcataggtggttttcactggcacgaaatgagctgacttcgtgagtcggtccacgattacccagatggagtcgtacccgctgggggttcttggcaaaccggtgatgaaatccattccgatctcttcccatttccactcgggaatcggtaggggttgcagcagaccagctggcctctgatgttccgccttgactctttggcaaatgtcacacagggctacgtattctgcgacgtctcgcttcattccagcccaccagaagtatgccttgatatcttggtacatcttcgtacttcctgggtgaatggagtaggcggactcatgagcttcctttaggatgagatctcttaactccttcttggccggtacacagatgcgtggtccgcaccaaactgtgcctttatcgtctatggagaaattggtgtctttcttctcctgtattctttttattaattcttttatcccttcgtcgtctttctgagcctcccggatttgcgactctagggtaggctgtactgtcaagctggcagggacacctgactgtaccacggtcagtcttaacttctccaattctctgcacaggtgatcttggtcaggccgtatttgagctacattgcaataggccttgtgacttagcgcatcagcgaccacgttggctttaccaggatgatagtggattccaagatcgtaatccttgattagttccaaccattttctctgtctcatatttaactcggtctgagtgaagatatacttaagacttttgtgatcggtgtatacttcacatctgttcccgattaaatagtgcctccagatcttaagagcatgaaccacggctgccaactcgagatcatgggtgggataattggcttcatgaggcctgagctgcctggatgcataggccacaaccttttgttcttgcattaggacacatcctaagccttgtcttgatgcgtcacagaagatctcgaaatcttttcggatatctggcaaggtgagaactggggcagtggtcaaccttttcttcaattcttggaagctgtcttcacaggctgcagaccattgaaatttcttttccttctttaacagctcggtcataggtctggctagcttagagaatccttcaatgaatcttcgataatatcccgctaagccaaggaagctgcgaatctctgacacattcttgggcgggttccaagcaagtacagcttcaaccttgctgggatctacttcgacaccgttggacgagatcacgtgtccaagaaatgctactcggtctaaccagaattcgcacttcgagaattttgcgaatagttgatgatctctgagcttttccattatccgcctcaggtgttcagcatgttcctcctcgttcttggagtatatcaggatgttatcgatgaataccacgacaaactggtccaggtattccataaagattttgttcattaagttcatgaagaatgctggagcattggtgagtccgaaggacattactgtgaactcatatagaccataacgcgttgagaaagcggtcttcggaatatcttcagatctgattttcagttgatggtaacctgacctcaagtcaatttttgagaagactcttgctcctttaagttgatcgaataaatcgtcaatccgtggcaacgggtacttgttctttatagttacttcattcagggctctatagtcgattaccattctctcagagccatcctttttcttaaccagaagcactggggctccccaaggggatgagctaggtcgcacataacctttactctccaactcttcgatttgtcttttaacttctgctaactcattagctgccattcggtagggtctttttgcaattggagctgtgcctggtgccagttctatggcgaactcgatctctcggtctggtggcattctttttaattcttccggaaatacgtcgggatattcacagactatgggcaccgactccaaggaggtgacttgtaaacaggttaggatagaccgacttgcggtaggggtgttaggggtaaagcggacttgctttcctccaggtccttgcaaggtgatggacttttcggcacaatctatctgtcctttgtgcttagccaaccaatccatccctagaatgatgtccaagctttgcgagtctaggactatcggtttggctaggaagtcaacttcctcaattctaaggttaacttccgggcatatttgagttgcccttatattccttccaggggaatgtactatcattggtacacgcaaattttgggttttccaaccatttcttttcacaaaagcttgcgatatgaaagaatgggaagctcccgaatcgaacagaactattgcgggtacggagttaacagagaacatacccatcacaacgtctggagcatcctgagcggtttcagcttgaatgtgattcacacggcctcgaccaaagttgttggaagcacgtgaaccttgtccacttgcctgagagctaggacgagactgagctgccgctggagtaggagttctggcagtgctgccattagcatgccctgagttggtgttggtaggattctgaggacactgtctagcatagtgacccatctggttgcaccggaaacactgaactgctgacggtccctgcggtgacttgaaagagataacactgttaggcgcagtattgccactaggggcacgctgctgtggctgaggtgccggacggtttatctgaggacgaggggcgtagcctggctggcggttagcctgagtgaccgactggtggtattgcatgggttgaccgtagcgagggcgaggtgcgcctcggaaagaatttccctgatggttagacttgcgtttcttgtattcttcggtagcctcttttctggcatcctcaagtagaagtgccttgttgatcatatgttgaaaagtggggaagtcatgagcaagcaactggagtctcattccaactgcgattcctttcaagaatttcctgatcttcttcttgtctgtgtccacttcctcaggggcataccgagccaacttgttgaactgacttaggtactcattgatactgctgttgccttgcttaagtctgttgaattcttctttcttcatgtcaatagtgctttcaggcacatgagctgcacggaaagccgtagcgaactcatcccaagcaatgttagtgggttcagggtgtgcattgcagtaattctcccaccaatctgcggcaggtcctcttagttggtgagaggcgtagagcatcttctcaacaggagtacactgcactaagttgagttttctatcaacatctttcaaccaatcgtcagcctcgacgggctcgacggtctgagagaactctggcggacgagacctcagaaagtctgtcagcttggatctgttgttgcccatgtgagggtggccatttccatgcgcattatgctgaaaactggctatggctgtggttagtccttgcaagatttgtgtctgaactgccattaagtgttgcatgttggtttccacatgaggtgggaaagggaggcgttcttctccagaattgtgactggcagtgcggtgagagcggtgagactgtcccatctctgcatcacgggaaactgtgcgatgcgagcggctgctgcggcggggttgctcaacctctgcgttgcgggaaacagtacgatgcgaacggttgctgtggtgagactgctcattagctgattcatgattttcttctggctcaactctaccatcctcaaaaccaaagcgggctggtgcacgagctgcacggcgggggcggctagccatctgtcgagggccggcagcagcacgggccgctggcggtaggggagctgggtagtggaaacggaacacggtggcagaaccaacaacacgcttccgcgcagtgcggataaagcgtgggccacggcaggaggaagcaactggggtgtgtcctggggtgtaggaagggctaactgggtgtgggtagggcgagtacactggtgagtacggcgcacgcgagctgggggagcgcgggccactgggagtgcgggcagagccgcgggagctgtgggaggacaggtggctggcgtggcagaggcggcctgagtcccaggagatagtgtcaactgaggtgacaccctcctcggccagacgggcctccaaggcggcgtagcggcgggcaagggagcggtaagcctcaaggagtaggtcgtgctgagtggcctgagcctccgaaagctcaaccatgcgagtcagcactggctgagactcgctgtacggacaagggtacctggcgtctgagtggccagaaggaaggcgtggaagctgccggaaggcggagcctccgagacggtggctgtagtcgtgggccaggcgacgaagcgcagtccaggagaggtcctggtacgcgatctggagagtgggcctggctacagtgaagtggtgtgggcgaaggccagctccgtgtatacctccacgggggtaaaggtacacagagagctcacagtgagggggaacacggtccacggagtaccccgtgtactcgggacacgagaagccaaggaaacgggcgaggtcacgaagctgagcgacgtggtgaccctcaccaaaaccgtgggaactgaaactggcgttcactgccat

SEQ ID NO: 23362 - DNA, 5281 bp, Oryza sativa
  Clone ID: TF_OsC1517_1433
agggaacagctccggaaactcggcgcggagaagatcttctcgttcccaggttgcctcatcttcagaatgattgctccattggactttgtagaacttgatggtcttccttcgagtctgatgttctgcctcttcaagaaccttgatcggtctttccttgtaggtcagattcttttccagctcgatattacccaggggaacttgctcttctggaactcgaagacatttctttaactgggatacgtggaacacgttgtgcacatctgcgagaccttcaggtagctcaagctgataagccacttcgccacgtctggccgttatgaggtaggggccgatgtagcggggtgctaacttgccggacatcccaaaccttctcataccacggaggggtgatacccgcaggtacacatgatctcctttttcgaactcaaggtcacgcctccgattgtcagcgtaattcttctaacggttctgtgctgtcttcaaacgttctcgtatcagcttaacttgttcttctgctgacttgagtatgtcaggaccgaataccagtgcttcgcccacctcattccagcacaagggggtgcggcactttcttccgaacattgcctcattcggcgacatctgaatgctggcctgataactgttgttgtatgagaactcggcatacggcaaacaacgatcccaagtgccttcgaaatccaaggcacacgcacgtagcatgtcttctaggatttggtttaccctttcggtctgaccatcggtctacggatggtaggctgtactaaaattcagatcagttccgagggcttcatgcaactgcttccagaaccttgaggtgaactgagtgcctcggtctgacacaattttcttgggacagccaaatctacatgacatgggtcatgtagagttctgctagtttctttccatcataggtggttttcactggcacgaaatgagctgatttcgtgagtcggtccacgattacccaaatggagtcgtacccgttgggggttcttggcaaaccggtgatgaaatccattccgatctcttcccatttccactcgggaatcggtaggggttgcagcataccagctggcctctgatgctctgccttgactctttggcaaatgtcacacaaggctacatattctgcgacatctcgcttcattccagcccaccaaaagtatgccttgatatcttggtacatcttcgtacttcctggatgaatggagtaagcggactcatgagcttcctttaggatgagatctcttaactccttcttggccggtacacagatgcgtggaccgcaccaaactgtgccttgatcgtctatggagaaattggtgtctttcttctcctgtattctttttattaactcttttatcccttcgtcatctttctgagcctcccggatttgcgattctagggtaggctgtactgtcaagctggcagggactcctgactgtaccacggtcagccttaacttctccaattctctgcacaaatgctcttggtcaggccgtatttgagctacattgcaataggccttgcgacttagcgcatcagcgaccacgttggctttaccaggatgatagtggattccaagatcgtaatccttgattagttccaaccatcttctctgcctcatatttaactcggtctgtgtgaagatatatttaagacttttgtgatcggtgtatacttcacatctgttcccgattaaataatgcctccagatcttaagagcatgaaccacggctgccaattcgagatcatgggtgggataattgacttcatgaggcctgagctgcctggatgcataggccacaacctttcgttcttgcattaggacacatcctaagccttgtcttgatgcgtcacagaagatctcgaaatcttttcggatatctggcaaggtgagaactggtgcagtggtcaaccttttcttcatttcttgaaagctgtcttcacaggctgcagaccattgaaatttcttttccttctttaacagttcggtcataggtctggctagcttagagaatccttcaatgaatcttcgataatatcccgctaagccaaggaagctgcggatttctgacacgttcttgggcgggttccaagcaagtacagcttcaaccttgctgggatctacttcgacaccgttggaggaaatcacgtgtccaagaaatgctactcggtccaaccagaattcgcatttcgagaatttagcgaatagttgatgatctctgagcttttccattatcagcctcaggtgttcagtatgttcttcctcgttcttggagtatatcaggatgtcatcgatgaacaccacgacaaactggtccaggtattccaagaagatttggttcattaagttcatgaagaatgctggagcattggtgagtccgaaggacataactgtgaactcatatagaccataacgcgttgagaaagcggtcttcgggatatcttcagatctgattttcagttggtggtaacctgacctcaagtcaatttttgagaaaactcttgctcctttaagttgatcgaataaatcgtcaatccgtggcaacgggtacttgttctttatagttacttcattcagggctctatagtcgattaccattctctcagagccatcctttttcttaaccagaagcactagggctccccaaggagatgagctaggtcgcacataacctttactctccaactcttcgatttgtcttttgacttctgctaactcattagctgccattcggtagggtctttttgcaattggagctgtgcctggtgccagttctatggcgaactcaatctctcggtctggtggcatactcgttaattcttctggaaatacgtcgggatattcacagactatgggcaccgactccaaggaggtgacttgtaaacaggttaggatagaccgacttgcggtaggggtgttaggggtaaagcggacttgctttcctccaggtccttgcaaagtgatggacttttcggcacaatctatctgtcctttgtgcttagccaaccaatccatccctaggatgatgtccaagctttgcgagtctaggattatcggtttggctagaaagtcaacttcctcaattctaaggttaacttccgggcatatttgagttgcccttatattcctcccaggggaatgtactatcattggtacacgcaaattttgggttttccaaccatttcttttcacaaaagcttgtgatatgaaagaatgggaagctcctgaatcaaatagaactattgcgggtacggagttgacagagaacatacccatcacaacgtctggagcatcctgagcggtttcagcttgaatgtgattcacacgtcctcgaccaaagtggttggaagcacgagaaccttatccacttgcctgagagctaggacgagactgagctgccgctggagtaggagttctggcggtgctgccattagcatgccctgagttggtgttggtaggattctgagggcactgtctagcatagtgacccatctggttgcaccggaaacactgaactgctgacggtccctgtggtgacttgaaggaggtaacactgtttggcgcagtgttgccactaggggcacgctgctgtggcggaggtgccggacggttcatctgaggacgaggggcgtagcctggctgtcggttagcctgagtgaccgactggtggtattgcatgggttgaccgtagcgagggcgaggtgcgcctcgggaagaatttccctgatggttagacttgcgacttgcgtttcttgtattcttcggtagcctcttttctggcatcctcaagcagaagtgccttgttgatcatatgttgaaaagtggggaagtcatgagcaagcaactggagtctcattccaactgcgattcccttcaagaatttcctgatcttcttcttatctgtgtctacttcctcaggggcgtaccgagccaacttgttgaactgacttaggtactcattgacactgctgttgccttgcttaagtctgttgaattcttctttcttcatgtcaatagtgctttcaggcacatgagctgcatggaaagccatagcaaactcatcccaagcaatgttagtgggttcaggatgtgcattgcagtaattctcccaccaatctgcagcaggtcctcttagctggtgagaggcgtagagcgtcttctcaacaggagtacactgcactaagttgagttttctatcaacatctttcaaccaatcgtcagcctcgacgggctcgacggtctgagagaactctggcggacgtgacctcagaaagtctgtgagcttggatctattgttgcccacgtgagggtggccatttccatgcgcattatgctgaaaaccggctatggctgtggttattccttgcaagatttgtgtctgaactgccattatgtgttgcatgttgttttccacatgaggccgaaaccctaaaactcatcgtagccggcttgctcctggaagaactcctcatcagcaggatccgcttcatcttcttcagcaactggggaggagttatttatatagagcaaggtttgttaacctctgcagagggggtacactttacccacatgacattactaacccggatcatccagcccgtggggatcagccacgtcgggagacctccaagctttcatgacaaggcatttcgaaagccgacacaggtttaccatatgccgacgagaggggtcccagaccaacaacagttttacccaagttgttactcagattttaagtttgaaggcgaccgtcgattctcgcacagagtgcacgattatcgaggcgcaactgggtggttacaaagggacatagctgagctggcgccgacgtggcgcctacgtggctgccacgcgggccggcgggaggtagacgacgacccggccgcgaatggacggcgggcggcggcggcgagcggcggagcgaaccacggcgatacgggcaacagcgagcacaccgggcggttgcacgtgacaaggggaggcgagccaacggctcggattcgccggaggttgctcgacggcggaggattgcggcggtggcaaccggtggcgggagaagagggaaacggcgacgaggtcacgagaggtcgattcccggcggtgagagcatctacgcggcttcgggaactcgacgctagcgtcggattgggcggaactacgccgagcgaggccggcgacgagcgggtgctacggagctcgggcggcgacggcggcgagcacacggcgagcgacggcaacggtcggggcggcgccggc

SEQ ID NO: 23363 - DNA, 5556 bp, Oryza sativa
  Clone ID: TF_OsC1517_1463
ctaagggagcaagtccgggaactcggcgcggagaagatcttctcgctcccaggttgcctcgtcttcggaatgattgctccattggactttgtagaacttgatggtcttccttcgagtctgacgttctgcctcttcaagaaccttgatcggtctttccttgtaggtcagattcttttccagctcgatattacctaggggaacttgctcttctggaactcgaagacatttctttaactgggatacgtggaacacgttgtgcacgtctgcgagaccttcaggtagctcaagctgataagccacttcgccacgtctggcggttatgaggtaggggccgatgtagcggggtgctaacttgccggacatcccaaaccttctcataccacggaggggtgatactcgcaggtacacatgatctcccttttcgaactcaaggtcacgtctccgattgtcagcgtaatttttctgacggttctgcgctgtctttaaacgttctcggatcagcttaacttgttcttctgctgacttaagtatgtcaggaccgaataccagggcttcgcccacctcatcccagcacaagggggtgcggcactttcttccgaacattgcctcattcggcgacatctgaatgctggcctgataactgttgttgtatgagaactcagcatacggcaaacaacgatcccaagtgccttcgaaatccaaggcacacgcacgtagcatgtcttctaggatttggtttaccctttcggtctgaccatcggtctgcggatggtaggctgtactaaaattcagatcagttccgagggcttcatgcaactgcttccagaaccttgaggtgaactgagtgcctcggtccgacactattttcttgggacagccaaatctacatacgacatgagtcatgtagagttctgctagtttctttccatcataggtggttttcactggcacgaaatgagctgacttcgtgagtcggtccacgattacccagatggagtcgtacccgctgggggttcttggcaaaccggtgatgaaatccattccgatctcttcccatttccactcgggaatcggtaggggttgcagcagaccagctggcctctgatgttccgccttgactctttggcaaatgtcacacagggctacgtattctgcgacgtctcgcttcattccagcccaccagaagtatgccttgatatcttggtacatcttcgtacttcctgggtggatggagtaggcggactcatgagcttcctttaagatgagatctcttaactccttcttggccggtacacagatgcgtggtccgcaccaaactgtgccttgatcgtctatggagaaatttgtgtctttcttctcctgtattctttttattaattcttttatcccttcgtcgtctttctgagcctcccggatttgcgactctagggtaggctgtactgtcaagctggcagggacacctgactgtaccacggtcagtcttaacttctccaattctctgcacaggtgatcttggtcaggccgtatttgagctacattgcaataggccttgcgacttagcgcatcagcgaccacgttggctttaccaggatgatagtggattccaagatcgtaatccttgattagttccaaccatcttctctgtctcatatttaactcggtctgagtgaagatatacttaagacttttgtgatcggtgtatacttcacatctgttcccgattaaataatgcctccagatcttaagagcatgaaccacggctgccaactcgagatcatgggtgggataattaacttcatgaggcctgagctgcctggatgcataggccacaacctttcgttcttgcattaggacacatcctaagccttgtcttgatgcatcacagaagatctcgaaatcttttcggatatctggcaaggtgagaactggggcagtggtcaaccttttcttcatttcttgaaagctgtcttcacaggctacagaccattggaatttcttttccttctttaacagctcggtcataggtctggctagcttagagaatccttcaatgaatcttcgataatatccagctaagccaaggaaactgcgaatctctgacacattcttgggcgggttccaagcaagtacagcttcaaccttgctgggatctacttcgacaccgttgggggagatcacgtgtccaagaaatgctactcggtctaaccagaattcgcattttgagaattttgcgaatagttgatggtccctgagcttttccattatcaacctcaggtgttcagcatgttcttcctcgttcttagagtatatcaggatgtcatcgatgaataccacgacaaactggtccagatattccataaagattttgttcattaagttcatgaagaatgctggagcattggtgagtccgaaggacattactgtgaactcatatagaccataacgcgttgagaaagcggtcttcgggatatcttcagatctgattttcagttggtggtaacctgacctcaagtcaatttttgagaaaactcttgctcctttaagttgatcgaataaatcgtcaatccgtggcaacgggtacttgttctttatagttacttcatttagggctctatagtcgattaccattctctcagagccatcctttttcttaaccagaagcactggggctccccaaggggatgagctaggtcgcacataacctttactttccagttcttcgatttgtcttttaacttctgctaactcattagctgccattcggtagggtctttttgcaattggagctgtgcctggtgccagttctatggcgaactcgatctctcggtctggtggcattcttgttaattcttccggaaatacgtcgggatattcacagactatgggcaccgactccaaggaggtgacttgtaaacaggttaggatagaccgacttgcggtaggggtgttaggggtaaagcggacttgctttcctccaggtccttgcaaggtgatggacttttcggcacaatctatctgtcctttgtgcttagccaaccaatccatccctagaatgatgtccaagctttgcgagtctaggactatcggtttggctaggaagtcaacttcctcaattctaaggttaacttccgggcatatttgagttgcccttatattccttccaggggaatgtactatcatcggtacacgcaaattttgggttttccaaccatttcttttcacaaaagcttgcgatatgaaagaatgagaagctcctgaatcaaacagaactattgcgggtacggagttgacagagaacatacccatcacaacgtctggagcatcctgagcgatttcagcttgaatgtgattcacacgtcctcgaccaaagtggttggacgcacgagaaccttgtccacttgcctgagagctaggacgagactgagctgccgctggagcaggagttctggcagtgctgccattagcatgccctgagttggtgttggtaggattctgaggacactgtctggcatagtgtcccatctggttgcaccggaaacactgaactgctgacggtccctgtggtgacttgaaagaggtaacactgtttggcgcagtattgccactaggggcacgctgctgtggctgaggtgccggacggttcatctgaggacgaggggcgtagcctggctggtggttagcctgagttaccgactggtgatattgcatgggttgaccgtagcgagggcgaggtgcgcctcgggaagaatttccctgatggttagacttgcgtttcttgtattcttcggtagcctcttttctggcatcctcaagtagaagtgccttgttgatcatatggtgaaaagtggggaagtcatgagcaagcaactggagtctcattccaactgcgatccctttcaagaatttcctgatcttcttcttatctgtgtccacttcttcaggggcgtaccgagctaacttgttgaactgacttaggtactcattgacactgctgttgccttgcttaagtctgttgaattcttctttcttcatgtcaatagtgctttcaggcacatgagctgcacggaaagccgtagcaaactcatcccaagcaatgttagtgggttcagggtgtgcattgcagtaattctcccaccaatctgcagcaggtcctcttagctggtgagaggcgtagagcgtcttctcaacaggagtacactgcactaagttgagttttctatcaacatctttcaaccaatcgtcagcctcgacgggctcgacggtctgagagaactctggcggacgtgacctcagaaaatctgtcagcttggatctattgttgcccacgtgagggtggccatttccatgcgcattatgctgaaaactggctatggctgtggttagtccttgcaagatttgtgtctgaactgtcattatgtgttgcatgttgttttccacatgaggtagggaagggaggcgttcttctccagaattgtgactggcagtgcggtgagagcggtgagactgtcccatctctgcatcacgggaaactgtgcgatgcgagcggttgctgcggcggggttgcccaatctctgcgttgcgggaaacagtatggtgcgaacggttgctgtggtgtgactgctcattagccgactcatgattttcttctggctcaactctaccatcttcaaaaccaaagcgggctggtgcacgggctgcatggcgggggtggctagccatctgtcgagggccggcagcagcacgggccgctggcggtgggggagctgggtggcggaaacggaacacggtggaagaaccaacaacacgcttccgcgcagtgcggataaagcgtgggccacggcgggaggaagcaactggggtgtgtccgggggtgtaggaagggctaactgggtgtgggtagggggagtacattggtgagtacggcgcacgcgagctgggggagcgcgggccactgggagtgcgggcagagccgcgggagctgtgggaggacaggtggctggcgtggcagaggcggcctgagtcccaggagatagtgtcaactgaggtgacaccctcctcggccaggcgggcctccaaggcggcgtagcggcgggcaagggagcggtaagcctcaaggagtaggtcgtgctgagtggcctgagcctccgaaagctcaaccatgcgagtcagcactggctgagactcgctgtacggacaagggtacctggcgtctgagtggccagaaggaaggcgtggaagctgccggaaggcggagcctccgagacggtggctgtagtcgtgggccaggcgacgaagcgcagtccaggagaggtcctggtacgcgatctggagagtgggcctggccacagtgaagtggtgggggcgaaggccagctccgtgtatacctccacgggggtaaaggtataccgagagctcatagtgagggggaacacggtccacggagtaccccgtgtactcgggacacgagaagccaaggaaacgggagaggtcacgaagctgagcgacgtggtgaccctcaccaaaaccgtgggaactgaagctggcgttcactgccat

SEQ ID NO: 23364 - DNA, 4092 bp, Oryza sativa
  Clone ID: TF_OsC1517_1473
ctaggttgcctcatcttcagaatggttgctccattggactttgtagaacttgatggtcttccttcgagtctgacgttctgcctcttcaagaaccttgatcggtctttccttgtaggtcagattcttttccagcacgatattacccaggggaacttgttcttctggaacacggagacatttctttaactgggatacgtggaacacgttgtgcacatctacgagaccttcaggtaactcaagctgataagccacttcgccacgtctggcggttatgaggtaggggccgatgtagcggggtgctaacttgccggacattccaaacctcctcataccacggaggggcgatacccgcaggtacacatgatctcctttttcgaactcaaggtcacgcctccgattgtcagcgtaattcttctgacggttctgcgctgtcttcaaacgttctcggatcagcttaacttgttcttctgctgccttgagtatgtcaggaccgaataccagtgcttcgcccacctcattccagcacaagggagtgcggcactttcttccgaacattgcctcattcggcgacatctgaatgctggcctgatagctgttgttgtatgagaactccgcatacggcaaacaacaatcccaagtgccttcgaaatccagggcgcacgcacgcaacatgtcttctaggatttggtttaccctttcggtctgaccatcggtctgcggatggtaggccgtactaaaatttagatcggttccgagggcttcatgcaactgcttccagaaccttgaggtgaactgagtgcctcggtctgacacaattttcttgggacagccaaatctacatacgacatgggtcatgtagagttctgctagtttctttccatcaaaggtggttttcactggcacgaaatgagctgatttcgtgagtcggtccacgattacccagatggagtcgtacccgctaggtgttcttggcaaaccggtgatgaaatccattccgatctcttcccatttccactcgggaatcggtaggggttgcagcagaccagctggcctctgatgctctgccttgactatcttcgtacttcctggatgaatggagtaggcggactcatgagcttcctttaggatgagatctcttaactccttcttggccggtacacagatgcgtggaccgcaccaaactgtgccttgatcgtctatggagaaatcggtgtctttcttctcttgtattctttttattaattcttttatcccttcgtcatctttctgagcctcccggatttgcgattctagggttggctgcaccgtcaagctggcagggacacctgactgtaccacggtcagcctcaacttctccaattctctgcacaggcggtcttggtcaggccgtatttgagctacattactgtaggccttgcgacttagcgcatcaccgaccacattagctttaccggggtggtcatgaattccaagatcgtaatccttgattagttccaaccatcttctttgcctcatatttaactcggtctgagtgaagatgtacttaagacttttgtgatcggtgtatacttcacatctgttcccgattaaatagtgcctctttcgttcttgcattaggacacatcctaagccttgtcttgatgcatcacagaagatctcgaaatcttttcggatatctagcaaggtgagaactggggcagtagtcaaccttttcttcattttttgaaagctgtcttcacaggctgcagaccattgaaatttattttccttctttaacagctcggtcataggtctggctagcttagagaatccttcaatgaatcttcgataatatccagctaagtcaaggaagctgcgaatctctgacacattcttgggtgggttccaagcaagtacagcttcaaccttgctgggatctacttcgacaccgttggaggagatcacgtgtccaagaaatgctactcggtctaaccagaattcgcatttcgagaatttagcgaatagttgatgatccctgagcttttccattatcagcctcaggtgttcagcatgttcttccttattcttggagtatatcaggatatcgtcgatgaacaccacgacaaactggtccaggtattccatgaagattttgttcattaagttcatgaagaatgctggagcattggtgagtccgaaggacatcactgtgaactcatatagaccataacgcgttgagaaagcggtcttcgggatatcttcagatctgattttcagttggtggtaacctgatctcaagtcaatttttgagaaaactcttgctcctttaagttgatcgaacaaatcgtcaatctgtggcaacgggtacttgttctttatagttacttcattcagggctctatagtcgattaccattctctcagagccatcctttttcttaaccagaagcactagggctccccaaggggatgagctaggtcgcacataactcttactctccaattcttcgatttgtcttttaacttctgctaactcattagctgccattcggtagggtctttttgcaattggtgcggtgcctggtgccagttctatggtgaactcaatctctcggtctggtggcatactcgttaattcttctggaaatacgtcgggatattcatagactatgggcaccgactccaaggaggtgacttgtaaacaggttaggatagaccgacttgcggtaggggtgttagaggtaaagcggacttgctttcctccaggtccttgcaaggtgatggacttttcggcacaatctatctgtcctttgtgcttagccaaccaatccatccctaggatgatgtccaagctttgcgagtctaggactatcggtttggctagaaagtcaacttcctcaattctaaggttaacttccgggcatatttgagtggcccttatattcctcccaggggaatgtactatcattggtacacgcaaattttgggttttccaaccatttcttttcacaaaagcttgtgatatgaaagaatggaaagctcctgaatcaaatagaactattgcgggtacggagttgacagagaacatacccatcacgacgtctggagcatcctgagcggtctcagcttgaatgtggttcacccggcctcgaccaaagttgttggaagcacgtgaaccttgtccacttgcctgagagctaggacgaggctgagctgccgctggagtaggagttctggcagtgctgccattagcatgccctgagttggtgttggtaggattctgagggcactgtctggcatagtgacccatctggttgcaccggaaacactgaactgctgacggtccctgcggtgacttgaaagaggtaacactgtttggcgcagtattgccactaggggcacgctgctgtggctgaggtgccggacggttcatctgaggacgaggggcgtagcctggctggcggttagcctgagtgaccgactggtgatattgcatgggttgaccgtagcgagggcgaggtgcgcctcgggaagaatttccctgatggttagacttgcgtttcttgtattcttcggtagcctcttttctggcatcttcaagtagaagtgccatgttgatcatatgttgaaaagtggggaagtcatgagcaagcaactggagtctcattccaacagcgatccctttcaagaatttcctgatcttcttcttgtctgtgtccacttcctcaggggcgtaccgagccaacttgttgaacatacttaggtactcattgacactgctgttgccttgcttaagtctgttgaattcctctttcttcatgtcaatagtgctttcaggcacatgagctacacggaaagccgtagcaaactcatcccaagcaatgttagtgggttcagggtgtgcattgcagtaattctcccaccaatctgcagcaggtcctcttagctggtgagaggcgtagagcgtcttctcaacaggagtacactgcactaagttgagttttctatcaacatctttcagccaatcgtcagcctcgacgggctcgacggtctgagagaactctggcggacgagacctcagaaaatctgtcagcttggatctattgttgctcat

SEQ ID NO: 23365 - DNA, 4974 bp, Oryza sativa
  Clone ID: TF_OsC1517_1474
ctaagggagcagctccgggaactcggcgcggagaagatcttctcgctcccaggttgcctcatcttcagaatgattgctccactggactttgtagaacttgatggtcttccttcgagtctgacgttctgcctcttccagaaccttgatcggtctttccttgtaggtcagattcttttccagttcgatattacccagggggacttgctcttctggaactcgaagacatttctttaactgggatacgtgaaacacgttatgcacgtctgcgagaccttcaggtagctcaagctgatatgccacttcgccacgtctggcggttatgaggtaggggccgatgtagcggggtgctaacttgccggacatcccaaacctcttcataccacggaggggtgatacccgcaggtatacatgatctcctttttcgaactcaaggtcacgcttgagtatgtcaggaccgaataccagcgcttcgcccacctcattccagcacaagggagtgcggcactttcttccaaacattgcctcattcggcgacatctgaatgctggcctgataactgttgttgtatgagaactcagcatacggcaaacaacgatcccaagtgccttcgaaatccaaggcacacgctcgcagcatgtcttctaggatttggtttaccctttctgtctgaccatcggtctgcggatggtaggctgtactaaaatttagatcagttccgagagcttcatgcaactgcttccagaaccttgaggtgaactgagtgcctcgatccgacactattttcttgggacaaccaaacctacatacgacatgggttatgtagagctctgctagtttccttccatcataggtggttttcactggcacgaaatgagctgatttcgtgagtcgatccacgattacccagatggagtcgtacccgctaggggttcttggcaaaccggtgatgaaatccattccgatctcttcccatttccacccggggatcggtaggggttgcagcagaccagctggcctctgatgctctgccttgactctttggcaaatgtcacacaaggctatgtattctgcgacatctcgcttcattccagcccaccagaagtatgccttgatatcttggtacatcttcgtacttcctggatgaatggagtaggcggactcatgagcttcttttaggatgagatctcttaactccttcttggccggtacacagatgcgtggaccgcaccaaactgtgccttgatcgtctatggagaaattagcgtctttcttctcctgtattctttttattaactcttttatcccttcgtcatctttctgagcctcccggatttgcgattctagggtaggctgtactgtcaagctggcagggactcctgactgtaccacggtcagccttaacttatccaattctctgtacagatgatcttggtcaggccgtatttgagctacattgcaataggccttgcgacttagcgcatcagcgaccacgttggctttaccaggatgatagtggattccaagatcgtaatccttgattagttccaaccatcttctctgcctcatatttaactcggtctgtgtgaagatatatttaagacttttgtgatcggtgtatacttcacatctgttcccgattaaatagtgcctccagatcttaagtgcatgaaccacggctgccaactcgagatcatgggtgggataattgacttcatgaggcctgagctgcctggatgcataggccacaacctttcgttcttgcattaggacacatcctaagccttgtcttgatgcgttacagaagatctcgaaatcttttcggatatctggcaaggtgagaactggtgcagtggtcaaccttttcttcatttcttgaaagctgtcttcacaggctgcagaccattgaaatttcttctccttctttaacagctcggtcataggtctggctagcttagagaatccttcaatgaatcttcgataatatcccgctaagccaaggaaactgcggatctctgacacgttcttgggcgggttccaagcaagtacagcttcaaccttgctgggatctacttcgacaccgttggaggaaatcacgtgtccaagaaatgctactcggtccaaccagaattcgcatttcgagaatttagcgaatagttgatgatctctgagcttttccattatcagcctcaggtgttcagcatgttcttccttgttcttggagtatatcaggatgtcatcgatgaacaccacgacaaactggtccaggtattccatgaagattttgttcattaagttcatgaagaatgctggagcattggtgagtccgaaggacataactgtgaactcatatagaccataacgcgttgagaaagcggtcttcgggatatcttcagatctgattttcagttggtggtaacctgaccattctctcagagccatcctttttcttaaccagaagcactggggctccccaaggggatgagctaggtcgcacataacctttactttccagttcttcaatttgcttttaacttctgctaactcattagctgccattcggtagggtctttttgcaattggagctgtgcctggtgccagttctatggcgaactcgatctctcggtctggtggcattctcgttaattcttccggaaatacgtcgggatattcacagactatgggcaccgactccaaggaggtgacttgtaaacaggttaggatagaccgacttgcggtaggggtgttaggggtaaagcggacttgctttcctccaggtcccattacaacgtctagagcatcctgagcggtttcagcttgaatgtgattcacacgtcctcgaccaaagttgttggacgcacgagaaccttgtccacttgcctgagagctaggacgagactgagctgccgctggagtaggagttctggcagtgctgccattagcatgccctgagttgttgttggtaggattctgaggacactgtctggcatagtgtcccatctggttgcaccggaaacactgaactgctgacggtccctgtggtgacttgaaagaggtaacactgtttggcgcagtattgccactaggggcacgctgctgtggctgaggtgccggatggttcatctgaggacgaggggcgtagcctggctggcggttagcctgagttaccgactggtgatattgcatgggttgaccgtagcgagggcgaggtgcgcctcggaaagaatttccctgatggttagacttgcgtttcttgtattcttcggtagcctcttttctggcatcctcaagtagaagtgctttgttgatcatatgttgaaaagtggggaagtcatgagcaagcaactggagtctcattccaactgcgattcccttcaagaacttcctgatcttcttcttgtctgtgtccacttcctcaggggcgtaccgagccaacttgttgaacatacttaggtactcattgacactgctgttgccttgcttaagtctgttgaattcttctttcttcatgtcaatagtgctttccggcacatgagctgcacggaaggccgtagcaaactcatcccaagcaatgttagtgggttcagggtgtgcattgcagtaattctcccaccaatctgcggcaggtcctcttagctggtgagaggcgtagagcgtcttctcaaccggagtacactgcactaagttgagttttctatccacatctttcagccaatcgtcagcctcgacgggctcgacggtctgagagaactctggcggacgagacctcagaaagtttgtcagcttggatctattgttgctcatgtgagggtggccatttccatgcgcattatgctgaaaaccggctacggctgcggctaaaccttgcaagatttgtgtctgaactgccattaagtgttgcatgttgttttccacatgaggtggggaagggaggcgttcttctccagaattgtgactgacagtgtggtgagagcggtgggactgttccatttctgcattacgggaagctgtacgatgcgaacggttgctgcggtgagactgctcattagccgactcatgattttcttctggctcaactctaccatcttcaaaaccaaagtgggctggtgcacgagctgcacggcgggggcggctagccatctgtcgagggccggcagcagcacgggccgctggcggtaggggagctgggtagtggaaacggaacacggtggcagaaccaacaacacgcttccgcgcagtgcggataaagcgtgggccacggcgggaggaagcaactggggtgtgtcctggggtgtaggaagggctaactgggtgtgggtagggcgagtacactggtgagtacggcgcacgcgagctgggggagcgcgggccactgggagtgcgggtagagccgcgggagctgtgggaggacaggtggctggcgtggcagaggcggcctgagtcccaggagatagtgtcaactgaggtgacaccctcctcggccagacgggcctccaaggcggcgtagcggcgggcaagggagcggtaagcctcaaggagtaggtcgtgctgagtggcctgagcctccgaaagctcaaccatgcgagtcagcactggctgaggctcgctgtacggacaagggtacctagcgtctgagtggccagaaggaaggcgtggaagctgccggaaggcggagcctccgagacggtggctgtagtcatgggccaggcgacgaagcgcagtccaggagagatcctggtacgcgatctggagagtgggcctggccacggtgaagtggtgtgggcgaaggccagctccgtgtatacctccacgggggtaaaggtacacagagagctcacagtgagggggaacacggtccacggagtaccccgtgtactcgggacacgagaagccaaggaaatgggcgaggtcacgaagctgagcgacgtggtgaccctcaccaaaaccgtgggaactgaagctggcattcactgccat

SEQ ID NO: 23366 - DNA, 4044 bp, Oryza sativa
  Clone ID: TF_OsC1517_1486
ctaagggagcagctccggaaactcggcgcggagaagatcttctcgctcccaggttgcctcatcttcagaatggttgctccattggactttgtagaacttgatggtcttccttcgagtctgacgttctgcctcttcaagaaccttgatcggtctttccttgtaggtcagattcttttccagcacgatattacccaggggaacttgctcttctggaactcgaagacatttctttagctgggatacgtggaacacgttgtgcacatctgcgagaccttcaggtagctcaagctgataagccacttcgccacgtctggcggttatgaggtaggggccgatgtagcggggtgctaacttgccggacatcccaaacctcctaacgggtttccactcgggaatcggtaggggttgcagcagaccagctggcctctgatgttccgccttgactctttggcaaatgtcacacagggctacgtattctgcgacatctcgcttcattccagcccaccagaagtatgccttgatatcttggtacatcttcgtacttcctggatgaatggaataggcggactcatgagcttcctttaggatgagatctcttaactccttcttggccggtacacagatgcgtggaccgcaccaaactgtgccttggttgtctatggagaaattggtgtctttcttctcctgtattctttttattaattcttttatcccttcgtcgtctttctgagcctcccggatttgcgactctagggtaggctgtactgtcaagctggcagggacacctgactgtaccacggtcagcattaacttctgcaattctctgcacaggtgatcttggtcaggccgtatttgagctacattgcaataggccttgcgacttagcgcatcagcgaccacgttggctttaccagggtgatagtggattccaagatcgtaatccttgattagttccaaccatcttctctgtctcatatttaactcggtctgtgtgaagatatacttaagacttttgtgatcagtgtatacttcacatctgttcccgattaaatagtgcctccagatcttaagagcatgaaccacggctgccaactcgagatcatgggtgggataattgacttcatgaggcctgagctgcctggatgcataggccacaacctttcgttcttgcattaggacacatcctaagccttgtcttgatgcatcacagaagatctcgaaatcttttcggatatctggcaaggtgagaactggggcagtggtcaaccttttcttcatttcttggaagctgtcttcacaggctgcagaccattgaaatttcttttccttctttaacagctcggtcataggtctggctagcttagagaatccttcaatgaatcttcgataatatccagctaagccaaggaagctgcggatctctgacacattcttgggcgggttccaagcaagtacagcttcaaccttgctgggatctacttcgacaccattggaggaaatcacgtgtccaagaaatgctactcggtctaaccagaattcgcatttcgagaattttgcgaatagttgatgatccctaagattttccattatcaacctcaggtgttcagcatgttcttcctcgttcttggagtatatcaggatgtcatcgatgaataccacaacaaactggtccaggtattccatgaagattttgttcattaagttcatgaagaatgctggagcattggtgagtccgaaggacattactgtgaactcatatagaccataacgcgttgagaaagcggtctttgggatatcttcagatctgattttcagttggtggtaacctgacctcaagtcaatttttgagaaaactcttgctcctttaagttgatcgaataaatcgtcgatccgtggcaacgggtacttgttctttatagttacttcattcagggctctatagtcgattaccattctctcagagccttcctttttcttaaccagaagcactggggctccccaaggggatgagctaggtcgtacataacctttactttccagctcttcgatttgtcttttaacttctgctaactcattagctgccattcggtagggtctttttgcaattggtgcggtgcctggtgccagttctatggcgaactcaatctctcggtctagtggcattcttgttaattcttccggaaatacgtcgggatattcacaaactatgggcaccgactccaaggaggtgacttgtaaacaggttaagatagaccgacttgcggtaggagtgttaggggtaaagcggacttgctttcctccaggtccttgcaaggtgatggacttttcggcacaatctatctgtcctttgtgcttagccaaccaatccatccctaggatgatgtccaagctttgcgagtctaggactatcggtttggctaggaagtcaacttcctcaattctaaggttaacttccgggcatatttgagttgcctttatattccttccaggggaatgtactatcattggtacacgtaaattttgggttttccaaccatttcttttcacaaaagcttgtgatatgaaagaatgggaagctcctgaatcaaacagaactattgcgggtacggagttgacagagaacatacccatcacaacgtctggagcatcctgagcggtttcagcttgaatgtgattcacacggcctcgaccaaagtggttggaagcacgtgaaccttgtccacttgcctgagtgctaggacgagacttagctgccgctggagtaggagttctggcagtgctgccattagcatgccctgagttggtgttggtaggattctgagggcactgtctagcatagtgacccatctggttgcaccggaaacactgaactgctgacggtccttgaggtgacttgaaggaggtaacgctgtttggcgcagtattgccactaggggcacgctgctgtggctgaggtgccggacggtttatctgaggacgaggggcgtagcctggctggcggttagcctgagtgaccgactggtggtattgcacgggttgaccgtagcgagggcgaggcgcgcctcgggaagaatttccctgatggttagacttgtgtttcttgtactcttcggtagcctcttttctggcatcctcaagtagaagtgccttgttgatcatgtgttgaaaagtggggaagtcatgagcaagcaactggagtctcatcccaactgcgattcccttcaagaacttcctgatcttcttcttgtctgtgtccacctcctcaggggcgtaccgagccaacttgttgaactgacttaggtactcattgacactggtgttgccttgcttaagcctgttgaattcctctttcttcatgtcaatggtgctttcaggcacatgagctgcacggaaagccgtggcaaactcatcccaagcaatgttagtgggttcagggtgtccattgcagtaattctcccaccaatctgcagcaggtcctcttagttggtgagaggcgtagagcgtcttctcaacaggagtacactgcactaagttgaattttctttcaacatccttcagccaatcgtcagcctcgacgggctcgacggtctgagagaactctggcggacgtgaccttagaaaatctgtcagcttggatctattgttgcccatgtgagggtggccatttccatgcacattatgctgataaccggctacggctgcggctattccttgcaagatttgtgtctgaactgccattaagtgttgcatgttgttttccacatgaggtggggaagggaggcgttcttctccagaattgtgactagcagtgcggtgagagcggtgagactgttccatctctgaatcacgggaagctgtgcgatgcgagcggttgctacggcggggttgctcaacttctgcgttacgggaaacagtacggtgcgaattgttgctgcggtgagactgctcattagctgattcatgatttgcttctggttcgactctaccttcttcaaaaccgaagtgggctggcgcacgagctgcacggcaggggcggctagccat

SEQ ID NO: 23367 - DNA, 1983 bp, Oryza sativa
  unsure (1)..(1983): unsure at all n locations
  Clone ID: TF_OsC1517_1505
gctaactcattagctgccattcggtagggtctttttgcaattggagctgtgcctggtgccagttctatggcgaactcgatctctcggtctggtggattctgttaattctccggaaacccaaaagggaaaacnccctttaatggggcacccgactcccaaggaggtgacttgtaaacaggttaggatagaccgacttgcggtaggggtgttaggggtaaagcggacttgctttcctctaggtccttgcaaggtgatggacttttcggcacattctatctgtcctttgtgcttagccaaccaatccatccctagaatgatgtccaagctttgcgagtctaggactatcggtttggctaggaagtcaacttcctcaattctaaggttaacttccgggcatatttgagttgcccttatattccttccaggggaatgtactatcattggtacacgcaaattttgggttttccaaccatttcttttcacaaaagcttgcgatatgaaagaatgggaagctcccgaatcgaacagaactattgcgggtacggagttgacagagaacatacccatcacaacgtctggagcatcctgagcggtttcagcttgaatgtgattcacacggcctcgaccaaagttgttggaagcacgtgaaccttgtccacttgcctgagagctaggacgagactgagttgccgctggagtaggagttctggcagtgctgccattagcatgccctgagttggtgttggtaggattctgaggacactgtctagcatagtgacccatctggttgcaccggaaacactgaactgctgacggtccctacggtgacttgaaagaggtaacgctgttaggcgcagtattgccactaggggcacgctgctgtggctgaggtgcccgaccggtttatctgaggacgaggggcgtagcctggcttgcggttagcctgagtgaccgactggtggtattgcatgggttgaccgtagcgaggcgagaggtgcgcctcgggaagaatttccctgatggttagacttgcgtttcttgtattcttcggtagcctctttcctggcatcctcaagtagaagtgcgttgttgatcatatgttgaaaagtggggaagtcatgagcaagcactggagtctcattccaactgcgattcctttcaagaatttcctgatcttcttcttgtctgtgtccacttcctcaggggcgtaccgagccaacttgttgaactgactttaggtactcatttgatactgctgttgccttgcttaagtctgttgaattcttctttcttcatgtcaatagtgctttcaggcacatgagctgcacggaaagccgtagcgaactcatcccaagcaatgttagtgggttcagggtgtgcattgcagtaattctcccaccaatctgcggcaggtcctcttagttggtgagaggcgtagagcgtcttctcaacaggagtacactgcactaagttgagttttctatcaacatctttcaaccaatcgtcagcctcgacgggctcgacggtctgagagaactctggcggacgagacctcaaaaagtctgtcagcttggatctgttgttgcccatgtgagggtggccatttccatgcgcattatgctgaaaactggctatggctgtggttagtccttgcaagatttgtgtctgaactgccattaagtgttgcatgttggtttccacatgaggtggggaagggaggcgttcttctccagaattgtgactggcagtgcggtgagagcggtgagactgttccatctctgcatcacgggaaactgtgcgatgcgagcggctgctgcggcggggttgctcaacctctgcgttgcgggaaacagtacgatgcgaacggttgctgtggtgagactgctcattagctgattcatgattttcttctggctcaactctaccatcctcaacaccaaagcgggctggtgcacgagctgcacggcggggacggctagccat

SEQ ID NO: 23368 - DNA, 4953 bp, Oryza sativa
  Clone ID: TF_OsC1517_1525
atgacggaacgggcgctacagaccaacccccctaacaagaatctcgaccccgagattcagcacctaagggagcaggtccgggaactcggcgcggagaagatcttctcgctcccaggttgcctcgtcttcggaatgattgctccattggactttgtagaacttgatggtcttccttcgagtctgacgttctgcctcttcaagaaccttgatcggtctttccttgtaggtcagattcttttccagctcgatattacccaggggaacttgctcttctggaactcgaagacatttctttaactgggatacgtggaacacgttgtgcacgtctgcgagaccttcaggtagctcaagctgataagccacttcgccacgtctggcggttatgaggtaggggccgatgtagcggggtgctaacttgccggacatcccaaaccttctcataccacggaggggtgatacccgcaggtacacatgatctccacacatgatctcctttttcgaactcaaggtcacgcctccgattgtcagcgtaattcttctgacggttctgtgcagtgctttgcccacctcattccagcacaagggggtgcggcactttcttccgaacattgcctcattcggcgacatctgaatgctggcctgataactgttgttgtatgagaactcggcatacggcaaacaacgatcccaagtgccttcgaaatccaaggcacacgcacgtagcatgtcttctaggatttggtttaccctttcggtctgaccatcggtctgcggatggtaggctgtactaaaattcagatcagttccgagggcttcatgcaactgcttccagaaccttgaggtgaactgagtgcctcggtctgacacaattttcttgggacagccaaatctacatacgacatgggtcatgtagagttctgctagtttctttccatcataggaggttttcactggcacgaaatgagctgatttcgtgagtcggtccacgattacccaaatggagtcgtacccgttgggggttcttggcaaaccggtgatgaaatccattccgatctcttcccatttccactcgggaatcggtaggggttgcagcagaccagctggcctctgatgttccgccttgactctttggcaaatgtcacacagggctacgtattctgcgacatctcgcttcattccagcccaccagaagtatgccttgatatcttggtacatcttcgtacttcctgggtgaatggagtaggcggactcatgagcttcctttaggatgagatctcttaactccttcttggccggtacacagatgcgtggtccgcaccaaactgtgccttgatcgtctatggagaaatttgtgtctttcttctcctgtattctttttattaattcttttatcccttcgtcgtctttctgagcctcccggatttgcgactccagggtaggctgtattgtcaagctggcagggacacctgactgtaccacggtcagtcttaacttctccaattctctgcacaggtgatcttggtcaggccgtatttgagctacattgcaataggccttgcgacttagcgcatcagcgaccacgttggctttaccaggatgatagtggattccaagatcgtaatccttgattagttccaaccatcttctctgtctcatatttaactcggtctgagtgaagatatacttaagacttttgtgatcggtgtatacttcacatctgttcccgattaaatagtgcctccagatcttaagagcatgaaccacagctgccaactcgagatcatgggtgggataattggcttcatgaggcctgagctgcctggatgcataggccacaaccttttgttcttgcattaggacacatcctaagccttgtcttgatgcgtcacagaagatctcgaaatcttttcggatatctggcaaggtgagaactggggcagtggtcaaccttttcttcaattcttggaagctgtcttcacaggctgcagaccattgaaatttcttttccttctttaacagctcggtcataggtctggctagcttagagaatccttcaatgaatcttcgataatatccagctaagccaaggaagctgcggatctctgacacgttcttgggcgggttccaagcaagtacagcttcaaccttgttgggatctacttcgacaccgttggaggaaatcacgtgtccaagaaatgctactcggtccaaccagaattcgcatttcgagaatttagcgaatagttgatgatctctgagcttttccattatcagcctcaggtgttcagcatgttcttccttgttcttggagtatatcaggatgtcatcgatgaacaccatgacaaactggtctaggtattccatgaagattttgttcattaagttcatgaagaatgctggagcattggtgagtccgaaggacataactgtgaactcatatagaccataacgcgttgagaaagcggtcttcgggatatcttcagatctgattttcagttggtggtaacctgacctcaagtcaatttttgagaaaactcttgctcctttaagttgatcgaataaatcgtcaatccgtggcaacgggtacttgttctttatagttacttcattcagggctctatagtcgattaccattctctctgagccatcctttttgtcgggatattcatagactatgggcaccgactccaaggaggtgacttgtaaacaggttaggatagaccgacttgcggtaggggtgttaggggtaaagcggacttgctttcctccaggtccttgcaaggtgatggacttttcggcacaatctatctgtcctttgtgcttagccaaccaatccatccctagaatgatgtccaagctttgcgagtctaggactatcggtttggctaggaagtcaacttcctcaattctaaggttaacttccgggcatatttgagttgcccttatattccttccaggggaatgtactatcattggtacacgcaaattttgggttttccaaccatttcttttcacaaaagcttgcgatatgaaagaatgggaagctcccgaatcgaacagaactattgcgggtacggagttgacagagaacatacccatcacaacgtctggagcatcctgagtggtttctgcttgaatgtgattcacacggcctcgaccaaagttgttggaagcacgtgaaccttgtccacttgcctgagagctaggacgagactgagctgccgctagagtaggagttctggcagtgctaccattagcatgccctgagttggtgttggtaggattctgaggacactgtctagcatagtgacccatctggttgcaccggaaacactgaactgctgacggtccctgcggtgacttgaaagaggtaacactgttaggcgcagtatcgctactaggggcacgctgctgtggctgaggtgccggacggtttatctgaggacgaggggcgtagcctggctggcggttagcctgggtgaccgactggtggtattgcatgggttgaccgtagcgagggcgaggtgcgcctcgggaagaatttccctgatggttagacttgcgtttcttgtattcttcggtagcctcttttctggcatcctcaagtagaagtgccttgttgatcatatgttgaaaagtggggaagtcatgagcaagcaactggagtctcattccaactgcgattcctttcaagaatttcctgatcttcttcttatctgtgtctacttcctcaggggcgtaccgagccaacttgttgaactgacttaggtactcattgacactgctgttgccttgcttaagtctgttgaattcttctttcttcatgtcaatagtgctttcaggcacatgagctgcacggaaagccgtagcgaactcatcccaagcaatgttagtgggttcagggtgtgcattgcagtaattctcccaccaatctgcggcaggtcctcttagttggtgagaggcgtagagcgtcttctcaacaggagtacactgcactaagttgagttttctatcaacatctttcaaccaatcgtcagcctcgacgggctcgacggtctgagagaactctggcggacgagacctcagaaagtctgtcagcttggatctgttgttgcccatgtgagggtggccatttccatgcgcattatgctgaaaactggctatggctgtggttagtccttgcaagatttgtgtctgaactgccattaagtgttgcatgttggtttccacatgaggtggggaagggaggcgttcttctccagaattgtgactggcagtgcggtgagagcggtgagactgttccatctctgcatcacgggaaactgtgcgatgcgagcggctgctgtggcggggttgctcaacctctgcgttgcgggaaacagtacgatgcgaacggttgctgtggtgagactgctcattagctgattcatgattttcttctggctcaactctaccatcctcaaaaccaaagcgggctggtgcacgagctgcacggcggggacggctagccatctgtcgagggccagcagcagcacgggccgctggcggtgggggagctgggtagtggaaacggaacacgttggaagaaccaacaacacgcttccgcgcggtgcggataaagcgtgggccacggcgggaggaagcaactggggtgtgtccgggggtgtaggaagggctaactgggtgtgggtagggggagtacactggtgagtacggcgcacgcgagctgggggagcgcgggccactgggagtgagggcagagccgcgggagctgtgggaggacaggtggctggcgtggcagaggcggcctgagtcccaagagatagtgtcaactgaggtgacaccctcctcggctagacaggcctccaaagcggcgtagcggcgggcaagggagcggtaagcctcaaggagtaggtcgtgctgagtggcctgagcctccgaaagctcgaccat

SEQ ID NO: 23369 - DNA, 4149 bp, Oryza sativa
  Clone ID: TF_OsC1517_1552
ctattggactttgtagaacttgatggtcttctttcgagtctgacgttctgcctcttcaagaaccttggtcggtctttccttgtaagtcagattcttttccagctcgatattacccagagggacttgctcttctggaactcgaagacatttcttcaactgagacacgtgaaacacgttgtgcacatctgcgagaccttcaggtaactcaagctgataagccacttcgccacgtctggcggttatgaggtaggggccgatgtagcggggtgctaacttgccggacatcccaaacctcctcataccacggaggggtgatacccgcaggtatacatgatctcctttttcgaactcaaggtcacgcctccgattgtcagcgtaattcttctgacggttttgcgctgtctttaaacgttctcggattagcttaacttgttcttctgctgccttgagtatgtcaagaccgaataccagcgcttcgcccacctcattccagcacaagggagtacggcactttcttccgaacattgcctcgttcggcgacatctgtatgctagcctgataactgttgttgtatgagaactccgcatacggcaaacaacgatcccaggtgccttcgaaatccaaggcacacgcacgtagcatgtcttctaggatttggtttaccctttctgtctgaccatcagtctgcggatggtagcccgtacttaaatttagatcggttccgagggcttcatgcaactgcttccagaaccttgaggtgaactgagtgcctcgatctgacacgatcttcttgggacagccaaatctacatacgacatgggtcatgtagagttctgctagtttctttccatcaaaggtggttttcactggcacgaaatgagctgatttcgtgagtcggtccacgattacccaaatggagtcgtacccgctaggggttcttggcaaaccggtgatgaaatccatcccgatctcttcccatttccactcgggaatcggtaggggctgtagcagaccagctggcctctggtgctctgccttgactctttggcaaatgtcacacagggctacgtattctgcgacatctcgcttcattctagcccaccagaaatatgccttgatatcttggtacatcttcgtacttcttggatgaatggagtaggcggactcatgagcttcctttaggatgagatctcttaactccttcttggctggtacacagatgtgtggaccgcaccaaactgtgccttggtcgtctatggagaaattggtgtctttcttttcctgtattctttttattaactcttttatcccttcgtcatctttctgagcctcccggatttgcgattctagggtaggctgtactgtcaagctggcagggacacctgactgtaccacggtcagccttaacttctccaattctctgcacaggcgatcttggtcaggccgtatttgagctacattgcaataggccttgcgacttagcgcatcagcgaccacgttagctttaccgggatgataatgaattcccagatcgtaatccttgattagttccaaccatcttctctgcctcatgtttaactcggtctgagtgaagatgtatttaagacttttgtgatcggtgtatacttcacatctctttccgattaaatagtgcctccagattttaagagcatgaatcacggctgccaactcgagatcatgggtggggtaattgacttcatgaggcctgagctgtctggacgcataggccaccacctttcgttcttgcattaggacacatcctaagccttgtcttgatgcatcacagaagatctcaaaatctttttggatatctggcaaggtgagaactggggcagtggtcaaccttttcttcatttcttgaaaactgtcttcacaggctgcagaccattgaaatttcctttccttctttaatagctcggtcataggtctggctagcttagagaatccttcaatgaatcttcgataatatccagctaagccaaggaagctgcgaatctctgacacattcttgggcgggttccaagcaagtacagcttcaaccttgctgggatctacttcgacaccgttggaggagatcacgtgtccaagaaatgctactcggtctaaccagaattcgcatttcgagaatttagcgaatagttgatgatctctgagcttttccattatcagcctcaggtgttcagcatgttcttcctcattcttggagtatatcaggatgtcatcgatgaacaccacgacaaactggtccagcattctctcagagccatcctttttcttaaccagaagcactggggctccccaaggggatgagctaggtcgcacataacctttaccctccaattcttcgatttgtcttttaacttctgctaactcattagctgccattcggtagggtctttttgcaattggtgcagtgcctggcgccagttctatggcgaacacaatctctcggtctggtggcatacttgttaattcttctgggaatacgtcgggatattcacagactatgggcaccgactccaaggaggtgacttgtaaacaggttaggatagaccgacttgcggtaggggtgttagaggtaaagcggacttgctttcctccaggtccttgcaaggtgatggacttttcagcacaatctatctgtcctttgtgcttagccaaccaatccatccctagaatgatgtccaagctttgcgagtctaggactatcggtttggctaggaagtcaacttcctcaattctaaggttaactcccgggcatacttgagttgcccttatattcctcccaggggaatgtacttgtccacttgcctgagagctaggacgagactgagctgccgctggagtaggagttctggcagtgctgccattagcatgccctaagctggtgttggtaggattctgagggcactgtctggcatagtgacccatctggttgcaccggaaacactgaactgctgacggtccctgtggtgacttgaaagaggtaacactgtttggcgcagtattgccactaggggcacgctgctgtggctgaggtgccggacggttcatttgaggacgaggggcgtagcctggctggtggttagcctgagtgaccgactggtggtattgcatgggttgaccgtagcgagggcgaggtacgcctcgggaagaatttccctgatggttagacttgcgtttcttgtattcttcggtagcctcttttctggcatcctcaagtagaagcgccttgttgatcatatgttgaaaagtggggaaatcatgagcaagcaactggagtctcattccaactgcgattcctttcaagaatttcctgatcttcttcttgtctgtgtccacttcctcaggggcgtaccgagccaacttgttgaacatacttaggtactcattgacactgctgttgccttgcttaagtctgttgaattcttctttcttcatgtcaatagtgctttcaggcacatgagctgcacggaaagccgtagcaaactcatcccaagcaatgttagtgggttcagggtgtgcattgcagtaattctcccaccaatctgcagcaggtcctcttagctggtgagaggcgtagagcgtcttctcgaccggagtacactgcactaagttgagttttctatcaacatctttcagccaatcgtcagcctcaacgggctcgatggtctgagagaactctggcggacgtgacctcagaaaatctgtcagcttggatctattgttgctcatgtgagggtggccatttccatgcgcattatgctgaaaaccggctacggctgcggctaatccttgcaagatttgtgtctgaactgccattaagtgttgcatgttgttttccacatgaggtgggaaagggaggcgttcttctccagaattgtgactggcagtgcggtgagagcggtgagactgttccatctctgcattacgggaaactgtgcgatgcgagcggctgctgcggcggggttgctcaacttctgcgttgcgggaagcagtacggtgcgaacggttgctgtggtgagactgctcattagctgactcatgattttcttctggctcaactctaccatcttcaaaaccaaagcgggctggtgcacgagctgcacggcgggggcggctagccat

SEQ ID NO: 23370 - DNA, 5600 bp, Oryza sativa
  Clone ID: TF_OsC1517_1556
atgggccggccggcccaaaaggcggcccagagcgcgcacgggaggggaggagagaggggaccggtggaccaggctcaccgcgcgcggtcccggcctcacggctcgcggtggatcgcgcgcacgcggagggaccgaccggggtcggcccgacccggtctggcccttggaggctagcgcgcggagtggtgatacccgcaggtacacatgatctcctttttcgaactcaaggtcacaccttcgattgtctgcgtaattcttctgacggtgtgctgtcttcaaacgttctcgtatcagcttaacttgttcttcagctgacttgagtatgtctggaccgaataccagtgcttcgcccacctcattccagcacaagggggtgcggcactttcttccgaacattgcctcattcggcgacatctgaatgctggcctgataacttgaggtgaactgagtgcctcggtctgacacaattttcttgggacagccaaatctacatacgacataggtcatgtagagttctgctagtttctttccatcataggtgattttcactggcacgaaatgagctgatttcgtgagtcggtccacgattacccaaatggagtcgtatccgttgggggttcttggcaaaccggtgatgaaatccattccgatctcttcccatttccactcgggagtcggtaggggttgcagcagaccaactggcctctgatgttccgccttgactctttggcaaatgtcacacagggctacgtattctgtgacatctcgcttcattccagcccaccagaagtatgccttgatatcttggtacatcttcgtacttcctggatgaatggaataggcggactcatgagcttccttgaggatgagatctcttaactccttcttggccggtacacagatgcgtggaccgcaccaaactgtgccttggttgtctatggagaaattggtgtctttcttctcctgtattccttttattaattcttttatcccttcgtcgtctttctgagcctcccggatttgcgactctagggtaggctatactgtcaagctggcagggacacctgactgtaccacggtcagccttaacttctccaattctctgcacaggtgatcttggtcaggccgtatttgagctacattgtgataggccttgcgacttagcgcatcagcgaccaccttggctttaccagggtgatagtggattccaagatcgtaatccttgattagttccaaccatcttctctgtctcatatttaactcagtctgtgtgaagatatacttaagactttggtgatcagtgtatacttcacatctgttcccgattaaatagtgcctccagatcttaagagcatgaaccacggctgccaactcgagatcatgggtgggataattgacttcatgaggcctgagctgcctggatgcataggccacaacctttcgttcttgcattaggacacatcctaagccttgtcttgatgcatcacagaagatctcgaaatcttttcggatatctggcaaggtgagaactggggcagtggtcaaccttttcttcatttcttggaagctgtcttcacaggctgcagaccattgaaatttcttttccttctttaacagctcggtcataggtctggctagcttagagaatccttcaatgaatcttcgataatatccagctaagccgaggaagctgcgaatctctgacacattcttgggcgggttccaagcaagtacagcttcaaccttgctgggatctacttcgacaccattggaggaaatcacgtgtccaagaaatgctactcggactaaccagaattcgcatttcgagaattttgcgaatagttgatgatccctgagcttttccattatcaacctcaggtgttcagcatgttcttcctcgttcttggagtatatcaggatgtcatcgatgaataccacaacaaactggtccaggtattccatgaagattttgttcattaagttcatgaagaatgctggagcattggtgagtctgaaggacattactgtgaactcatatagaccataacgcgttgagaaagcggtctttgggatatcttcagatctgattttcagcattctctcagagccatcctttttcttaaccagaagcactggggctccccaaggggatgagctaggtcgcacataacctttactttccagctcttcgatttgtcttttaatttctgctaactcattagctgccattcggtagggtttttttgcaattggtgcggtgcctggtgccagttctatggcgaactcaatctctcggtctggtggcattcttgttaattcttccggaaatacgtcgggatattcacaaactatgggcaccgactccaaggaggtgacttgtaaacaggttaagatagaccgacttgcggtaggagtgttaggggtaaagcggacttgctttcctccaggtccttgcaaggtgatggacttttcggcacaatctatctgtcctttgtgcttagccaaccaatccattcctaggatgttgtccaagctttgcgagtctaggactatcggtttggctaggaagtcaatttcctcaattctaaggttaacttccgggcatatttgagttgcccttatattccttccaggggaatgtactatcattggtacacgtaaattttgggttttccaaccatttcttttcacaaaagcttgtgatatgaaagaatgggaagctcccgaatcaaacagaactattgcgggtacggagttgacagagaacatacccatcacaacgtctggagcatcctgagcggtttcagcttgaatgtgattcacacggcctcgaccaaagtggttggaagcacgtgaaccttgtccacttgcttgagtgctaggacgagactgagctgccgctggagtaggagttctggcagtgctgccattagcatgccctgagttggtgttggtaggattctgagggcattgtctggcatagtgacccatctggttgcaccggaaacactgaactgctgacggtccctgcggtgacttgaaagaggtaacactgtttggcgcaatattgccactaggggcacgctgctgtggctggggtgccgggcggttcatctgaggacgaggggcgtagcctggctggcggttagcctgagtgaccgactggtggtattgcatgggttgaccgtagcgagggcgaggtgcgccttgggaggaattcccctggtggttagatttgcgtttcttgtattcttcggtagcctcttttctggcatcctcaagtagaagtgctgcgattcctttcaagaatttcctgatcttcttcttatctgagtccacttcctcaggggcgtaccgagccaacttgttgaacatacttaggtactcattgacactgctgttgccttgcttaagtctgttgaattcctctttcttcatgtcaatggtgctttcaggcacatgagctgcacagaaagccgtagcaaactcatcccaagcaatgttagtgggttcagggtgtgcattgcagtaattctcccaccaatctgcagcaggtcctcttagctggtgagaggcgtagagcgtcttctcgaccggagtacactgcactaagttgagttttctattaacatctttcaaccaatcgtcagcctcgacgggctcgacggtctgagagaactctggcggacgtgacctcagaaaatctgtcagcttggatctattgttgcccatgtgagggtggccatttccatgcgcattatgctgataaccggctacggctgcggctattccttgcaagatttgtgtctgaactgccattaagtgttgcatgttgttttccacatgaggtggggaagggaggcgttcttctccagaattgtgactggcagtgcggtgagagcggtgagactgttccatctctgcatcacgggaagctgtgcgatgcgagcggttgctgcggcggggttgctcaacctctgcgttgcgggaaatagtacggtgcgaacggttgctgtggtgagactgctcattagctgattcatgatttgcttctgcttcaactctaccatcttcaaaaccaaagcgggctcctgtagtcggctcctcagtcgaagaaacgtcgatcggctgacgcgaagggaccggcggaacctgtcgagggccggcagcagcacgggccgctggcggtgggggagctgggtagtggaaacggaacacggtggaagaaccaacaacacgcttccgcgcggtgcggataaagcgtgggccacggcgggaggaagcaactggggtgtgtccgggggtgtaggaagggctaactgggtgtgggtagggggagtacactggtgagtacggcgcacgcgagctgggggagcgcgggccactgggagtgcgggcagagccgcgggagctgtgggaggacaggtggctggcgtggcagaggcggcctgagtcccaagagatagtgtcaactgaggtgacaccctcctcggccaaacgggcctccaaagcggcgtagcggcgggcaagggagcggtaagcctcaaggagtaggtcgtgctgagtggcctgagcctccgagagctcaaccatgcgagtcagcactggctgagactcgctgtacggacaagggtacctggcgtctgagtggccagaaggaaggcgtggaagctgccggaaggcggaacctccgagacggtgggcgatctggagagtgggcctggccacagtgaagtggtgggggcgaaggccagctccgtgtatacctccacgggggtaaaggtacacagagagctcacagtgagggggaacacggtccacggagtaccccgtgtactcgggacacgagaagccaaggaaacgggcgaggtcacgaagctgagcgacgtggtgaccctcaccaaaaccgtgggaactgaagctggcgttcactgccatctgttaatcgataccagtcccaggaaacagtgctggtatcacaggaagatagaatatcacagcaacagaggtctctttattatagagtaggagtacagtcatgttgggctgtggacagatcccgagctcacaactgcattacaaaaggaaagcggaagccaggactagaccaaacaacacaggcgcgacttgggaactaggccgagaccctaaaactcatcgtagccggcttgctcctggaagaactcctcatcagcaggatccgcttcatcttcttcagcaacgtgcgcggtcccgggtgggacccgcttgtcagcggctcggctcaccgtgcggagggagcacgcggcgcacgcgcgcgggcgggggagggacgcggtgcacgcgcgcggtctgcggaggaacggatgcggcgggcccacgcgcagcctcacggctcgcggtggaacacgcgcacggaaggggctgaccggggtcggcccgtcccgacctcggctgagctggcgcacggcgatacctgtcaggtcgtccccttcctccagccacccgcctccgacggcaaccgccgccgaatccgccacgccgccgcctcctccgctcttcccgcgcccacgccgcgccgctcccgcgtcctccccacgtcgccgcctcttcccccgcat

SEQ ID NO: 23371 - DNA, 4797 bp, Oryza sativa
  Clone ID: TF_OsC1517_1561
atgacattactaacccggatcatccagcccgtggggatcagccacgtcgggagacctccaagctttcatgacaaggcatttcgaaagccgacacagatttaccatatgccgacgagaggggtcccagaccaacaacaggctcaagatgttcaagggtggcttgccttgctcgagatctggagcttgatcctcgaaatcctcgcactgcgggtcttcgggctctgaaaccaggggaacttgctcttctggaattcgaagacatttctttaactgggatacgtggaacacgttgtgcacatctgcgagaccttcaggtagctcaagctgataagccacttcgccacgtctggcggttatgaggtaggggccgatgtagcggggtgctaacttgccggacatcccaaaccttctcataccatggaggggtgatactcgcaggtatacatgatctcctttttcgaactcaaggtcacgtctccgattgtcagcgtaattcttttggcggttctgcgctgtcttcaaacgttctcggatcagcttaacttgttcttctgctgacttgagtatgtcaggaccgaatactagcgcttcgcccacctcattccagcacaagggagtgcggcactttcttccgaacattgcctcattcggcgacatctgaatgctggcctgatagctgttgttgtatgagaactcggcatacggcaaacaacgatcccaagtgccttcgaaatccagggcacacgcacgtagcatgtcttctaggatttggtttaccctttcggtctgaccatcggtctgcggatggtaggctgtactaaaatttagatcagttccgagagcttcatgcaactgcttccagaaccttgaggtgaactgagtgcctcggtctgacacgatcttcttgggacagccaaatctacatacgacatgggtcatgtagagttctgctagtttctttccatcataggtggttttcactagcacgaaatgagctgatttcgtgaggcgatccacgattacccaaatggagtcgtacccgctaggggttcttggcaaaccggtgatgaaatccattccgatctcttcccatttccactcgggaatcggtaggggttgcagcagaccagctggcctctgatgctctgccttgactctttggcaaatgtcacacaaggctacgtattctgcgacatctcgcttcattccagcccaccagaagtatgccttgatatcttggtacatcttcgtacttcctggatgaatggagtaggcggactcatgagcttcttttaggatgagatctcttaactccttcttggccggtacatagatgcgtggaccgcaccaaactgtgccttgatcgtctatggaaaaattggtgtctttcttctcctgtattctttttattaactcttttatcccttcgtcgtctttctgtgcctcccggatttgcgactctagggtaggctgtactgtcaagctggcagggacacctgactgtaccatggtcagccttaacttctccaattctctgcacaggtgatcttggtcgggccgtatttgagctacgttgcaataggccttgcgacttagcgcatcagcgaccacgttggctttaccaggatgatagtggattccaaggtcgtaatccttgattagttccaaccatcttctctgtctcatatttaactcggtctgtgtgaagatatacttaagacttttgtgatcggtgtatacttcacatctgttcccgattaaatagtgcctccagatcttaagagcatgaaccacggctgccaactcgagatcatgggtgggataattgacttcatgaggcctgagctgcctggatgcataggccacaacctttcgttcttgcattaggacacatcctaagccttgtcttgatgcgtcacagaagatctcgaaatcttttcggatatctggcaaggtaagaactggggcagtggtcaaccttttcttcatttcttgaaagctgtcttcacaggctgcagaccattgaaatttcttttccttctttaacagctcagtcataggtctggctagcttagagaatcctttaatgaatcttcgataatatcccgctaagccaaggaagctgcgaatctctgacacattcttggggtatatcaggatgtcatcgatgaacaccacgacaaatgtgaactcgtatagaccataacgcgttgagaaagcggtcttcggaatatcttcagatctgattttcagttggtggtaacctgacctcaagtcaatttttgagaaaactcttgctcctttgagttgatcgaataaatcgtcaatccgtggcaacgggtacttgttctttatagttacttcattcagggctctatagtcgattaccattctctcagagccatcctttttcttaaccagaagcactggggctccccaaggggatgagctaggtcgcacataacctttactctccaattcttcgatttgtcttttaacttctgctaactcattagctgccattcggtagggtctctttgcaattggggcagtgcctagtgccagttctatggcgaactcgatctctcggtctggtggcattcttgttaattcttccggaaatacgtcggggtatgcacagactatgggcaccgactccaaggaggtgacttgtaaacaggttagaatagaccggcttgcggtaggggtgttaggggtaaagcggatttgctttcctccaggtcccatcacaacgtctggagcatcctgagcggtttcagcttgaatgtgattcacacggcctcgaccaaagttgttggaagcacgtgaaccttgtccacttgcctgagagctaggacgagactgagctgccgctggagtaggagttctggcagtgctgccattagcatgtcctgagttggtgttggtaggattctgaggacactgtctagcatagtgacccatctggttgcaccggaaacactgaactgctgacggtccctgtggtgacttgaaagaggtaacactgtttggcgcagtgttgccactaggggcacgctgctgtggcggaggtgccggacggttcatctgagggcgaggggcgtagcctggctggcggttagcctgagtgaccgactggtggtattgcatgggttgaccgtagcgagggcgaggtgcgcctcgggaagaatttccctgatggttagacttgcgtttcttgtattcttcggtagcctcttttctggcatcctcaagtagaagtgccttgttgatcatatgttgaaaagtggggaagtcatgcgcaagcaactggagtctcattccaactgcgatccctttcaagaatttcctaatcttcttcttgtctgtgtccacttcctcaggggcgtaccgagccaacttattgaactgacttaggtactcattgacactgctgttgccttgcttaagtctgttgaattcttctttcttcatgtcaatagtgctttcaggcacatgagctgcacggaaagccgtagcaaactcatcccaagcaatgttagtgggttcaaggtgtgcattgcagtaattctcccaccaatctgcggcaggtcctcttaactggtgagaggcgtagagcgtcttctcaaccggagtacactgcactaagttgagttttctatcaacatctttcaaccaatcgtcagcctcgacgggctcgacggtctgagagaactctggcggacgagacctcagaaagtctgtcagcttggatctgttgttgcccatgtgagggtggccatttccatgcgcattatgctgaaaactggctatggctgtggttagtccttgcaagatttgtgtctgaactgccattaagtgttgcatgttgttttccacatgaggtggggaagggaggcgttcttctccagaattgtgactggcagtgtggtgagagcggtgagactgttccatctctgcatcacgggaaactgtgcgatgcgagcggctgctgcggcggggttgctcaacctctgcgttgcgggaaacagtacggtgcgaacggttgctgtggtgagactgctcattagctgattcatgatttgcttctggttcgactctaccatcttcaaaaccaaagcgggctggcgcacgagctgtacggcgggggcggctagccatcgctagcggtgggggagctgggtagtggaaacggaacacggtggaagaaccaacaacacgcttccgcgcagtgcggataaagcgtgggccacggcgggaggaagcaactggggtgtgtccgggggtgtaggaagggctaactgggtgtgggtagggggagtacactggtgagtacggcgcacgcgagctgggggagcgcgggccactgggagtgcgggcagagccgcgggagctgtgggaggacaggtggctggcgtggcagaggcggcctgagtcccaagagatagtgtcaactgaggtgacaccctcctcggccagacaggcctccaaggcggcgtagcggcgggcaagggagcggtaagcctcaaggagtaggtcgtgctgagtggcctgagcctccgaaagctcaaccatgcgagtcagcactggctgagactcgctgtacggacaagggtacctggcgtctccacgggggtaaaggtacacagagagctcacagtgagggggaacacggtccacggagtaccccgtgtactcgggacacgagaagccaaggaaacgggcgaggtcacgaagctgagcgacgtggtgaccctcaccaaaaccgtgggaactgaagctggcgttcactgccat

SEQ ID NO: 23372 - DNA, 4797 bp, Oryza sativa
  Clone ID: TF_OsC1517_1568
ctaagggagcaggtccgggaactcggcgcggagaagatcttctcgctcccaggttgtctcgtcttcggaatgattgctccattggactttgtagaacttgatggtcttccttcgagtctgacgttctgtctcttcaagaaccttgatcggtctttccttgtaggtcagattcttttctagctcgatattacccaggggaacttgctcttctggaactcgaagacatttctttaactgggatacgtggaacacgttgtgcatatctgcgagaccttcaggtaactcaagctgataagccacttcgccacgtctggcggttatgaggtaggggccgatgtagcggggtgctaacttgccggacatcccaaacctcctcataccacggaggggtgatacccgcaggtatacatgatctcctttttcgaactcaaggtcatgccttcgattgtcagcgtaattcttctgacggttctgtgctgtcttcaaacgttctcgtatcagcttaacttgtacttctgctgacttgagtatgtcaggaccgaatatcagcgcttcgcccacctcattccagcataagggagtgcggcactttcttccgaacattgcctcgttcggcgacatctgaatgctggcctgataactgttgttgtatgagaacttggcatacggcaaacaacgatcccaagtgccttcgaaatccaaggcacacgcacgtagcatgtcttctaggatttggtttaccctttcggtctgaccatcggtctgcggatggtaggctgtactaaaattcagatcagttccgagggcttcatgcaactggttccagaaccttgaggtgaactgagtgcctcggtctgacacaattttcttgggacagccaaatctacatacgacgtgggtcatgtagagatctgctagtttctttccatcataggtggttttcactggcacgaaatgagctgatttcgtgagtcggtccacgattacccaaatggagtcgtacccgttgggggttcttggcaaaccggtgatgaaatccattccgatctcttcccatttccactcgggaatcggtaggggttgcagcagaccagctggcctctgatgttccggcttgactctttggcaaatgtcacacagggctacgtattctgcgacgtctcgcttcattccagcccaccagaagtatgccttgatatcttggtacatctttgtacttcctgggtgaatggagtaggcggactcatgagcttcctttaggatgagatctcttaactccttcttggccggtacacagatgcgtggtccgcaccaaactgtgccttgatcgtctgtggagaaatttgtgtctttcttctcctgtattctttttattaattcttttatcccttcgtcgtctttctgagcctcccggatttgcgactctagggtaggctgtactgtcaagctggcagggacacctgactgtaccatggtcagtcttaacttcaccaattctctgcacaggtgatcttggtcaggccgtatttgagctacattgcaataggccttgcgacttagcgcatcagcgaccacgttggctttaccaggatgatagtggattccaagatcgtaatccttgattagttccaaccatcttctctgtctcatatttaactcggtctgagtgaagatatacttaagacttttgtgatcggtgtatacttcacatctgttcccgattaaatagtgcctccagatcttaagagcatgaaccacggctgccaactcgagatcatgggtgggataattggcttcatgaggcctgagctgcctggatgcataggccacaaccttttgttcttgcattaggacacatcctaagccttgtcttgatgcgtcacagaagatctcgaaatcttttcggatatctggcaaggtgagaactggggcagtggtcaaccttttcttcaattcttggaagctgtcttcacaggctgcagaccattgaaatttcttttccttctttaacagctcggtcataggtctagctagcttagagaatccttcaatgaatcttcgataatatccagctaagccaaggaagctgcggatctctgacacgttcttgggcgggttccaagcaagtacagcttcaaccttgctgggatctacttcgacaccgttggaggaaatcatgtgtccaagaaatgctactcggtccaaccagaattcgcatttcgagaatttagcgaatagtcgatgatctctgagcttttccattatcagcctcaggtgttcagcatgttcttcctcgttcttggagtatatcaggatgtcatcgatgaacaccacgacaaactggtctaggtattccataaagattttgttcattaagttcatgaagaatgctggagcattggtgagtccgaaggacataactgtgaactcatatagaccataacgcgttgagaaagcggtcttcgggatatcttcagatctgattttcagttggtggtaacctgacctcaagtcaatttttgagaaaactcttgctcctttaagttgatcgaataaatcgtcaatccgtggcaacgggtacttgttctttatagttacttcattcagggctctatagtcgattaccattctctccgagccatcctttttcttaaccagaagcactggggctccccaaggggatgagctaggtcgcacataacctttactttccagttcttcgatttgtcttttaacttctgctaactcattagctgccattcggtagggtctttttgcaattggagctgtgcctggtgccagttctatggcgaactcgatctcttggtctggtggcattcttgttaattcttccggaaatacgtcgggatattcacagactatgggcaccgactccaaggaggtgacttgtaaacaggttaggatagaccgacttgcggtaggggtgttaggggtaaagcggacttgctttcctccaggtccttgcaaggtgatggacttttcggcacaatctatctgtcctttgtgcttagccaaccaatccatccctagaatgatgtccaagctttgcgagtctaggactatcggtttggctaggaagtcaacttcctcaattctaaggttaacttccgggcatatttgagttgcccttatattgcttccaggggaatgtactatcattggtacacgcaaattttgggttttccaaccatttcttttcacaaaagcttgcgatatgaaagaatgggaagctcccgaatcgaacagaactattgcgggtacggagttgacagagaacatacccatcacaacgtctggagcatcctgagcggtttctgcttgaatgtgattcacacggcctcgaccaaagttgttggaagcacgtgaaccttgtccacttgcctgagagctaggacgagactgagctgccgctggagtaggagttctggaagtgctaccattagcatgccctgagttggtgttggtaggattctgaggacactgtctagcatagtgacccatctggttgcaccggaaacactgaactgctgacggtccctgcggtgacttgaaagaggtaacactgttaggcgcagtatcgctactaggggcacgctgctgtggctgaggtgccggacggtttatctgaggacgaggggcgtagcctggctggcggttagcctgggtgaccgactggtggtattgcatgggttgaccgtagcgagggcgaggtgcgcctcgggaagaatttccctgatggttagacttgcgtttcttgtattcttcggtagcctcttttctggcatcctcaagtagaagtgccttgttgatcatatgttgaaaagtggggaagtcatgagcaagcaactggagtctcattccaactgcgatttctttcaagaatttcctgatcttcttcttatctgtgtctacttcctcaggggcgtaccgagccaacttgttgaactgacttaggtactcattgacactgctgttgccttgcttaagtctgttgaattcttctttcttcatgtcaatagtgctttcaggcacatgagctgcacggaaagccgtagcgaactcatcccaagcaatgttagtgggttcagggtgtgcattgcagtaattctcccaccaatctgcggtaggtcctcttagttggtgagaggcgtagagcgtcttctcaacaggagtacactgcactaagttgagttttctatcaacatctttcaaccaatcgtcagcctcgacgggctcgacggtctgagagaactctagcggacgagacctcaaaaagtctgtcagcttggatctgttgttgcccatgtgagggtggccatttccatgcgcattatgctgaaaactggctatggctgtggttagtccttgcaagatttgtgtctgaactgccattaagtgttgcatgttggtttccacatgaggtggggaagggaggcgttcttctccagaattgtgactggcagtgcggtgagagcggtgagactgttccatctctgcatcacgggaaactgtgcgatgcgagcggctgctgcggcggggttgctcaacctctgcgttgcgggaaacagtacgatgcgaacggttgctgtggtgagactgctcattagctgattcatgattttcttctggctcaactctaccatcctcaaaaccaaagcgggctggtgcacgagctgcacggcggggacggctagccatgtactgcaccgagttagccatcatggacagctcaaccacccaggcaagttcctgtgcacggatcgagttggccgccat

SEQ ID NO: 23373 - DNA, 5379 bp, Oryza sativa
  Clone ID: TF_OsC1517_1573
ctaagggagcagctccgggaactcggcgcggagaagatcttctcgctcccaggttgcctcatcttcagaatgattgctccattggaccttgtagaacttgatggtcttccttcgagtctgacgttttgcctcttcaagaaccttgatcggtctttccttgtacgtcagattcttttccagctcgatattacccagggggacttgctcttctggaactcgaagacatttctttagctgggatacgtggaacacgttgtgcacatctgcgagaccttcaggtaactcaagctgataagccacttcgccacgtctggcggttatgaggtaggggccgatgtagcggggtgctaacttgccggacatcccaaacctcctcataccacggaggggtgatacccgcaggtatacatgatctcctttttcgaactcaaggtcatgccttcgattgtcagcgtaattcttctgacggttctgtgctgtcttcaaacgttctcgtatcagcttaacttgttcttctgctgacttgagtatgtcaggaccgaatatcagcgcttcgcccaccctttctgtctgaccatcggtctgcggatggtaggccgtactaaaatttagatcagttccgagagcttcatgcaactgcttccagaaccttgaggtgaactgagtgcctcgatctgacacaattttcttgggacagccaaatctacatacgacatgggtcatgtagagttctgctagtttctttccatcataggtggttttcactggcacgaaatgagctgatttcgtgagtcggtccacgattacccaaatggagtcgtacccgttgggggttcttggcaaaccggtgatgaaatccattccgatctcttcccatttccactcgggaatcggtaggggttgcagcagaccagctggcctctgatgctctgccttgactctttggcaaatgtcacacaaggctacgtattccgcgacatctcgcttcattccggcccaccagaagtatgccttgatatcttggtacatcttcgtacttcctgggtgaatggagtaggcggactcatgagcttcctttaggatgagatctcttaactccttcttggccggtacacagatgcgtggaccgcaccaaactgtgccttgatcgtctatggagaaattggtgtctttcttctcctgtattctttttatcaactcttttatcccttcgtcgtctttctgagcttcccggatttgcgactctagggtaggctgtactgtcaagctggcagggacacctgactgtaccacggtcagccttaacttctctaattctctgcacaagtgatcttggtcaggccgtatttgagctacattgcaataggccttgcgacttagcgcatcagcgaccacgttggctttaccaggatgatagtggattccaagatcgtaatccttaattagttccaaccatcttctctgtctcatatttaactcggtctgtgtgaaaatatacttaagacttttgtgatcggtgtatacttcacatctgttcccgattaaataatgcctccagatcttaagagcatgaaccacggctgccaactcaagatcatgggtgggataattgacttcatgaggcctgagctgcctggatgcataggccacaacctttcgttcctgcattacgacacatcctaagccttgtcttgatgcatcacagaagatctcgaaatcttttcggatatctggcaaggtgagaactggggcagtggtcaaccttttcttcatttcttgaaagctgtcttcacaggctgcagaccattgaaatttcttttccttctttaacagctcggtcataggtctggctagcttagagaatccttcaatgaatcttcgataatatccagctaagccaaggaaactgcgaatctctgacacattcttgggcgggttccaagcaagtacagcttcaaccttgctgggatctacttcaacaccgttgggggagatcacgtgtccaagaaatgctactcggtctaaccagaattcgcatttcgagaattttgcgaatagttgatggtccctgagcttttccattatcaacctcaggtgttcagcatgttcttcctcgttcttagagtatatcagaatgtcatcgatgaataccacgacaaactggtccaggtattccatgaagattttgctcattaagttcatgaagaatgctggagcattggtgagtccgaaggacataactgtgaactcatatagaccataacgcgttgagaaagcggtcttcggaatatcttcagatctgattttcagttgatggtaacctgacctcaagtcaatttttgagaagactcttgctcctttaagttgatcgaataaatcgtcaatccgtggcaacgggtacttgttctttatagttacttcattcagggctctatagtcgattaccattctctcagagccatcctttttcttaaccagaagtactggggctccccaaggggatgagctaggtcgcacataacctttactctccaactcttcgatttgtcttttaacttctgctaactcattagctgccattcggtagggtctttttgcaattggagctgtgcctggtgccagttctatggcgaactcgatctctcggtctggtggcattcttgttaattcttccagaaatacgtcgggatattcatagactatgggcaccgactccaaggaggtgacttgtaaacaggttaggatagaccgacttgcggtaggggtgttaggggtaaagcggacttgctttcctgcaggtccttgcaaggtgatggacttttcggcacaatctatctgtcctttgtgcttagccaaccaatccatccctagaatgatgtccaagctttgcgagtctaggactatcggtttggctaggaagtcaacttcctcaattctaaggttaacttccgggcatatttgagttgcccttatattcctcccaggggaatgtactatcattggtacacgcaatttttgggttttccaaccatttcttttcacaaaagcttgcgatatgaaagaatgggaagctcccgaatcgaacagaactattgcgggtacggagtcgacagagaacatacccatcacagcgtctggagcatcctgagcggtttcagcttgaatgtgattcacacggcctcgaccaaagtggttggaagcacgagaaccttgtctacttgcctgagagctaggacgagactgagctgccgctggagtaggagttctggcggtgctgccattagcatgccctgagttggtgttggtaggattctgagggcactgtctagcatagtgacccatctggttgcaccggaaacactgaactgctgacggtccctgtggtgacttgaaagaggtaacactgtttggcgcagtgttgccactaggggcacactgctgtggcggaggtgccggacggttcatctgagggcgaggggtgtagcctggctggcggttagcctgggtgaccgactggtggtattgcatgggttgaccatagcgagggcgaggtgtgcctcgggaagaatttccctgatggttagacttgcgtttcttgtattcttcggtagcctcttttctggcatcctcaagcagaagtgccttgttgatcatatgttgaaaagtggggaagtcatgagcaagcaactggagtctcattccaactgcgattcccttcaagaatttcctgatcttcttcttatctgtgtctacttcctcaggggcgtaccgagccaacttgttgaactgacttaggtactcattgacactgctgttgccttgcttaagtctgttgaattcttctttcttcatgtcaatagtgctttcaggcacatgagctgcacggaaagccgtagcgaactcatcccaagcaatgttagtgggttcagggtgtgcattgcagtaattctcccaccaatctgcggcaggtcctcttagttggtgaaaggcgtagagcatcttctcaacaggagtacactgcactaagttgagttttctatcaacatctttcaaccaatcgtcagcctcgacgggctcgacggtctgagagaactctggcggacgagacctcagaaagtctgtcagcttggatctgttgttgcccatgtgaggatggccatttccatgcgcattatgctgaaaactggctatggctgtggttagtccttgcaagatttgtgtctgaactgccattaagtgttgcatgttggtttccacatgaggtggggaagggaggcgttcttctccagaattgtgactggcagtgcggtgagagcggtgagactgttccatctctgcatcacgggaaactgtgcgatgcgagcggctgctgcggcggggttgctcaacctctgtgttgcgggaaacagtacgatgcgaacggttgctgtggtgagactgctcattagctgattcatgattttcttctggctcaactctaccatcctcaaaaccaaagcgggctggtgcacgagctgcacggcggggacggctagccatctgtcgagggccggcagcagcacgggccgctggcggtgggggagctgggtagtggaaacggaacacggtggaagaaccaacaacacgcttccgcgcggtgcggataaagcgtgggccacggcgggaggaagcaactggggtgtgtccgggggtgtaggaagggctaactgggtgtgggtagggggagtacactggtgagtacggcgcacgcgagctgggggagcgcgggccactgggagtgcgggcagagccgcgggagctgtgggaggacaggtggctggcgtggcagaggcggcctgagtcccaagagatagtgtcaactgaggtgacaccctcctcggccagacgggcctccaaagcggcgtagcggcgggcaagggagcggtaagcctcaaggagtaggtcgtgctgagtggcctgagcctccgaaagctcgaccatgcgagtcagcactggctgagactcgctgtacggacaagggtacctggcgtctgagtggccagagggaaggtgtggaagctgccggaaggcggaacctccgagacggtggctgtagtcgtgggccaggcgacgaagcgcagtccaggagaggtcctggtacgcgatctggagagtgggcctggccacagtgaagtggtgggggcaaaggccagctccgtgtatacctccacgggggtaaaggtacaccgagagctcacagtgagggggaacacggtccacggagtaccccgtgtactcgggacatgagaagccaaggaaacgggcgaggtcacgaagctgggcgacgtggtgaccctcaccaaaaccgtgggaactgaagctggcgttcactgccatcat

SEQ ID NO: 23374 - DNA, 4863 bp, Oryza sativa
  Clone ID: TF_OsC1517_1576
ttatttcttttcgatggttaggttgttgccgacatttctataactaatataaatattcgtatttttccattcgttgcctgataggtgcggtgattttttcgtcacccttgcctccccccaaatcccagtaagaattccatcacccccacatgtgttatcgttaccaagctttccacaagcgacataatagttccgacttcgctgcgaagatgccctcctctccgcctgcatggaggccaccctcaggctcctacgcgcgtgccgctggtcaccggtgccctctctaaaactacgccaccggctttccaccctatgtcgcggcggctgccccatcgtggatcgggccacgggctctagtctcaagactttcagggaggagaagaaaggcacggttttctggtggcttgcttgggcggcaatgaggtagaggtgggaggagatgatgggtcggctggggagggaggcgacgcccgtgtcgcccaacccttgagcgacgcgggcggggaccaagagtatgagcgccttcatcaaaattgctaacgactttgtagtccccaccgcagcttctgacctcaaataggccagatctggcggcactgagaggtggcagcgatggatctgaaggggaagggggtaaagcgatggatcggcgaaggaggtggtgacctctgacctcaaagagccattctggagcttgcttggaccgacggagttggacacggaggcgggggcgtgggcggatgcggcgactagaccaaggccggtgacaagatccgactgccgcgaggtcagtgatgtgaccaagggtagcatgtcttctaggatttggtttaccctttctgtttgaccatcggtctgcggatggtaagctgtactaaaatttagatcggttccgagagcttcatgcaactgcttccagaaccttgaggtgaactgagtgcctcggtctgacacaatcttcttgggacagccaaatctacacacgacatgggtcatgtagagttctgctagtttctttccatcaaaggtggttttcactggcacgaaatgagctgatttcgtgagtcggtccacgattacccagatggagtcgtacccgctaggggttcttggcaaaccggtgatgaaatccattccgatctcttcccatttccactcgggaatcggtaggggttgcagcagacccgctggcctctgattctctgccttgactctttggcaaatgttacacaacgccacgtattctgcgacatctcgcttcattccagcccaccagaaatatgccttgatatcctggtacatcttcgtacttcctggatgaatggagtaggcggactcatgagcttcctttaggatgggatctcttaactccttcaaactgtgccttgatcgtctatttgagaaatcggtgtccttcttctcctgtattctttttattaattcttttatcccttcatcatctttctgagcttcccggatttgcgactctagggtaggctgcacggtcaagctggcagggacacctgactgtaccacggtcagccttaacttctccaattctccgcacaggcgatcttggtctggccatatttgagctacattgtagtaggtcttgcgacttagcgcatcagcgaccacattagctttaccgggatggtaatgaattccaagatcgtaatccttgattagttccaaccatcttctctgcctcatatttaactcggtctgggtgaagatgtacttaagacttttgtgatcggtgtatacttcacatctgttcccgattaaatagtgcctccagatcttaagagcatgaaccacggctgccaactcgagatcatgggtgggatagttgacttcatgaggcctgagctgcctggatgcataggccacaacctttcgttcttgcattaggacacatcctacgccttgtcttgatgcatcacagaagatctcgaaatcctttcggatatctggcaaggtgagaactggggcggtggtcaaccttttcttcatttcttgaaagctgtcttcacaggctgtagaccattgaaatttcttttcattctttaacagctcggtcataggtctggctagcttagagaatccttcaataaatcttcgataatatccagctaagccaaggaagctgtggatctctgacacattcttgggcgggttccaagcaagtacagctccaaccttgctgggatctacttcgacaccgttgaaggagatcacgtgtccaagaaatgctactcggtccaaccagaattcgcatttcgagaatttagcgaatagttgatgatccctgagcttccccattatcagcctcaggtgttcagcatgttcttcctcattcttggagtatatcaggatgtcatcgatgaataccacgacaaactggtccaggtattccatgaagatcttgttcattaagttcatgaagaatgctggagcattggtgattccgaaggacatcactgtgaactcatatagaccataacgcgttgagaaagcggtcttcgggatatcttcagatctaattttcaattggtggtaacctgatctcaagtcaattttagagaaaactcttgctcctttaagttgatcgaacaaatcgtcaatccgtggcaatgcgtacttgttctttatagttacttcattcagggctctatagtcgattaccattctctcagagccatcctttttcttaaccaggagcactggggctccccaaggggatgagctaggtcgcacataacctttactctccaattcttcgatttgtcttttgacttctgctaactcattagctgccatttggtagggtctttttgcaattggtgcggtgcctggtgccagttctatggcgaactcaatctctcggtctggtggcatacttgttaattcttcgggaaatacgtcgggatattcacagactatgggcaccgactccaaggaggtgacttgtaaataggttaggatagaccgacttgcggtaggggtgttagtggtgaagcagacttgctttcctctaggtccttgcaaggtgatggacctttcggcataatctatctgtcctttgtgcttagccaaccaatccatccctaggatgatgtccaagctttgcgagtctaggactatcggtttggctaggaagtcaacttcctcaattctaaggttaacttccgggcatatttgggttgcccttatattcctcccaggggaatgtaccatcacaacgtctggagcatcctgagcggtctcagcttgaatgtggttcacccggcctcgaccaaagttgttggaagcacgagaaccttgtccacttgcctgagagctaggacgagactgagctgccgctggagtaggagttctggcagtgctgccattagcatgccctgagttggtgttggtaggattctgagggcactgtctggcatagtgacccatctggttgcaccggaaacactgaactgctgatagtcctagtggtgacttgaaagaggtaacactatttggcgcagtattgccacttggggcatgctgctgtggctgaggtgccggacggttcatctgaggacgaggggcgtagcctggctggcggttagcctgagtgaccgattggtgatattgcatgggttgaccatagcgagggcgaggtgcgcctcgggaagaattcccctgatggttaaacttgcgtttcttgtattcttcggtagcctcttttctggcatcctcaagtagaagtgccttgttgatcatatgttgaaaagtggggaagtcatgagcaagcaactggagtctcattccaactgcgattcccttcaagaacttcctgattttcttcttgtctgtgtccacttccttaggggcgtaccgagccaacttgttgaactgacttaggtactcattgacactgttgttgccttgcttaagcctgttaaattcctctttcttcgtatcaatggtgctttcaggcacatgagctccacggaaagccgtagcaaactcatcccaagcaatgttagtgggttcagggtgtgcattgcagtaattctcccaccaatctgcagcatgtcctcttagctggtgagaggcgtagagcatcttctcaacaggagtacactgcactaagttgagttttctatcaacatctttcagccaatcgtcagcctcgacgggctcgacggtctgagagaactctggcggacgagacctcagaaagtctgtcagcttggatctattgttgcccatgtgagggtggccatttccatgggcattatgctgaaagccggctatggctgcggctaatccttgcaagatttgtgtctgaactgtcattaagtgctgcatgttgttttccacatgaggtggggaagggatgcgttcttctccagaattgtgactggcagtgcggtgagagcggtgagattgttccacttctgcattacgggaagctgtgtgatgcgagcgattgctgcggtggggttgctcaacttctgcattgcgggaagcagtatggtgcgaacggatgctgtggtgagactgctcattagctgactcatgatttgcttctggctcaactctaccttcctcaaaactgaagcgggctggcatctgcgtagccagaaggaagacgtgggagctgccggaaggcagagcccccgagacggtggctgtagtcgtgggccaagcgacgaagcgcagtccaggagaggtcctggtacgcgatctggagggtgggcctagccacagtgaagtggtgtgggcgaaggccagctccgtgtatacctccgcgagggtaaaggtacacagagagctcacagcgagggggaacacgtccacggagtaccccat

SEQ ID NO: 23375 - DNA, 6033 bp, Oryza sativa
  Clone ID: TF_OsC1517_1586
atggggagggaaggagaaggggaggccgggggtttaaggaggcggcaatgtcggtttggggaaccgacttgcgcggtcaagagcgcgagctggcgctcggctagcggccaaattggcgacagggaggatgacgccggcggagaggcgtgcgcagaggctgacggcggcggcgaccgggcggtcggccacgcgcgcgcggctcgcaacgggaaggcgcggcggatggtgcggcgcggctcggcacgcgcgctggctgcggggccgagcggctgcaggctgcaggcggcagggcagcgggaccgggcggcatccacgcgggcgcgcgcgagcaacggcccgcggggagcggcagcgagggatggggagacggagagcgaggggggggcgctcggggcggcgcgcgagcagcgcgccacgacggaacgggcgctacagaccaacccccctaacaagaatctcgtccccgagattcagcacctaagggagcagctccggaaactcggcgcggagaagatcttctcgttcccaggttgcttcatcttcagaatgattgctccattggactttgtagaacttgattgtcttccttcgagtctgacgttctgcttcttcaagaaccttgatcggtctttccttgtaggtcagattcttttccagctcgatattacctaggggaacttgctcttctggaactcgaagacatttctttaactgggatacgtggaacacgttgtgcacatctgcgagaccttcaggtagctcaagctgataagccacttcgccacgtctggcggttatgaggtaggggccgatgtagcggggtgctaacttgccggacatcccaaaccttctcattcctcggagtggtgatacccgtaggtacacatgatctcctttttcgaactcaaggtcacgcctccgattgtcagcgtaattcttctgacggttctgtgctgtcctcaaacgttctcgtatcagcttaacttgttcttctgctgacttgagtatgtcaggaccgaataccaaggcttcgcccacctcattccagcacaagggagtgcggcaccttcttccgaacattgcctcattcggcgacatctgaatgctggcctgataactgttgttgtatgagaactcggcatacggcaaacaacgatcccaagtgccttcgaaatccaaggcacatgctcgcagcatgtcttctaggatctggtttactctttctgtctgaccatcggtctgcgggtggtaggccgtactaaaattcagatcagttccgagtgcttcatgcaattgcttccagaaccttgaggtgaactgagtgcctcgatccgacactattttcttgggacagccaaatctacatacgacatgagtcatgtagagttctgctagtttctttccatcataggtggtcttcactggcacgaaatgtgctgacttcgtgagtcggtccacgattacccaaatggagtcgtatccgctgggggttcttggcaaaccggtgatgaaatccattccgatctcttcccatttccactcgggaatcggtaggggttgtagcagtccagctggcctttggtgttctgccttgactctttggcaaatgtcacacaaggctacgtattctgcgacatctcgcttcattccagcccaccaaaagtatgccttgatatcttggtacatcttcgtacttcctggatgaatggagtaagcggactcatgagcttcctttaggatgagatttcttaactccttcttggccggtacacagatgcgtggaccgcaccaaattgtgccttgatcgtctatggagaaattggtgtctttcttctcctgtattctttttattaattcttttatcccttcgtcgtctttctgagcctcccggatttgcgactctagggtaggctgtactgtcaagctggcagggacacctgactgcaccacggtcagccttaacttctccaattctctgcacaggtgatcttggtcaggccgtatttgagctatattgcaataggccttgcgacttagcgcatcagcgaccacgttggctttaccaggatgatagtggattccaagatcgtaatccttgattagttccaaccatcttctctgtctcatatttaactcggtctgagtgaagatatacttaagacttttgtgatcggtgtatacttcgcatctgttccctattaagtagtgcctccagatcttaagagcatgaatcacggctgccaactcgagatcatgggtggggtaattgacttcatgaggcctgagctgcctggatgcataggccacaacctttcgttcttgcattaggacacatcctaagccctgtcttgatgcatcacagaagatctcgaagtcttttcggatatctggcaaggtgagaactggggcagtggtcaatcttttcttcatttcttgaaagctgtcttcacaggctgtggaccattgaaatttcttttccttctttaacagctcggtcataggtctggctagcttagagaatccttcaatgaatcttcgataatatccagctaagccgaggaagctgcgaatctccgacacattcttgggcgggttccacgcaagtacagcttcaactttgctgggatctacttcgacaccgttggaggagatcacgtgaccaagaaaagctactcggtccaaccagaattcgcatttcgagaatttagcgaatagttgatgatctctgagcttttccattatcagcctcaggtgttcagcatgttcttcctcattcttagagtatatcaggatgtcatcgatgaataccactacaaactggtccaggtattccataaagattttgttcattaagttcatgaagaatgctggagcattggtgagtccgaaggacattactgtgaactcatatagaccataacgcgtcgagaaagcggtcttcggaatatcttcagatctgattttcagttggtggtaacctgacctcaagtcaatttttgagaagactcttgctcctttaagttgatcgaataagtcgtcaatccgaggcaacgggtacttgttctttatagttacttcattcagggctctatagtcaattaccattctctcagagccatcctttttcttaaccagaagcactggggctccccaaggggatgagctaggtcgcacataacctttactttccagttcttcgatttgtcttttaacttctgctaactcattagcggccattcggtagggtctttttgcaattggagctgtgcctggtgccagttctatggcgaactcaatctctcggtctggtggcattcttgttaattcttccggaaatacgtcgggatattcacagactatgggcaccgactccaaggaggtgacttgcaaacaggttaggatagaccgacttgcggtaggggtgttaggggtaaagcggacttgctttcctccaggtccttgcaaggtgatggacttttcggcacaatctatctgtcctttgtgcttagccaaccaatccatccctaggatgatgtccaagctttgcgagtctaggactatcggtttggctaggaagttaacttcctcaattctaaggttaacttccgggcatatttgagttgcccttatattccttccaggggaatgtactatcattggtacacgcaaattttgggttttccaaccatttcttttcacaaaagcttgcgatatgaaagaatgggaagctcccgaatcaaacaggactattgcgggtacggagttgacagagaacatacccatcacaacgtctggagcatcctgagcggtttcagcttgaatgtgattcacacgtcctcgaccaaagtggttggaagcacgagaaccttgtccacttgcttgagagctaggacgagactgagctgccgctggagtaggagttctggcagtgctgccattagcatgtcctgggctggtgttggtaggattctgaggacactgtctagcatagtgacccatctggttgcaccggaaacactgaactgctgacggtccctgtggtgacttgaaggaggtaacactgtttggcgcagtgttgccactaggggcacgctgctgtggcggaggtgccggacggttcatctgaggacgaggggcgtagcttgactggcggttagcctgagtgaccgactgatggtattgcatgggctgaccgtagcgagggcgaggtgcgcctcgggaagaatttccctgatggttagacttgcgtttcttgtattcttcggtggcctcttttctggcatcctcaagtagaagtgctttgttgatcatatgttgaaaagtggggaagtcatgagcaagcaactggagtctcattccaactgcgattcctttcaagaatttcctgatctttttcttatcggtgtctacttcctcaggggcgtaccgagccaacttgttgaactgacttaggtactcattgacactgctgtggccttgcttgagtctgttaaattcttctttcttcatgtcaatagtgctttcaggcacatgagctacacggaaagccgtagcgaactcatcccaagcaatgttagtgggttcaggatgtgcattgcagtaattctcccaccaatctgcggcaggtcctcttagctggtgagaggcgtagagcgtcttctcaacaggagtacactgcactaagttgagttttctatccacatctttcaaccaatcgtcagcctcgacgggctcgatggtctgagagaactctggtggacgtgacctcagaaagtctgtcagcttggatctattgttgcccacgtgagggtggccatttccatgcgcattatgctgaaagctggctatggctgtggttagaccttgcaagatctgtgtctgaactgccattatgtgttgcatgttgttttccacatgaggtggggaagggaggcgttcttctccagaattgtgactggcagtgcggtgagagcggtgagactgctccaactctgcttcacgggaaactgtgcgatgcgagcggctgctgcggcgaggttgctcaacctctgcgttgcgggaaacagtacggtgcgaacggttgctgtggtgagaatgctcattagctggttcgtgatttgcttctgcttcaactctaccatcttcaaaaccaaagcggactggtgcacgagctgtacgacgggggcggctagccatctgtcgagggccggcagcagcacgggccgctggcggtgggggagctgggtggcggaaacggaacacggtggaagaaccaacaacacgcttccgcgcagtgcggataaagcgtgggccacggcgggaggaagcgactggagtgtgtccgggggtgtaggaagggctaactgggtgtgggtagggggagtacactggtgagtacggcgcacgcgagctgggggagcgcgggccactgggagtgcgagcagagccgcgggagctgtgggaggacaggtggctggcgtggcagagacggcctgagtcccaagagatagtgtcaactgaggtgacaccctcctcggccagacgggcctccaaggcggcgtagcggcgggcaagggagcggtaagcctcaaggagtaggtcgtgctgagtggcctgagcctccgaaagctcgaccatgcgagtcagcactggctgagactcgctgtacggacaagggtatctggcgtctgcgtggccagaaggaagacgtggaagctgccggaaggcggagcctccgagacggtggccgtagtcgtgggccaggcggcgaagcgcagtccaggagaggtcctggtacgcgatctggagagtgggcctggccacagtgaagtggtgggggcgaaggccaactccgtgtatacctccacgagggtaaaggtacacagagagctcacagtgagggggaacacggtccacggagtaccccgtgtactcgggacacgagaagccaaggaaacgggcgaggtcacgaagctgggcgacgtggtgaccctcaccaaaaccgtgggaactgaaactggcgttcactgccat

SEQ ID NO: 23376 - DNA, 5339 bp, Oryza sativa
  Clone ID: TF_OsC1517_1607
ctaagggagcagctccgggaactcggcgcggagaagatcttcttgctcccaggttgcctcatcttcagaatggttgctccattggactttgtagaacttgatggtcttccttcgagtctgacgttctgcctcttcaagaaccttgatcggtctttccttgtaggtcagattcttttccagctcgatattacccagggggacttgctcttctggaactcgaagacatttctttaactgggatacgtggaacacgttgtgcacatctgcgagaccttcaggtaactcaagatgataagccacttcgccacgtctggcggttatgaggtaggggccgatgtagcggggtgctaacttgccggacatcccaaacctccttataccacggagaggcgatacccgcaggtacacatgatctcctttttcgaactcaaggtcacgcctccgattgtcaacgtaattcttctgacggttctgcgctgcctttaaacgttctcggatcagcttaacttgttcttctgctgccttgagtatgtcaggaccgaataccagcgcttcgcccacctcattccagcacaagggagtgcggcactttcttccgaacatttcctcattcgatgacatctgaatgctggcctgataactgttgttgtatgagaactccgcatacggcaaacaacgatcccaagtgccttcgaaatccagggcacacgcacgtagcatgtcttctaggatttggtttaccctttctgtctgaccatcggtctgcggatggtaggccgtactaaaatttagatcggttccgagggcttcatgcaactgcttccagaaccttgaggtgaactgagtgcctcggtctgacacaatcttcttgggacagccaaatctacacacgacatgggtcatgtagagttctgctagtttctttccatcaaaggtggttttcattggcacgaaatgagctgatttcgtgagtcggtccacgattacccagatggagtcgtacccgctaggggttcttggcaaaccggtgatgaaatccattccgatctcttcccatttccactcggggatcggtaggggttgcagcagaccagctggcctctgatgttctgccttgactctttggcaaatgtcacacaaggctacgtattctgcgacatctcgcttcattccagcccaccaaaagtatgccttgatgtcttggtacatcttcgtacttcctggatgaatggagtaggcggactcatgagcttcctttaggatgagatctcttaactccttcttggccggtacacagatgcgtggaccataccaaactgtgccttgatcgtctatggagaaatcggtgtctttcttctcctgtattctttttattaactcttttatcccttcgtcgtctttctgagctttccggatttgcgattctagggtaggctgtactgtcaagctggcagcgacacctgactgtactacggtcagccttaacttttccagatctctgcacaggcgatcttggtcgggccgtatttgatctacattacaataggtcttgcgacttagcgcatcagcgaccacattagccttaccggggtggtaatggattccaagatcgtaatccttgattagttccaaccatcttctctgcctcatatttaactcggtctgtgtgaagatatacttaagacttttgtgatcggtgtatacttcacatctgttcccgattaaatagtgcctccagatcttaagagcatgaaccacggctgccaactcgagatcatgggtgggatagttgacttcatgaggcctgagctgcctggatgcataggccacaacctttcgttcttgcattaggacacatcctaagccttgtcttgatgcatcacagaagatctcgaaatcttttcggatatctggcaaggtgagaactggggcagtggtcaaccttttcttcatttcttgaaagctgtcttcacaggctgtagaccattgaaatttcttttctttctttaacagctcggtcataggtctggctagcttagagaatccttcaatgaatcttcgataatatccagctaagccaaggaagctgcgaatctctgacacattcttgggcgggttccaagcaagtacagcctcaaccttgctgggatctacttcgacaccgttgggggagatcacgtgtccaagaaatgctactcggtctaaccagaattcgtatttcgagaatttagcgaatagttgatgatccctgagcttttccattatcagcctcaggtgttcagcatgttcttcctcattcttggagtatatcaggatgtcattgatgaacaccacgacaaactggtccaggtattccatgaagattttgttcattaagttcatgaagaatgctggagcattggtgagtccgaaggacatcactgtgaactcatatagaccataacgcgttgagaaagcggtcttcgggatatcttctgatctgattttcaattggtggtaacctgatctcaagtcaatttttgagaaaactcttgctcctttaagttgatcgaacaaatcgtcaatccgtggcaacgggtacttgttctttatagttacttcattcagggctctatagtcgattaccattctctcagagccatcctttttcttaaccaggagcactggggctccccaaggggatgagctaggtcgcacataacctttactctccaattcttcgatttgtcttttaacttctgctaactcattagctgccattcggtagggtctttttgcaattggtgcggtgcctggtgccagttctatggcgaactcaatctctcggtctggtggcatactcgttaattcttctggaaatacgttgggatattcacagactatgggcaccgactccaaggaggtgacttgtaaacaggttaggatagaccgactcgcggtaggggtgttagaggtaaagcggacttgctttcctccaggtccttgcaaggtgatggacttttcggcacaatctatctgccctttgtgcttagccaaccaatccatccctaggatgatgtccaagctttgcgagtctaggactatcggtttggctaggaagtcaacttcctcaattctaaggttaacttccgggcatatttgagttgcccttatattcctcccagggaaatgtactatcattggtacacgtaaattttgggttttccaaccatttcttttcacaaaagcttgtgatatgaaagaatgggaagctcctgaatcaaacagaactattgcgggtacggagttgacagagaacatacccatcacaacgtctggagcatcctgagcggtctcagcttgaatgtggttcacccggcctcgaccaaagttgttggaaacacgagaaccttgtccacttgcctgagagctaggacgagactgagctgccgctggagtaggagttctggcagtgctgccattagcatgccctgagttggtgttggtaggattctgagggcactgtcgggcatagtggcccatctggttgcaccggaaacactgaactgctgacggtcctagcgatgacttgaaagaggtaacattgtttggcgcagtattgccactaggggcacgctgctgtggctgaggtgcctgacggttcatctgaggacgaggggcgtagcctggctggcggttagcctgagtgaccgactggtggtattgcatgggttgaccgtagcgagggcgaggtgcgcctcgggaagaatttccctgatggttagacttgcgtttcttgtattcttcggtagcctcttttcgagccaacttgttgaacagacttaggtactcattgacactattattgccttgcttaagtttgttgaattcctctttcttcatatcaatggcgctttcaggcacatgagctgcacggaaagccgtagcaaactcagcccaagcaatgttagtgggttcagggtgtgcattgcagtaattctcccaccaatctgcagcaggtcctcttagctggtgagaggcgtagagcgtcttctcaacaggagtacactgcactaagttgagttttctatcaacatctttcagccaatcgtcagcctcgacgggctcgacggtctgagagaactctggcggacgagacctcagaaagtctgtcagcttggatctattgttgcccatgtgagggtggccatttccatgcgcactatgctgaaaaccggctatggctgcggctaatccttgcaagatttgtgtctgaactgccattaagtgctgcatgttgttttccacatgaggtggggaagggaggcgttcttctccagaattgtgactagcagtgcggtgagagcggtgagactgttccatctctgcattacgggaagctgtgtgatgcgagcggttgctgcggcggggttgctcaacttctgcgttgcgggaagcagtacggtgcgaacggttgctgtggtgagaccgctcattagctgactcatgattttcttctggctcaactctaccttcttcaaaaccgaagcgggctggcgcacgagcagcacggcgggggcggctagccatctgtcgagggccgatagcagcacgggccgctggcggtgggggagctgggtagtcgaatcggaacacggtggaagaaccaacaacacgcttccgcgcagtgcggataaagcgtgggccacggcgggaggaagcaactggggtgtgtccgggggtgtaggaggggctaactgggtgtgggtagggggagtacactggtgagtacggcgcacgtgagctgggggagcgcgggccactaggagtgcgagcagagccgcgggagctgtgggaggacaggtggctggcgtggcagaggcggcctgagtcccaagagacagtgtcaactgaggtgacaccctcctcggccagacgggcctccagagcggcgtagcggcgggcaagggagcggtaagtctcaaggagtaggtagtgctgagtggcctggcgtctgcatggccagaaggaaggcgtggaagctgccggaaggcagagcccccgagacggtggctgtagtcgtgggccaagcgacgaagcgcagtccaggagaggtcctggtacgcgatctggagggtgggcctggccacagtgaagtggtgtgggcgaaggccagctccgtgtatacctccacgagggtaaaggtacacagagagctcacagcgagggggaacacggtccacggagtaccccgtgtacttgggacacgagaagccaaggaagtgggcgaggtcacgaagctgagcgacgtggtgaccctcaccaaaaccgtgggaactgaagctggcgttcactgccat

SEQ ID NO: 23377 - DNA, 5273 bp, Oryza sativa
  Clone ID: TF_OsC1517_1610
atggcggcgaccaggcggtcggccaccacagcacgcgcgcgcggcttgcaatgggaggcgcggcggattgagtggcgcggctcgggcacgcgcgctggctgcggggccgagcggctgcgcggctgcaggcgcggcagggcagcggggccgggcggcgcagacgcgacgcgggcgacgaccacgcgggcgcgcgccacgacggaacgggcgctacagaccaacccccctaacaagaatctcgaccccgagattcatcacctaagggagcagctccgggaactcggcgcggagaagatcttctcgctcccaggttgttttcactggcacgaaatgagccaatttcgtgagtcgatccacgattacccaaatggagtcgtacccgctaggggttcttggcaaaccggtgatgaaatccattccgatttcttcccatttccactcgggaattggtaggggctgtagcagaccagctggcctctggtgctctgccttgactctttggcaaatgtcacacaaggctacgtattctgcgacatctcgcttcattccagcccaccagaagtatgccttgatatcttggtacatcttcgtacttcctggatgaatggagtaggcggactcatgagcttcctttaggatgagatctcttaattccttcttggccggtacacagatacgtggaccgcaccaaactgtgccttgatcgtctatggagaaattggtgtctttcttctcctgtattctttttattaactcttttatcccttcgtcgtctttctgagcttcccggatttgcgactctagggtaggctgtactgtcaagctggcagggacacctgactgtaccacggtcagcctcaacttctccaattctctgcacaggcgatcttggtcaggccgtatttgagctacattgcaataggccttgcgacttagcgcatcagcgaccacgttggctttaccggggtggtaatgaattccaagatcgtaatccttgattagttccaaccatcttctctgcctcatatttaactccgtctgtgtgaagatgtacttaagacttttgtgatcggtgtatacttcacatctgttcccgattaaatagtgcctccagatcttaagagcatgaaccacggctgccaattcgagatcatgggtgggataattgacttcatgaggcctgagctgcctggatgcataggccacaacctttcgttcttgcattaggacacatcctaagccttgtcttgatgcatcacagaagatctcgaaatcttttcggatatctggcaaggtgagaactggggcagtggtcaaccttttcttcatttcttgaaagctgtcttcacaggctgcagaccattgaaatttcttttccttctttaacagctcggtcataggtctggctagcttagagaattcttcaatgaatcttcgataatatccaactaagccaaggaagctgcgaatctctgacacattcttgggcgggttccaagcaagtacagcttcaaccttgctgggatctacctcgacaccgttggaggagatcacgtgtccaaggaatgctactcggtctaaccagaattcgcatttcgagaatttagcgaatagttgatgatccctgagcttttccattattagcctcaggtgttcagcatgttcttcctcattcttggagtatatcaggatgtcatcgatgaacaccacgacaaactggtccaggtattccataaagattttgttcattaagttcatgaagaacgctggagcattggtgagtccgaaggacatttctgtgaactcatatagaccataacgcgttgagaaagcggtcttcgggatatcttcagatctgattttcaacattctctcagagccatcctttttcttaaccagaagcactggggctccccaaggggatgagctaggtcgcacataacctttactctccaattcttcgatttgtcttttaacttctactaactcattagctgccattcggtagggtctttttgcaattggtgcggtgcctggtgccagttctatggcgaactcaatctcccggtctggtggcatactcgttaattcttctggaaatacgtcgggatattcacagactatgggcaccgactccaaggaggtgacttgtaaacaggttaagatagaccgacttgcggtaggagtgttaggggtaaagcggacttgctttcctccaggtccttgcaaggtgatggacttttcggcacaatctatctgtcctttgtgctttgccaaccaatccatccctaggatgatgtccaagctttgcgagtctaggactatcggtttggctaggaagtcaacttcctcaattctaaggttaacttccaggcatatttgagttgcccttatatccctcccaggggaatgtactatcattggtacacgtaaattttgggttttccaaccatttcttttcacaaaagcttgtgatatgaaagagtgggaagctcctgaatcaaacagaactattgcgggtatggagttgacagagaacatacccatcacaacgtctggagcatcctgagcggtctcggcttgaatgtgattcacccggcctcgaccaaggttgttggacacacgagaaccttgtccacttgcctgagagctaggacgagactgagctgccgctggagtaggagttctggcagtgctgccattagcatgccctgagctggtgttggtaggattctgagggcactgtctggcatagtggcccatctggttgcaccggaaacactgaactgctgacggtccctgtggtgacttgaaagaggtaacactgttgggcgcagtattgccactaggggcacgctgctgtggctgaggtgccggacagttcatctgaggacgaggggcgtagcctggctggcggttagcctgagtgaccgactggtggtattgcatgggttgaccgtagtgagggcgaggtgcgcctcgggaagaatttccctgatggttagagttgcgtttcttgtattcttcggtagcctcttttctggcatcttcaagtagaagcgctgcgattcctttcacgaatttcctgatcttcttcttatctgtgtccacttcctcaggggcgtatcgagccaagttgttgaacatacttaggtactcattgacactgctgttgccttgcttaagtctgttgaattccactttcttcatgtcaatggtgctttcaggcacatgagctgcacggaaagacgtagcaaactcatcccaagcaatgttagtgggttcagggtgtgcattgcagtaattttcccaccaatctgcagcaggtcctcttagctggtgagaggcatagagcgtcttctcaaccggagtacactgcaccaagttgagttttctatccacatctttcagccaatcgtcagcctcgacgggctcgacggtctgagagaactctggcggacgagacctcagaaagtctgtcagcttggatctattgttgctcatgtgacggtggccatttccatgcgcagtatgctgaaaaccggctacggctgcggctaatccttgcaagatttgtgtctaaactgccattaagtgctgcatgttgttttccacatgaggtggggaagggaggcgttcttctccagaattgtgactggcagtgcggtgagagcggtgagactgttccatctctacatcacaggaagccgtgcgatgcgagcggttgctgcggcggggttgctcaacttctgcattgcgggaagcagtacggtgcgaacggttgctgtggtgagactgctcatgatttgcttctggctcggctctaccatcttcaaaaccaaagcgggctcctgtagtcggctcctcagtcgaagaaatgtcgatcggctgacgcgaagggaccggcggaacctgtcgagggccgacagcagcacgggccgctggcggtgggggagctgggtagtggaaacggaacacggtggaagaaccaacaacacgcttccgcgcggtgcggataaagcgtgggccacggcgggaggaagcaactggggtgtgtccgggggtgtaggaggggctaactgggtgtgggtagggggagtacactggtgagtacggcgcacgcgagctgggggagcgcgggccactgggagtgcgggcagagccgcgggagctgtgggaggacaggtggctgccgtgacagaggcggcggcgtagcggcgggcaagggagcggtaagcctcaaggagtaggtcgtgctgagtggcctgagcctccgaaagctcaaccatgcgagtcagcactggctgagactcgctgtacggacaagggtacctggcgtctgagtggccagaaggaaggcgtggtagctgccggaaggcgaagcccccgagatggtgggcgatctggagagtgggcctggccacggtgaagtggtgtgggcgaaggccagctccgtgtatacctccacgagggtaaaggtacacagagagctcacagtgagggggaacacggtccacggagtaccccgtgtactcgggacacgagaagccaaggaaacgagcgaggtcacgaagctgagcgacgtggtgaccctcaccaaaaccgtgggagctgaagctggcgttcactgccatctgttaatcgataccagtcccaggaaacagtgctggtatcacaggaagacagaatatcacagcaacagaggcgcgcggttcgcggaggacgcggtgcggcaggcccacgcgcagcctcacggctcgcggtggaccgcgcgcgcgagggggaggagggaagcgacggaccggggtctgcttgacccggtcgcggccgaggtggcgccgacgtggtgcctacgtggctgccacgtgggcgggcgggaggtagacgacgacgccggtcggaacggacggcagacaacagcggcgagcggcggagcgaaccacggcgatacaggcgaaagcgagcacaccgggaagttgcacaggactaagggagacgagccaatggctcggattcgccgggggatgctcgacggcggcggattgcggcggcggcaaccggcggcaggagaagggggaaacggcgatggcgcgacgggagaccgattcgggcgagttagagcatctacgcgactccgggaatccgttgctagcgtcggattgggcggagctacgctgagcgaggccggcgacgagtgggtgctacggagcacgggcggcgacggcggcgagcacacagcgagcggcggcaacggtcggggcggcgtcagctag

SEQ ID NO: 23378 - DNA, 5313 bp, Oryza sativa
  Clone ID: TF_OsC1517_1625
atgacggcggggcggtttggaccggagcggcgacactggcgacaggcgcgtgcagaggctgacggcggcggcgaccgggcggtcggccaccacggcacgcgcgcgcgggaagcaacgggcggcgtccgcgcgggcgcgcacacgctggctcgcgaggacgagcggatgcgcgggttctgcctcttcaagaaccttgatcggtctttccttgtaggtcagattcttttctagctcgatattacccaggggaacttgctcttctggaactcgaagacatttctttaactgggatacgtggaacacgttgtgcacgtctgcgagaccttcaggtagctcaagctgataagccacttcgccacgtctggcggttatgaggtaggggccgatgtagcggggtgctaacttgccggacatcccaaaccttctcataccacggaggggtgatacccgcaggtacacatgatctcctttttcgaactcaaggtcacgcctccgattgtcagcgtaattcttctgacggttctgtgctgtcttcaaacgttctcgtatcagcttaacttgttcttctgctgacttgagtatgtcaggaccgaataccagtgctttgcccacctcattccagcacaagggggtgcggcactttcttccgaacattgcctcattcggcgacatctgaatgctggcctgataacttgaggtgaactgagtgcctcgatccgacacaatcttcttgggacaaccaaatcgacacacgacatgggtcatgtagagttctgccagtttctttccatcaaaggtggttttcgctggcacgaaatgtgccgatttcgtgagtcgatccacgattacccagatggagtcgtacccgctaggggttcttggcaaaccggttatgaaatccattccgatctcttcccatttccactcgggaatcggtaggggttgcagcagaccagctggcctctgatgctctgccttgactctctggcaaatgtcacaaagggctacgtattctgcgacatctcgcttcattccaacccaccagaaatatgccttgatatcctggtacatcttcgtacttcctggatagatggagtaggcggactcatgagcttcttttaaaatgaggtctcttaactccttcttggccggtacacagatgcgtggaccgcaccaaactgtgccttgatcgtctatggagaaatcggtgtccttcatcttctgtattctttttattagctcttttatcccttcatcatctttctgagcttcccggatttgcgattctagggtaggctgcactgtcaagctggcagggacacctgactgcaccacggtcagccttaacttctccaattctctgcacaggcgatcttggtctggccatatttgagctgcattgcaataggtcttgcgacttagcgtatcagcgaccacattagctttaccgggatggtaatgaattccaagatcgtaatccttgattagttccaaccatcttctctgcctcatatttaactcggtctgagtgaagatgtacttaagacttttgtgatcggtgtatacttcacatctgttcccgattaaatagtgcctccagatcttaagagcatgaaccacggctgccaactcgagatcatgggtgggatagttgacttcgtgaggcctaagctgcctggatgcgtaggccacaacctttcgctcttgcattaggacacatcctaagccttgtcttgatgcatcacagaagatttcgaaatcttttcggatatctggcaaggtgagaactggggcagtggtcaatcttttcttcatttcttgaaagctgtcttcacaggctgctgaccattcaaacttcttttccttctttaacagctcggtcataggtctggctagcttagagaacccttcgatgaatcttcgatagtaaccagctaggccaaggaaactgcggatctctgactcattcttgggaggataccaagcaaggacagcttcaaccttgctgggatctacttcgacaccgttagaggagatcacgtgaccaaggaatgctactcggtccagccagaattcgcattttgagaacttagcgaacaattgatgatctcttagcttctccattatcagcctcaggtgttcaacatgttcttcctcattcttggagtatatcaggatgtcatcgatgaataccacaacaaactggtccaggtactccatgaagattttgttcatcaggttcatgaagaatgctggagcattggtgagtccgaaggacatcactgtgaactcatacagcccatagcgcgttgagaaagcggtcttcgggatatcttcatatctgattttcaacattctctcagagccatcctttttcttaaccagaagcactggggctccccaaggggatgagctaggtcgcacataacctttactctccaattcttcgatctgctttttgacttctgctaattcattagctgccattcggtagggactttttgcaattggtgcggtgcctagtgccagttctatggcgaactcaatctctcggtttggtggcatttccgttaattcttttggaaatacgtcgggatattcacagactatgggtaccgattccaaagaagtggcttgcaaactggttaggatagaccgacttgcagtaagagtgttgggggtaaagcgaacttgctttcctccaggtccttgcaaggtgatggacctttcggcacaatctatctgtcctttgtgcttagccaaccaatccatcccaagaatgatgtccaagctttgcgagtctaggactatcggtttggctaggaagtcaacttcctcaattctaaggttaacttccgagcatattttagttgcccttatatcccttccaggggaatgtactatcattggtactcgcaaattttgggttttccaaccatttcttttcacaaaagcttgcgatatgaaagaatgggatgctcctgaatcaaacagaactattgcgggtgcggagttgacagagaacatacccataacaacgtctggagcgtcctgagcggtctcggcttgaatgtggttcactcggtctcgaccaaagttgttggaagcacgggaaccttgtccacttgcctgcgtgctaggacgggactgagctgctgcaggagtaggagttctggcggtgctgccattggtatgccctgagttggagttggtaagattctgagggcactgtctggcatagtgacccatctggttgcaccggaaacactgaactgctgatagtcctggcggtgacttgaaagaggtaacactgtttggcgcggtattgccacttggggcacgctgctgcggctgaggtgccagacgattcatctgaggacgaggggcatagcttggctggcggttagcctgagtgactgactggtgatattgcatgggttgtccaaagcgagggcgaggttcccctcgggaagaatttccctgatgggtagacttgcgtttcttatactcctcggtagcctcttttctggcatcctcaagtagaagtctcttgttgatcatgtgtgtgactcctttcaagaacttcctgatcttcttcttgtctgtgtccacttcctcaggagcgtatcgagccaacttgttgaactgactcatatactcattgacactggtattgccttgcttgagcctgttaaattcttccttcttcatgtcaatagtgctttcaggcacatgagctgcacggaaagctgcagcgaattcatcccatggaatgttagtgggttcggggtgtgcgttgcaataattctcccaccaatctgcagcaggtcctcttagctggtgagaggcgtagagcgtcttctcaacaggagtacactgcactaagttgagttttctctcaacatctttcagccaatcgtcagcctcaacgggctcgacggtctgggagaactctggcggacgagaccttagaaagtctgtcagcttagatctgttgttgcccgtgtggggatggccatttccatgcgcgttgtgctgaataccggctatggctgtggctaaaccttgcaagatttgagtctgaactgccatcaagtgctgcatgttgttctcaacatggggtggggaaggaatgcgttcttccctagaattgtgaatggcagcgcggggagagcggtgagactgttccacttctgcattacgggaaactgtgcggtgcgagcggttgctgcggtggggttgctcaacttctgcattgcgggaagcagtatggtgcgaacggttgctgtggtgagactgctcattagctgactcatgatttgcttctggctcaactctaccttcctcaaaaccgaaatgggctcctgtagtcggctcctcagtcgaagagacgtcgatcggctgacgcgaagagatcggcggaacttgtcgagggccggcagcagcacgggctgctggcggtgggcgagctgggtggtcaaagcggaacacagtggaagaaccaacaacacgcttccgcacagtgcggataaagcgtgggccacggcaggaggaagcaactggggtgtgaccaggagtgtaggaagggctaactgggtgagggtagggagagtgcactggggagtacggcacacgcgaactgggggtgcgcgggccactgggagtgcgaacagagccgcgggagctgtgggaagacaggtggctggcgtggcagaggcgacctaagtcccaagaggcagtgtcaactgaggtgacaccctcctcggccaggcgggcctccaaagcagcgtagcggcgagcaagggagcggtaagcctcaaggagaaggtcgtgctgggtggcctgagcctcagagagctcaaccatgcgagtcagcacaggctgagactcgctgtacgggcaagggtacctagtgtcagtgcggccagaaggaaggcgcaggagctgccgaaaggcagagcccccgaggcggtgggcgatctggagagtgggcctggccacagtgaagtggtgtgggcgaaggccagccccgtgtatacctccacgagggtaaaggtacaccgaaagctcataacgagagggaacacggtccacagagtaccccgtgtactcaggacacgagaagccaaggaagcgggcgaggtcacgaagctgagcgacgtggtgaccctcaccaaaaccgtgggaactgaagctggcgttcactgccatctgttcatcgataccagtcccaggaaacaatgctggtatcacaggaagacagaatatcatagcaacagaggtctctttattacagagtaggagtacagtcat

SEQ ID NO: 23379 - DNA, 5856 bp, Oryza sativa
  Clone ID: TF_OsC1517_1640
ttatgcacaaataagttcggaaattactagtgaatttccgggcgtgacagcgcccaccgtgcgcaggaggtggaagtagacctgcgggttcgccaggaacgccgcgcgggagatgacgtagccggcggcgcccggcgccttcatcatatcatcgccgccgccggcgccgaggccggccacagcaagtacaagaaggcggtcgacccgacgcccacgggcacggcagcgatcatcgacggcgccgcaaccatcggcaccggccaacagcttttcaaacggccacccgggccaaccacttttcaaacggccacccgggcccggatcacccagcccgtggggatcagccacgtcgggagacctccaagctttcatgacaaggcatttccaaagccgacacaggtttaccatatgccgacgagaggagtcccagaccaacaacaggttaggtcccagaccatactgtgccaagaagcccaggggtcctccccgacaccaccccggcgaatccacatgtctctcggcatcaaggctcccctgataagctagttactcagccaagggtgtcccattccacccatgtggtcgtacttgtcttatgtttggatgaaattccaaggaaatcggtccttaagtgcgagagcgggaaaccgtacacccgttatggcagtgaacgctagcttcagttcccacggttttggtgagggtcaccacgtcgcccagcttcgtgacctcgcccgtttccttggcttctcgtgtcccgagtacacggggtactccgtggaccgtgttccccctcactgtgagctctctgtgtacctttacccccgtggaggtatacacggggctggccacttcactgtggccaggcccaccctccagatcgcgtaccaggacctctcctggactgcgcttcgtcgcctggcccacgactacagccaccgtctcggaggctccgccttccggcagcttccacgtcttccttctgggcactcagacgccaggtacccttgtccgtacagcgagtctcagccagtgctgactcgcatggtcgagctttcggaggctcaggccactcagcacgacctactccttgaggcttaccgctcccttgcccgccgctacgccgccttggaggcccgtctggccgaggagggtgtcacctcagttgacactatctcttgggactcaggccgtctctgccacgccagccacctgtcctcccacagctcccgcggctctgctcgcactcccagtggcccacgctcccccagctcgcgtgcgccgtactcaccagtgtactccccctacccacacccagttagcccttcctacacccccggacacactccagtcgcttcctcccgccgtggcccacgttttatccgcactgcgcggaagcgtgttgttggttcttccaccgtgttccgtttctgccacccagctcccccaccgccagcggcccgtgctgctgccggccctcgacagacacaaatcttacaaggtctaaccacagccatagccagctttcagcataatgcgcatggaaatggccaccctcacgtgggcaacaatagatccaagctgacagactttctgaggtcacgtccaccaaagttctctcagaccgtcgagcccgtcgaggctgacgattggttgaaagatgttgatagaaaactcaacttagtgcagtgtactcctgttgagaagacgctctacgcctctcaccagctaagaggacctgccgcagattggtgggagaattactgcaatgcacaccctgaacccactaacattgcttgggatgagttcgctacggctttccgtgcagctcatgtgcctgaaagcactattgacatgaagaaagaagaatttaacagacttaagcaaggccacagcagtgtcaatgagtacctaagtcagttcaacaagttggctcggtacgcccctgaggaagtagacaccgataagaaaaagatcaggaaattcttgaaaggaatcgcagttggaatgagactccagttgcttgctcatgacttccccacttttcaacatatgatcaacaaagcacttctacttgaggatgccagaaaagaggccaccgaaaaatacaagaaacgcaagtctaaccatcagggaaattcttcccgaggcgcacctcgccctcgctacggtcaacccatgcaataccatcagtcgctcactcaggctaaccgccagccaggctacgcccctcgtcctcagataaaccgtccggcacctcagccacagaagcatgcccctagtggcaacactgcgccaaacagtgttacctccttcaagtcaccacagggaccgtcagcagttcagtgtttccggtgcaaccagatgggtcactatgctagacagtgtcctcagaatcctaccaacaccaactcagggcatgctaatggcagcaccgccagaactcctactccagcggcagctcagtctcgtcctagctctcaggcaagtggacaaggttctcgtgcttccaaccactttggtcgaggacgtgtgaatcacattcaagctgaaaccgctcaggatgctccagacgttgtgatgggtatgttctctgtcaactccgtacccgcaatagttctgtttgattcgggagcttcccattctttcatatcgcaagcttttgtgaaaagaaatggttggaaaacccaaaatttgcgtgtaccaatgatagtacattcccctggaaagaatataggggcaactcaaatatgcccggaagttaaccttagaattgaggaagttgacttcctagccaaaccgatagtcctagactcgcaaagcttgaacatcatccttgggatggattggttggctaagcacaaaggacagatagattgtgccgaaaagtccatcaccttgcaaggacctggaggaaagcaagtccgctttacccctaacacccctaccgcaagtcggtctatcctaacctgtttgcaagtcacctccttggagtcggtgcccatagtctgtgaatatcccgacgtatttccggaagaattaacaagaatgccaccagaccgagagatcgagttcgccatagaactggcaccaggcacagctccaattgcaaaaagaccctaccgaatggccgctaatgagttagcagaagttaaaagacaaatcgaagaactggaaagtaaaggagccccagtgcttctggttaagaaaaaggatggctctgagagaatggtaattgactatagagccctgaatgaagtaactataaagaacaagtacccgttgcctcggattgacgacttattcgatcaacttaaaggagcaagagtcttctcaaaaattgacttgaggtcaggttaccaccaactgaaaatcagatctgaagatattccgaagaccgctttctcgatgcgttatggtctatatgagttcacagtaatgtccttcggactcaccaatgctccagcattcttcatgaacttaatgaacaaaatctttatggaatacctggaccagtttgtcgtggtattcatcgatgacatcctgatatactctaagaacgaggaagaacatgctgaacacctgaggctgataatggaaaagctcagagatcatcaactattcgctaaattctcgaaatgcgaattctggttggaccgagtagcatttcttggacacgtgatctcctccaacggtgacgaagtagatcccagcaaggttgaagctgtacttgcttggaacccgcccaagaatgtgtcagtgattcgcagcttcctcggcttagctagatattatcgaagattcattgaaggattctctaagctagccagacctatgaccgagctgttaaagaaggaaaagaaatttcaatggtctacagcctgtgaagacagctttcaagaaatgaagaaaagattgaccactgccccagttctcaccttgccagatatccgaaaagatttcgagatcttctgtgacgcatcaagacagggcttaggatgtgtcctaatgcaagaacgaaaggttgtggcctatgcatccaggcagctcaggcctcatgaagtcaattatcccacccatgatctcgagttggcagccgtgattcatgctcttaagatctggaggcactacttaataggaaacagatgtgaagtatacaccgatcacaaaagtcttaaatatatcttcacacagaccgagttaaatatgaggcagagaagatggttggaactaatcaaggattacgatcttggaatccactatcatcctggtaaagccaacgtggtcgctgatgcgctaagtcgcaaggcctattgcaatgtagctcaaatacggcctgaccaagatcatctgtgcagagaattggagaagttaaggctgaccgtggtacagtcaggagtcccagccagcttgacagtacagcctaccctagagtcgcaaatccgggaggctcagaaagatgacgaagggataaaagagttaataaaaagaatacaggagaagaaagacaccaatttctccatagacgatcaaggcacagtttggtgcggttcacgcatctgtgtaccggccaagaaggagttaagagatctcatcctaaaggaagctcatgagtccgcttactccattcatccaggaagtacgaagatgtaccaggatatcaaggcatacttttggtgggctggaatgaagcgagatgtcgctgaatacgtagccttgtgtgacatttgccaaagagtcaaggcagagcatcagaggccagctggtctgctgcaacccctaccgattcccgagtggaaatgggaagagatcggaatggatttcatcaccggtttgccaagaacccccagcgggtacgactccatttgggtaatcgtggaccgactcacgaaatcagctcatttcgtgccagtgaaaaccacctatgatggaaagaaactggcagaactctacatgacccatgtcgtatgtagatttggctgccccaagaaaattgtgtcagaccgaggcactcagttcacctcaaggttctggaagcagttgcatgaagccctcgggactgatctaaactttagtacagcctaccatccgcagaccgatggtcagacagaaagggtaaaccaaatcctagaagacatgctgcgtgcgtgtgccttggatttcgaaggcacttgggatcgttgtttgccgtatgccgagttctcttacaacaacagttatcaggccagcattcagatgtcaccgaatgaggcaatgttcggaagaaagtgccgtacccccttgtgctggaacgaggtgggcgaagccctggtattcggtcctgacatactcaagtcagcagaagaacaagttaagctaatccgagaacgattaaagacagcgcaggaccgtcagaagaattacgctgacaatcggaggcgtgaccttgagttcgaaaaaggagatcatgtatacctgcgggtatcacccctccgtggtatgagaaggtttgggatgtccggcaagttagcaccccgctacatcggcccctacctcataaccgccagacgtggcgaagtggcttatcagcttgagctacctgaaggtctcgcagatgtgcacaacgtgttccacgtatcccagttaaagaaatgtcttcgagttccagaagagcaagttcccctgggtaatatcgagctggaaaagaatctgacctacaaggaaagaccgatcaaggttcttgaagaagcagaacgtcagactcgaaggaagacaatcaagttctacaaagtccaatggagcaatcattctgaagatgaagcaacctgggaacgagaagatcttctccgcgccaagtttccggagctgctcccttag

SEQ ID NO: 23380 - DNA, 5559 bp, Oryza sativa
  Clone ID: TF_OsC1517_1674
ctaagggagcagctccggaaactcggcgcggagaagatcttctcgttcccaggttgcctcatcttcagaatgattgctccattggaccttgtagaacttgatggtctttcttcgagtctgacgttctgcttcctcaagaaccttgatcggtctttccttgtaggtcagattcttttccagctcgatgttacccaggggaacttgctcttctggaactcgaagacatttctttaactgggatacgtggaacacgttgtgcacatctgcgagaccttcaggtagctcaagctgataagccacttcgccacgtctggcggttatgaggtaggggccgatatagcggggtgctaacttgccggacatcccaaaccttctcattcctcggagtggtgatacccgtaggtacacatgatctcctttttcgaactcaaggtcacgcctccgattgtcagcgtaattcttctgacggttctgtgctgtcttcaaacgttctcgtatcagcttaacttgttcttctgctgacttgagtatgtcaggaccgaataccaaggcttcgcccacctcattccagcacaagggagtgcggcaccttcttccgaacattgcctcattcggcgacatctgaatgctggcctgataactgttgttgtatgagaactcggcatacggcaaacaacgatcccaagtgccttcgaaatccaaggcacatgctcgcagcatgtcttctaggatctggtttactctttctgtctgaccatcggtctgcgggtggtaggccgtactaaaattcagatcagttccgagtgcttcatgcaattgcttccagaaccttgaggtgaactgagtgcctcgatccgacactattttcttgggacagccaaatctacatacgacatgagtcatgtagagttctgctagtttctttccatcataggtggtcttcactggcacgaaatgtgctgacttcgtgagtcggtccacgattacccaaatggagtcgtatccgctgggggttcttggcaaaccggtgatgaaatccattccgatctcttcccatttccactcgggaatcggtaagggttgtagcagtccagctggcctttggtgttctgccttgactctttggcaaatgtcacacagggctacgtattctgcgacatctcgtttcattccagcccaccagaagtatgccttgatatcttggtacatcttcgtacttcctgggtgaatggagtaggcggactcatgagcttcctttaggatgaggtctcttaactccttcttggccggtacacagatgcgtggaccgtaccaaactgtgccttgatcgtctatggagaagttggtgtctttcttctcctgtattctttctattaactcttttatcccttcgtcttctttctgtgcctcccgaatttgcgattctagggtaggctgtactgtcaagctggcagggactcctgactgtaccacggtcagccttaacttctccaattctctgcacagttgaccttggtcaggccgtatttgagctatattgcaataggccttgcgacttagcgcatcagcgaccacgttggctttaccaggatgatagtggattccaagatcgtaatccttgattagttccaaccatcttctctgtctcatatttaactcggtctgagtgaagatatacttaagacttttgtgatcggtgtatacttcacatctgttcccgattaaatagtgcctccagatcttaagagcatgaatcacggctgccaactcgagatcatgggtggggtaattgacttcatgaggcctgagctgcctggatgcataggccacaacctttcgttcttgcattaggacacatcctaagccctgtcttgatgcatcacagaagatctcgaagtcttttcggatatctggcaaggtgagaactggggcagtggtcaatcttttcttcatttcttgaaagctgtcttcacaggctgtggaccattgaaatttcttctccttctttaacagctcggtcataggtctggctagcttagagaatccttcaatgaatcttcgataatatccagctaagccgaggaagctgcgaatctctgacacattcttgggcgggttccacgcaagtacagcttcaactttgctgggatctacttcgacaccgttggaggagatcacgtgaccaagaaaagctactcggtccaaccagaattcgcatttcgagaatttagcgaatagttgatgatctctgagcttttccattatcagcctcaggtgttcagcatgttcttcctcgttcttagagtatatcaggatgtcatcgatgaataccacgacaaactggtccaggtattccataaagattttgttcattaagttcatgaagaatgctggagcattggtgagtccgaaggacattactgtaaactcatatagaccataacgcgtcgagaaagcggtcttcggaatatcttcagatctgattttcagttggtggtaacctgacctcaagtcaatttttgagaagactcttgctcctttaagttgatcgaataagtcgtcaatccgaggcaacgggtacttgttctttatagttacttcattcagggctctatagtcaattaccattctctcagagccatcctttttcttaaccagaagcactggggctccccaaggggatgagctaggtcgcacataacctttactttccagttcttcgatttgtcttttaacttctgctaattcattagcggccattcggtagggtctttttgcaattggagctgtgcctggtgccagttctatggcgaactcaatctctctatctggtggcattcttgttaattcttccggaaatacgtcgggatattcacagactatgggcaccgactccaaggaggtgacttgcaaacaggttaggatagaccgacttgcggtaggggtgttaggggtaaagcggacttgctttcctccaggtccttgcaaggtgatggacttttcggcacaatctatctgtcctttgtgcttagccaaccaatccatccctagaatgatgtccaagctttgcgagtctaggactatcggtttggctaggaagtcaacttcctcaattctaaggttaacttccgggcatatttgagttgcccttatatttcttccaggggaatgtactatcattggtacacgcaaattttgggttttccaaccatttcttttcacaaaagcttgcgatatgaaagaatgggaagctcctgaatcaaacagaactattgcgggtacggagttgacagagaacatacccatcacaacgtctggagcatcctgagcggtttcagcttgaatgtgattcacacgtcctcgaccaaagtggttggaagcacgggaaccttgtccacttgcctgagagctaggacgagactgagctgccgctggagtaggagttctggcggtgctgccattagcatgccctgagttggtgttggtaggattctgaggacactgtctagcatagtgacccatctggttgcaccggaaacactgaactgctgacggtccctgtggtgacttgaaggaggtaacactgtttggcgcagtgttgccactagggcatgcttctgtggctgaggtgccggacggtttatcgtagcgagggcgaggtgcgcctcgggaagaatttccctgatggttagacttgcgtttcttgtattcttcggtggcctcttttctggcatcctcaagtagaagtgctttgttgatcatatgttgaaaagtggggaagtcatgagcaagcaactggagtctcattccaactgcgattcctttcaagaatttcctgatctttttcttatcggtgtctacttcctcaggggcgtaccgagccaacttgttgaactgacttaggtactcattgacactgctgtggccttgcttaagtctgttaaattcttctttcttcatgtcaatagtgctttcaggcacatgagctgcacggaaggcagctgcaaactcatcccaagcaatgttagtgggttcaggatgtgcattgcagtaattctcccaccaatctgcggcaggtcctcttagctggtgagaggcgtagagcgtcttctcaacaggagtacactgcactaagttgagttttctatcaacatctttcaaccaatcgtcagcctcgacgggctcgacggtctgagagaactctggcggtcgagacctcagaaagtccgtcagcttggatctgttgttgcccacgtgagggtggccatttccatgcgcattatgctgaaagctggctatggctgtggttagaccttgcaggatttgtgtctgaactgccattatgtgttgcatgttgttttccacatgaggtggggaagggaggcgttctcctccagaattgtgactggcagtgtggtgagagcggtgagactgctccaactctgcttcacgggaaactgtgcgatgcgagcggttgctgcggcgaggttgctcaacctctgcgtcgcgggaaacagtacggtgcgaacggttgctgtggtgagaatgctcattagctggttcgtgatttgcttctgcttcaactctaccatcatcaaaaccaaagcggactggtgcacgagctgtacgacgggggcggctagccatctgatacaacgggtgtggactagtcacagagctacgccgagcttgactgtgcgcacacctcctaggagaaccagactgtcgagggccggcagcagcacgggccgctggcggtgggggagctgggtggcggaaacggaacacggtggaagaaccaacaacacgcttccgcgcagtgcggataaagcgtgggccacggcgggaggaagcgactggagtgtgtccgggggtgtaggaagggctaactgggtgtgggtagggggagtacactggtgagtacggtgcacgcgagctgggggagcgcgggccactgggtgtgcgagcagagccgcgggagctgtgggaggacaggtggctggcgtggcagagacggcctgagtcccaagagatagtgtcaactgaggtgacaccctcctcggccagacgggcctccaaggcggcgtagcggcgggcaagggaacggtaagcctcaaggagtaggtcgtgctgagtggcctgagcctccgaaagctcgaccatgcgagtcagcactggctgagactcgctgtacggacaagggtacctggcgtctgagtggccagaaggaagacgtggaagctgccggaaggcggagcctccgagacggtggccgtagtcgtgggccaggcggcgaagcgcagtccaggagaggtcctggtacgcgatctggagagtgggcctggccacagtgaagtggtgagggcgaaggccaactccgtgtatacctccacgagggtaaaggtacacagagagctcacagtgagggggaacacggtccacggagtaccccgtgtactcgggacacgagaagccaaggaaacgggcgaggtcacgaagctgggcgacgtggtgaccctcaccaaaaccgtgggaactgaagctggcgttcactgccat

SEQ ID NO: 23381 - DNA, 6479 bp, Oryza sativa
  Clone ID: TF_OsC1517_1687
ctaagggagcagctccgggaactcggcgcggagaagatcttctcgctcccaggttgcctcatcttcagagtggttgctccattggactttgtagaacttaatggtcttccttcgagtctgacgtactgcctcttcaagaaccttgatcggtctttccttgtaggtcagattcttttccagctcgatgttacccagggggacttgttcttctggaactcgaagacatttctttaactgggatacgtggaacacgttgtgcacatctgcgagaccttcaggtaactcaagctggtaagccacttcgccacgtctggcggttataaggtaggggccgatgtagcggggtgctaacttgccggacatcccaaacctcctcataccacggagaggtgatacccgcaggtacacatgatctcctttttcgaactcaaggtcacgcctccgattgtcagcgtaattcttttggcggttctgcgctgtctttaaacgttctcggatcagcttaacttgttcttctgctgccttgagtatgtcaggaccgaataccagcgcttcgcccacctcattccagcacaagggggtgcggcactttcttccgaacattgcctcattcggcgacatctgaatactggcctggtaactgttgttgtatgagaactcagcatacggcaaacaacgatcccaagtgccttcgaaatccagggcacacgcacgtagcatgtcttctaggatttggtttaccctttcggtctgaccatcggtctgcggatggtaggctgtactaaaatttagatcggttccgagagcttcatgcaactgtttccagaaccttgaggtgaactgagtgcctcggtctgacacgatcttcttgggacagccaaatctacatacgacatgggtcatgtagagttctgctagtttctttccatcaaagatggttttcactggcacgaaatgagccgatttcgtgagtcgatccacgattacccagatggagtcgtacccgctaggggttcttggcaaaccggtgatgaaatacattccgatttcttcccatttccactcgggaattggtaggggctgtagcagaccagctggcctctggtgctctgccttgactctttggcaaatgtcacacaaggctacgtattctgcgacatctcgcttcattccagtccaccagaagtatgccttgatatcttggtacatcttcgtacttcctggatgaatggagtaggcggactcatgagcttcctttaggatgagatctcttaattccttcttggccggtacacagatgcgtggaccgcaccaaactgtgccttgatcgtctatggagaaattggtgtctttcttctcctgtattctttttattaactcttttatcccttcgtcgtctttctgagcttcccggatttgcgactctagggtaggctgtactgtcaagctggcagggacacctgactgtaccacggtcagcctcaacttctccaattctctgcacaggcgatcttggtcaggccgtatttgagctacattgcaataggccttgcgacttagcgcatcagcgaccacattagctttaccggggtggtaatgaattccaagatcgtaatccttgattagttccaaccatcttctctgcctcatatttaatttggtctgagtgaagatatacttaagacttttgtgatcagtgtatacttcacatctgttcccgattaaatagtgcctccagatcttaagagcatgaaacacggctgccaactcgagatcatgggtgggatagttgacttcatgaggcctgagctgcctgaatgcataggccacaacctttcgttcttgcattaggacacatcctaagccttgtcttgatgcatcacagaagatctcgaaatcttttcggatatctggcaaggtgagaactggggcagtggtcaaccttttcttcatttcttgaaagctgtcttcacaggctgcagaccagtgaaacttcttttccttctttaacagctcggtcataggtctgactagcttagagaatccttcaatgaatcttcgataatatccagctaagccaaggaggctgcgaatctctaacacgttcttgggcgggttccaagcaagtacagcttcaaccttgctgggatctacatcgacaccgttggaggagatcacgtgtccaaggaatgcttctcggtctaaccagaattcgcatttcgagaatttagcgaatagttgatgatccctgagcttttccattattagcctcaggtgttcagcatgttcttcctcattcttggagtatatcaggatgtcatcgatgaacaccacgacaaactggtccagtgtgaactcatatagaccataacgcgttgagaaagcagtcttcgggatatcttcagatctgattttcaattggtggtaacctgatcttaagtcaatctttgagaaaactcttgctcctttaagttgatcgaacaaatcgtcaatccgtggcaacgggtacttgttctttatagtcacttcattcagggctctatagtcgattatcattctctcagagccatccttcttcttaaccagaagcactggggctccccaaggggatgagctaggtcgcacataacctttactcttcaattcttcgatttgtcttttaacttctgctagctcattggctaccattcggtagggtctttttgcaattggtgcggtgcctggtgccagttctatggcgaactcaatctctcggtctggtggcatactcgttaattcttctggaaatacgtcgggatattcacagactacgggcaccgactccaaggaggtgacttgtaaacaggttaagatagaccgacttgcggtaggggtgttagaggtaaaacggacttgctttcctccaggtccttgcaaggtgatggacttttcggcacaatctatctgtcctttgtgcttagccaaccaatccatccctaggatgatgtccaagctttgcgagtctaggactatcggtttggctaggaagtcaacttcctcaattctaaggttaacttccgggcatatttgagttgcccttatattcctcccaggggaatgtactatcattggtacacgtaaattttgggttttccaaccatttcttttcacaaaagcttgtgatatgaaagaatgggaagctcctgaatcaaacagaactattgcgggtacggagttgacagagaacatacccatcacaacgtctggagcatcctgagcggtctcagcttgaatgtggttcacccggcctcgaccaaagttgttggaagcacaagtaccttgtccacttgcctgagagctaggacgagactgagctgccgctggagtaggagttctggcagtgctgccattagcatgccgtgagctggtgttggtaggattctgagggcactgtctggcatagtggcccatctggttgcaccggaaacactgaacagctgacggtccttgcggtgacttgaaagaggtaacactgtttggcgcagtattgccactaggggcacgctgctgtggctgaggtgccggacggttcatttgaggacaaggggcgtagcctggctggcggttagcctgagtgaccgactggtggtattgcatgggttgaccgtagcgagggcgaggtgcgcctcgggaggaatttccctgatggttagacttgcgtttcttgtattcttcggtagcctcttttctggcatcctcaagtagaagtgccttgttgatcatatgttgaaaagtggggaagtcgtgagcaagcaactggagtctcattccaaccgcgattcctttcaagaatttcctgatcttcttcttatctgtgtccacttcctcaggggcgtaccgagccaacttgttgaacatacttaggtactcattgacactgctgttgccttgcttaagtttgttgaattcctctttcttcatgtcaatggtgctttcaggcacatgagctgcacggaaagccgtagcaaactcatcccaagcaatgttagtgggttcagggtatgcattacagtaattctcccaccaatctgcagtaggtcctcttagctggtgagaggcgtagagcgtcttctcaaccggagtacactgcaccaagttgagttttctatcaacatctttcagccaatcgtcagcctcgacgggctcgacggtctgagagaactctggcggacgagacctcagaaaatctgtcagcttggatctattattgcccatgtgagggtggccatttccatgcgcattgtgctgataaccggctacggctgcggctaatccttgcaagatttgtatctgaactgccattaagtgctgtcgagggccggcagcagcacaggccgctggcggtgggggagctgggtagtggaaacggaacacggtggaagaaccaacaacacgcttccgcgcggtgcggataaagcgtgggccacggcgggaggaagcaactggggtgtgtccgggggtgtaggaggggctaactgggtgtgggtagggggagtacactggtgagtacggcgcacgcgagctaggggagcgcgggccactgggagtgcgggcagagccgcgggagctgtgggaggacaggtggctggcgtgacagaggcggcctgagtcccaagagacagtgtcaactgaggtgacaccctcctcggccatatgggcctccagagcggcgtagcggcgggcaagggagcggtaagcctcaaggagtaggtcgtgctgagtggcctgagcctccgaaagctcaaccatgcgagtcagcactggctgagactcgctgtacggacaagggtacctggcgtctgcgtggccagaaggaaggcgtggaagctgccggaaggcggagcccccgagacggtggctgtagtcgtgggccaggcgacgaagcgcagtccaggagaggtcctggtacgcgatctggagagtgggcctggccacagtgaagtggtgtgggcgaaggccagctccgtgtatacctccacgggggtaaaggtacacagagagctcacagcgagggggaacacggtccacggagtaccccgtgtactcgggacacgagaagccaaggaaacgggcgaggtcacgaagctgagcgacgtggtgaccctcaccaaaaccgtgggagctgacgcttgcgttcactgccatctgtaaattgataccagacccaggaaacagtgctggtatcataggaagacagattatcacagcaacagaggtctctttattatagagtagaggtacagtcatgttgggctgcggacagatcccgagctcacaactgcattacaaaagggaaagcggaagccaagacttggaccaatcatcacaggcgcgacttgggaactagaccgaaaccctaaaactcatcgtagccgacttgctcctggaagaactcctcgtcagcgggatccacttcatcttcttcagcaaccggatcacccagcccgtgcagaacggccacgtttggagaccttgaggctttcatgacaaggcatttcgaaagccgacacaggttcactatatgccaacgagaggggtcccagaccgacatcaggttaggtcccagaccatgctctaagtatgccattagatagatctcgagatttgaggatttttggaagttgaacggagtcaatcggatgtacggttgagaagatattgaatttctaagattattggatttttgatcttgcatggtcccgagtgggacccgcttgttggcggctcggctcaccgtgagcggggagcaggcagcgcggcggctcgcggtggaccgcgcgcgcgagcggggcagaggggagcggcggaccggggttagcttgactcggtcgcggccaaggtggcaccgacgtggcgtctacgtggctgggcggacggcggcggcgagcggcggggagatcgggaggttgcacgggacgaggggagacgagctaatggctcggattcgccggagaaagctcgacggcagcagattgcggcggcggcaaccggcggcgagaaaagagggaaacggcgacgacgcgactagggttcgattcctccggactagagcatctacgcggtcaccggagtccattcctcgcatcggattgagcggagctacaacgagggaggccggcgatgagaggcgctcgagtggcactaggcgagggagcttcgaggggaagggatgggctcacgggcgcggggtcaaacggcatgggcgatggctggcgcggctgctcctctgcgtccatggcgctcgagccatgtcgatttggggagggagagagatgggagcgagaggcgctgcctcccgattttggacggacgcgggcggcgcggctcgggcacgcgcgctggcttgcggggccgagcggcagcgcggccacgggcacggcagggcagcggggcttaggcgcggcacgggcggcgaccgcgcgggcgcgcgtgcgcgaggc

SEQ ID NO: 23382 - DNA, 4629 bp, Oryza sativa
  Clone ID: TF_OsC1517_1697
atggcagtgaacgccagcttcagttcccatggttttggtgagggtcaccacgtcgctcagcttcgtgacctcgcccgtttccttggcttctcgtgtcccgagtacacggggtactccgtgggccgtgttccccctcactgtgagctctctgtgtacctctacccccgtggaggtatacacggagctggccttgcccacaccacttcactttggccaggcccactctccagatcgcgtaccaggacctctcctggactgcgcttcgtcgcctggcacacgactacagccaccgtctcgggggctccgccttccggcagcttccacgccttccttctggccactcagacgccagctcgtgcgccagcccgctttggttttgaagatggtagagccgagccagaagtaaatcatgagcagtctccccacagcaaccgttcgcaccgtactgcttcccgcaacgcagaagttgagcaaccccgccgcagcaaccgctcgcatcgcacggcttcctgtgatgcagagatggaacagtctcaccgctctcaccacactgccagtcacaattctggagaagaactcctcccttccccacctcatgtggaaaacaacatgcagcacttaatggcagttcagacacaaatcttgcaaggattagccgcagccgtagccggttttcagcataatgcgcatggaaatggccaccctcacatgagcaacaatagatccaagctgacagattttctgaggtctcgtccgccagagttctctcagaccgtcgagcccgtcgaggctgacgattggctgaaagatgttgatagaaaattcaacttagtgcagtgtacccctgttgagaagacgctctacgcctctcaccagctaagaggacctgctgcagattggtgggagaattactgcaatgcacaccctgaacccactaacattgcttgggatgagtttgctacagctttccgtgcagctcatgtacctgaaagcaccattgacatgaagaaagaggaattcaacagacttaagcaaggcaacagcaatgtcaatgagtacctaagtcagttcaacaagttggctcggtatgcccctgaggaagtggacacagacaagaagaagatcaggaagttcttgaagggaatcgcagttggaatgggactccagttgcttgctcatgacttccctacttttcaacatatgatcaacaaggcacttctacttgaggatgccagaaaagaggctaccgaagaatacaagaaacgcaagtctaaccatcagggaaattcttcccgaggcgcacctcgccctcgctacggtcaacccatgcaataccatcagtcggtcactcaagctaaccgccagccaggctacgcccctcgtcctcagatgaaccgtccggcaccccagccacagcagcgtgcccctagtggcaatactgtgccaaacagttttacctctttcaagtcaccgcagggaccgtcagcagttcagtgtttccggtgcaaccagatgggtcactatgctagacagtgccctcagaatcctaccaacaccagctcagggcatgctaatggcagcactgctagaactcctactccagcggcagctcagtctcgtcctagctcccaggcaagtggacaaggttctcatgcgtccaacaactttggtcgaggcggagcgaaccacattcaagccgagactgctcaggatgctccagacgttgtgatgggtatgttctctgtcaactccatacccgcaatagttctgtttgattcaggagcttcccactccttcatatcacaagcttttgtgaaaagaaatggttggaaaacccaaaatttacgtgtaccgatgatagtacattcccctgggagggatataagggcaactcaaatatgcccggaagttaaccttagaattgaggaagttgacttcctagccaaaccgatagtcctagactcgcaaagcttggacatcatcctagggatggattggttggcaaagcacaaaggacagatagattgtgccgaaaagtccatcactttgcaaggacctggaggaaagcaagtccgctttacctctaacagtcctaccgcaagtcggtctatcttaacctgtttacaagtcacctccttggagtcggtgcccatagtctgtgaatatcccgacgtatttccagaagaattaacgagtatgccaccagaccgagagattgagttcgccatagaactggcaccaggcaccgcaccaattgcaaaaagaccctaccgaatggcagctaatgagttagcagaagtcaaaagacaaatcgaagaattggagagtaaaggttatgtgcgacctagctcatccccttggggagccccagtgcttctggttaagaaaaaggatggctctgaaagaatgtttgtcgtggtgttcatcgatgacatcctaatatactccaagaatgaggaagaacatgctgaacacctgaggctaataatggaaaagctcagggatcatcaactattcgctaaatttttgaaatgcgaattctggttagaccgagtagcattccttggacacgtgatctcctccaacggtgtcgaagtagatcccagcaaggttgaagctgtacttgcttggaacccgcccaagaatgtgtcagagattcgcagcttccttggcttagccggatattatcgaagattcatcgaaggattctctaagttagccagacccatgaccgagctgttaaagaaggaaaagaaatttcaatggtctgcagcctgtgaagacagctttcaagaaatgaagaaaaggttgaccactgccccagttctcaccttgccagatatccgaaaagatttcgagatcttctgtgatgcatcaagacaaggcttagaatgtgtcctaatgcaagaacgaaaggttgtggcctatgcatccaggcagctcagacctcatgaagtcaattatcccacccatgatctcgaattggcagccgtggttcatgctcttaagatctggaggcactatttaatcgggaacagatgtgaagtatacaccgatcacaaaagccttaagtacatcttcacacagacggagttaaatatgaggcagagaagatggttggaactaatcaaggattacgatcttggaattcattaccacccctgtaaagccaacgtggtcgctgatgcgctaagtcgcaaggcctattgcaatgtagctcgaatacggcctgaccaagatcgcctgtgcagagaattggagaagttgaggctgaccgtggtgcagtcaggtgtccctgccagcttgacagtacagcctaccctagagtcgcaaatccgggaagctcagaaaaacgacgaagggataaaagagttaataaaaagaatacaggagaagaaagacaccaatttctccatagacgaccaaggcacagtttggtgcggtccacgcatctgtgtaccggccaagaaggaattaagagatctcatcctaaaagaagctcatgagtccgcctactccattcatccaggaagtacgaagatgtaccaagatatcaaggcatatttctggtgggctggaatgaagcgagacgtcgcagaatacgtagccttgtgtgacatttgccaaagagtcaaggcagagcatcagaggcccgctggtctgctacagcccctaccaattcccgagtggaaatgggaagaaatcggaatggatttcatcaccggtttgccaagaacccctagcgggtacgactccatttgggtaatcgtggaccagctcacgaaaccggctcatttcgtgccagtgaaaaccacctatgatggaaagaaactagcagaactctacatgacccatgtcgtatgtagatttggctgtcccaagaaaattgtgtcagaccgaggcactcagttcacctcaaggttctggaagcagttgcatgaagccctcggaaccgatctaaactttagtacagcttaccatccgcagaccgatggtcagacagaaagaatgtcgccgaatgaggcaatgttcggaagaaagtgccgcacccccttgtgctggaatgaggtgggcgaagcgctggtattcggtcctgacatactcaaggcagcagaagaacaagttaagctaatccgagaacatttaaagacagcgcagaaccgtcagaagaattacgctgacaatcggaggcgtgaccttaagttcgaaaaaggagatcatgtgtacctgcgggtatcacccctccgtggtatgaggaggtttgggatgtccggcaagttagcaccccgctacatcggcccctacctcataactgccagacgaggcgaagtggcttatcagcttgagttacctgaaggtctcgcagatgtgcacaacgtgttccacgtatctcagttaaagaaatgtcttcgagttccagaagagcaagtccccctgggtaatatcgagctggaaaagaatctgacctacaagggaagaccaatcaaggttcttgaagaggcagaacgtcaaactcgaaggaagaccatcaagttctacaaagtccaatggagcaaccattctgaagatgaggcgacctgggagcgagaagatcttctccacgccgagttcccggagctgctcccttag

SEQ ID NO: 23383 - DNA, 3208 bp, Oryza sativa
  Clone ID: TF_OsC2559_1
gcatcaaatcagcttgtgtaaccttggataagcaatacccatgaattgaataccactgcaaaattgcactcttgcagtatatactgcatgagttaaggtacatcctatgttacaaatgtacagccgtgagttcaatacgtaatcaaaattcatcagagttaaaaaaaaaatgtttctgtagttctgttgccgatatatactattttgttgctataaactatggctgtgtttggagctgccgttcttgtagctttggcagtgacttgtggcctcatctggtcgaggtcaagaaggctatcaaaggagatgagagacatccccggaacaatgggctggcctgtcgtcggcgagaccttctccttcatctccggcttctcgagccctgctggcattctgagcttcatgcgtgacagacagaagaggttcggcaaggtgttcaagacgtatgttcttgggaggatgacggtgttcatgacggggagggaggcggccaagatcctgctgtccgggaaggacggcgtggtgagcctgaacctgttctacaccggcaagcaggtgctcgggccgaccagcctcctcaccaccaacggcgacgagcacaagaagctgcgccgcctcatcggcgagccgctctccattgacgcgctcaagaagcacttcgacttcatcaacgacctcgccgtccagacgctcgacacctggctcgacaggagagtgcttgtgctcgaggaggcctcatctgtaattattaagctcttcacgctcaaggtgatcgccaacatgctgataagcttggagccagagggagaggagcaggagaagtttcgcgccaatttcaagatcatatcgtcttcgttcgcgtcgctgcctctcaagatcccaggaactgcatttcaccgtggcctcaagaaggccaggaaccggatgtacgcgatgctggactcggtgatcgccaggaggagggacggcggcgaggtccgcaacgacttcctccagacgctgctgcggaagcacgccaaggacggcaccgccgccgacgaggacgacggcggcggcggcggcgatcgagacgcggacaagctgacggacgcgcagctcaaggacaacatcctgacgctgctcgtcgccggccacgacacgacgacggcggggctgacgtggctcatcaagttcctcggcgagaacccggaggccctgcagaaactcagagtgatgaacgagacactgaggagagcgaccatcctgccatggttctcacgaaaagccgctcaggacttcagcattgatgggtacgagatcaagaaggggacgtcggtgaacctggacgtggtgtccatccaccatgacccgtccgtcttcgccgacccctacaagttcgatccaaacagattcgatgggacgttgaagccgtacagcttcctgggattcggcagcgggccgcggatgtgccccgggatgagcctggcgcgcctcgagatctgcgtcttcatccaccacctcgtctgcagatacagtactccagcaggcagccaagaaataaagcagcaggagctactccgtggcaaagtgacgaggaacagctacttcagtggcaaatgtgacaaagaacagcaaccacgtagcatcgctcagatattcaggtcgcttaaacatgatcacagcagggcagtaacaaggaatggcacaatccaagaagcaacacaacagcagcaactccggaagggccagggtcaatggaacaataaccaggtagcaaagccaatcagagtaacaaagaaacactatgcaaggcagcagtggccttcccacgctaaaccgcacatgatagattgatgccaacgaacaagccggtcataagactagaacaaatcgctgttaagacagtagtaaccaatccagaacaagagaacaaagaactcaaacaaacctgccaaaacaaaacaaacatttgagaacacctggtttacaatgagttgattaagaagagttaaagattacatggcaatttcccgtaaggttcagtagaatgcttcctctcccaagagaacagaaacaaaacaatttaccggtccaatcccacatatcccgtttccaaaggtgctatgccgcatgagcacaaccaacgtaacagagcatcaacaagtaatgtgacaaaaaccacctctcaagtctcaaccaagaaaagaatcacccaacagcatatcatgcatatatgtaggaccaagcgccaagcactatgaacaagtcatatgcctggcaacaagcaggaaacaataataagaatgtcagtaatacagtcgataataaagtagatgctttctcatggtacaccatagttctcaaactacatgaacacaaagttccagacacaaggaaacacagctcacaatagtagatagacttccatacctggatggaacatacttcttagagatttgataggccatcaatagggaccagaccggtcacgactgtaacggtcacccccacctccaccgtagccaccaccatctcgactacgaccagaataacggtcaccaccacggtcagatccataacggccgccaccgccaccaccaccaccgtacctatcatctcggccaccatatctatcacctctaccaccaccatctccagatgggcactctctagcaaagtggccaggttttccacacttgtagcaatccccaccaccacctgagccacgtggtgcacgcccaccaccaccaaagtcacggccacggtcataacgagatccacggtcacgatcataatcacggtctccattacggtctctaccaggtccttgtggctgagctttatcgacagtgatcgcccgcccatccaaatccaatccattcattccttcaatagcatcttccatggctttcttctcatcaaaggtcacaaagccaaaaccacgagaacggccagaatacttgtcaaaaaccacctttgcttcagtgaggttgccaaatttgccaaaggcatccttgaggctttcatcagttgtggaccatgacagattcccaatgaagcaacggtactcctccacgtccgccatctctgcgaggaagacgaaggcggcggcgaatcggatgctcttgccctcggtttggttcggaggtctagtatatagatcgaagggaagggagaagaagaccgccgcctttttttggggagggggaatttgggcatcccctcgtgc

SEQ ID NO: 23384 - DNA, 1528 bp, Oryza sativa
  Clone ID: TF_OsC359_6058
atgtcatggcacaaggccggtgtcctgctgctagggggctcaatcctgcctgcctgtcccggaggttccggccgtaggtggggttggatgtttaacagagaaaaagaaaagaatgtcagagggtatgcctccagtaactcaagttttcaactcaatccaccactggcctcaagagagttaacaagggcacacccttggtccattccgagcatgctgcttggttcacagctaccattggttggaagtcaagaccaaaatcagtatgtgtttgatcaagcatttgccacccaggtcaatgagcttccaatgccagaagagcatgtccccttttgtcatgattgtagagagcaaggacactatgccctgaattgtccatgggtatatgccaaagaagccccttcctttggtttagcagggcagacatcgctaaacccgcctcctcgcaccaagtcaagcttgcagcctagtgtgcaaggtagagagcccaatggagagaatccattgaatcccgagaattgctttcctcctagcctttcgtaccacgtggggtcacgtactaagcaagccaaaggcaagaagagtaagagtcagaagagaaaagcgccgatgcgaactaaagaagaagtacgtaagatgactattaccagcgccgaatggcctccagcagggataactattcctagacgtcaaagaggaaataccttccgaggtgcacgacggttgacccagcacctcctaagccatggtggcagagtatctgatcaagtctcctcggatgatgaagatgagtctccccgacatctcggcgaggaagagatggaatcaaaggcatgcacccgttgtggagaaattggacacgttgctagcatgtgtctcacactctgccttcattgtgaggaagaccatccacccgacaggtgtccaacgagcaggatcacttgtttcttttgtgaaggaactgatcatgtaccaaaagattgtcaatccagttttctgctgacgaagaagatggccaaccaacccgccagttccaacggagagaagcatcaaggcaacacaaatcctcgccaagattacagtttcagcctaactccagtgccaggacagaggaaccaaaatgagaaaagaaaatgccgagtccgggaagatatctgttgcttcaattgtcaaggaatgggtcatttcgccgacaagtgcccaaaaccgagaaacatagctgccagcacgtcagtccacgcaactccctgcaatcagaagcttgctcctcagcgaattgtcatccatgcatcccgaagcagtcctatagcccgcgttgcaacagctccaactccagcgagtgcattaccacaaggtgtcaatgctcaatttcagccccagccatcagttgacaagacagaggccagtatcggcattgtacctttggatgttccagcacagcagccaaagaaatcaagtacaagatgaagaacccgaacagaaacatgagataatgaatgagcttgataagcttatgaaggacccatgttaa

SEQ ID NO: 23385 - DNA, 1581 bp, Oryza sativa; identical to SEQ ID NO: 15511
  Clone ID: TF_OsC359_7004

SEQ ID NO: 23386 - DNA, 3810 bp, Oryza sativa
  Clone ID: TF_OsC1713_3645
atcaaattgatccaatgagaaatatgcaacagcagtagatgaattgtatggattgatttcggccgcacagccgaaacagacgtggtactcgtctcgacgaaacacagatgggtagattgcaaattcggctattaaagaggtgtcgcactctcgcagcggcggcggacggtttacggtgcaaaccgacaaagatggactaaacctgtggtctgaccggccctgtgaaggaaacccgtcactttctaaactttggcaattttcccctatttcgtccataggtgccaaatttgggtgtaaacagctggctaaggaacttgagaacaacaactgtgagttgctggacaagtttgtggcgggtggcattattgccaaattgccaccttcttgctcggactttgccacttgtctaaagcacaagagataagagttcagtgtttctgatctcattggctctttgggtgttgaggagaaggcgagggcaaaggacgtccagggcaaaaagattgagggaggttctagtgccaatatggtacagaagaagaaccctcaagcatcccacaacaacaagaaagtcaagcctgatgtcaaacccaaggctgcaaccaactttaagaagaaaggcaagggaaaggcaaagggagactgctttgtgtgtggcaagtctgggcattgggccaaggattgtcctgagcgcaaagacaggaagtctgctaacatggtcattagcgagggcggaggaacatcggggtacggtaaaatattacctacagttctctctgtttttcactcacctgattggtgggtggatactgtgctaatattcatgtatgtgctgacatttctctgttttcttcttatcaggtcgggagaggttcctccttgttgatgggaaacgggtcgcttgcggctgttcatggtgttggtacgatcgatctgaagtttacttcgggaaataccgtgcagctgaagaacgtgcagcatgtcccttcatatataaagaagaatcttgttagcggctctctattgtgtagagaaggttttagacttgtgtttgagtccaataaatgtgtcgtatctaaatatgagacttttgttggaaaaggttatgacagcggaggcttgtttcgctttgctttgaatgacatgtgtaataatcataatgctgtgaaccatattagcgagaatgatgagtctaatgtgtggcattcgcgactctgtcatgtgaatttcggttgtatgacgcgcttagctaacatgagtttaattccaaaattcactttggtcaaaggttccaagtgccatacttgtgttcaatcgaaacaacctcgtaagcctcacaaggcatctgaggcgaggaatttggcacctctagaacttgttcattccgatttgtgcgaaatgaacagcgtgttgactaaagggggaaagaaatatttcatgacactgacagatgattgcactagattttgctatgtgtatctattgaaaagaaaggatgaagcattgcattactttaaaatctataaagctgaggtagaaaaccaacttgaaaggaaaatcaaacggttgaggtctgatagaggtagggagtatttttccaatgagtttgcatccttttgcgaagagtttggaattattcatgagagaacgcctccctatttaccccaatcaaatggggtggccgaaagaaagaaccgtactctagctgagatagtgaatgctatgttagacactacggggctttgcaaggaatggtggggtgaggcagttttgactgcgtgttatgtcctgaataaaattccaatgaagcataagaaagtaacaccattcgaggaatgggaaaggaagaaattaaatctctcatacctacgaacatggggctgtttggccaaggtaaatgtacctatagccaaaaagcggaaacttggaccaaatactgttgattgtgtgttccttggttatgctattcacagtgtgggttatagattcttaatagtaaactctggagtacccgacatgcatgttggtacaatttttgagtccagagatgctatattctttgagaatgaatttcccatgaaacatacacctagcacttctagtcaagaaactgtcatgccccatgagcactttgcaccgatagaacacaatgatcaaacgcctaagaaaaatcctgaggaggacaacattgtagatactcgcaagagtaagagacaaagggttgcaaaatcctttggagatgactacattgtatacctcgttgatgacaccccaagaaccatagaagaggcatattcatctcctgacgctgactactggaaggaagcagtacgtagtgaaatggacccgattatgtctaatggtagttgggaagtcgttgagcgtccatatggctgcaagcccataggatgcaaatgggttttcaagaaaaagtttaggcctaatggtacaattgaaaagtacaaggcaaggcttgtgcccaagggttatacccaaaaggaaggcgaggacttctttgacatatactcaccagttgctcgcttgaccacgattcgagtactacttgctctggcagcctctcatggtcttctcgtccatcagatggacgttaagacagctttcctaaacggagagctggaggaggagatctatatggatcaactagacgggtatgtactagaaggtcgggagggaatggtgtgtaaactgttgaaatccttgtatggcatcaagcaagcacctaagcaatggcatgaaaagtttgacaccacgcttacatctgtaggctttgttgtgaacgtagttgacaaatgtatgtactatcgctatggtgggggagaaggagtgatcttgtgcttatatgtcgatgacatattgatctttgggatcagccttaatgtgattgaggaggtcaaggactatctgtccaagagttttgaaatgaaggatttgggagaggctgatgttatccttaacatcaaactacaaagaggagatgagggtgggattacacttgtgcaatcccactatgtggacaaggttttgagtcgctttggatatagtgactgcaagccagctcctactccttatgatcccagcgtgctattaagaaaaaaccgaagaatagtaagggatcaactgagatactctcaaatcattggttcattgatatacttggctagtgcaacgaggcctgacatctcatttgctgtaagcaagctgagccggtttgtctcaaatccgggagatgatcattggcaggctctggaaagagtaatgcgctatctaaagggcactatgagctatggaattcactataccgggtatccaaaagtactagaagggtatagtgactcaaactggatatctgatgctgatgagataaaagtcacaagtggatatgtgttcacacttggaggtggcgctgtttcctggaagtcttgcaagcagaccatcttaacgaggtcaacaatggaagtagaacttacagcactagatactgcgacagttgaggccgagtggcttcgtgaactcctgatggatttgtcggtggttgaaaaaccagtgccagctatcctaatgaactgtgataatcaaacagtgattattaaattgaacagttcaaaggacaacatgaagttatctaggcatatcaagagaagactgaaatctgtcagaaagtagaaaaactccggagtgatagcattggactatgtccaaacggctagaaatctggcagatcagtttaccaaggggctaccacgtaatgtgatagatagtgcatcgagggaaatgggcatgatacctacc

SEQ ID NO: 23387 - DNA, 2697 bp, Oryza sativa
  Clone ID: TF_OsC1713_3689
tcacagaacaaaaatgatcatctcaaaatccccaaatcggtaatctccaaatacatcataaattaatccggtgatgccgctgccgcctcccgcctcccctccggcagagaggacagcgccgcttgcacgccgcctaccgctgcccacccatccgcccgccacccgccttcttgcttcctgcagccgccttcctgccgccatcccctccgtctgcctctgcccgccacagccttcacggcgcgccgccgcgcgccactgcccgccaccgccatccccttcgcctgccgtcgcgcgccgctgcccgccgctgcccgccattgcgcgcacaagagatcggaaggagcagggcctccggaaccacaccttcgcctgatatctgcaccgggtaggcgggtgatcaggtttttggggagatcggaaggagcatggcctccggaacctcaccttcgcctgagatcttcgcctgatatctgcaccgggtaggcgggtgatcaggtttttggggagatcgaaaggagcatggcctccggaaccacaccttcgcctgagatctgcaccgggtaggcgggtgatcaggtttttggggagtgcttcccgcacgactgctcgtccaccatgtctgcgcctggagccggagctgccgccgccgccgctgctgctggagctggagatggcgtgcctggagctggagccggagccgttgcgaacgtcaacaccaacagaggcaattctgcctcacaatccagcggagggccattctcggggtatatccttctcctgctgttaactcattcgtttatagcgctgttagtcctgttagtcgcaagtcaattgcagcttttggggagtgcttcccgtacgattgctcgtccaccatgtatgcgcctggagccggagctgccgccggtgccactgctgctggagctagagatggcgcgcctggagctggagccggagctgttgcgaacgtcaacaccaacggaggcaattctgcctcacaatccaacggagggccattctcgggttggctttgctgctgcactgaaaccacatgcttttgatggttctaactataagagatggaaagcacgtgcactattgtggttgacagcgatgcaatgcttctatgtttcacggggcaaacaaagtgaaccacctctttctcctgaggaagaggctaagttcgaggcttcggattgcctgttccgtggagcattgatcagtgtactcgctgacaacatagtggacgtgtacatgcacatgccttctgggaaggacatgtgggatgcacttgaggccaaattcggagtttccgacgccggcagtgagctgtatgtcatggagcagttctatgactacaagattgtcgatgaccgttctgtagtagaacaagctcatgagattcagatgctggctaaggaacttgagaacaacaactgtgagttgccagacaagtttgtggcgggtggcattattgccaaattgccaccttcttggtcggacttggccacttctctaaagcacaagagacaagagttcagtgtttctgatctcattggctctttgggtgttgaggagaaggcgaggacaaaggacgtccggggcaaaaaggttgagggaggttctagtgccaatatggtacagaagaagaaccctcatgcatcccacaacaacaagaaagtcaagcctgatgtcaaacccaaggctgcaaccaactttaagaacaaaggcaagggaaaggcaaagggagactgctttgtgtgtggcaagtctgggcattgggccaaggactgtcctgagcgcaaagacaggaagtctgccaacatggtcattagcgagggcggaggaacatcggggtacggtcgggagaggttcctccttgttgatgggaaacgggtcgcttgcggctgttcatggtgttggttttgctatgtgtatctattgaaaacaaaggatgaagcattgcatttctttaagacctataaagctgaggtagaaaaccaacttgaaaggaaaatcaaacggttgaggtctgatagaggtggggagtatttttccaatgaatttgcatccttttgcgaagagtttggaattattcatgagaggacgcctccctattcaccccaatcaaatggggtggccgaaagaaagaaccgtactctaactgagatggtgaatgccatgttagacactgcagggctttctaaggaatggtggggtgaggcagttttgactgcgtgtcatgtcctgaataaaattccaatgaagcataaggaagtaacaccattcgaggaatgggaaaggaagaaattaaatctctcatacctacgaacatggggctgtttggccaaggtaaatgtacctatagccaaaaagcggaaacttggaccaaatactgttgattgtgtgttccttggttatgctattcacagtgtgggttataaattcttaatagtaaactctagagtacccgacatgcatgttggtacaattattgagtccagagatgctacattctttgagaatgaatttcccatgaaacatacacctagcacctctagtcaagaaactatcatgccccatgagcactttgcaccgatagaacacaatgatcaaacgcctgaggaaaatcctgaggaggacaacattgtagatactcgtaagagtaagagacaaagggttgcaaaatggagatga

SEQ ID NO: 23388 - DNA, 4086 bp, Oryza sativa; identical to SEQ ID NO: 15401
  Clone ID: TF_OsC1713_3856

SEQ ID NO: 23389 - DNA, 3414 bp, Oryza sativa
  Clone ID: TF_OsC1713_3861
atgtcgaacactggagacaaggagaaggagactcccgtcaacaccaacggaggcaatactgcctcaaactccagcggaggaccattcttggggtcattttcggtagttggctttgctgctacactgaaaccacatgcctttgatggttcaaactataagagatggaaagcacgtgcactattgtggttgacagcgatgcagtgcttctatgtttcacggggcaaacgaagtgaaccacctctttctcctgaggaagaggctaagttcgaggcttcggattgcctgttccgtggagcattgatcagtgtactcgctgacaacatagtggacgtgtacatgtacatgccttctgggaaggaaatgtgggatgcacttgaggccaagttcggagtttctgacgccggcagtgagctgtatgttatggagcagttctatgactacaagatggtcgatgaccgttctatagttgaacaagctcatgagattcagatgctggctaaggaacttgagaacaacaactgtgagttgccggacaagtttgtggcaggtggcattattgccaaactaccaccttcttggtcggactttgccacttctctaaagcacaagagacaagagttcagtgttcctgatctcattggctctttgggtgttgaggagaaggcgagggcaaaggacgtccggggcaaaaaggttgagggaggttctagtgccaatatggtacagaagaagaaccctcatgcatcccacaacaacaagaaagtcaagcctgatgtcaaacccaaggctgcaaccaattttaagaagaaaagcaagggaaaggcaaagggagactgctttgtgtgtggcaagtctgggcattgggccaaggactgtcctgagcgcaaagacaggaagtctgccaacatgatcattagcgagggcggaggaacatcggggtacggtaaaatattacctacagttctctctgtttttcattcacttgattggtgggtggacactggtgctaatattcatgtcgggagaggttcctccttgttgatgggaaacgggtcgcttgcggctgttcatggtgttggtacggtcgatctgaagtttacttcgggaaagaccgtgcagctgaagaacgtgcagcatgtcccttcaataaagaagaatctagttagcggctctctattgtgtagagaaggttttagacttgtgtttgagtccaataaatgtgtcgtatctaaatatgggacttttgttggaaaagattatgacagcggaggcttgttccgcttttctttgaatgacatgtgtaataatcataatgctgtgaaccatattagcgagaatgatgagtctaatgtgtggcattcgcgactctgtcatgtgaatttcggttgtatgacgcgcttagctaacatgagtttaattccaaaattcactttggtaaaaggttccaagtgccatacttgtgttcaatcgaaacaacctcgcaagcctcacaaggcatctgaggcgaggaatttggcacctctagaacttgttcattccgatttgtgcgaaatgaacggcgtgttgactaaagggggaaagaaatatttcatgacactgatagatgattgcactagattttgctatgtgtatctattgaaaacaaaggatgaggcattgcatttctttaaaatctataaagctgaggtagaaaaccaacttgaaaggaaaatcaaacggttgaggtctgatagaggtggggagtatttttccaatgagtttgcatccttttgcgaagagtttggaattattcatgagatgacgcctccctattcaccccaatcaaatggggtggccgaaagaaagaaccgtactctaactgagatggtgaatgccatgttagacactgcggggctttccaaggaatggtggggtgaggcagttttgactgcgtgtcatgtcctgaataaaattccaatgaagcataaggaaataacaccattcgaggaatgggaaaggaagaaattaaatctctcatacctacgaacatggggctgtttggccaaggtaaatgtacctatagccaaaaagcggaaacttggaccaaaaactgttgattgtgtgtttcttggttatgctatccacagtgtgggttatagattcttaatagtaaactctggagtacccgacatgcatgttggtacaattcttgagtccagagatgctacattctttgagaatgaatttcctatgaaatatacacctagcacttctagtaaagaaactgtcatgccccatgagcactttgcaccgatagaacacaatgatcaaacgcctgaggaaaatcctgaggaggacaacattgtagatactcgcaagagtaagagacaaagggttgcaaaatcctttggagatgactacattgtatacctcgtggatgacaccccaagaaccatagaagaggcatattcatctcctaacgctgactactggaaggaagcagtacgcagtgaaatggactcgattatgtctaatggtacttgggaagtcgttgagcgtccatatgggtgcaagcccgtaggatgcaaatgggttttcaagaaaaagcttaggcttgatggtacaatcgaaaagtacaaggcaaggcttgtggccaagggttatacccaaaaggaaggcgaggacttcttcgacacatactcactagttgctcgcttgaccacgattcgagtactactcgctctggcagcctctcatggtcttctcgtccatcagatggacgttaagacagctttcctaaacggagagctggaggaggagatctatatggatcaaccagacgggtatgtactagaaggtcaggagggaatggtgtgtaaactattgaaatccttgtatggcctcaagcaagcacctaagcaatgtcatgagaagtttgacaccacgcttacatctgcaggctttgttgtgaacgaagctgacaaatgtgtatgctatcgctatggtgggggagaaggggtgatcttgtgcttatatgtcgatgacatactgatctttgggaccagccttaatgtgattgaggaggtcaaagactatctgtccaagagttttgaaatgaaagatttgggagaggctgatgttattcttaacatcaaactacaaagaggagatgagggtgggattacacttgtgcaatcccactatgtggacaaggttttgagtcgctttggatatagtgactgcaagccagctcctactccttatgatcccagcgtgctattaaggaaaaaccgaagaatagcaagggatcagctgagatactctcaaatcattggttcattgatgtacttggctagcgcaacgaggcctgacatctcatttgctgtaagcaagctgagccggtttgtctcaaatccgggagatgatcattggtag

SEQ ID NO: 23390 - DNA, 3306 bp, Oryza sativa
  Clone ID: TF_OsC1713_4039
atgtctgcgcctggagccggagccgccggcgtggctgttggaggagatggcgtgcctggagctggagccggaggtggtgcgctaggagctagagccggtgccacgaacaacaacatcaacggaggcaattttgcctcacaatccagtggagggccattctcggggtatatccttctcctgttcctattgttagcgctttaccgctatgttcctgttcctgatattcatgatgcctttagcatgctagcgctttactgctatgttcctgttcctgatattcatgatgcctttagcgtgctactgcgttactgctatgttattcatgatgcctttagtatgctactggttatgttgtcactagattaccctacactgagatggaaagcacatgcactattgtggttgacagcgatgcaatgcttctttgtttcacggggcaaacgaagtgaaccacctctctctcctgaggaagaggctaagttcgaggcttcggattgcctgttccgtggagcattgatcagtgtactcgctgacaacatagtggacgtgtacatgcacatgccttccgggaaggacatgtgggatgcacttgaggccaagttcggagtttccgacgccggtagtgagctgtatgtcatggagcagttctatgactacaagatggtcgatgaccgttctgtagtagaacaagctcacgagattcagatgctggctaaggaacttgagaacaacaactgtgagttgccagacaagtttgtgcacaagagacaagagttcagtgtttctgatctcattggctctttgggtgttgaggagaaggcgagggcaaaggacaaccggggcaaaaagaagaagaaccctcatgcatcccacaacaacaagaaaatcaagcttgatgtcaaatccaaggctgcaaccaaatttaagaagaaatgcaagggaaaggcaaagggagactgctttgtgtgtggcaagtctgggcattgggccaaggactgtcctgagtgcaaagacaggaagtctgccaacatggtcattagcgagggcggaggaacatcggggtacggtaaaatattacctacagttctctctgtctttcactcacctgattggtgggtggatactggtgctaatattcatgcatgtgctgacatttctctgttttcttcttatcaggtcgggagaggttcctccttgttgatgggaaacaggtcgcttgcggctattcatggtgttggtacggtcgatctgaagtttacttcgggaaagaccatgcagctgaagaacgtgcagcatgtcccttcaataaagaagaatcttgttagcggctctctattgtgtagagaaggttttagacttgtgtttgaatccaataaatgtgtcatatctaaatatggaacttttgttggaaaaggttatgacagtggaggcttgttccgcttttctttgaatgacatgtgtaataatcataatgttgtgaaccatattagcgagaatgatgagtctaatgtgtggcattcgcgactctgtcatgtgaatttcggttgtatgacgctcttagctaacatgagtttaattccaaaattcactttggtcaaaggttctaagtgccatacttgtgttcaatcgaaacaaccttgcaagcctcacaagacatctgaggcgaggaatttggcacctctagaactcgttcattccgatttgtgcgaaatgaacggcgtgttgactaaagggggaaagaaatatttcatgacactgatagatgattgcactagattttgttatgtgtatctattgaaaacaaaggatgaagcattgcatttctttaagacctataaagctgaggtagaaaaccaacttgaaaggaaaatcaaactgttgaggtctgatagaggtggggagtattttttcaatgagtttgcatccttttgcgaagaatttggaattattcatgagaggacgcctccctattcaccccaatcaaatggggtggccgaaagaaagaaccgtactctaactgagatggtgaatgccatgttagacactgcggggctttccaaggaatggtggggtgaggcagttttgactgcgtgtcatgtcctgaataaaattctaatgaagcataaggaagtaataccattcgaggaatgggaaaggaagaaattaaatctctcatacctacgaacatggggctgtttggccaaggtaaatgtacctatagccaaaaagcggaaacttggaccaaatactgttgattgtatgttccttggttatgctattcacagtgtgggctatagattcttaatagtaaattctggagtacctgacatgtatgttggtacaattattgagtccagagatgctacattctttgagaatgaatttcccatgaaacatacacctagcacttctagtcaagaaactgtcatgccccatgagcactttgcaccgatagaacacaatgatcaaacgcctgaggaaaatcctgaggaggacaacattgtagatactcgtaagacctctcatggtgttctcgtccatcagatgaacgttaagacagctttcctaaacggagagctggaggaggagatctatatggatcaaccagacgggtatgtactagaaggctttgttgtgaacggagctgacaaatgtgtgtactatcgctatggtgggggagaaggagtgatcttgtgcttatatgtcgatgacatattgatctttgggaccaacctcaatgtgattgagggggtcaaggactatctgtccaagagttttgaaatgaaggatttgggagaggctgatgttattcttaacattaaactacaaagaggagatgagggtgagattacacttgtgcaatcccactatgtggacaagattttgagtcactttggatatagtggctgcaagccagcttctactccttatgatcccagcgtgctattaaggaaaaaccgaagaatagcaagggatcaactgagatactcccaaataattggttcattgatgtacttggctagtgcaacgaggcctgacatctcatttgctgtaagcaagctgagccggtttgtcttaaatccgggagatgatcattggcaggctctggaaagagtaatgcgctatctaaagggcattatgagttatggaattcactataccaggtatccaaaagtactagaagggtatagtgactcaaactggatatctgatgctgataagataaaagccacaagtggatatgtgttcgcacttgaaggtggcactgtttcctggaagccttgcaagcagacggggatcctctag

SEQ ID NO: 23391 - DNA, 4314 bp, Oryza sativa; identical to SEQ ID NO: 15392
  Clone ID: TF_OsC1713_4055

SEQ ID NO: 23392 - DNA, 3381 bp, Oryza sativa; identical to SEQ ID NO: 15381
  Clone ID: TF_OsC1713_4266

SEQ ID NO: 23393 - DNA, 4116 bp, Oryza sativa; identical to SEQ ID NO: 15390
  Clone ID: TF_OsC1713_4346

SEQ ID NO: 23394 - DNA, 3255 bp, Oryza sativa; identical to SEQ ID NO: 15431
  Clone ID: TF_OsC1713_4393

SEQ ID NO: 23395 - DNA, 3561 bp, Oryza sativa; identical to SEQ ID NO: 15372
  Clone ID: TF_OsC1713_4437

SEQ ID NO: 23396 - DNA, 3381 bp, Oryza sativa; identical to SEQ ID NO: 15421
  Clone ID: TF_OsC1713_4451

SEQ ID NO: 23397 - DNA, 4149 bp, Oryza sativa
  Clone ID: TF_OsC1713_4689
atgtcgaacactggagacaaggagaaggagactcccgtcaacaccaacggaggcaatactgcctcaaactccagcggaagaccattcttggggtataaccttattacattatttcaattagaagttttactgttaatgttcatcgcaatgtcaacattgtgtcattatgtgattgttgatgcttattcaatgttaagcatgctcatgttgattacattcaccactatcactggatcaaatcctattgtaaatatcatgtttattatcttgttattttggattaaaatatgccgaattatgaccaaatttctaacaatccaaaaacctgataggtcattttcggtagttggctttgctgctacactgaaaccacatgcctttgatggttcaaactataagagatggaaagcacgtgcactattgtggttgacagcgatgcagtgcttctatgtttcacggggcaaacgaagtgaaccacctctttctcctgaggaagaggctaagttcgaggcttcggattgcctgttccgtggagcattgatcagtgtactcgctgacaacatagtggacgtgtacatgcacatgccttctgggaaggaaatgtgggatgcacttgaggccaagttcggagtttctgacgccggcagtgagctgtatgttatggagcagttctatgactacaagatggtcgatgaccgttctgtagttgaacaagctcatgagattcagatgctggctaaggaacttgagaacaacaactgtgagttgccggacaagtttgtggcaggtggcattattgccaaactaccaccttcttggtcggactttgccacttctctaaagcacaagagacaagagttcagtgttcctgatctcattggctctttgggtgttgaggagaaggcgagggcaaaggacgtccggggcaaaaaggttgagggaggttctagtgccaatatggtacagaagaagaaccctcatgcatcccacaacaacaagaaagtcaagcctgatgtcaaacccaaggctgcaaccaattttaagaagaaaagcaagggaaaggcaaagggagactgctttgtgtgtggcaagtctgggcattgggccaaggactgtcctgagcgcaaagacaggaagtctgccaacatgatcattagcgagggcggaggaacatcggggtacggtaaaatattacctacagttctctctgtttttcattcacctgattggtgggtggacactggtgctaatattcatgtcgggagaggttcctccttgttgatgggaaacgggtcgcttgcggctgttcatggtgttggtacggtcgatctgaagtttacttcgggaaagaccgtgcagctgaagaacgtgcagcatgtcccttcaataaagaagaatctagttagcggctctctattgtgtagagaaggttttagacttgtgtttgagtccaataaatgtgtcgtatctaaatatgggacttttgttggaaaaggttatgacagcggaggcttgttccgcttttctttgaatgacatgtgtaataatcataatgctgtgaaccatattagcgagaatgatgagtctaatgtgtggcattcacgactctgtcatgtgaatttcggttgtatgacgcgcttagctaacatgagtttaattccaaaattcactttggtaaaaggttccaagtgccatacttgtgttcaatcgaaacaacctcgcaagcctcacaaggcatctgaggcgaggaatttggcacctctagaacttgttcattccgatttgtgcgaaatgaacggcgtgttgactaaagggggaaagaaatatttcatgacactgatagatgattgcactagattttgctatgtgtatctattgaaaacaaaggatgaggcattgcatttctttaaaatctataaagccgaggtagaaaaccaacttgaaaggaaaatcaaacggttgaggtctgatagaggtggggagtatttttccaatgagtttgcatccttttgcgaagagtttggaattattcatgagatgacgcctccctattcaccccaatcaaatggggtggccgaaagaaagaaccgtactctaactgagatggtgaatgccatgttagacactgcggggctttccaaggaatgcataaggaaaacaccattcgaggaatgggaaaggaagaaattaaatctctcatacctacgaacatggggctgtttggccaaggtaaatgtacctatagccaaaaagcggaaacttggaccaaaaactgttgattgtgtgtttcttggttatgctatccacagtgtgggttatagattcttaatagtaaactctggagtacccgacatgcatgttggtacaattcttgagtccagagatgctatattctttgagaatgaatttcctatgaaatatacacctagcacttctagtaaagaaactgtcatgccccatgagcactttgcaccgatagaacacaatgatcaaacgcctgaggaaaatcctgaggaggacaacattgtagatactcgcaagagtaagagacaaagggttgcaaaatcctttggagatgactacattgtatacctcgtggatgacaccccaagaaccatagaagaggcatattcatctcctgacgctgactactggaaggaagcagtacgcagtgaaatggactcgattatgtctaatggtacttgggaagtcgttgagcgtccatatgggtgcaagcccgtaggatgcaaatgggttttcaagaaaaagcttaggcctgatggtacaatcgaaaagtacaaggcaaggcttgtggccaagggttatacccaaaaggaaggcgaggacttcttcgacacatactcaccagttgctcgcttgaccacgattcgagtactacttgctctggcagcctctcatggtcttctcgtccatcagatggacattaagacagctttcctaaacggagagctggaggaggagatctatatggatcaaccagacgggtatgtactagaaggtcaggagggaatggtgtgtaaactattgaaatccttgtatggcctcaagcaagcacctaagcaatggcatgagaagtttgacaccacgcttacatctgcaggctttgttgtgaacgaagctgacaaatatgtatactatcgctatggtgggggagaaggggtgatcttgtgcttatatgtcgatgacatactgatctttgggaccagccttaatgtgattgaggaggtcaaagactatctgtccaagagttttgaaatgaaagatttgggagaggctgatgttattcttaacatcaaactacaaagaggagatgagggtgggattacacttgtgcaatcccactatgtggacaaggttttgagtcgctttggatatagtgactgcaagccagctcctactccttatgatcccagcgtgctattaaggaaaaaccgaagaatagcaagggatcagctgagatactctcaaatcattggttcattgatgtacttggctagcgcaacgaggcctgacatctcatttgctgtaagcaagctgagccggtttgtctcaaatccgggagatgatcattggcaggctctggaaagagtaatgcgctatctaaagggtactatgagctatggaattcactataccgggtatccaaaagtactagaagggtatagtgactcaaactggatatctgatgctgatgagataaaagccacaagtggatatgtgttcacacttggaggtggcgctgtttcctggaagtcttgcaagcagaccatcttaacgaggtcaacaatggaagcagaacttacagcactagatactgcgacagttgaggccgagtggcttcgtgaactcctgatggatttgccggtggttgaaaaaccagtgccagctatcctaatgaactgcgataatcaaacagtgattattaaagtgaacagttcaaaggacaacatgaagtcatctagacacatcaagagaagactgaaatctgtcagaaagcagaaaaactccggagtgatagcattggactatgtccaaacggctagaaatctggcagatcagtttaccaaggggctaccacgtaatgtgatagacagtgcatcgagggaaatgggcttgatacccacctaa

SEQ ID NO: 23398 - DNA, 5357 bp, Oryza sativa
  Clone ID: TF_OsC1713_4708
atggtgtgtggcaagctcgtggtcatcgagttcggtgcatcctggtgtgaaccttcacgcaggatcgctccagttttcgctgagtacgccaaggagttcgctggagtagttttcctgaagttcgatatcgatgagctggaggaaattgcagactcgtatgatgtcaacggagtagtacccaccttcaccttcgtcaaggctgggcagaagattgacatgatccaaggagccagatatagagagggcctggcggtcaccgggaaattcttcccgggtgcgcacgagagacgttcccggcctgggttgaccgacgaggacgtcggtgtcttaagggggagagaatgtgacatcccggctcagggcttaaagaggattaatagaatactcataccaacaagttgcaacttcttttccggaagccgatctcgaaagaactctaagctgccagatgtaacagggcccggcctcgagtgtggggcgtcacaccaggtctctccgttcgaagattcaaatgcacactgcttctccttacttcctgggttgcagctgctcaaggcagttgctgctacactcggaggggagaccatcttccaccacgaggcataccaacgcgatacatgaacaatggagaggacaaagagacacttggagaaggacttagagttatggaggatcatcaaggacgtccaagtcaaggtggagggccaaagcaagccaactttgagtgcaattcggagtccagaaccagtctacactaaaacgggcgtccagtataactgctgctctgctagtgctagcggctactgtggtgctgctccgcgcgccgccatggcgcctactgacggcttcgcgcagccgctccgcctgcagcctgccggcttccgcgcctgcggccgcctttgtttgctcttactcgccaccagacagctagctacggcgctgcagctcgaggcctcgagctcttgcgacttgcgtcggcgtcggctgctccagccgccaccagttgccagcgacagctcccacccggcggaggtggtacgccgccgccgacaggagctggtgcgccgccgccgacaggagctggtgcgccaggaggaggtgccgtgaacgactacaacaacggaggcaattctgcctcaccatccagcggagggccattctcggggtataatcttctcctcctgctactgctgttagcgctattcctgttcccattgttagcgctatactgtgtgcgctatgttcttgttcctattctacgtgatgcctctagcatgttatcgcgttactggtatgttcctgtttctgacattcatgatgcgcatagtatgctactggttatgttaagattaccctacactgcttatgccatgatcattgtttcaatttcttggattaaaatatgccgaataatgactatatttccaacaatccaaaaacctgataggtcattttcggtagttggctttgctgctgcactgaaaccacatgcttttgatggttcaaactataagagatggaaagcacgtgcactattgtggttgacagcgatgcagtgcttctatgtttcacggggcaaacgaagtgaaccacctctttctcctgaggaagaggctaagttcgaggcttcggattgcctgttccgtggagcattgatcagtgtactcgctgacaacatagtggacgtgtacatgcacatgccttctgggaaggacatgtgggatgcacttgaggccaagttcggagtttctgacgccggcagtgagctgtatatcatggagcagttctatgactacaagatggtcgatgaccgttctgtagtagaacaagctcatgagattcagatgctggctaaggaacttgagaacaacaactgtgagttgccggacaagtttgtggcgggtggcattattgccaaactaccaccttcttggtcggactttgccacttctctaaagcacaagagacaagagttcagtgttcctgatctcattggctctttgggtgttgaggagaaggcgagggcaaaggacgtccggggcaaaaaggttgagggaggttctagtgccaatatggtacagaagaagaaccctcatgcatcccacaacaacaagaaagtcaagcctgatgtcaaacccaaggctgcaaccaattttaagaagaaaggcaagggaaaggcaaagggagactgctttgtgtgtggcaagtctgggcattgggccaaggactgtcctgagcgcaaagacaggaagtctgccaacatgatcattagcgagggcggaggaacatcggggtacggtaaaatattacctacagttctctctgtttttcattcacctgattggtgggtggatactggtgctaatattcatgtatgtgctgacatttctctgttttcttcttatcaggtcgagagaggttcctccttgttgatgggaaacgggtcgcttgcggctgttcatggtgttggtacggtcgatctgaagtttacttcgggaaagaccgtgcagctgaagaacgtgcagcatgtcccttcaataaagaagaatctagttagcggctctctattgtgtagagaaggttttagacttgtgtttgagtccaataaatgtgtcgtatctaaatatgggacttttgttggtaaaggttatgacagcggaggcttgttccgcttttctttgaatgacatgtgtaataatcataatgctgtgaaccatattagcaagaatgatgagtctaatgtgtggcattcgcgactctgtcatgtgaatttcggttgtatgacgcgcttagctaacatgagtttaattccaaaattcactttggtcaaaggttccaagtgccatacttgtgttcaatcgaaacaacctcgcaagcctcacaaggcatctgaggcgaggaatttggcacctctagaacttgttcattccgatttgtgcgaaatgaacggcatgttgactaaagggggaaagaaatatttcatgacactgatagatgattgcactagattttgctatgtgtatctattgaaaacaaaggatgaggcattgcattactttaaaatctataaagctgaggtagaaaaccaacttgaaaggaaaatcaaacggttgaggtctgatagaggtggggagtatttttctaatgagtttgcatccttttgcgaagagtttggaattattcatgagatgacgcctccctattcaccccaatcaaatggggtggccgaaagaaagaaccgtattctaactgagatggtgaatgccatgttagacactgcggggctttccaaggaatggtggggtgaggcagttttgactgcgtgtcatgtcctgaataaaattccaatgaagcataaggaagtaacaccattcgaggaatgggaaaggaagaaattaaatctctcatacctacgaacatggggctgtttggccaaggtaaatgtacctatagtcaaaaagcggaaacttggaccaaaaactgttgattgtgtgtttcttggttatgctatccacagtgtgggttatagattcttaatagtaaactttggagtacccgacatgcatgctgctacaatttttgagtccagagatgctacattctttgagaatgaatttcttatgaaatatacacctagcacttctagtaaagaaactgtcatgctccatgagcactttgcaccgatagaacacaatgatgaaacgcctgaggaaaatcctgaggaggacaacattgtagatactcgcaagagtaagagacaaagggttgcaaaatcctttggagatgactacattgtatacctcgtggatgacaccccaagaaccatagaagaggcatattcatctcctgacgctgactactggaaggaagcagtacgcagtgaaattgactcgattatatctaatggtacttgggaagtcgttgagcgtccatatgggtgcaagcctgtaggatgcaaatgggttttcaagaaaaagcttaggcctgatggtacaatcgaaaagtacaaggcaaggcttgtggccaagggttatacccaaaaggaaggcgaggatttcttcgacacatattcaccagttgctcgcttgactacgattcgagtactacttgctctggcagcctctcatggtcttctcgtccatcagatggacgttaagacagctttcctaaacggagagctggaggaggagatctatatggatcaaccagacgggtatgtactagaaggtcaggagggaatggtgtgtaaactattgaaatccttgtatggcctcaagcaagcacctaagcaatggcatgagaagtttgacaccacgcttacagctgcaggctttgttgtgaacgaagctgacaaatgtgtatactatcgctatggtgggggagaaggggtgatcttgtgcttgtatgtcgatgacatactgatctttgggaccagtcttaatgtgattgaggaggtcaaagactatctgtccaagagttttgaaatgaaggatttgggagaggctgatgttattcttaacatcaaattacaaagaggagatgagggtgggattacacttgtgcaatcccactacgtggacaaggttttgagtcgctttggatatagtgactgcaagccagctcctactccttatgatcccagcgtgctattaaggaaaaatcgaagaatagcaagggatcaactgagatactctcaaatcattggttcattgatgtacttggctagcgcaacgaggcctgacatctcatttgctgtaagcaagctgagctggtttgtctcaaatccgggagatgatcattggcaggctctggaaagagtaatgcgctatctaaagggcactatgagctatggaattcactataccgggtatccaaaagtactagaagggtatagtgactcaaactggatatctgatgctgatgagataaaagccacaagtggatatgtgttcacacttggaggtggcgctgtttcctggaagtcttgcaagcagaccatcttaacgaggtcaacaatggaagcagaacttacagcactagatactgcgacagttgaggccgagtggcttcgtgaactcctgatggatttgccggtggttgaaaaaccagtgccagctatcctaatgaactgcgataatcaaacagtgattattaaagtgaacagttcaaaggacaacatgaagtcatctagacacatcaagagaagactgaaatctgtcagaaagcagaaaaactccggagtgatagcattggactatgtccaaacggctagaaatctggcagaccagtttaccaaggggctaccacgtaatgtgatagacagtgcatcgagggaaatgggcttgatacccacctaa

SEQ ID NO: 23399 - DNA, 4371 bp, Oryza sativa
  Clone ID: TF_OsC1713_4762
atgtctggagttgctgccgccgctattggcggaggtggagctgcgccgccgccgacgccgacaggagctggatccggagctggtgcgccaggaggaggtgccgtgaacgactacaacaacggaggcaattctgcctcaccatccagcggagggccattctcggggtataatcttctccttctactgctcatgttatcgcattactggtatgttcctgtttctgacattcatgatgcgcatagtatgctactggttatgttaagatcaccctacactgcttatgccatgatcatagtttcaatttcttggattaaaatatgccgaataatgactatatttccaacaatccaaaaacctgataggtcattttcggtagttggctttgctgctgcactgaaaccacatgcttttgatggttcaaactataagagatggaaagcacgtgcactattgtggttgacagcgatgcagtgcttctatgtttcacggggcaaacgaagtgaaccacctctttctcctgaggaagaggctaagttcgaggcttcggattgcctgttccgtggagcattgatcagtgtactcgctgacaacatagtggacgtgtacatgcacatgccttctgggaaggacatgtgggatgcacttgaggccaagttcggagtttctgacgccggcagtgagctgtatgtcatggagcagttctatgactacaagatggtcgatgaccgttctgtagtagaacaagctcatgagattcagatgctggctaaggaacttgagaacaacaactgtgagttgccggacaagtttgtggcgggtggcattattgccaaactaccaccttcttggtcggactttgccacttctctaaagcacaagagacaagagttcagtgttcctgatctcattggctctttgggtgttgaggagaaggcgagggcaaaggacgtccggggcaaaagggttgagggaggttctagtgccaatatggtacagaagaagaaccctcatgcatcccacaacaataagaaagtcaagcctgatgtcaaacccaaggctgcaaccaattttaagaagaaaggcaagggaaaggcaaagggagactgctttgtgtgtggcaagtctgggcattgggccaaggactgtcctgagcgcaaagacaggaagtctgccaacatagtcattagcgagggcggaggaacatcggggacggtcgggagaggttccttcttgttgatgggaaacgggtcgcttgcggctgttcatggtattgccaaaaagcggaaacttggaccaaaaactgttgattgtgtgttccttggttatgctatccacagtgtgggttatagattcttaatagtaaactctggtgtacccgacatgcatgctggtacaattcttgagtccagagatgctacattctttgagaatgagtttcctatgaaatatacacctagcacttctagtaaagaaactgtcatgccccatgagcactttgcaccgatagaacacgatgatcaaacgcctgaggaaaatcctgaggaggacaacattgtagatactcgcaagagtaagagacaaagggttgcaaaatcctttggagatgactacattgtatacctcgtggatgacaccccaagaaccatagaagaggcatattcatctcctgacgctgactactggaaggaagcagtacgcagtgaaatggactcgattatgtctaatggtacttgggaagtcgttgagcgtccatatgggtgcaagcccgtaggatgcaaatgggttttcaagaaaaagcttaggcctgatggtacaatcgaaaagtacaaggcaaggcttgtggccaagggttatacccaaaaggaaggcgaggacttcttcaacacatactcaccagttgctcgcttgaccacgattcgagtactacttgctctggcagcctctcatggtcttctcgtccatcagatggacgttaagacagctttcctaaacggagagctggaggaggagatctatatggatcaaccagacgggtatgtactagaaggtcaggagggaatggtgtgtaaactattgaaatccttgtatggcctcaagcaagcacctaagcaatggcatgagaagtttgacaccacgcttacatctgcaggctttgttgtgaacgaagctgacaaatgtgtatactatcgctatggtgggggagaaggggtgatcttgtgcttgtatgtcgatgacatactgatctttgggaccagccttaatgtgattgaggaggtcaaagactatctgtccaagagttttgaaatgaaggatttgggagaggctgatgttattcttaacatcaaacttcaaagaggagatgagggtgggattacacttgtgcaatcccactatgtggacaaggttttgagtcgctttggatatagtgactgcaagccagctcctactccttatgatcccagcgtgctattaaggaaaaaccgaagaatagcaagggatcaactaagatactctcaaatcattggttcattgatgtacttggctagcgcaacgaggcctgacatctcatttgctgtaagcaagctgagccggtttgtctcaaatccgggagatgatcattggcaggctctggaaagagtaatgcgctatctaaagggcactatgagctatggaattcactataccgggtatccaaaagtactagaagggtatggtgactcaaactggatatctgatgctgatgagataaaagccacaagtggatatgtgttcacacttggaggtggcgctgtttcctggaagtcttgcaagcagaccatcttaacaaggtcaacaatggaagcagaacttacagcactagatactgcgacagttgaggccgagtggcttcgtgaactcctgatggatttgccggtggttgaaaaaccagtgccagctatcctaatgaactgcgataatcaaacagtgattattaaagtgaacagttcaaaggacaacatgaagtcatctagacacatcaagagaagactgaaatctgtcagaaagcagaaaaactccggagtgatagcattggactatgtccaaacggctagaaatctggcagatcagtttaccaaggggctaccacgtttttggggagtgcctcctgcacgactgctcatcgccatgtctggagttgctgccgccgctactggcccgccgacaggagctggtggtacgccgccgccgacaggagctggatccggagctggtgcgccaggaggaggtgccgtgaacgactacaacaacggaggcaattctgcctcaccatccagcggagggccattctcgggggacggctatgcatttgcatccacagagaacagcatggttatctacaacattaatgtggctcctctgataaaaagtaacaaatacacgcttttggctgagcggacgaggaagtgggaggaggagaagaggcaggagcgccgtgagggcaaggccccggcggctcccgccggcaaccggcgaggtgaggccaagcagaaggccaccgccgaggacatcgacgatggcgacgaggacttggggttccaggagcctgaggccaccgtcgccaccgtcgatgggggagcgtgcgctcacgcttctcgctggagcctcaaggccatgaagcgcgagcttctggccgcggcccctacccatgaggcgacgcggcgggcgcggtggtcggaggttgccctcaccttcgaccagaccgaccacccgccgtgcgttgcccggggaggacagatcgcgatggtggtttcccccaccgtttgcaatgtgaagttggggcgtgtcctcatagacgggggtgcagccctcaacatcctttcccccgtagcctttgacgccatcaaggccctggggatggtgctccggccgtcccagccgatcatcggtgtgacgctggggcacacctggccgctgggtcatatcgacctcccggtcaccttcggtggttccgccaacttccgcacggagcgggtggacttcgatgtggcggacctcagtctgccctacaacgcggtcctggggaggcccgcgttggtgaagttcatggcggcggtccactacgcctatctccagatgaagatgccgggccccggtggccccatcaccgtccatggcgacctcaaagttgcgcttgcttgtatggagcagcacgcggaccacctcgccgcggcgtccaagcccgcgggtggcgacgagaggctcagcgcctccgtcccggccgccccgaggcagcggatggtcacgtgcgacgaggtcccggtcaaggaggttgccctgggcgacggcccgtccaagaccacacgaatcggtggtcttctggacgacaaatag

SEQ ID NO: 23400 - DNA, 7376 bp, Oryza sativa
  Clone ID: TF_OsC1713_4807
atgcagtgcttctatgtttcacggggcaaacgaagtgaaccacctctttctcctgaggaagaggctaagttcgaggcttcggattgcttgttccgtggagcattgatcagtgtactcgctgacaacatagtggacgtgtacatgcacatgccttctgggaaggacatgtgggatgcacttgaggccaagttcggagtttctgacgccggcagtgagctgtatgttatggagcagttctatgactacaagatggtcgatgaccgttctgtagttgaacaagctcatgagattcagatgctggctaaggaacttgagaacaacaactgtgagttgccggacaagtttgtggcaggtggcattattgccaaactaccaccttcttggtcggactttgccacttctctaaagcacaagagacaagagttcagtgttcctgatctcattggctctttgggtgttgaggagaaggcgagggcaaaggacgtccggggcaaaaaggttgagggaggttctagtgccaatatggtacagaagaagaaccctcatgcatcccacaacaacaagaaagtcaagcctgatgtcaaacccaaggctgcaaccaattttaagaagaaaagcaagggaaaggcaaagggagactgctttgtgtgtggcaagtctgggcattgggccaaggactgtcctgagcgcaaagacaggaagtctgccaacatgatcattagcgagggcggaggaacatcgggagatgctacattctttgagaatgaatttcctatgaaatatacacctagcacttctagtaaagaaactgtcatgccccatgagcactttgcaccgatagaacacaatgatcaaacgcctgaggaaaatcctgaggaggacaacattgtagatactcgcaagagtaagagacaaagggttgcaaaatcctttggagatgactacattgtatacctcgtggatgacaccccaagaaccatagaagaggcatattcatctcctgacgctgactactggaaggaagcagtacgcagtgaaatggactcgattatgtctaatggtacttgggaagtcgttgagcgtccatatgggtgcaagcccgtaggatgcaaatgggttttcaagaaaaagcttaggcctgatggtacaatcgaaaagtacaaggcaaggcttgtggccaagggttatacccaaaaggaaggcgaggacttcttcgacacatactcaccagttgctcgcttgaccacgattcgagtactacttgctctggcagcctctcatggtcttctcatccatcagatggacgttaagacagctttcctaaacggagagctggaggaggagatctatatggatcaaccagacgggtatgtactagaaggtcaggagggaatggtgtgtaaactattgaaatccttgtatggcctcaagcaagcacctaagcaatggcatgagaagtttgacaccacgcttacatctgcaggctttgttgtgaacgaagctgacaaatgtgtatactatcgctatggtgggggagaaggggtgatcttgtgcttatatgtcgatgacatactgatctttgggaccagccttaatgtgattgaggaggtcaaagactatctgtccaagagttttgaaatgaaagatttgggagaggctgatgttattcttaacatcaaactacaaagaggagatgaggacgggcgggcgatcaggtttttggggagcgcaaggcgcgactactcactgttcgtcaatatctacttcatcttcaccaacatgtcgaacactggagacaaggagaaggagactcccgtcaacaccaacggaggcaatactacctcaaactccagcggaggaccattcttggggactattcatttccacttgtttgagtcggggttcatgccaagctataattgttggacatcccacggagagcaaggtgttgaaatggaagaggatgaagtggaagacgacaatattccggactttgctcagtatgttggatttgaaggaaatcaaacgggcgaggaggaaatagctgctgatggtaacgacgttgcggatgatcttggtcagatgttgcaggacgccagggaagacagcgaaagtgaaaaggaggcccataaattggacaagatgttggaggaccacagaacttcgttgtacccaggttgcgagcaggggcacaaaaagttggataccactctggatttgttgcaatggaaggcaaaaaatggggacgggatcctgagacaccccgccgatggttcgcagtggcgaaacatcgacagaaaatttaaagaatttggaaaggacgcacgaaacatacggtttggccccaagcaacctggtaacgacatcgacgtgtacctaagaccactggtcgaagatcttaaacagttgtggaagaaggaaggtgtccccgtgtgggacgaggacaaacaggaggagtttaacctacgagcgctgctgttcgtaaccatcaacgattggcctgcacttagcaacctatccggacagtccaacaagggttacaaggcttgcactcactgtatggatgaaacagaaagtacgtatcttaagcactgtaggaaggttgtatacatgggtcatcgtcgattccttgcagcaaaccacccggtacggaagaaagacaagcacttcgaacataaggccgaccaccgtacgaagcctaaacatcgcagcgggaaaacagtgtttgctatggttaaagatcttaaagtagtgttcggaaaggggcctggaagccagcatatagagagcgaagatggtcacgcggcgatgtggaaaaagaactctatattttgggagttaccatattgggaattcttggacgtacgccacgcaatcgacgtgatgcacctcactaagaacctttgcgtaaaccttcttggcttcctaggtgtatacggaaagtcgaaagatacactggaagcacgtaatgatctgaagcatatggaacaacgtagcgaccttcacccggaaccaaaggagaaaggaagccattacttgagtccagccagctacactcttagcaaggcagagaaggaaagtatgtttgaatgcttggagagcataaaggtaccgtctggatactccacgaatatcaagcgaataataagcacgaaggagaagaagttcacaaacctaaagtctcatgactgtcacgtgttgatgacacaactgctaccagttgtaataaggggtatccttccagacaatgtccgggcaacaataacaaagctatgtgcattcatgaacgcaatttcgcagaaggtcatcgatccggatagattagaagcccttcagaatgaagtggtgcaatgtctcgtcagttttgagttgatatttccaccttcatttttcaatataatgacgcatctgctttgtcaccttgtgaaagagatccgtattctcggacctatgtacctacacaacatgtttcctttcgagaggtacatgggcgttctgaagaagtatgttcgtaaccgtgctcgtccagaggcaagcatcgccaagggttatggaacagaggaggtcatcgaattttgcgtagaatttatcgaagaccttcgcccaatcggggtacctaaatcacgccatgaagggagactacagggaaagggaactctcggaaggaaagcaataacgacggtagacaacaatttattccgtaaagcccatttcactgttctgcaacactcttcattggtagctccttacatcgaggagcacttggctctagttcgcgcaaggaacatcggtaagtccgatgcatggattacacggcatcacattgatactttccccgcgtggctacgacaacatctcatgggtaacgagtcgatcaaccaacaacttgccttcctggcgtggggaccgtctgggtcgatcgcgacattccagggatatgagatcaatgggtacacattctacacgagagcccaagacatgaagagcacgaaccaaaacagcgctgttcgtgtcgatgccatgggacacgatggaacaactgccacgtattacggttccatcgaggacatatgggaacttgactatggtcctctcaaggttcctctgttccggtgccaatgggttaggttgactggtggaggcgtaatgattgatgacagtgggatgacaactgttgaccttaacaaggttggatactcggacgaaccttttgtccttgccaatgatgtaacgcaagtctttttcgtgaaggacatgtctagcaaaggaaagaagggcagagggcctgatgagcctaagcgtcaagtggttctcccaggcaaaagaaaaatcgtcggagttgaggacaagactgacgaggattacgatcagttggatgggcaaccccctttcacggtgacgattgaccctagcatcctcctatcaaatgaagacaccccttactcacgcagcgatcacaaggagggaacaataggggcatccccgcgccgacgccgccgccatatctcgccgtcgtctcgcgctcgtcgtcgtcgccgcctcctccgccatcgccgcatctctggggtgagagccgccgcacgccgcctccctctcgatctctctctccgatctcgatctctctctctctctcggttgccgccagccgccgagtttcagacgccgacgctgacctcgtcacgacacgacgccgcgccacgacgacgccgcgccacgagacgccacgacgccgcacgccgccgccgcgccacgccgatgccgcgcgcggcgccacgccgccgccgccccgccccgccgccgctccgctgccgccacaccgagaacgtgaacgagcgaacgaacgtgaacgagaacaaggtgaatgaatgtgaacgagaacgagcgaatgaacgtgaacgagccaacgaacgtgaatgagaacgagcgaacgaacgtgaacgagaacaaggtgaatgaacgtgaacaagaacgagcgaacgaacgtgaacgagccaacgaacgtgaatgagaacgagagaacgaatgtgaacgagaacaaggtgaatgaacgtgaacgagaacgttgtcggacaaacgtgaacgagccaacgaacgtgaacgtgaaatgcaattataggcaggtggctgatcgcgatgaggaacagatattgtacgattcaatcgcggagggaagcagccagtactggaacgaagaagaggggaacgaggatccaaaccagtatttgaacgaggaagggaacgtggagagggatgcggaggggaaccaggaggggcacgtggaaagggatgtggaggggaaacaggaggaggaggctagtggaagtcaaccctccgttggacagaagagggcacgcgggcaacgaggtgccgcgaagaagcttgagggttggcacatcataacggaagtggaagaagatggacgacctagtgccccggcagaagccgccaagaactatagcttcaagggagagctgtacaagaaatatatcctgaaggggcagacaccgaacttcgacacattcccaaagctaagggatcaccgggacgagttcgttgcatataagacaggtgaacaagggcaggcgatgatggaaagaaacaaagaaaatgccaccaagaagaagtaccatcaccacttggggtcaggcggctatagcgtcgcgatgccgaagtgggaggagatggaggctagcttgcttgagagggagcatccaggacgaacacgaggcaaaggggtgattccttggaagattgggttcaaggaggacatccacacgtacaggagtcggatgaggagcaagagagataccgaggcgaagattgcagatcttgagttcagggtatcgagctacgagctcagcatgcaagaggaggtggcaaggaaggttgatgaacgcatggccgcacatcggtccactgatccccagccgaccattcctcctgcaatggacgaatccacctgccccgttgatgacatcactcaacggacaccatgtgagctacatattcctttcaagaacttatcaataaaggtggtgtcgggcatggccatcccaacggaaccttcaggtacttaccactgcaggccgattccagcaggatactcgaaggtcgaagttgagttggtcaaaggcgcgtacgaggacctcgagctggattaccctagaggagacgcaccgtctccacctcaagctcctgcaccgactcctcctcgggctcctgcaccgactcctccgcaagctcctcttccgacaccttcaaagtcaagggccccccaagctccaccacctgcccacacaagggcaacgaagaaggcgaaagttgacgccgccaagaacaaggacccggggtacgattgcacgcaagaggagcttgacgcttacgtggcatcagaagtcaagagacaattcaagcctcgaagaccagaaaagaagattcctatagacccgagtgtcatgaacttcttcaggggtatgtctgcacctgccaaggaggccattaagctatcggactatgagcgaacgctgaagaaagcatcttctggaaagtccaaaacagtccctcagcttggagagcaaccaaaccaggacatcgagccgttggtgaccggtaaagaaatgacgatagaagaatttattactgacaccggtctaactacggatcaattgctaggagtcgcaccaatcgaaaaggcagaagtgaaatacatgtacgaactcggtaaaccgcttgtcaaccctgagcttctgcagtccctacccacacaaatgtacaagttccatcagctgtacatggagatgagcgccaccggtagagagatgatcggagcgaggatcagggacacggacttcttgcaaggagatgacattctctggatcaatttcaagggaatctacgaactataccagctggacgccctcaacgtctctattatgagttgctggattttaatggagattcaaagggcccgacggcggggggttttcgatactggattcatcgaccctcggaaagtaaacgtcgcaatgctcgaccaatatccgcaagccacagaggacaatatcgtccatctcctgaaggcgcagcattacaagacgttcatactgttgccgtacaacacagagtggctggatggtgggcctgtttatggctctttggtaaactcctcggtgacaggagggctgcgcccattaagggagcggcacagattcccgagggcgcctgctattacccgggtaaaggcgtgctgcggggctgttgaggccctagcttcttctggagcccttgtacagctccggaggacctggaaggctttgaagtccttggacagctccggagtccacggacagctccggaggccttggacacccccgtag

SEQ ID NO: 23401 - DNA, 3831 bp, Oryza sativa
  Clone ID: TF_OsC1713_4916
atgtctggagttgctggcggaggtggtgcgccgccgccgacaggagctggatccggagctggtgcgccgccgccgacaggagctggatccggagctggtgcgccaggaggaggtgccgtgaacgactacaacaacggaggcaattctgcctcaccatccagcggagggccattctcggggtataatcttctcctcctactactgttgttagcgctatactgtgtgagctatgttcttgttcctgttctacatgatgcctctagcatgttatcgcattactggtatgttcctgtttctgacattcatgatgcgcatagtatgctactggttatgttaagatcaccctacactgcttatgccatgatcattgtttcaatttcttggattaaaatatgccgaataatgactatatttccaacaatccaaaaacctgataggtcattttcggtagttggctttgctgctgcactgaaaccacatgcttttgatggttcaaactataagagatggaaagcacgtgcactattatggttgacagcgatgcagtgcttctatgtttcacggggcaaacgaagtgaaccacctctctctcctgaggaagaggctaagttcgaggcttcggattgcctgttccgtggagcattgatcagtgtactcgctgacaacatagtggacgtgtacatgcacatgccttctgggaaggacatgtgggatgcacttgaggctaagttcggagtttctgacgctggcagtgagctgtatgtcatggagcagttctatgactataagatggtcgatgaccgttctgtagtagaacaagctcatgagattcagatgctggctaaggaacttgagaacaacaactgtgagttgccagacaagtttgtggcgggtggcattattgccaaactgccaccttcttggtcggactttgccacttctctaaagcacaagagacaagagttcagtgttcctgatctcattggctctttgggtgttgaggagaaggcgagggcaaaggacgtgcggggcaaaaaggttgagggaggttctagtgccaatatggtacagaagaagaaccctcatgcatcccacaacaacaagaaagtcaagcctgatgtcaaacccaaagctgcaaccaattttaagaagaaaggcaagggaaaggcaaaaggagactgctttgtgtgtggcaagtctgggcattgggccaaggactgtcctgagcgcaaagacaggaagtctgccaacatgatcattagcgagggcggaggaacatcggggtacggtaaaatattacctacagttctctctgtttttcattcacctgattggtgggtggatactggtgctaatattcatgtcgggagaggttcctccttgttgatgggaaacgggtcgcttgcggctgttcatggtgttggtacggtcgatctgaagtttacttcgggaaagaccgtgcagctgaagaacgtgcagcatgtcccttcaataaagaagaatctagttagcggctctctattgtgtagagaaggttttagacttgtgtttgagtccaataaatgtgtcgtatctaaatatgggacttttgttggaaaaggttatgacagcggaggcttgttccgcttttctttgaatgacatgtgtaataatcataatgctgtgaaccatattagcgagaatgatgagtctaatgtgtggcattcgcgactctgtcatgtgaatttcggttgtatgacgcgcttagctaacatgagtttaattccaaaattcactttggtcaaaggttccaagtgccatacttgtgttcaatcgaaacaacctcgcaagcctcacaaggcatctgaggcgaggaatttggcacctctagaacttgttcattccgatttgtgcgaaatgaacggcgtgttgactaaagggggaaagaaatatttcatgacactgatagatgattgcactagattttgctatgtgtatctattgaaaacaaaggatgaggcattgcattacttcaaaatctataaagctgaggtagaaaaccaacttgaaaggaaaatcaaacggttgaggtctgatagaggtggggagtatttttccaatgagtttgcatctttttgcgaagagtttggaattattcatgagatgacgcctccctattcaccccaatcaaatggggtgcccgaaagaaagaaccgtactctaactgagatggtgaatgccatgttagacactgcggggctttccaaggaatggtggggtgaggcagttttgactgcgagtcatgtcctgaataaaattccaatgaagcataaggaagtaacaccattcgaggaatgggaaaggaagaaattaaatctctcatacctacgaacatggggctgtttggccaagataaatgtacctatagccaaaaagcggaaacttggaccaaatactgttgattgcgtgtttcttggttatgctatccacagtgtgggttatagattcttaatagtaaactctggagtacccgacatgaatgctggtacaattcttgagtccagagatgctacattctttgagaatgaatttcctatgaaacattcacctagcacttctagtaaagaaactgtcatgccccatgagcactttgcaccgacagaacacaatgatcaaacgcctgaggaaaatcctgatgaggacaacattgtagatactcgcaagagtaagagacaaagggttgcaaaatcctttggagatgactacattgtatacctcgtggatgacaccccaagaaccatagaagaggcatattcatctcctgacgctgactgctggaaggaagcagtacgcagtgaaatggactcgattatgtctaatggtacttgggaagtcgttgagcgtccatatgggtgcaagcccgtaggatgcaaatgggttttcaagaaaaagcttaggcctgatggtacaatcgaaaagtacaaggcaaggcttgtggccaagggttatacccaaaaggaaggcgaggacttcttcgacacatactcactagttgctcgcttgaccacgattcgagtactacttgctctggcagcctctcatggtcttctcgtccatcagatggacgttaagacagttttcctaaacggagagctggaggaggagatctatatggatcaaccagacgggtatgtactagaaggctttgttgtgaacgaagctgacaaatgtgtatactatcgctatggtgggggagaaggggtgatcttgtgcttatatgtcgatgacatactgatctttgggactagccttaatgtgattgaggaggtcaaagactatctgtccaagagttttgaaatgaaggatttgggagaggctgatgttattcttaacatcaaactacaaagaggagatgagggtgggattacacttatgcaatcccactatgtggacaaggttttgagtctctttggctatagtgactgcaagccagctcctactccttatgatcccagcgtgctattaaggaaaaacagaagaatagcaagggatcaactgagatactctcaaatcattggttcattgatgcacttggctagcgcaacgagacctgacatctcatttgttgtaagcaagttgagccggtttgtctcaaatccgggagattatcattggcaggctctggaaagagtaatgcgctatctaaagggcactatgagctatggaattcactataccgggtatccaaaagtactagaagggtatagtgactcaaactggatatctgatgctaatgagataaaagccacaagtggatatgtgttcacacttggaggtggcgctatttcctag

SEQ ID NO: 23402 - DNA, 4515 bp, Oryza sativa; identical to SEQ ID NO: 15429
  Clone ID: TF_OsC1713_4934

SEQ ID NO: 23403 - DNA, 4374 bp, Oryza sativa; identical to SEQ ID NO: 15411
  Clone ID: TF_OsC1713_4959

SEQ ID NO: 23404 - DNA, 4260 bp, Oryza sativa; identical to SEQ ID NO: 15432
  Clone ID: TF_OsC1713_4998

SEQ ID NO: 23405 - DNA, 1483 bp, Oryza sativa
  Clone ID: TF_OsC1713_5057
atggcggcggcggccggccccagcctgtccatcaccgtcgagaagaacccgccggaggcgcgcttgcttcagctcggcatcaagtcgtggcccaaatgggggtgtccgccggggaagttcccgctcaagttcgacgcgaggctgacgtgctacctcctcaagggcagggtgagggcctccgtgaagggcaccgggaggtgcgtcgagttcggcgccggcgacctcgtcgtcttccccaagggcctcagctgcacatgggacgtcgtcgtcggcatcgacaagcactacaacttcgactcctatggtctcgaacccagctttggaccgggcggccgggtggtgactgacgggcgggcgatcaggtttttggggagcgcaaggcgcgactactcactgttcgtcaacatctacttcatcttcaccaacatttcgaacactggagacaaggagaaggagactcccgtcaacaccaacggaggcaatactgcctcaaactccagcggaggaacattcttgggtgtactcgctgacaacatagtgaaggtgtacatgcacatgccttctgggaaggacatgcgggatgcacttgaggccaagttcggagtttctgacgccggcagtgagctgtatgttatggagcagttctatgactacaagatggtcgatgaccgttctgtagttgaacaagctcatgagattcagatgctggctaaggaacttgagaacaacaactgtgagttgccggacaagtttgtggcaggtggcattattgccaaactaccaccttcttggtcggactttgccacttctctaaagcacaagagacaagagttcagtgttcctgatctcattggctctttgggtgttgaggagaaggcgagggcaaaggacgtccggggcaaaaaggttgagggaggttctagtgccaatatggtacagaagaagaaccctcatgcatcccacaacaacaagaaagtcaagcctgatgtcaaacccaaggctgcaaccaattttaagaagaaaagcaagggaaaggcaaagggagactgctttgtgtgtggcaagtctgggcattgggccaaggactgtcctgagcgcaaagacaggaagtctgccaacatgatcattagtgagggcggaggaacatcggggtacggtcgggagaggttcctccttgttgatgggaaacgggtcgcttgcggctgttcatggtgttggtacggtcgatctgaagtttacttcgggaaagaccgtgcagctgaagaatgtgcagcatgtcccttcaataaagaagaatctagttagcggctctctattgtgtagagaaggttttagacttgtgtttgagtccaataaatgtgtcgtatctaaatatgggacttttgttggaaaaggttatgacagcggaggcttgttccgcttttctttgaatgacatgtgtaataatcataatgttgtgaaccaaaaaaaaaaaaaaaaaaaa

SEQ ID NO: 23406 - DNA, 3708 bp, Oryza sativa
  Clone ID: TF_OsC1713_5171
atgtctggagttgctgccgccgctaccggcggaggtggtgcgccgccgccgacaggagctggtgcgccgccgccgacaggagctggatccggagctggtgcgccaggaggaggtgccgtgaacgactacaacaacggaggcaattctgcctcaccatccagcggagggccattctcggggtataatcttctcctcctgctactgctgttagcgctattcctgttcccattgttagcgctatactgtgtgcgctatgttcttgttcctgttctacatgatgcctctagcatgttatcgcgttactggtatgttcctgtttctgacattcatgatgcgcatagtatgctactggttatgttaagatcaccctacactgcttatgccatgatcattgtttcaatttcttggattaaaatatgccgaataatgactatatttccaacaatccaaaaacctgataggtcattttcggtagttggctttgctgctgcactgaaaccacatgcttttgatggttcaaactataagagatggaaagcacgtgcactattgtggttgacagcgatgcagtgcttctatgtttcacggggcaaacgaagtgaaccacctctttctcctgaggaagaggctaagttcgaggcttcggattgcctgttccgtggagcattgatcagtgtactcgctgacaacatagtggacgtgtacatgcacatgccttctgggaaggacatgtgggatgcacttgaggccaagttcggagtttctgacgccggcagtgagctgtatgtcatggagcagttctatgactacaagatggtcgatgaccgttctgtagtagaacaagctcatgagattcagatgctggctaaggaacttgagaacaacaactgtgagttgccggacaagtttgtggcgggtggcattattgccaaactaccaccttcttggtcggactttgccacttctctaaagcacaagagacaagagttcagtgttcctgatctcattggctctttgggtgttgaggagaaggcgagggcaaaggacgtccggggcaaaaaggttgagggaggttctagtgccaatatggtacagaagaagaaccctcatgcatcccacaacaacaagaaagtcaagcctgatgtcaaacccaaggttgcaaccaattttaagaagaaaggcaagggaaaggcaaagggagactgctttgtgtgtggcaagtctgggcattgggccaaggactgtcctgagcgcaaagacaggaagtctgccaacatgatcattagcgagggcggaggaacatcggggtacggtaaaatattacctacagttctctctatttttcattcacctgattggtgggtggatactggtgctaatattcatgtcgggagaggttcctccttgttgatgggaaacgggtcacttgcggctgttcatggtgttggtacggtcgatctgaagtttacttcgggaaagaccgtgcagctgaagaacgtgcagcatgtcccttcaataaagaagaatctagttagcggctctctattgtgtagagaaggttttagacttgtgtttgagtccaataaatgtgtcgtatctaaatatgggacttttgttggtaaaggttatgacagcggaggcttgttccgtttttctttgaatgacatgtgtaataatcataatgctgtgaaccatattagcaagaatgatgagtctaatgtgtggcattcgcgactctgtcatgtgaatttcggttgtatgacgcgcttagctaacatgagtttaattccaaaattcactttggtcaaaggttccaagtgccatacttgtgttcaatcgaaacaacctcgcaagcctcacaaggcatctgaggcgaggaatttggcacctctagaacttgttcattccgatttgtgcgaaatgaacggcgtgttgactaaagggggaaagaaatatttcatgacactgatagatgattgcactagattttgctatgtgtatctattgaaaacaaaggatgaggcattgcattactttaaaatctataaagctgaggtagaaaaccaacttgaaaggaaaatcaaacggttgaggtctgatagaggtggggagtatttttctaatgagtttgcatccttttgcgaagagtttggaattattcatgagatgacgcctccctattcaccccaatcaaatggggtggccgaaagaaagaaccgtactctaactgagatggtgaatgccatgttagacactgcggggctttccaaggaatggtggggtgaggcagttttgactgcatgtcatgtcttgaataaaattccaatgaagcataaggaagtaacaccattcgaggaatgggaaaggaagaaattaaatctctcatacctacgaacatggtgctgtatggccaagtccagagatgctacattctttgagaatgaatttcctatgaaatatacacctagcacttctagtaaagaaactgtcatgccccatgagcactttgcaccgatagaacacaatgatcaaacgcctgaggaaaatcctgaggaggacaacattgtagatactcgcaagagtaagagacaaagggttgcaaaatcctttggagatgactacattgtatacctcgtggatgacaccccaagaaccatagaagaggcatattcatctcctgacgctgactactggaaggaagcagtacgcagtgaaatggactcgattatgtctaatggtacttgggaagtcgttgagcgtccatatgggtgcaagcccgtaggatgcaaatgggttttcaagaaaaagcttaggcctgatggtacaatcgaaaagtacaaggcaaggcttgtggccaagggttatacccaaaaggaaagcgaggatttcttcgacacatattcaccagttgctcgcttgactacgattcgacaagcacctaagcaatggcatgagaagtttgacaccacgcttacatctgcaggctttgttgtgaacgaagctgacaaatgtgtatactatcgctatggtgggggagaaggggtgatcttgtgcttgtatgtcgatgacatactgatctttgggaccagccttaatgtgattgaggaggtcaaagactatctgtccaagagttttgaaatgaaggatttgggagaggctgatgttattcttaacatcaaactacaaagaggagatgagggtgggattacacttgtgcaatcccactatgtggacaaggttttgagtcgctttggatatagtgactgcaagccagctcctactccttatgatcccagtatgctattaaggaaaaaccgaagaatagcaagggatcaactaagatactctcaaatcattggttcattgatgtacttggctagcgcaacgaggcctgacatctcatttgctgtaagcaagctgagccggtttgtctcaaatccgggagatgatcattggcaggctctggaaagagtaatgcgctatctaaagggcactatgagctatggaattcactataccgggtatccaaaagtactagaagggtatagtgactcaaactggatatctgatgctgatgagataaaagccacaagtggatatgtgttcacacttggagtggaagcagaacttacagcactagatactgcgacagttgaggccgagtggcttcgtgaactcctgatggatttgccggtggttgaaaaacca

SEQ ID NO: 23407 - DNA, 4344 bp, Oryza sativa
  Clone ID: TF_OsC1713_5234
atgtctggagttgctgccgccgctattggcggaggtggtgcgccgccgccgacaggagctggatccggagctggtgcgccaggaggaggtgccgtgaacgactacaacaacggaggcaattctgcctcaccatccagcggagggccattctcggggtataatcttctccttctactgctgttagcgctactcctgttcccattgttagcgctatactgtgtgcgctatgttcttgttcctgttctacatgatgcctctagcatgttatcgcattactggtatgttcctgtttctgacattcatgatgcgcatagtatgctactggttatgttaagatcaccctacactgcttatgccatgatcatagttttaatttctaggattaaaatatgccgaataatgactatatttccaacaatccaaaaacctgataggtcattttcggtagttggctttgctgctgcactgaaaccacatgcttttgatggttcaaactataagagatggaaagcacgtgcactattgtggttgacagcgatgcagtgcttctatgtttcacggggtaaacgaagtgaaccacctctttctcctgaggaagaggctaagttcgaggcttcggattgcctgttccgtggagcattgataagtgtactcgctgacaacatagtggacgtgtacatgcacatgccttctgggaaggacatgtgggatgcacttgaggccaagttcggagtttctgacgccggcagtgagctgtatgtcatggagcagttctatgactacaagatggtcgatgaccgttctgtagtagaacaagctcatgagattcagatgctggctaaggaacttgagaacaacaactgtgagttgccggacaagtttgtggcgggtggcattattgccaaactaccaccttcttggtcggactttgccacttctctaaagcacaagagacaagagttcagtgttcctgatctcattggctctttgggtgttgaggagaaggcgagggcaaaggacatccggggcaaaaaggttgagggaggttctagtgccaatatggtacagaagaagaaccctcatgcatcccacaacaacaagaaagtcaagcctgatgtcaaacccaaggctgcaaccaattttaagaagaaaggcaagggaaaggcaaagggagactgctttgtgtgtggcaagtctgggcattgggccaaggactgtcctgagcgcaaagacaggaagtctgccaacatgatcattagcgagggcggaggaacatcggggtacggtaaaatattacctacagttctctctgtttttcattcacctgattggtgggtggatactggtgctaatattcatgtatgtgctgacatttctctgttttcttcttatcaggtcgggagaggttcctccttgttgatgggaaacgggtcgcttgcggctgttcatggtgttggtacggtcgatctgaagtttacttcgggaaagaccgtgcagctgaagaacgtgcagcatgtcccttcaataaagaagaatctagttagcggctctctattgtgtagagaaggttttagacttgtgtttgagtccaataaatgtgtcgtatctaaatatgggacttttgttggaaaaggttatgacagcggaggcttgttccgcttttctttgaatgacatgtgtaataatcataacgctgtgaaccatattagcgagaatgatgagtctaatgtgtggcattcgcgactctgtcatgtgaatttcggttgtatgatgcgcttagctaacatgagtttaattccaaaattcactttggtcaaaggttccaagtgccatacttgtgttcaatcgaaacaacctcgcaagcctcacaaggcatctgaggcgaggaatttggcacctctagaacttgttcattccgatttgtgcgaaatgaacggcgtgttgactaaagggggaaagaaatatttcatgacactgatagatgattgcactagattttgctatgcatatctattgaaaacaaaggatgaggcattgcattactttaaaatctataaagctgaggtagaaaaccaacttgaaaggaaaatcaaacggttgaggtctgatagaggtggggagtatttttccaatgagtttgcatccttttgcgaagagtttggaattattcatgagatgatgcctccctattcaccccaatcaaatggggtggccgaaaaaaagaaccgtactctaactgagatggtgaatgccatgttagacactgcggggctttccaaggaatggtggggtgaggcagttttgactgcgtgtcatgtcctgaataaaattccaatgaagcacaaggaagtaacaccattcgaggaatgggaaaggaagaaattaaatctctcatacctacgaacatggggctgtttggccaaggtaaatgtacctatagtcaaaaagcggaaacttggaccaaaaactgttgattgtgtgtttcttggttatgctatccacagtgtgggttatagattcttaatagtaaactctggagtacccgacatgcatgctggtacaatttttgagtccagagatgctactttctttgagaatgaatttcctatgaaatatacatctagcacttctagtaaagaaactgtcatgccccatgagcactttgcaccgatagaacacaatgatcaaacgtctgaggaaaatcctgaggaggacaacattgtagatactcgcaagagtaagagacaaagggttgcaaaatcctttggagatgactacattgtatacctcgtggatgacaccccaagaaccatagaagaggcatattcatctcctgacgctgactactggaaggaagcagtacgcagtgaaatggactcgattatgtctaatggtacttgggaagtcgttgagcgtccatatggatgtaagcccgtaggatgcaaatgggttttcaagaaaaagcttaggcctgatggtacaatcgaaaagtataaggcaaggcttgtggccaagggttatacccaaaaggaaggcgaggatttcttcgacacatattcaccagttgctcgcttgactacgattcgagtactacttgctctggcagcctctcatggtcttctcgtccatcagatggacgttaagacagctttcctaaacggagagctggaggaggagatctatatggatcaaccagacgggtatgtactagaaggtcaggagggaatggtgtgtaagctattgaaatacttgtatggcctcaagcaagcacctaagcaatggcatgagaagtttgacaccacgcttacatctgcaggctttgttgtgaacgaagctgacaaatgtgtatactatcgctatggtgggggagaaggggtgatcttatgcttgtatgtcgatgacatactgatctttgggaccagccttaatgtgattgaggaggtcaaagactatctgtccaagagttttgaaatgaaggatttgggagaggctgatgttattcttaacatcaaactacaaagaggagatgagggtgggattacacttgtgcaatcccactatgtggacaaggttttgagtcgctttggatatagtgactgtaagccagctcctactccttatgatcccagcgtgctattaaggaaaaaccgaagaatagcaagggatcaactgagatactctcaaatcattggttcattgatgtacttggctagcgcaacgaggcctgacatctcatttgctgtaagcaagctgagccggtttgtctcaaatccgggagatgatcattggcaggctctggaaagagtaatgcgctatctaaagggcactatgagctatggaattcactataccgggtatccaaaagtactagaagggtatagtgactcaaactggatatctgatgctgatgagataaaagccacaagtggatatgcgttcacacttggaggtggcgctgtttcctggaagtcttgcaagcagaccatcttaacgaggtcaacaatggaagcagaacttacagcactagatactgcgacagttgaggctgagtggcttcgtgaactcctgatggatttgccggtggttgaaaaaccagtgccagctatcctaatgaactgcgataatcaaacagtgattattaaagtgaacagttcaaaggacaacatgaagtcatctagacacatcaagagaagactgaaatctgtcagaaagcagaaaaactccggagtgatagcattggactatgtccaaacggctagaaatctggcagatcagtttaccaaggggctaccacgtaatgtgatagacagtgcatcgagggaaatgggcttgatacccacctaa

SEQ ID NO: 23408 - DNA, 3853 bp, Oryza sativa
  Clone ID: TF_OsC1713_5259
acgagtgtgtgcacacgcgttgggagagtaggcctccgaaaccacgcgttgctgcgacgtttgcacagacgggcgggcgatcaggtttttggggagcgcaaggcgcgactactcactgttcgtcaacatctacttcatcttcaccaacatgtcgaacactggagacaaggagaaggagactcccgtcaacaccaacggaggcaatactgcctcaaactccagcggaggaccattcttggggtataaccttattacattatttcaattagaagttttactgttaatgttcatcgcaatgtcaacattgtgtcattatgtgattgttgatgcttattcaacgttaagcatgctcatgttgattacattcaccactatcactggatcaaatcctattgtaaatatcatgtttattatcttgttattttggattaaaatatgccgaattatgaccaaatttccaacaatccaaaaacctgataggtcattttcggtagttggctttgctgctgcactgaaaccacatgcctttgatggtccaaactataagagatggaaaacacgtgcactattgtggttgacagcgatgcagtgcttctatgtttcacggggcaaacgaagtgacccacctctttctcctgaggaagaggctaagttcgaggcttcggattgcctgttccgtggagcattgatcagtgtactcgctgacaacatagtggacgtgtacatgcacatgccttctgggaaggacatgtgggatgcacttgaggccaagttcggagtttctgacgccggcagtgagctgtatgttatggagcagttctatgactacaagatggtcgatgaccgttctgtagttgaacaagctcatgagattcagatgctggctaaggaacttgagaacaacaactgtgagttgccggacaagtttgtggcaggtggcattattgccaaactaccaccttcttggtcggactttgccacttctctaaagcacaagagacaagagttcagtgttcctgatctcattggctctttgggtgttgaggagaaggcgagggcaaaggacgtccggggcaaaaaggttgagggaggttctagtgccaatatggtacagaagaagaaccctcatgcatcccacaacaacaagaaagtcaagcctgatgtcaaacccaaggctgcaaccaattttaagaagaaaagcaagggaaaggcaaagggagactgctttgtgtgtggcaagtctgggcattgggccaaggactgtcctgagcgcaaagacaggaagtctgccaacatgatcattagcgaggacggaggaacatcggggtacggcaaaatattacctacagttctctctgtttttcattcacctgattggtgggtggacactggtgctaatattcatgtcgggagaggttcctccttgttgatgggaaacgggtcgcttgcggctgttcatggtgttggtacggtcgatctgaagtttacttcgggaaagaccgtgcagctgaagaacgtgcagcatgtcctttcaataaagaagaatctagttagcggctctctattgtgtagagaagattttagacttgtgtttgagtccaataaatgtgtcgtatctaaatatgggacttttgttggaaaaggttatgacagcggaggcttgttccgcttttctttgaatgacatgtctaataatcataatgctgtgaaccatattagcgagaatgatgagtctaatgaaaatcaaacggttgggtctgatagaggtggggagtatttttccaatgagtttgcatccttttgcgaagagtttggaattattcatgagatgacgcctccctattcaccccaatcaaatggggtggccgaaagaaagaaccgtactctaactgagatggtgaatgccatgttagacactgcggggctttccaaggaatggtggggtgaggcagttttgactgcgtgtcatgtcctgaataaaattccaatgaagcataaggaagtaacaccattcgaggaatgggaaaggaagaaattaaatctctcatacctacgaacatggggctgtttggccaaggtaaatgtacctatagccaaaaagcggaaacttggaccaaaaactgttgattgtgtgtttcttggttatgctatccacagtgtgggttatagattcttaatagtaaactctggagtacccgacatgcatgttggtacaattcttgagtccagagatgctacattctttgagaatgaatttcctatgaaatatacacctagcacttctagtaaagaaactgtcatgccccatgagcactttgcaccgatagaacacaatgatcaaacgcctgaggaaaatcctgaggagggcaacattgtagatactcgcaagagtaagagacaaagggttgcaaaatcctttggagatgactacattgtatacctcgtggatgacaccccaagaaccatagaagaggcatattcatctcctgacgctgactactggaaggaagcagtacgcagtgaaatggactcgattatgtctaatggtacttgggaagtcgttgagcgtccatatgggtgcaagcccgtaggatgcaaatgggttttcaagaaaaagcttaggcctgatggtacaatcgaaaagtacaaggcaaggcttgtggccaagggttatacccaaaaggaaggcgaggacttcttcgacacatactcaccagttgctcgcttgaccacgattcgagtactacttgctctggcagcctctcatggtcttctcgtccatcagatggacgttaagacagctttcctaaacggagagctggaggaggagatctatatggatcaaccagacgggtatgtactagaaggtcaggagggaatggtgtgtaaactattgaaatccttgtatggcctcaagcaagcacctaagcaatggcatgagaagtttgacaccacgcttacatctgcaggctttgttgtgaacgaagctgacaaatgtgtatactatcgctatggtgggggagaaggggtgatcttgtgcttatatgtcgatgacatactgatctttgggaccagccttaatgtgattgaggaggtcaaagactatctgtccaagagttttgaaatgaaagatttgggagaggctgatgttattattaacatcaaactacaaagaggagatgagggtgggattcacttgtgcaatcccactatgtggacaagcgcaacgaggcctgacatctcatttgctgtaagcaagctgagccggtttgtctcaaatccgggagatgatcattggcaggctctggaaagagtaatgcgctatctaaagggtactatgagctatggaattcactataccgggtatccaaaagtactagaagggtatagtgactcaaactggatatctgatgctgatgagataaaagccacaagtggatatgtgttcacacttggaggtggcgttgtttcctggaagtcttgcaagcagaccatcttaacgaggtcaacaatggaagcagaacttacagcactagatactgcgacagttgaggccgagtggcttcgtgaactcctgatagatttgccggtggttgaaaaaccagtgccagctatcctaatgaactgcgataatcaaacagtgattattaaagtgaacagttcaaaggacaacatgaagtcatctagacacatcaagagaagactgaaatctgtcagaaagcagaaaaactccggagtgatagcattggactatgtccaaacggctagaaatctggcagatcagtttaccaaggggctaccacgtaatgtgatagacagtgcatcgagggaaataggcttgatacccacctaa

SEQ ID NO: 23409 - DNA, 4137 bp, Oryza sativa
  Clone ID: TF_OsC1713_5387
tcacgtcgctattcttttgcgtccacgatcccacgttcccacgactgcctctgcaatggcgcgtccacgatcccacattgcaaccacgaacccacgttcccacgacttcgcctgagatctgcaccggtaggtgggtgatcaggtttttggggagtgcttcccgcacgactgctcgtcctcgtccaccatgtctgcgcctggagctgcagacggagatggcgcgcctggagctggagccggagccgcaattctgcctcacaatccagcggagggccattcttggggtatatccttctcctgttccctttgttagcgctatcgctttattattatgtgcgctatgttcctgttcctgacattcatgatgcctctagtatgttattgcgttactgtaatgttcctgtttctgacattcatgatgcgcatagtatgctacttcatgatgcctctagcatgttattgcgttactgtaatattcctgttcctgacattcatgatacgcatagtatgctactggttatgttaagatcaccctacaccgcttatgccatgattattgttttaacattttggattaaaatatgccgattcatgactatatttccaacaatccaaaaacctgataggtcattttcggtagttggctttgctgctgcactgaaaccacatgcttttgatggttctaactataagagatggaaagcatgtgcactattgtggttgacagcgatgcagtacttctatgtttcacggggcaaacgaagtgaaccacctctttctcctgaggaagaggctaagttcgaggctttggattgcctgttccgtggagcattgatcagtgtactcgctgacaatatagtggacgtgtacatgcacatgccttccgggaaggacatgtgggatgcacttgaggccaagttcggagtttctgacgccggcagtgagctgtatgtcatggagcagttctatgactacaagatggtcgatgaccgttctgtagtagaccaacctcatgagattcagatgctggctaagaaacttgagaacaacaactgtgagttgccggacaagtttgtggcgggtggcattattgccaaactgccaacttcttggtcggactttgccacttctctaaagcacaagagacaagagttcagtgtttctgatctcattggctctttgggtgttgagaagaaggcgagggcaaaggacgttcggggcaaaaaggttgagggaggttctagtgccaatatggtacagaagaagaaccctcatgcatcccacaacaacaagaaagtcaaacctgatgtcaaacccaaggctgcaaccaactttaagaagaaaggcaagggaaaggcaaagggagactgctttgtgtgtggcaagtcagggcattgggccaaggactgtcctgagcgcaaagacaggaagtctgccaacatggtcattagcgagggcggaggaacatcggggtacggtaaaatattacctacagttctctctgttcttcacttacctgattggtgggtggacactggtgctaatattcatgtcgggagaggttcctccttgttgatgggaaacgggtcgcttgcggctgttcatggtgttggttccaagtgccatacttgcatccaatcgaaacaacctcgcaagcctcacaagtcatctgaggcgaggaatttggcacctctagaacttgttcattccgatttgtgcgaaatgaacgacgtgttgactaaagggggaaagaaatatttcatgacactgatagatgattgcactagattttgctatgtgtatctattgaaaacaaaagataaggcattgcattactttaaaatctataaagctgaggcagaaaaccaacttgaaaggaaaatcaaacggttgaggtctgatagaagtggggagtatttttccaatgagtttgcatcattttgcgaagagtttggaattattcatgagaggacacctccctattcaccccaatcaaatggggtggccgaaagaaagaaccgtactctaactgagatggtgaatgccatgttagacacttcagggctttccaaggaatggtggggtgaggcagttttgaccacctatcatgtcctgaataaaattccaatgaagcataaggaagtaacaccattcgaggaatgggaaaggaagaaattaaatctctcatacctacgaacatggggctgtttggccaaggtaaatgtacctatagccaaaaagcggaaacttggaccaaatactgttgattgtgtgttccttggttatgctattcacagtgtgggttatagattcttaatagtaaactttggtgtacccgacatgcatgttggtacaattcttgagtccagagatgctacattctttgagaatgaatttcccatgaaacatacacctagcacttctagtaaagaaactgtcatgccccatgagcactttgcaccggtagaacacaatgatcaaacgcctgaggaaaatcctgaggaggacaacattgtagatactcgcaagagtaagagacaaagggttgcaaaatcctttggagatgactacattgtatacctcgtggatgacacctcaagaaccatagaagaggcatattcatctcctgacgctgactactggaaggaagcagtacgcagtgaaatggactcgattatgtctaatggtacttgggaagtcgttgagctttcatatgggtgcaagcccgtaggatgcaaatgggttttcaagaaaaagcttatacctgatggtacaattgaaaagtacaaggcaagacttgcggccaagggttatacccaaaaggaaggcgaggacttcttcgacacatactcaccagttgctcgcttgaccacgattcgagtactacttgctctggcagcctctcatggtcttctcgtctatcagatggacgttaagacagctttcctaaacggagagctagaggaggagatctatatggatcaactagacgggtatgtactagaaggtcaggagggaatggtgtgtaaattgttgaaatccttgtatggcctcaagcaagcacctaagcaatggcatgagaagtttgacaccacgcttacatctgcaggctttgttgtgaatgaaactgacaaatgtgtgtactatcgctatggtgggggagaaggagtgatcttgtgcctatatgtcgatgacatattgatctttgggaccagccttaatgtgattgaggaggtcaaggactatctgtccaagagttttgaaataaaggatttgggagaggctgatgttattcttaacatcaaactacaaataggagatgagggtgggattacacttgtgcaatcccactatgtggacaaggttttgagtcgctttggatatagtgactgcaagccagctcctactccttatgatcccagcgtgctattaaggaaaaaccgaagaatagcaagggatcaactgagatactctcaaatcattggttcattgatgtacttggctagtgcaacgaggcctgacatctcatttgctgtaagcaagctgagccggtttgtctcaaatccgggacatgatcattggcaggctctggaaagagtaatgcgctatctaaagggcactatgagctatggaattcactataccgggtatccaaaagtactagaagggtatagtgactcaaactggatatctgatgctgatgagataaaagccacaagtggatatgtgttcacacttggaggtggcgctgtttcctggaagtcttgcaagcagaccatcttaacgaggtcaacaatggaagcagaacttacagcactagatactgcgacagttgaggccgagtggcttcatgaacttctgatggatttgccggtggttgaaaaatcagtgccagctatcctaatgaactgtgataatcaaacagtgattattaaagtgaacagttcaaaggacaacacgaagtcatctaggcacatcaagagaagactgaaatctgttagaaagcagaaaaactccggagtgatagcattggactatgtccaaacggctagaaatctggcagatcagtttaccaagggactaccacgtaatgtgatagacaatgcatcgagggaaatgggcttgatacccacctaa

SEQ ID NO: 23410 - DNA, 6888 bp, Oryza sativa
  Clone ID: TF_OsC1713_5421
atgggcttgggaggaggaggtcgaccagtggaggtgtccctcgagggcttgaggagcctagctgtaacatcccggcctaggcaaaacctgccttggtttggtaaagtgtccggtattgataaatggaggatggatcggcaatggatgtacgctgaccggcggtccaaagagtttattgacggcgtgcactattttttgagagtggccaaagctaacaggcaaaggggttttatttgttgtccatgcaataagtgtaagaatcagaaggagtattctgcattcaggactattcatttccacttgtttgagtcggggttcatgccaagctataattgttggacatcccacggagagcaaggtgttgaaatggaagaagatgaagtggaagacgacaatattccggactttgctcagtatgttggatttgaaggaaatcaaacgggcgaggaggaaatagctgctgatggtaacgacgttgcggatgatcttggtcagatgttgcaggacgccagggaagactgcgaaagtgaaaaggaggcccataaattggacaagatgttggaggaccacagaacttcgttgtacccaggttgcgagcaggggcacaaaaagttggataccactctggagttgttgcaatggaaggcaaaaaatggggttagtgacaaggcatttggcgatttattgaaactcgtcaagaacattcttccggggggaaacaaattgcccgagaaaacgtacgaggctaagaagatagtctgcccgttaggactggaagttcataagattcacgcatgtccgaacgattgtatcctatatcgcggtgaggagtatgagaacctagaagcatgccatgtttgcaaagcactacgatacaagattagacgggacgatccaggagaagttgacgggcagctaacaaagaagagaattcctgctaaggtgatgtggtattttcctataataccacggctaaggcgtttgttcaggaacaaggggaatgctagaatgttgcgatggcacgctgaagagcgtcaacaggacgggatgctgagacaccccgccgatggttcgcagtggcgaaacatcgacagaaaatttaaagaatttggaaaggacgcacgaaacatacggtttggtttgagtacggatggcatgaatccttttggagagatgagcagcggccatagcacttggcccgttacgatgtgtatctacaacctccccccctggctatgcatgaagaggaagtacataatgatgccgattattattcaaggccccaagcaacctggtaacgacatcgacgtgtacctaagaccactggtcgaagatcttaaacagttgtggaagaaggaaggtgtccccgtgtgggacgaggacaaacaggaggagtttaacctacgagcgctgctgttcgtaaccatcaacgcggcgacctgcacttagcaacctatccggacagtccaacaaggggtacaaggcttgcactcactcaaaccacccggtacggaagaaaggcaagcacttcgaacataaggccgaccactgtgtatacggaaagtcgaaagatacactggaagcacgtaatgatctgaagcatatggaacaacgcggcgaccttcacccggaaccaaaggagaaaggaagccattacttgagtccagccagctacactcttagcaaggggtatccttccagacaatgtccgggcaacaataacaaagctatgtgcattcatgaacgcaatttcgcagaaggtcatcgatccggatagattagaagcccttcagaatgaagtggtgcaatgtctcgtcagttttgagttgatatttccaccttcatttttcaatataatgacgcatctgctttgtcaccttgtgaaagagatccgtattcttgggcctatgtacctacacaacatgtttcctttcgagaggtacatgggcgttctgaagaagtatgttcgtaaccgtgctcgtccagaggcaagcatcgccaagggttatggaacagaggaggtcatcgaattttgcgtagaatttatcgaagaccttcgcccaatcggggtacctgaatcacgccatgaagggagactacggggaaagggaactctcggaaggaaagcaataatgacggtagacaacaatttattccgtaaagcccatttcactgttctgcaacactcttcattggtagctccttacatcgaggagcacttggctctagttcgcgccaggaacatcggtaagtccgatgcatggattacacggcatcacattgatactttccccgcgtggctacgacaacatctcatgggtaacgagtcgatcaaccaacaacttgccttcctggcgaggggaccgtctgggtctatcgcgacattccagggatatgagatcaatgggtatacattctacacgagagcccaagacatgaagagcacgaaccaaaacagcgctgttcgtgtcgatgccatgggacacgatggaacaactgccacatattacggtgccatcgaggacatatgggaacttgactatggtcctcttaaggttcctctgttccggtgccaatgggttaggttgactggtggaggcgtaatgattgatgacagtgggatgacaactgttgaccttaacaaggttggatactcggacgaaccttttgtccttgccaatgatgtaacgcaagtctttttcgtgaaggacatgtctagcaaaggaaagaagggcagagggcctgatgagcctaagcgtcaagtggttctcccaggcaaaagaaaaatcgtcggagttgaggacaagactgacgaggattacgatcagttggatgggcaaccccctttcacggtgacgattgaccctagcatcctcctatcaaatgaagacaccccttactcacgcagcgatcacaaggagggaacaatagtgaggagaaagtacgtgcggtcaaccgtcaccgccgatgtaatgccgccgattccagcaggatactccaaggtcgaagttgagttggtcgaaggcgcgtacgaggacctcgagctggattaccctggaggagacggcggtacatcatcctccctgggcgacaagcggcgtctcgctccagcatcgactcctcaggatcctgcaccgactcctcctcgtgctcctacacctactcccccgcaagctcctcttccggcaccttcaaagtcaagggcccccccagctccaccgcttgcccacacaagggcaacaaagaaggcgaaagttgacgccgccaagaacaaggacccggggtacgattgcacgcaagaggagcttgacgcttacgttgcatcagaagtcaagagacaattcaagcctcgaagtccagaaaagaagattcctatagaccccagtgtcaggaacttcttcaggggtatgtctgcatctgtcaaggaggccatcaagctatcggactatgagcgaacgctgaagaaagcatcttctggaaagtccaaaccagtccctcagcttggagagcaaccaaacctggagatcgagccgttggtgaccggtaaagaaatgacgatagaacaatttattactgacaccggtctaactacggatcaattgctaggagtcgcaccaatcgaaaaggcggaagtgaaatacatgtacgaactcggtaaaccgcttgtcaagcctgagctgctgcagtccctacccacacaaatgtacaagttccatcagctgtacatggagatgagcgccaccggtagagagatgatcggagcgaggatcagggacacggacttcttgcaaggagatgacattctctggatcaatttcaggggaatctacgaactataccagctggacgccctcgacgtctctattatgagttgctggattttaatggagattcaaatggcccgacggcggagggttttcgatactggattcatcgaccctcggaaagtaaacgtcgcaatgctcgaccaatatccacaagaaacagaggacaatctcgtctatctcctgaaggcgcagcattacaagacgttcatactgttgccatacaacacagaattccactgggtgcttttactcatcgacctggaggcctgcaccgtcaactgcgcaaagcaaaagcagggaactaacttgtgcggctattacgtgtgcgagtattgccactgccttgcagaccaaatcatcaccacaagagagctcgattttattcgcatgagggataacctgaccacacacaaggaatttatcgcggcggttcaagaacaactcatgggattcatcaacgaagaaatccttgatcccaagggcgacgtgttggccgtcgacgacatgtccggcgacatcgtggcacacccaaggaaaattgcctctattggtgttgatgttcgcggcaccggctccagctccaggcgtgccatctccggctccagctccaggcgcgccatctcctccagaagtagcggcaccggcggcagctccggctccaggcgcagacatggtgggcgaggacgagcagtcgtgcgggaagcactcaggacgagcagtcgtgcgggaagcactccccaaaaacctgatcacccgccggcaaatccatcaggagttcacgaagccactcggcctcaactgtcgcagtatctagtgctgtaagttctacttccattgttgacctcgttaagatggtctgcttgcaaggcttccaggaaacagtgccacctccaagtgcgaacacatatccacttgtggcttttatcttatcagcatcagatatccagtttgagtcactatacccttctagtacttttggatacctggtatagtgaattccataactcataatgccctttagatagcgcattactctttccagagcctgccaatgatcatctcccggatttaagacaaaccggctcagcttgcttacagcaaatgagatgtcaggcctcgttgcactagccaagtacatcaatgaaccaattatttgggagtatctcagttgatcccttgctattcttcggtttttccttaatagcacgctgggatcataaggagtagaagctggcttgcagccactatatccaaagtgactcaaaatcttgtccacatagtgggattgcacaagtgtaatctcaccctcatctcctctttgtagtttaatgttaagaataacatcagcctctcccaaatccttcatttcaaaactcttggacagatagtccttgaccccctcaatcacattgaggttggtcccaaagatcaatatgtcatcgacatataagcacaagatcactccttctcccccaccatagcgatagtacacacatttgtcagctccgttcacaacaaagccttctagtacatacccgtctggttgatccatatagatctcctcctccagctctccgtttaggaaagctgtcttaacgttcatctgatggacgagaacaccatgagaggctgccagagcaagtagtactcgaatcattgtcaagtgagcaactggtgagtatgtgtcgaaaaaatccttgccttccttttgggtataacccttggccacaagtcttgccttgtacttttcgattgtaccatcagggctaagctttttcttgaaaacccatttgcatcctataggcttgcacccatatggacgctcaacgacttcccaagtatcattagacataatcgagtccatctcactgcgtactgcttccttccagtagtcagcgtcaggagatgaatatgcctcttctatggttcttggggtgtcatccacgaggtatacaatgtagtcatctccaaaggattttgcaaccctttgtctcttactcttacgagtatctacaatgttgtcctcctcaggattttcctcaggcgtttgatcattgtgttctatcggtgcaaagtgcttatggggcatgacagtttcttgactagaagtgctaggtgtatgtttcatggaaaattcattctcaaagaatgtagcatctcccgatgttcctccgccctcgctaatgaccatgttggcacacttcctgtctttgcgctcaggacagtccttggcccaatgcccagacttgccacacacaaagcagtcgccctttgcctttcccttgcctttcttcttaaagttggttgcaaccttgggtttgacatcaggcttgactttcttgttgttgttgtgggatgcatgacggttcttcttctgtaccatattggcactagaacctccctcaacctttttgccccagttgtcctttgccctcgccttctcctcaacacccaaagagccaatgagatcagaaacactgaactcttgcctcttgtgctttagagaagtggcaaagtccgaccaagaaggtggcaatttggcaataatgccacccgccacaaacttgtccggcaactcacagttgttgttctcaagttccttagtcagcatctgaatctcatgagcttgttctactacagaacggtcatcgaccatcttgtagtcataaaactgctccatgacatacagctcactgccggcgtcggaaactccgaacttggcctcaagtgcatcccacatgtccttcccgaaaggcatgtgcatgtacacgtccactatattgtcagcgagtacactgatcaatgctccacggaacaggcaatccgaagccttgaatttagcctcttcctcaggagaaagaggtggttcacttcgtttgccccgtgaaacatagaagcattgcatcgcccgagaatggccctccgctggattgtgaggcagaattgcctccgttggagttgacgttcgcaacgcctccggctcccggcgtgccatctccagaggcagcaacggcgccagcggcagctccggctcgaacggctccggctcccggcgcgccat

SEQ ID NO: 23411 - DNA, 6642 bp, Oryza sativa
  Clone ID: TF_OsC1713_5483
tcagtatccgctactactggtggcgtccacttcaaaactgatactttccggcgagtcgctgagcaaacaccgcacctcgtcgagctcgacgacgtcctgcgtccatggatgctggtgcagcttccgcagtccgcccagcctctcggcgacctccttcatcgccggcctgtcgccgccgcacatctgcaggcactccagagccagcagcgtgatctcctccagcaactcaccgctcgcctcgctcttcacctgctcatccagtatcaaatcggctctgttctccctcatggcggccaagaacctcgccgacaagctccgcccctcatccggcccgtcgaggcagagcggcttcttgccggtgagcagctcgagcaggacaacgccgaagctgtacacgtcgctcttctccgtgagctggcatgtctgcatgtattctgggtcgaggtaaccgcacgtcccctgcaccatggtcatcatttgggcttcgtcagtgggagccaagatggaggcgccgaagtcggacaccttggccatgatgctctcgtcgaggaggatgttggaggacttgacatcgccatggaggatcggcggcgacgcgaaggagtgcaggtacgcgagtgactccgccgactcgtgggcgatccggagacgggaagcgaaggagatggcgccggcagatccgccatggatgagctggtacaaggtgccattggggacgtactcgtagaccaacatggggacgtcgacctcgaggcagcagccgagtagcttgacgatgttcttgtggttgacctgggagaggatcagcatctccttcccgaattccttcttgttcctctcgtccattagcttgcaccgcttgatggcgacaacgaggtcgtcggaggctgcagccacccagcccttgtacacggtgccgtggccgccgcggccgaggacgttgctctcgtcgaagccgttggtcgcctgctcgagctgctcctcggtgtatatggtgaacgcgttgctcttcctcgcgttcagctcctcgtacagaagcaggccgccatgtcgcttgaagtagctgcgcttgatgtcggcaagcgctcttcgctggtgtactaggtatgagctcaggaagctcatcacgatgatagcgatgccaccggtgacgccgatagctatgatcgctgagaccgggagccggtaagatcgtttaaatttcaggtccggcaaagatcgtttcaggtccggctcgcagatgagtactccactcttgttgctcttgtgctctccttctggacacgagcagttgtgtccgccgggaaaattactgcaaatcatcccgtccggacacccgtcatttccaggagcacatacgtcaatatctgtgcatccgccggggaggtaggggttgcccttgtacccactcgtgcagttgcacacgtagccatcagccgtgccgacgcacgcgctgtggtcgctgacgcacgcgtaggtatctttcattcttgcttccttgcacttctcgctgcccgccgcgaagttgagcacgacggggaccgtgccgttcttgtttctgaaaaacttatcggttgtcgcgtagtccctctcgaagctgaagcttttagcctccatcaacacggcgtggctgcaccaggtgtaattgtccggcgaccagctgttattaaataataatggcccgctgaattcaagccggtaggatttgagtcccacggggatggccatctcgcagcatcccgcgccagagcagtagccgttcctgatgttgctcccgttgccgaagcatgtggacatgcagacgttcaggatcgggtcgactgacgcctcctctccggatagcaagacgagcacgttgcagccgacggtgacgaattggttgtcctcgtaggagaagcggtacggcagctccgtcacgtcgaggcccatccacgagctgttcttcaacggggcgccggttgggtcgttctcgtccttgcactgccaggagatgctgttggcaatccggatcttgccgtggagcaggttgatgtcgagcacggccaccaccacttgctgccgatcggtgccgaggcgaagctgcggggtgtcgtggacgcactcgaggctgaaatcgtcggacagcgagcagtttggcccgatgccgaacgggtactcgatgtcgacgttgccgcacttcttcggacacagcggcgacggcggcggccgccgtgatgcggccgcgatcagaggctgcagggcgagcaaagctaggccaaggaagagcagcattggatgatgcttcgtcatccgtgcctggaggtggctgtcgtagcagatgccacgttcccacgattccctccgcaacagcgcgtccacgttctttctcctgatagataaggaggccgcgagtccgatccgatttcttcgcttctttcccggtgttagtttctctttctccgcgcctgagttgctctcgcttccccgcttctgatctcttgcgcgcacgagagattggaaggagcagtgcctccgaaaccacacctttgcctgagatctgcaccgggtaggcgggtgatcaggtttttggggagtgcctcccgcacgactgctcatcaccatgtctggagttgccaccgccactgctggcggaggtggtacgccgccgacaggagctcgatccggagctggtgcgccaggaggtgccgtgaacgacaacaacaacggaggcaattcgccactgctggcggaggtggtacgccgccgacaggagctggatccggagctggtgcgccaggaggtgccgtgaacgacaacaacaacggaggcaattctgcctcaccatccagcggagggccattctcagggtataatcttctcctcctgctactgttgttagcgctatcgctatactatgtgcgctatgttcttgttcctgttctacatggtgcctctagcatgttatcgcgttactgttatgttcctgttcctgacattcaggatgcgcatagtatgctactggttatgttaagatcaccctacactgcttatgccatgatcattgctttaaccttttggattaaaatatgccgattaatgactatatttccaacaatccaaaaacctgataggtcattttcggtagttggctttgctgctgcactgaaaccacatgcttttgatggttcaaactataagagatggaaagcacgtgcactattgtggttgacagcgatgcagtgcttctatgtttcacggggcaaacgaagtgaaccacctctttctcctgaggaagaggctaagttcgaggcttcggattgcctgttccgtggagcattgatcagtgtactcgctgacaacatagtggacgtgtacatgcacatgccttctgggaaggacatgtgggatgcacttgaggccaagttcggagtttctgacgccggcagtgagctgtatgttatggagcagttctatgactacaagatggtcgatgaccgttctgtagtagaacaagctcatgagattcagatgctggctaaggaacttgagaacaacaactgtgagttgccggacaagtttgtggcaggtggcattattgccaaactaccaccttcttggtcggactttgccacttctctaaagcacaagagacaagagttcagtgttcctgatctcattggctctttgggtgttgagaagaaggcgagggcaaaggacgtccagggcaaaaaggttgagggaggttctagtgccaatatggtacagaagaagaaccctcatgcatcccacaacaacaagaaagtcaagcctgatgtcaaacccaagactgcaaccaattttaagaagaaaggcaagggaaaggcaaagggagactgctttgtgtgtggcaagtctgggcattgggccaaggactgtcctgagcgcaaagacaggaagtctgccaacatgatcattagcgagggaggaggaacatcggggtacggtaaaatattacctacagttctctctgtttttcattcacctgattggtgggtagacactggtgctaatattcatgtatgtgctgacatttctctgttttcttcttatcaggtcgggagaggttcctccttgttgataggaaacgggtcgcttgcggctgttcatggtgttggtacggtcgatctgaagtttacttcgggaaagaccgtgcagctgaagaacgtgcagcatgtcccttcaataaagaagaatctagttagcggctctctattgtgtagagaaggttttagacttgtgtttgagtccaataaatgtgtcgtatctaaatatgggacttttgttggaaaaggttatgacagcggaggcttgttccgcttttctttgaatgacatgtgtaataatcataatgctgtgaaccatattagcgagaatgatgagtctaatgtgtggcattcgcgactctgtcatgtgaatttcggttgtatgacgcgcttagctaacatgagtttaatttcaaaattcactttggtaaaaggttccaagtaccatacttgtgttcaatcgaaacaacctcgcaagccacacaaggcatctgaggcgaggaatttggcacctctagaacatgttcattccgatttgtgcgaaatgaacggcgtgttgactaaagggggaaagaaatatttcatgacactgatagatgattgcactagattttgctatgtgtatctattgaaaacaaaggatgagacattgcattactttaaaatctataaagctgaggtagaaaaccaacttgaaaggaaaatcaaacggttgaggtctgatagaggtggggagtatttttccaatgagtttgcatccttttgcgaagagtttggaattattcatgagatgacgcctccctattcaccccaatcaaatggggtggccgaaagaaagaaccgtactctaactgagatggtgaataccatgttagacactgcggggctttccaaggaatggtggggtgaggcagttttgactgcgtgtcatgtcctgaataaaattccaatgaagcataaggaagtaacaccattcgaggaatgggaaaggaagaaattaaatctctcatacctacgaacatggggctgtttggccaaagtaaatgtacctatagccaaaaagcggaaacttggaccaaaaactgttgattgtgtgtttcttggttatgctatccacagtgtggattatagattcttaatagtaaactctggagtacccgacatgcatgttggtacaattcttgagtccagagatgctacattctttgagaatgaatttcctatgaaatatacacctagcacttctagtaaagaaactgtcatgccccatgagcactttgcaccgatagaacacaatgatcaaacgcctaaggaaaatcctgaggaggacaacattgtagatactcgcaagagtaagagacaaagggttgcaaaatcctttggagatgactacattgtatacctcgtggatgacaccccaagaaccatagaagaggcatattcatctcctgacgctgactactggaaggaagcagtacgcagtgaaatggactcgattatgtctaatggtacttgggaagtcgttgagcgtccatatgggtgcaagcccgtaggatgcaaatgggttttcaagaaaaagcttaggcctgatggtacaatcgaaaagtacaaggcaaggcttgtggccaagggttatacccaaaaggaaggcgaggacttcttcgacacatactcaccagttgctcgcttgaccacgattcgagtactacttgctctggcagcctctcatggtcttctcgtccatcagatggacgttaagacagctttcctaaacggagagctggaggaggagatctatatggatcaaccagacggatatgtactagaaggtcaggagggaatggtgtgtaaactattgaaatccttgtatggcctcaagcaagcgcctaagcaatggcatgagaagtttgacaccacgcttacatctgcaggctttgttgtgaacgaagctgacaaatgtgtatactatcgctatggtgggggagaaggggtgatcttgtgcttatatgtcgatgacatactgatctttgggaccagccttaatgtgattgaggaggtcaaagactatctgtccaagagttttgaaatgaaggatttgggagaggctgatgttattcttaacatcaaactacaaagaggagatgagggtgggattacacttatgcaatcccactatgtggacaaggttttgaatcactttggatatagtgactgcaagccagctcctactccttatgatcccagcgtgctattaaggaaaaaccaaagaatagtaagggatcagctgagatactctcaaatcattggttcattgatgtacttggctagtgcaacgaggcctgacatctcatttgctgtaagcaagctgagccggtttgtctcaaatccgggagatgatcattggcaggctctggaaagagtaatgcgctatctaaagggcactatgagctatggaattcactataccgggtatccaaaagtactagaagggtatagtgactcaaactggatatctgatgctgatgagataaaagccacaagtagatatgtggtcatacttggaggtggcgctgtttcctag

SEQ ID NO: 23412 - DNA, 4622 bp, Oryza sativa
  Clone ID: TF_OsC1713_5486
atggcgagcttgggggcgaacccatcggtcttcgtcgcttggcttcgcccaagcgcttcaccctattgcttcgccccgagcgcactcctttggactcagtcgacgcctagtggattcggtggtttcagcagtcccactagttgcaaccgctcctcggcatgcttgtggtctctgcagaaggataggggcgacgccgacatgtgcgagaacgagatgaagcgtgagcctccacaaagacaagtagtcctgccaactgtaataacagttcttcagccatgtcagcactgccattggagacgggcgggcgatcaggtttttgggagctcaaggcgcgactactcactgttcgtcaacatctacttcaccttcaccaacatgtcgaacactggagacaaggagaaggagactcccgtcaacaccaacggaggcaatactgcctcaaactccagcggaggaccattcttggggtataaccttattacattatttcaattagaagttttactgttaatgttcatcgcaatgtcaacattgtgtcattatgtgattgttgatgcttattcaacgttaagcatgctcatgttgattacattcaccactatcactggatcaaatcctattgtaaatatcatgattattatcttgttattttggattaaaatatgccgaattatgaccaaatttccaacaatccaaaaacctgataggtcattttcggtagttggctttgctgctgcactgaaaccacatgcctttgatggttcaaactataagagatggaaagcacgtgcactattgtggttgacagcgatgcagtgcttctatgtttcacggggcaaacgaagtgaaccacctctttctcctgaggaagaggctaagttcgaggcttcggattgcctgttccgtggagcattgatcagtgtactcgctgacaacatagtggacgtgtacatgcacatgccttctgggaaggacatgtgggatgcacttgaggccaagttcggagtttctgacgccggcagtgagctgtatgttatggagcagttctatgactacaagatggtcgatgaccgttctgtagttgaacaagctcatgagattcagatgctggctaaggaacttgagaacaacaactgtgagttgccggacaagtttgtggcaggtggcattattgccaaactaccaccttcttggtcggactttgccacttctctaaagcacaagagacaagagttcagtgttcctgatctcattggctctttgggtgttgaggagaaggcgagggcaaaggacgtccggggcaaaaaggttgagggaggttctagtgccaatatggtacagaagaagaaccctcatgcatcccacaacaacaagaaagtcaagcctgatgtcaaacccaaggctgcaaccaattttaagaagaaaagcaagggaaaggcaaagggagactgctttgtgtgtggcaagtctgggcattgggccaaggactgtcctgagcgcaaagacaggaagtctgccaacatgatcattagcgagggcggaggaacatcggggtacggtaaaatattacctacagttctctctgtttttcattcacctgattggtgggtggacactggtgctaatattcatgtatgtgctgacatttctctattttcttcttatcaggtcgggagaggttcctccttgttgatgggaaacgggtcgcttgcggctgttcatggtgttggtacggtcgatctgaagtttacttcgggaaagaccgtgcagctgaagaacgtgcagcatgtcccttcaataaagaagaatctagttagcggctctctattgtgtagagaaggttttagacttgtgtttgagtccaataaatgtgtcgtatctaaatatgggacttttgttggaaaaggttatgacagcggaggcttgttccgcttttctttgaatgacatgtgtaataatcataatgctgtgaaccatattagcgagaatgatgagtctaatgtgtggcattcgcgactctgtcatgtgaatttcggttgtatgacgcgcttagctaacatgagtttaattccaaaattcactttggtaaaaggttccaagtgccatacttgtgttcaatcgaaacaacctcgcaagcctcacaaggcatctgaggcgaggaatttggcacctctagaacttgttcattccgatttgtgcgaaatgaacggcgtgttgactaaagggggaaagaaatatttcatgacactgatagatgattgcactagattttgctatgtgtatctattgaaaacaaaggatgaggcattgcatttctttaaaatctataaagctgaggtagaaaaccaacttgaaaggaaaatcaaacggttgaggtctgatagaggtggggagtatttttccaatgagtttgcatccttttgcgaagagtttggaattattcatgagatgacgcctccctattcaccccaatcaaatggggtggccgaaagaaagaaccgtactctaactgagatggtgaatgccatgttagacagtgcggggctttccaaggaatggtggggtgaggcagttttgactgcgtgtcatgtcctgaataaaattccaatgaagcataaggaagtaacaccattcgaggaatgggaaaggaagaaattaaatctctcatacctacgaacatggggctgtttggccaaggtaaatgtacctatagccaaaaagcggaaacttggaccaaaaactgttgattgtgtgtttcttggttatgctatccacagtgtgggttatagattcttaatagtaaactctagagtacccgacatgcatgttggtacaattcttgagtccagagatgctacattctttgagaatgaatttcctatgaaatatacacctagcacttctagtaaagaaactgtcatgccccatgagcactttgcaccgatagaacacaatgatcaaacgcctgaggaaaatcctgaggaggacaacattgtagatactcgcaagagtaagagacaaagggttgcaaaatcctttggagatgactacattgtatacctcgtggatgacaccccaagaaccatagaagaggcatattcatctcctgacgctgactactggaaggaagcagtacgcagtgaaatggactcgattatgtctaatggtacttgggaagtcgttgagcgtccatatgggtgcaagcccgtaggatgcaaatgggttttcaagaaaaagcttaggcctgatggtacaatcgaaaagtacaaggcaaggcttgtggccaagggttatacccaaaaggaaggcgaggacttcttcgacacatactcaccagttgctcgcttgaccacgattcgagtactacttgctctggcagcctctcatggtcttctcgtccatctgatcagatggacgttaagacagctttcctaaacggagagctggaggaggagatctatatggatcaaccagacgggtatgtactagaaggtcaggagggaatggtgtgtaaactattgaaatccttgtatggcctcaagcaagcacctaagcaatggcatgagaagtttgacaccacgcttacatctgcaggctttgttgtgaacgaagctgacaaatgtgtatactatcgctatggtgggggagaaggggtgatcttgtgcttatatgtcgatgacatactgatctttgggaccagccttaatgtgattgaggaggtcaaagactatctgtccaagagttttgaaatgaaagatttgggagaggctgatgttattcttaacatcaaactacaaagaggagatgagggtgggattacacttgtgcaatcccactatgtggacaaggttttgagtcgctttggatatagtgactgcaagccagctcctactccttatgatcccagcgtgctattaaggaaaaaccgaagaatagcaagggatcagctgagatactctcaaatcattggttcattgatgtacttggctagcgcaacgaggcctgacatctcatttgctgtaagcaagctgagccggtttgtctcaaatccgggagatgatcattggcaggctctggaaagagtaatgcgctatctaaagggtactatgagctatggaattcactataccgggtatccaaaagtactagaagggtatagtgactcaaactggatatctgatgctgatgagataaaagccacaagtggatatgtgttcacacttggaggtggcgctgtttcctggaagtcttgcaagcagaccatcttaacgaggtcaacaatggaagcagaacttacagcactagatactgcgacagttgaggccgagtggcttcgtgaactcctgatggatttgccggtggttgaaaaaccagtgccagctatcctaatgaactgcgataatcaaacagtgattattaaagtgaacagttcaaaggacaacatgaagtcatctagacacatcaagagaagactgaaatctgtcagaaagcagaaaaactccggagtgatagcattggactatgtccaaacggctagaaatctggcagatcagtttaccaaggggctaccacgtaatgtgatagacagtgcatcgagggaaatgggcttgatacccacctaa

SEQ ID NO: 23413 - DNA, 4199 bp, Oryza sativa
  Clone ID: TF_OsC1528_2046
ctagaagagagcatgcggcgtcatgatgtagtcgtcggtatacacagcgcgctcctcgaatgacattggctcgccgtggagcttcacccaggttgtgacatcgttcggccgttgtcgagcatgtaggtttcgtgtagtcccctgtggagaggaggagaccatggtgatatgacctgtggtgcatggtccaagcgacatgatgtggcagctcaaaaggttgcggtaagggtgaccatgtctcgccaatgccagcccggtgaacactttccctgagctggtgtcagtgatgtcgctctcaacattgttggcgccgttggattttccggtgatgccgatgatcttcgaaccaaccttgatgaagtccatgccaataaggtgagcgatagggggtttggtgagctcttcaccaatgttgaagatgctatgtcaatgcagtgtgcacgacatagccgaagtggtcattgtggccatcttgcaagatcagctagaggcgtaaaaaggcttcttggtcctctaatgatggtagagccgctgatcctcatgcatcggtgttaccatctgccacaaaccagagtcgccaaagtttgttgtctagcattgaaccccaaacaacggtgggactctggctcagggaacatcaaggagatcaaaattcgtggcgagctcggactcagagatgaacaatcatcgtcagacgctgcactcacgtggcaatcgacgcggacactgagaaaacatcttctcatacgacgtggtgaatgttggtcggagtactcctccatcgtcaacaccgacgacgaagcaaaggcgacctgcaactcattttgtgagacatgttggaagattctacggtttcgctccaaccagacattccaccagctgaacccgttcctcaatctccgaaacagatgtaatcgggttaagcatggcaatccaatggttgtcttgcagttccacctggagattatttccctttcttttggcaagcttgaaaatagagggcgcaatgtgttgagggggagactgaggtatttgcaggggaaagatttcaggcttcctgtgaaagaagggagaaggccttcaacatcaataccagagcatgatattgggaagatttcagttttgattaaatcattatatgcctataatctcaacaatccaaaaacttattataggcactgtgattttactatggctggttttgccgatgcactgaggccggataaatttaccggtgtgcattttaagagatggcagatcagggtcactctgtggctgacagctatgaaatgcttctgggtgagtactggcaaacctgaaggagttcttactgctgaacagcagaagcaattcgaggaagccactactctctgtgtaggatgcattcttagcgttcttggcgatcgtctggtcgaggtgtatatgcatatgaccgacgcaaaggagttgtgggatgcactgaatactaaattcggtgctactgatgctagcaatgatctgtatatcatggagcagtttcatgactacaagatggctgacaaccgttctgtagtcgaacaggctcatgagatacaaaccatggctaaggaacttgaactccttaagtgtgttttacccgacaaatttgtggccaggtgcattattgcgaaactacctccatcttggagaagtttcggtactgcactcaaacacaagagacaggaatactccgttgaggggttgatagcgtctcttgatgttgaggagaaagctcgggaaaaagatgccgcgtctaagggcgatggtgggcagtccagtgccaatgttgtgcacaaggcccagaacaagagcaaggggaaatacaaagctcagcagaccaccaacttcaagaagcagaagaagaacaacaacaatcctaatcaggatgagaggacttgctttgtgtgtggccaacttggtcatctggctaggaagtgtccacagcgcaaggggatgaaggcacctacagggcagacttctaagtctgctaatgtgaccattagcaacactggagatggaagcgggtatggtaatttacctgctattttttcagttaatcagtctactaattggtgggttgatactaggtccaatgtcgcacggggttccaccgtcctaatggggaatgggtcacatgtttctgttcatggtgttggcacggtagatctgaagtttacttcgggaaagatcgtgcagctgaagaacgtgcagcatgtcccttctatcgacaggaatcttgttagtggctcccgtctgactagagctggatttaagttggtttttgagtctaataaagtagtcgtgtccaaacatggatattttattggtaaaggttatgagtgcggaggcctgttccgcttttccctttctgatttctgcaataagtctgtgaaccatatttgtggcagtgtggatgatgaggctaatgtttggcactcacgtttatgtcatattaattttggcttgatgtctcggctttccagcatgtgtttaattcctaagttttccattgtcaaaggttctaagtgccatagttgtgtgcaatcgaagcaacctcgcaagcctcacaaggttgccgaggaaagaaacttggcaccactagaactcttacattcagatctttgtgaaatgaatggggtgttgacaaagggtggaaaacgatatttcatgactttgattgatgatgctactagattttgctatgtgtacttgttgaaaacgaaagacgaagctctagactattttaaaatttataaggcagaagttgaaaatcaacttgacagaaagataaaaagacttatgtctgatcgtagtggagagtttttctcaaacgagtttgacttattctgtgaggaacaggacatcatacatgagaggacgcccccctattctcccgagtctaatgggattgctaaaaggaagaaccgcacactgactgacttggtgaatgccatgttggacactgcgggactacctaaggcatggtggggggaggcattgttgacctcaaattatgtgttaaacagagttcctaacagaaataaggacaaaacaccatatgagatatggatcgggagaaaaccatcactttcttacttgcgcacatgggggtgcttggcgcaagtcaatgtaccaataacgaataagcacaaacttggacctaagactgtagactgtgtctttctgggatatgcttatcacaacattgcctatagatttttaatagttaaatctgaggtacctgacatgcatgttggtcaattatgaagtctcgtgatgctaccttttttgagagcttttttccaatgaaggatacacatagtagttcgagccaaccctctgaagtaattcctagttcaatcacaccaccagaacaaactgaacatacacatgaatatgtcactgaggaggatgtcagtgaagctcctcgaaggagtaagagacaaaggacagctaagtcctttggtgatgatttcattgtgtacctcgtggatgacactcctaagtcaatttcagaagcatatgcatctcctgatgcagactactagaaggaggttgtctgtagtgaaatggattccattatcgctaacgggacttgggaggtgacagagcgaccctatgggtgtaaacctgttgggtgcaaatgagtgttcaagaagaagcttaggcctgatggtactattgaaaagtacaaggttcggcttgttactaagggctatactcagaaagaaggcgaatatttctttgatacttactcacctgttgctagattgaccacaattcgtgtgctactttccctagcagcctcacatagtcttctcgttcatcaaatggacgttaagacagcttttcttaatggagagctggatgaggagatctatatggatcaacctgatgggtttgtagttgaaggtcaagaaggcaaaatgtgcaaattgttgaagtctttgtatggtttgaaacatgctcctaagcaatggcatgagaaatttgacaaaacattgacatctacaggctttgcagtcaatgaggcagataaatgtgtgtactatagccatggtgggggtgagggagttattctgtgcttgtatgttgatgacatactgatatttgggacaaaccttgaggtgataaatgaggttacatcaaccctctctcttcatcgacctgtgtcggaggcg

SEQ ID NO: 23414 - DNA, 960 bp, Oryza sativa; identical to SEQ ID NO: 15564
  Clone ID: TF_OsC108353_1

SEQ ID NO: 23415 - DNA, 8279 bp, Oryza sativa
  Clone ID: TF_OsC359_7779
gtggatccccgggctgcaggcagcaaagtttacaatactgttttatttaatcttgctgcaataaaataaattagtatgttgattttatgactttcttttgaaaccagttattcaaaattacaaaattgtgatctcgtttccaactgttttaatttatttcgcaaagcttggtttactttatttacttccctttttactttgattttctaactttattcaaattaatccaaaaacttgtgctattaattggataaaggtcttaactccctcctttcacttgtctttagatgccgcgttacaagcctgagtacctgtttggtgttgagggttttgtccaggagttgcgcacgatgtcctttgtcattggatttgggactgcccctttttatgcccagattcctcatgatcgtcatgaagagaagtgccgagtcaaagtcaccttgaacagcaatagtgaagaggtcccctcagtgatgtttgaagctggaggaagaaactacatccatgcatgtcaggaggtggcaaggatcgccataggagagctccgtgatcgctacagtgatcaattggccgacactgagtatcgctaccatcctcgccaacctcagggaagtgaccgtggcagttaccttgagactgaaggaattgagaatgatgttaccacgaaacatttggttgagatgttgtgggctatggatgaaagtcgtgcggagactgtgttagcagctcaagatcgtgaagatcggaatcgtggtaagatttgcaagctagaagacaaggtggatcgtttggagaaggaattagccgcattgaagggagaagcaccgccgcagaaggccaggattcgtcttaccgcaaggaagagagctttatttgtccctcgctatcaactggcgccaaaggttcgtgtggtggagaaagaagttgccccagctcaagcggatcctccggtcatcatcataagtagtgatgaagaagaagaatccaagcgcaaccattccaagattgagtgggtagcaactcaagatgatgaagatgagccttcaattgacctccgatgcttggaagaactagataccactaatcctgttgaagctagtgattggctgcatgccatagagaagaagttggatttacttcagtgtactgatcaggagaaggtctcatttgcatcacatcagttgcatggccctgcctctgaatggtgggatcacttccgccttaacaggactactgctgaacctatcacttggcttgaattcaccgctgctttccggaagacgcatataccatcgggagtagtgtctctcaagaagaaggagttcaggtcgctttcccagggatctcgctctgttacggagtatctgcacgagttcaatcgtcttgctcgttatgctccggaagatgtgcgcaatgatgaagagcgccaggagaagtttttgggaggacttaatgatgagctttcttacccactcatggttggagattaccctgatttccagaaattagtggataaggctattcgtcaggaggacaagtacaatcgcatggagcagaagaaacgtcggattgctcaattcaagacacaacagggaaataatcagaagccgcgtcttactttaggaccccagtccatgccacagggaggttcttcgtctgttgttcgtccgcaacgtcagttcttcaacaacaatgctggcaacaacattcgtaatcaagctccacgtcctgttgcagctccagcacagcaacaacctgccaagagggagcaaggcaacaagcccgtggtgtgtttcaactgtggagacccaggacattatgctgacaagtgtccgaagccccgacgcgtgaaggttgtccctgcccagaataactctgctgtaccagcatccaaggctcgtgtaaatcatgtcgctgctgcagaagctcaagatgctccagatgtgattttggtccgggagtatcctgatgtgttcccagatgatttacctgccaatgagttggcagaagttaagaggcaagtagatgatttgctacagaaaggatacatcagaccgagttcatcaccatggggagctccggttatctttgtggaaaagaaagaccatactcagagaatgtgtgtggactatcgtgcactaaacgatgtgactatcaagaataagtatccactacccaggattgatgatttgtttgatcagcttaaaggtgccactgttttctccaagatagatcttcgatcagggtatcatcagttgagaatcaaagaggaagatatacctaagacagcttttaccactaggtatgggttgttcgaatgtactgttatgtcttttggacttaccaatgcccctgctttcttcatgaacttgatgaataaggtgtttatggaatacttagacaagttcgtggtggtctttattgatgatattcttatctactctcgaaccaaagaagagcatgaggaacatcttcgccttgcattggagaagctacgagaacatcaactgtatgctaagtttagcaagtgtgaattttggttgtccgaagtgaaattccttggtcacgtcatctcagccggaggagttgccgtcgatcctagtaacgtggaatccgtaaccaattggaagcaaccaaagacagtttcagagattcgcagtttcctaggccttgcaggatattatcggaggtttatagagaatttttccaagattgctaagcccatgacacgactgcttcagaaagatgtgaagtacaagtggtcggaagaatccttagaagcgaagcccactctaattgatcaagttagagaagcccaaattaatgatcctgatattcaagagatcaagaagaatatgagaagaggaaaagctattggtttcttggaggatgagcaaggaacaccgtgctccgccgtcgctccagctgtcgccgccgctcgggaagaccgccgtcgtcatcgccaagtcgccgccgtcctcgtccgccccttcgcagccgtcggaacccgccggagcttcgtcgccgtcgacaacccgaaggtagccgccgcttccttctcgtcgccgtcgtcgtccaagattccgtcgtttccggagagtccgttttcgcagaagaagagtttgaagagttccaaggccagcaaggcaactcctggtttggaatggtacattcctggtttggagatagaactgtgcagccggggtggttgttcagaatggttgggcctatacaacaggatgccgcgctacaagcctgagtacctgtttggtgttgaagggtttgtccaggagttgcgtactatgtcctttgtcattggatttggaactgcccctttttatgcccagattcgtcatgatcgtcatgaagagaggtgccgtgtcaaagtcaccttaaacagtaatagtgaagatattccatcagtgatgttcgaagctggaggaagaaattatatccatgcatgtcaggaagtggcaaggatcgccataggagagctccgtgaccgctacagtgatcagttggccgatactgagtatcgctaccatcctcgccaaccacagggaagtgaccgtggcagttaccttgagactgaaggaattgagaatgatgctaccacaaggcatttggttgagatgctgtgggctatggatgaaagtcgtgcggagactgtgttagcggctcaagatcgtgaagaccggaatcgtggtaagatttgcaagctagaagacaaggtggatcgcttggagaaggaattagccgcattgaagggagaagcaccgccgcagaaggccaggattcgtctcaccgcaaggaagagaactttgtttgtccctcgttatcaattggcgccaaagatggtgaacactcgcagcaacgggaatggtcctaacctcaacaaccccaataacaacaacaatggagagaatcccactcttgctcaagttcttgctcaacagacacagcttatgaacatgatgatgcagcaatttcagaatcagcagaaccaaggaaataaccatgtacctcctcagaataagttagcagaatttcttcgtgtgaggccgcctgttttctctagtaccactaatcctgttgaagctagtgattggctgcatgccatagagaagaagttggatttacttcagtgtactgatcaggagaaggtctcatttgcatcacatcagttgcatggccctgcctctgaatggtgggatcacttccgccttaacaggactactgctgaacctatcacttggcttgaattcaccgctgctttccgaaagacgcatataccatcgggagtagtgtctctcaagaagaaggagttcaggtcgctttcccagggatctcgctctgttacggagtatctgcacgagttcaatcgtcttgctcgttatgctccggaagatgtgcgcaatgatgaagagcgccaggagaagtttttgggaggacttaatgatgagctttcttacccactcatggttggagattatcctgatttccagaaattagtggataaggctattcgtcaggaggacaagtacaatcgcatggagcagaagaaacgtcggattgctcaattcaagacacaacagggaaataatcagaagccgcgtcttactttaggaccccagcccatgccacagggaggttcttcgtctgttgttcgtccgcaacgtcagttcttcaacaacaatgctggcaacaacatccgtaatctagctccacgtcctgttgcagttccagcacagcaacaacctgccaagagggagcaaggcaacaagcccgtggtgtgtttcaactgtggagatccaggacattatgctgacaaatgtccgaagccccgacgcgtgaaggttgtccctgcccagaataactctgctgtaccaacatccaaggctcgtgtaaatcatgtcgctgctgcagaagctcaagatgctccagatgtgattttgggtatgttccttgttaactcagttcctgcaacagtgcttttcgattctggtgctacacattcattcttatctatgagttttgcgggaaatcatgggatggaagtagaagaccttagatgtcctttgatggttagtaccccaagtaatcaagcactctctttgcaacgtagcccctctgtcagaatagaaattcaaggagtaccatttctggccaatcttatcttgttagaatccaaagaccttgatgtcatcctagggatggactggttagccagacataaaggtgtgatagactgtgccaacagaaaagtaactctcaacagctatgatggtcgagttgtaactgttcatgcattgtcatctgagtctttaaggtcaagactgaaccagataactttggaagagattcctatagtccgggagtatcctgatgtgttcccagatgatttacctggtatgccgcctaaaagggatatagagttcagaatagatttggtacctggaacaactccgatccataagagaccttatcgaatggcagccaatgagttggcagaagttaagaggcaagtagatgatttgctacagaaaggatacatcagaccgagttcatcaccatggggagctccggttatttttgtggaaaagaaagaccatactcagagaatgtgtgtggactatcgtgcactaaacgatgtgactattaagaataagtatccactacccaggattgatgatttgtttgatcaacttaaaggtgccactgttttctccaagatagatcttcgatcagggtatcatcagttgagaatcaaagaggaagatatacctaagacagcttttaccactaggtatgggttgttcgaatgtactgttatgtcttttggacttaccaatgcccctgctttcttcatgaacttgatgaataaggtgtttatggaatacttagacaagttcgtggtggtctttatagatgatattcttatctactctcgaaccaaagaagagcatgaagaacatcttcgccttgcattggagaagctacgagaacatcaactgtatgctaagtttagcaagtgtgaattttggttgtccgaagtgaaattccttggtcacatcatctcagccggaggagttgccgtcgatcctagtaacgtggaatccgtaaccaattggaagcaaccaaagacagtttcagagattcgcagtttcctaggccttgcaggatattatcggaggtttatagagaatttttccaagattgctaagcccatgacacgactgcttcagaaagatgtgaagtacaagtggtcggaagaatgtgagcagagttttcaagagttgaaaagtcgcttaatatcagctcctattttgattttgcctgatccaaagaagggttttcaagtgtattgtgatgcatccaaacttgggttaggttgtgttctgatgcaagatgggaaggtggttgcctatgcctctcgacagttacgtccgcatgagaagaactaccctactcatgatattgagttagctgcagtcgttcatgcattgaagatttggcgtcattatcttttcggtactcgtacagaagtgtacaccgatcacaagagtttaaagtatatctttactcagtcggatctgaacatgagacaacggagatggttggaattaattaaggattatgacatgggaattcattatcatccgggaaaggctaatgttgtagcagacgctcttagcagaaaaggctattgcaatgctacagaaggacgacagttgccattggaattatgcaaggaatttgaaagattaaatttgggaattgtcggtagaggtttcgttgcagccttagaagcgaagcccactctaattgatcaagttagagaagcccaaattaatgatcctgatattcaagagatcaagaagaatatgagaagaggaaaagctattggtttcttggaggatgagcacggaactgtatggttgggtgagagaatctgtgtccccgacaacaaagatttaaaggatgcaattctgaaagaagctcatgatactttatactccattcaccctggtagtactaagatgtaccaggatctcaaggaaagattttggtgggcaagtatgaagcgtgaaatcgcagaatatgtagcagtatgtgatgtttgtcagcgagtcaaggcagaacatcagaaacccgccggtttgttgcagcctttgaagattcctgaatggaaatgggaagaaataggtatggattttattactggtttacccagaacgtcatcaggccatgactctatttgggtgatagtcgacagacttaccaaagtggctcatttcattccggtaaagacaacttattccggaagtcgcttagcggaattgtatatggcaaggattgtgtgtttgcatggcgtccctaagaagatagtgtctgatcgaggcagtcagtttacttcaaatttttggaagaaacttcaggaagagatgggttctaagctgaactttagtactgcttatcatccgcagacagacggacaaaccgaaagggtgaatcaaattttggaagacatgttgagagcttgtgctctagatttcggtggaagttgggataagaatctaccctatgcagaattttcgtacaacaacagttatcaagctagtctacagatggctccgtatgaagcactgtatggtcggaagtgccgcactccgcttttgtgggatcaaacgggagaacgtcaggttttcggaacggatatcctaagggaagcagaagaaaaggtaaagatcattcaagaaagattgcgtgtggctcagtctcgtcataagagttatgccgacaatcgccgtagggatttgagttttgaagaaggagattatgtgtatcttcgtgtcacgcctctacgaggagttcatcgttttcataccaagggaaaattggcaccgcgttttgtgggaccttataagattgtcagtagaagaggagaggttgcttatcagttggagttacctcaatctttggcaggagtacataatgtgttccatgtgtcgcaattgaaaaagtgtttaagggtacctactgaagaagctaatattgagcagatagaagtccaagaggatttgacttatgttgagaaaccaatccgtatcctggaaacaaatgagagaagaaccaggaatcgagttatccgtttttgtaaagtccagtggagtaatcactcggaagaagaatcaacttgggaacgagaagatgaattgaagtcagctcatccgcacctgttcgccagttcttccgaatctcgaggacgagattctgtt

SEQ ID NO: 23416 - DNA, 4000 bp, Oryza sativa
  Clone ID: TF_OsC1713_4911
gtcgctatccttttgcaggcactaacccacgttcccacgattccctccgcaacagcgcgtccacgttctttctcctgatagataaggaggccgcgagtccgatccgttttcttagcttctttcccggtgttagtttcttcttctccgcgcctgaattgctctcgcttcctcgcttctgatctcttgcgcgcacgagagaatggaaggagcagtgcctccgaaaccacaccttcgcctgagatctgcaccgggtaggcgggtgatcaggtttttggggagtgcctcccgcacgactgctcgactgctcatcgccatgtctggagttgccgccgccactgctggcggtggtggtacgccgccgacaggagctggatccggagctggtgcgccaggaggtgccgtgaacgacaacaacaacggaggcaattctgcctcaccatccagcggagggccattctcggggtatactcttctcctcctgctactgttgttagcgctattcctgttcccattgttagcgctatcgctatactatgtgcgctatgttcttgttcctgttctacataatgcctctagcatgttatcgtgttactggtatgttcctgttcctgacattcatgatgcgcatagtatgctactggttatgttaagatcaccctacactgcttatgccatgatcattgctttaactttttggattaaaatatgccgattaatgactatatttccaacaatccaaaaacctgataggtcattttcggtagttggctttgctgctgcactgaaaccacatgcttttgatggttcaaactataagagatggaaagcacgtgcactattgtggttgacagcgatgcagtgcttctatgtttcacggggcaaacgaagtgaaccacctctttctcctgaggaagaggctaagttcgaggcttcggattgcctgttccgtggagcattgatcagtgtactcgctgacaacatagtggacgtgtacatgcacatgccttctgggaaggacatgtgggatgcacttgaggccaagttcggagtttctgacgccggcagtgagctgtatgtcatggagcagttctatgactacaagatggtcgatgaccgttctgtagtagaacaagctcatgagattcagatgctggctaaagaacttgagaacaacaactgtgagttgccggacaagtttgtggcgggtggcattattgccaaactaccaccttcttggtcggactttgccacttctctaaagcacaagagacaagagttcagtgttcctgatctcattggctctttgggtgttgaggagaaggcgagggcaaaggacgtgcggggcaaaaaggttgagggaggttctagtgccaatatggtacagaagaagaaccctcatgcatcccacaacaacaagaaagtcaagcctgatgtcaaacccaaggctgcaaccaattttaagaagaaaggcaagggaaaggcaaagggagactgctttgtgtgtggcaagtatgggcattgggccaaggactgtcctgagcgcaaagacaggaagtctgccaacatggtcattagcgagggcggaggaacatcggggtacggtaaaatattacctacagttctctctgtttttcattcacctgattggtgggtggatactggtgctaatattcatgtcgggagaggttcctccttgttgatgggaaacgggtcgcttgcggctgttcatggtgttggtacggtcgatctgaagtttacttcgggaaagaccgtgcagctgaagaacgtgcagcatgtcccttcaataaagaagaatctagttagcggctctctattgtgtagagaaggttttagacttgtgtttgagtccaataaatgtgtcgtttctaaatatgggacttttgttggaaaaggttccaagtgccatacttgtgttcaatcgaaacaacctcgcaaggctcacaaggcgtctgaggcgaggaatttggcacctctagaacttgttcattccgatttgtgcgaaatgaacggcgtgttgactaaagggggaaagaaatatttcatgacactgatagatgattgcactagattttgctatgtgtatctattgaaaacaaaggatgaggcattgcattactttaaaatctataaagctgaggtagaaaaccaacttgaaaggaaaatcaaacggttgaggtctgatagaggtggggagtatttttccaatgagtttgcatccttttgcgaagagtttggaattattcatgagatgatgcctccctattcaccccaatcaaatggggtggccgaaagaaagaaccgtactctaactgagatggtgaatgccatgttagacactgcggggctttccaaggaatggtggggtgaggcagttttgactgcgtgtcatgtcctgaataaaattccaatgaagcataaggaagtaaatgtacctatagccaaaaagcggaaacttggaccaaaaactgttgattgtgtgttttttggttatgctatccacagtgtgggttatagattcttaatagtaaactctggagtacccgacatgcatgctggtacaattcttgagtctagagatgctacattctttgagaatgaatttcctatgaaatatacacctagcacttctagtaaagaaactgtcatgccccatgagcactttgcaccgatagaacacaatgatcaaacgcctgaggaaaatcctgaggaggacaacattgtagatactcgcaagcgtaagagacaaagggttgcaaaatcctttggagatgactacattgtatacctcgtggatgacaccccaagaaccatagaagaggcatattcatctcctgacgctgactactggaaggaagcagtacgcagtgaaatggactcgattatgtctaatggtacttgggaagtcgttgagcgtccatatgggtgcaagcccgtaggatgcaaatgggttttcaagaaaaaacttaggcctgatggtacaatcgaaaagtacaaggcaagacttgtggccaagggttatacccaaaaggaaggcgaggacttcttcgacacatactcaccagttgctcgcttgaccacgattcgagtactacttgctctggcagcctctcatggtcttctcgtccatcagatggacgttaagacagctttcctaaacggagagctggaggaggagatctatatggatcaaccagacaggtatgtactagaaggtcaggagggaatggtgtgtaaactattgaaatccttgtatggcctcaagcaagcaccaaagcaatggcatgagaagtttgacaccacgcttacatctgcaggctttgttgtgaacgaagctgacaaatgtctatactatcgctatggtgggggagaaggggtgatcttgtgcttatatgtcgatgacatactgatctttgggaccagccttaatgtgattgaggaggtcaaagactatctgtccaagagttttgaaaagaaggatttgggagaggctgatgttattcttaacatcaaactacaaaaaggagatgagggtgggattacacttgtgcaatcccactatgtggacaaggttttaagtcgctttggatatagtgactgcaagccagctcctactccttatgatcccagcgtgctattaaggaaaaaccgaagaatagtaagggatcaactgagatactctcaaatcattggttcattgatgtacttggctagcgcaacgaggcctgacatctcatttgctgtaagcaagctgagccggtttgtctcaaatccgggagatgatcattggcaggctctggaaagagtaatgcgctatttaaagggcactacgagctatggaattcactataccgggtatccaaaagtactagaagggtatagtgactcaaactggatatctgatgctgatgagataaaagccacaagtggatatgtgttcacacttggaggtggcgctgtttcctggaagtcttgcaagtag

SEQ ID NO: 23417 - DNA, 2811 bp, Oryza sativa
  Clone ID: TF_OsC1713_5111
atgtcgacaaccggcgacaacaacaacactggagacaaggagaaggagcctcccgtcaacaccaacagaggcaataccgcctcaaactccagcggagggccattatcaggtgtactcgctgacaatatagtggatgtgtacatgcacatgccttcggggaaggacatgtgggatgcacttgaggccaagttcggagttttcgacgccggcagcgagctttatgtcatggagcaattctatgactacaagatggtcgatgaccgttctgtagtggaacaggctcatgagattcagatgttggcaaaggaacttgagaacaacaattgtgagttgccggacaagtttgtggcggctggcattattgccaagttgccaccttcttggtcggactttgctacttctctaaaacacaagaggcaagagttcggtgttactgatctcattggctctttgggtgttgaggagaaggcgagggcaaaggacaaccggagtaaaaagatcaagggaggttctagcgccaatttggtgcagaagaagaaccctcacgcatcccacaacaacaacaagaaagtcaaacctgacgtcaaacccaaggctacaaccaattttaagaagaaaggcaagggaaaggcaaaaggagattgctttgtgtgtggcaagtatgggcattgggccaaggattgtcctgagtgcaaggataagaagtctgcaagcatggttattggtgagggcggaggaacattgaggtatggtaaatttttacctacagttctctttgtctgtcactcacctgattggtgggttgatactggtgctaatattcatgtcgggagatgttcctccttgttgatgggaaacggatcgcttgcagctgttcatggtgttggttatgacagcggaggcttgtttcgcttttccttggatgatatgtgtaataaagttgtcaaccatgatgaagcattacattactttaagatctataaggctgaggtagaaaaccaaactggaaaggaaaatcaaacggttgagtatggaattattcatgagaggacgcctccctattcaccccagtcaaacggggtagccgaaagaaagaaccgcactctaactgagatggtgaatgccatgttagacactgcaggactttccaaggaatggtggggtgaggcaatattgactgcgtgtcatgtcctgaatagaattcctactaagcataaggaagtaacacaattcgaggaatgggaaaggaagaaattaaatctctctcacctgcgcacatggggctatttggccaaggtaaatgtacctatagccaaaaagcgtaaacttggaccaaagaccgtagattgtgtgttccttggttatgctatccacagtgtgggatataggttcttaatagtaaattctagagtacccgacatgcgtattggtacaattactgagtctagagatgccacattttttgagaatgaatttcctatgaaaaatgcacctagcacttctagtcaagaacctattttatcccctgagcactttgcgccgatagaatacattgatcaaacacttgaggaaaatcctgtggaggataacattatggatgttaagacagctttcctcaatggagagttggaggaggagatctatatggatcaaccagatgggtatgtactagaaagtcaggagggaatggtgtgcaagctgttgaagtctttgtatggtctcaaacaagcgcctaagcaatggcatgagaagtttgacaatacacttacatctgctggctttgttgtgaacgaagctgacaaatgtgtgtactatcgttgtggtgggggagagggagtgatcttgtgtttatatgtcgatgacatattgatctttgggaccagcctcaatgtgattgaggaggtcaaggactttttgtccaaaagctttgaaatgacggatttgagagtggctgatgttattcttaacattaaactactgagaggagatgagggtgggattacacttgtgcaatctcactatgtggacaaggtcttgagtcgctttggttatagtgactgcaaggcagctcctactccttatgatcctaggacaatgagctatggaattcactacgccgggtacccaaaagtgctggagggctatagtgattcaaactggatatctgatgctgatgagataaaggccacaagtgggtatgtgttcacacttggagaatccttccctggttctgttcacctgcgcgcacaggtgtatgggacgagcaggtgcctccgaaactccgtccgcttgagaacttgcacgggtaggcgggcgatcaagtttttgggtagcgcttcaagtgcgactgctcctgttcttcgcgactactattattgcatcgacgccttcgtcaacatgtcgatggagattggagacaaggaggtgaacgacatcaacggaggcaatactgcctcaaaatccagcggtgggacgttcttaggggagatcttgctctccggacgcaaatttacttgggccaactctatgccgagcccaacttacaaaaacgccgcctccgcgtcagcccgtgcgccgccgtcgctgccgcgagtccagccaagcgccgccgctgctccagtcaccgccgtcgctccggaaggccatcgccaggttcgcaaggtcgccaccgtcctcatcccgtcctccgtttctgccaaagactgccggagcgccgccgccatcgacgacccgaagaccgccgccgcctcgacctcgctgccgtcgtcgtccaagccaccggtgagttgtcgcgtcgcgctttacgcgtag

SEQ ID NO: 23418 - DNA, 1713 bp, Oryza sativa
  Clone ID: TF_OsC359_7392
ttctccttcccctaatgctatttgcaaaaggtttctccgttcttccttcttcggattttcaactagtactagatggtcagctttgcgaagaagaagatgtcgtcaattgtttgccgaagctccggaagactgcaaggatccgctagtgaagtggaggaagcagtgaagccagctgtgaagcaggacaaaagacttagatctgttaaggtcctatccttagtttctaatctgtctctcccctttgttttccctctctccctctccaaacctttgcaacagatggctgacaatgagaaaggcaataaggtcagaagtcaggacattggtacctcaagctcccgagtgaatgaagcaccagacaccagttgtgtggcagtggtccaacacctgattaaccagaaccaattgcttatagagatactacagcagcatcggatgccaattttgaacccgagtcagatgcaacatcaagtgcagttggaggcagtccaagcactcacaccacaagtcagcgcaccgccaacatcccagaaggcccctcatgccatgccacatgttgacccaaaagaagcaagtatcatctgttttatgtgtgatgagcaagggcactacgcaaggaactgtcctcagcagaaaagaaaagcaccaatgcgaaccgaagatgaagtccgtaagatgatcattaccagcacagaatggcctccaccaggaatgacaaaacatcagagaagaaattcctcccgaggtgcacaacagttgacagagcatcttttagctaatggaggtagagtgtctggtagtgaagattcagatcaagtctcctcagatgatgaagatgcgaagtctccccaaggctttaaccagaataaaatagaacttaaggcatgctctcgttgtggagaaatcggtcatgttgccagctcgtgtgcctctacatgcgttcattgtgaggaagaccatccacccgacaggtgtccaacgagcaggatcacttgtttcttttgtgaaggaactgatcatgtaccaaaagattgtcaattcagttttctgctgacgaagaagatggccaaccaacccgccagttccaacggagagaagcatcaaggcaacacaaatccccgccaaggtcaccgtttcagcctaactccagtgccaggacagaggaatcgaaatgagaaaagaaaatgccgagtccgggaagacatctgttgcttcaattgtcaaggaatgggtcatttcgccgacaagtgcccaaaaccgagaaacatagctgccggcacgtcagtccacgcaactccctgcaatcagaagcttgctcctcaacgaattgtcatccatgcatcccgaagcagtcctatagcccgcgttgcaacagctccaattccaatgaatgcactaccacaaggtgtcaatgctcaatttcagccccagccaccagctgacaagacaggggccagtatctgcgttgtacctttggaagttccaatacagcagctgagaaatcaagtacaagatgaagaacccgagtgtaagaaagttattgtttgttacaactgcagtgaagaagggcattactccaaaaactgtccccaaccaaggcaaaatcgacctccacattaccgccaatttacacgaagcagacattccaatcgtattgtggtcactggagcaaacgccgtacccgtaaggcctcgtgttaatcagaacccatag

SEQ ID NO: 23419 - DNA, 4333 bp, Oryza sativa
  Clone ID: TF_OsC359_7849
atggataatactggtaacaaaggctatgggaatgatggatccgatgactcaagaacccaagccaatgggaatgagagaagcaccaacgaaacctcaccagagctaatccaagttgtggttaaccaaaccaacatgttggcaacagcctttcaactattacagaattggagcagcccagcaggggcaaccaacgttcaagtgcctacagtccagcaacagtgcaagttatcagaatttctcaaaactgagcctccaacctttgccattgccgtcgatcctatggaagccagtgattggttgcgcacaatcgagaagaagctagggttgattcagtgcaccgaccaggagcgggttggcttcgcaactcatcagctggttggaccggcttcagagtggtggggaagctacgaagcatcacggccagaaggacataccatcacctggaacgagttttcatctgtattcaagagatcacatgttcccgcaggaatgatcacactaagaaaacgagagttccgctacctgaagcaaggagatttgaccgtcacagagtacctgcacgagttctatcgtttggctcactatgcaccagaagatgtggaaacggatgaagacaaacaagagaagtttctccaggggttaaaagatgagcttgcagtgcaactactcctagaggattatgaagattttgagaaacttgtggacaaagccatgcaactcgaaagtgagcataatcggatgacgaactgcaagagaaggattgtcaacatcccagtaattccatgtggtaaccaaagacagcgcactgagccacttcagatcaccggatcttctgttgtgcatcaagagttcctgccccaagaagacggacgcaatgcagacaacaacagtagcaatactaacgatgatgataccaccaacaaccatggttcttgccccattagtgaccactcgaataaagcgtgcaatgtcagtagcattcaccaagatgtcaacgatagtatcaatgttggaacccagaatgacaaccttagcaattttgacactgagaaagactccaatggtgatagcaactatggtaccactgatgccaatgttagcaaggatttccaaccaccaattccaactccaagtcaaaatgatcgtccccagatgggcagctcagtaaagaagacgttgatttgttacaactgcaaagaaccaggtcatttctctagagattgtccacagccgaagcgtaacctgcgccatcactccggccattatgcaagaagaagacaagtcactcgccttgtggtcactggagcaaacgccgtacctgcgggcccgcccgccactctcgctgacgggtgggacccacctgtcatcgccttcctcccgccgcgcccgccgcccgcccgtgccctagcgccgccgccgccgctgaatccgccgcatcccgccttccccgcgcgccttaatgaggggggaatcactccccgtgattccctctcccgtttccccctcttttccctctctctctccctcggattcgtccggattcatcccgcgaagttcgccggcgtcttcaatggcgcccgagatctccgcgcgcggtttcctctctccccggccgcgctctccccctcccgttgctatatattcgatccccgtgcttcgctcttccgtttccgccgctcgccgctcgctctcgccgtcggtttcgtgcccgcgccgtgctcctctctctccgccgtcgccgccgaccttcggttcgccgccgacgtcgctccggtcctccgcccgactcggcgccacctccttcggcttcgccgagtggttgccgaccccgtccgccgctccgcttcgcccgccgactgccggagcaccgtcgccctcggcatcccgaaccgcgccgtcgccttcctccgctccggttcgccgccgccgtcgctccggtcttcctcccggctcggcgccacctccctcggcatcgccgcatcgccgtcgacctcgtccgcgccttcgtttcgctcgccgaccgtcggagcgccgccgtcatcgtcatcccgagccgtgccgccgccttcttccgctccggccgccgttctcgtcgtcgtcgttgtcccggggtgagccgtggaccgtcccttccgtttccccctcctctccgctctctcgggcgctgctccgccgcgccgatggtcgccggcggtgaccatcggggcgcgggcgcgttccctcccgtcggccgtgccggcgaggccgccttcgggcgcgccctcgcgggcgtgggacccacggcgccgaccgccgccagccgcgtgcgcccggtccaccgtggaccgagcggctgacgcgtgggcccccacccccgtggacccgggcaaatgaaggctacacgggctgcggcccgatggctgacaatgagaaaggcaataaggtcagaagtcaggacattggtacctcaagctcccgagtgaatgaagcaccagacaccagttgtgtggcagtggtccaacacctgattaaccagaaccaattgcttatagagatactacagcagcatcggatgccaattttgaacccgagtcagatgcaacctcaagtgcagttggaggcagtccaagcactcacaccacaagtcagcgcaccgccaacatcccagaaggcccctcatgccatgccacatgttgacccaaaagaagcaagtatcatctgttttatgtgtgatgagcaagggcactatgcaaggaactgtcctcagcagaaaagaaaagcaccaatgcgaaccgaagatgaagtccgtaagatgatcattaccagcacagaatggcctccaccaggaatgacaaaacatcagagaagagattccttccgaggtgcacaacagttgacagagcatcttttagctagtggaggtagagtgtctgatagtgaagattcagatcaagtctcctcagatgatgaagatgagaagtctccccaaggttttaaccagaataaaatagaacttaaggcatgctctcgttgtggagaaatcggtcatgttgccagctcgtgtgcctctacatgcgttcattgtaaggaagaccatccacccgacaggtgtccaacgagcaggatcacttgtttcttttgtgaaggaactgatcatgtaccaaaagattgtcaattcagttttctgctgacgaagaagatggccaaccaacccgccagttccaacggagagaagcatcaaggcaatacaaatccccgccaagatcaccgtttcagcctaactccagtgccaggacagaggaatcgaaatgagaaaagaaaatgccgagtccgggaagacatctgttgcttcaattgtcaaggaatgggtcatttcgccgacaagtgcccaaaaccgagaaacatagctgccggcacgtcagtccacgcaactccctgcaatcagaagcttgctcctcaacgaattgtcatccatgcatcccgaagcagtcctatagcccgcgttgcaacaactccaattccaatgagtgcactaacacaaggtgtcaatgctcaatttcagccccagccaccagctgacaagacagaggccagtatctgcgttgtacctttggaagttccaatacagcagctgagaaatcaagtacaagatgaagaacccgagtgtaagaaagttattgtttgttacaactgcagtgaagaagggcattactccaaaaactgtccccaaccaaggcaaaatcgacctccacattaccgccaatttacacgaagcagacattccaatcgtattgtggtcactggagcaaacgccgtacccgccgagccaagggcaatcaacctccggagggcgataccaagcagaagaccgtcatccgcttcaaccagcaatcagaaggaagcttctcctgtgaatgatagcagtatgcagtcctatcacatcatcacagaaccaatcgaggatgcagtcactggaacaatgccagctatatctctccagaatcaaaatgagcagccatgtttgtggttttcagtccgctacttatcatggtgtaatcgaaagtttgcagcaatcatattcatgtctataaacattgataacttgtccgaggttgactccgaagatatgaatcatgagaagttctggaacggaagcatcacagaactaccgcaacctagtctgagtcagccaaaaggtgcaccctggtccaagtcaggtgaagagaagattccatccgcaacaggaggtcaagccaagcagttccgagtggtaaagttttgctggaagttcgtcaagacgcaacggaagaagtcagacaagaagagaagcccgcccaacctatcttcttgctag

SEQ ID NO: 23420 - DNA, 1639 bp, Oryza sativa
  Clone ID: TF_OsC359_5515
ttatccggtaggcggtctgacgcacgcctcgccccatcctgtcaggatgagagcctccaagcactcgtccctagccggagccggcgtgttagctcctggagatggcacgttggtcccggtcagatatataccaggcttcatccgatttatgaccggtctgacaatggtcatgtcgtcagcagacagccatgttcccacgtcgcgcctgcttccggcggaagtggagaccaagagtttagaacctcacccagggcccccggccgaaccggcaaaggggggcctgcgcggtctcccggtgaggagccccaagctccgtcagaaggtgttcgccaggtcacctgaaaaagacgagaagcagtgcccagggagtaaccaagctccatgtcagtctaccgacaagaaggatggtactttgcagcccaactctggagcaaacaggacagtgatatggaagatggataatggcaggaccatgatcatcaccggttcagaatttactcctgaagacgcagcaaggatacccaagcgtcagagaggaagaaataccttccgaggagcgcgtcagctaacccgtcatctcataaagtacggtccgcctagacccgaagatgatgaatcaggagaacggttttctgctgatgacgatgacgacaacgatgatgataatgatgacaatgatgatgcgacccttgacagtttcagggaaagagagttgaagttcaaagcatgtgctagatgtgggatagtcggacacactgctagtttatgcctccccacatgccgctgtggtgaatatacccattactcaaatgcatgccctttaaggaaggtcacatgtttcttgtgtgaaggaacagatcatgtgcctaaggactgtcagttaaacgcggtcatagctaagaccaagaaagaacaagggacaaccgtgcaacccattcgtcaaccaatgacaatcgacaacagcggtcacaatccttctgctcttcctccaactccagctccagtggaagccaaccatggaagaagcaacgtcaccaaggatgttcataagtctctgcttgttcccgtttcagctgccaaagtgcataatcagaagcctgcaccccgagaccaagcaagtcgattctgtcgcaactgtcataagccaggacatcgtttcagtgattgtcctcttccaagagcagcaaaggcagttcgtcgtgattcacaagttaccagcactgcccatgacaccaatcgacacctgaatgtgcaacctccgccccaacggattatcgtcaagggcaccgtcaaaggtcgcattgttccaccggcaatcgtttcaagcctacagcaccaacgccagcagggtaagcaatgtcaggagaacaacagctcgctacagctacaaagaggcggtacgctccctcgtcagcacccgcggcaagtgttgtcagcaacaggtcgtccaactgttgtcagttctagcaatgcacctcgtattgctccaatctggaggcccatcgacaaatcaccgctcggtaaccccacgggcaagaagatcctacccgttacagctgacaagacagttgcccctccaccatcgaagatcaacaagcagagcaacgttcccggtgagacttctggtagtaggaactaa

SEQ ID NO: 23421 - DNA, 3550 bp, Oryza sativa
  Clone ID: TF_OsC359_7154
atggatgaagtcgggggtcgatggacattctccagggcaaatgaaggctacacgagctgcggcccggtagtcgagatgtcatggcagagggttggtgccctgctgctagggggctcagtcctgcctgcctgtcccgggtgtcccggccgtaggaggattgggtcggtactcttgtttatggctaggatgggttgggaactatgtcacgtcttccgtccgtataccgtggtggtattttgctcaacaactaaaatgtggaatggttggcctgggttggcttgggacgagctgggacccagggtcgggttgccagttcggtctgaatcatcgtaggccttgggttaaggcagtactagatggtcagctttgcgaagaagaagatgtcgtcagttgtttgccgaagctccggaagactgcaggatccgctagcgaagcaaaggaagcagtgaagccagctgtgaagcaggacaaaagacttagatctgttaaggtcctatccttagtttctaatctgtctctcccctttgttttccctctctccctctccaaacctttgcaacagatggctgtcaatgagaaaggcaataaggtcagaagtcaggacattggtaccttaagctcccgggtgaatgaagcaccagacaccagttgtgtgacactggtccaacacctgattaaccagaaccgattgcttatagagatactacagcagcatcagacgccaattctgaacctgagtcaaatacaacctcaagtgcagttggaggcagtccaagcactcacaccacaagtcagcatgccgccagcatcccgaaggacccagggtgacgtgccacatgttgacccaaaagaagcaagtaacatttgctttatgtgtgatgagcaagggcactatgcaagggagcgtcctcagcagaaaagaaaaacaccaatgcgaaccgaagatgaagtccgtaagatgatcattactagcacagaatggcctccaccaggaatgaccagacgtcagagaagaaataccttccgaggtgcaccacagttgacagagcatcttttagctaatggaggtagagtgtctgatagtgaagattcagatcaagtctcctcagatgatgaagatgaaatggaatgtaaggcatgctctcgttgtggagaaatcggtcatgtcgccagctcgtgtgccactatatgcgttcattgcgaggaagaccatccacccgacaggtgtccaacaagcaggatcacttgtttcttttgtgaaggaattgatcatgtaccaaaagattgtcaattcagttttctgctgacgaagaagatggctaaccaacccgccagttccaacggagagaagcatcaaggcaacaccaatcctcgccaagattacagtttcagcctaactccagtgccaggacagaggaatcaaaatgagagaagaaaatgccgagtccgggaagatatctgttgcttcaattgtcaaggaatgggtcatttcgccgacaagtgcccaaaaccgagaaacatagctgccagcacgtcagtccacgcagctccctgcaatcagaagctcgctcctcagcgaattgtcatccatgcatcccaaagcagtcctatggcccgcgttgcaacagctccaactccagcgagtgcattaccacaaggtgtcaatgctcactttcagccccagcaaagaattgtcgtcgatggaagaagttgtgtctctccccgacctactccaggccaagcaaagggcaatcgacctccggagggcgataccaagcagaagaccgttattcgcctcaaccagcaatcagaaggaaacttctcctgtgaatgatagcaatatgcagtcctatcacatcatcacagaaccaatcaaggatgcagtcactagaacagagacctagggtctcatttcagaggaactatgttcgacaggcataggctggggtcctaaagtaagacgcggcttctgattactcccctgttgtgctttgaagtgagcaatccggcgtttcttctgctccatgcgattgtatttgtcctcctgacgaatagccttatccactaacttctggaaatcatgataatctccagtcatgagtgggtaagaaagttcatcattaagtccttccaagaacttctcttgacgctcttcatcattgcgcacatcttccggagcataacgagcaagacgattgaactcgtgcagatactccgtaacagagcgagatccctgagtaagcgacctgaattccttctttttgagagacaccactcccgatggtatatgcgtcttccggaaagcagcggtgaactcaagccaagtgataggttcagcagtagtcctgttaaggcggaagtgatcccaccattcagaggcagggccatgcaactggtgtgatgcaaatgagaccttctcctgatcagtgcactaaagtaaatccaacttcttctctatggcatgcagccaatcaccagcttcaacaggattagtggtactagagaaaataggcggcctcacacgaagaaattctgctaacttattctgaggaggtacatggttatttccttggttctgctgattctgaagttgttgcatcatcatgttcattagctgtgtctgttgagcaagaacttgagcaagagtgggattctctccattgttgttattggggttgttgggaccattcccgttgctgcgagtattcaccatctggcagggcacaagaagagaaaccaggggaaaaagctactctagttcttccaagcatcggaggtcgattgaaggctcatttggctcgtcttcatcatcttgagttgctacccactcaatcttggaattgttgcgcttggattcttcttcttcatcatcacttatgatcatgaccggaggatccgctagggttggggcaacttctttctccaccacacgaacctttggcgccaattgataacgagggacaaatagagctctcttccttgcggtaagacgaatcctggccttctgcggcggtgcttctcccttcaatgcggctaattccttttccaaacgatccaccttgtcttctagcttacaaatcttaccacgattccgatcttcacgatcttgagctgctaacacagtctctgcacggctttcatccctagcccacaacatctcaaccaaatgccttgtggtagcatcattctcaattccttcagtctcaaggtaactgccacgatcacttccctgaggttgacgaggatggtagcgatactcagtgtcggccaactgatcactgtagcgatcacggagccctcctatggcgatccttgccacttcctgacatgcatggatgtagtttcttcctccagcttcgaacatcactgaggggatatcttcactattgctgttcaaggtgactttgattcggcacttctcttcatgacgatcatgaggaatctgggcataaaaaggggcagtcccaaatccaatgacaaaggacatcgtacgcaactcctggacaaaaccctcaacaccaaacaagtactcaggcttgtagcgcggcat

SEQ ID NO: 23422 - DNA, 2745 bp, Oryza sativa
  Clone ID: TF_OsC359_6375
aaatgattttaggctgggctcggggtgcatggttttgctagtagcacctcggccacataaggaccggtcttcgggcctctgttgaaaagcactaccgtacttccacatgtctagtgggtaaggcttagtttgtggctcagtctggttataaacaaaagtacacggatggagatggacgaagtcgggggtcgatggacatctgtcccggaggttccggccgtaggtggggttgggtcggtactcttgtctatggctaggatgggttggaaactatgtcatgtcttccgtccatatgccgtggtgaataagcctaacatacatcataacagcaaaagacttagatctgttaaggtcctatccttagtttctaatctgtctctcccctttgttttccctctctccctctccaaacctttgcaacagatggctgacaatgagaaaggcaataaggtcagaagtcaggacattggtacctcaagctcccgagtgaatgaagcaccagacaccagttgtgtgacactggtccaacacctgattaaccagaaccgattgcttatagagatactacagcagcatcagacgccaattctgaacctgagtcaaatacaacctcaagtgcagttggaggcagtccaagcactcacaccacaagtcagcatgccgccagcatcccgaaggacccatggtgacgtgccacatgttgactcaaaagaagcaagtatcatttgttttatgtgtgatgagcaagggcactatgcaagggagtgtcctcagcagaaaagaaaaacaccaatgcgaaccgaagatgaagtccgtaagatgatcattaccagcatagaatggcctccaccaggaatgacaaaacgtcagagaagaaataccttccgaggtgcaccacagttgacagagcatcttttagctaatggaggtagggtgtctgatagtgaagattcagatcaagtctcctcagatgatgaagatgagaagtctccccaaggtttcaaccagaataaaatggaacgaaaggcatgctctcgttgtggagaaatcggtcatgttgccagctcgtgtgccactacatgcgttcattgtgaggaagaccatccacccgacaggtgcccaacgagcaggatcacttgtttcttttgtgaaggaactgatcatgtaccaaaagattgtcaattcagttttctgctgacgaagaagatggccaaccaacccgccagttccaacggagagaagcatcaaggcaacacaaatcctcgtcaagattacagttttagcctaactccagtgccaggacagaggaatcaaaatgagaaaagaaaatgccgagtccggaaagatatttgttgcttcaattgtcaaggaatgggtcatttcgccgacaagtgcccaaaaccgagaaacatagctgccagcacctcagtccacgcaactccctgcaatcagaagcttgctcctcagcgaattgtcatccatgcatcccgaagcagtcctatagcccccgttgcaacagctccaactccagcgagtgcattaccacaaggtgtcaatgctcaacttcagccccagccaccagttgacaacacagaggccagtatcggcattgtacctttggatgttccagcacagcagccaagaaatcaaaattggaacaacccagcaggggcaaccaacgttcaagtacctacagtccagcaacagtgcaagttatcagaatttctaaaaactgagactccaacctttgccattgccgtcgatcctatggaagccagtgattggttgcgcacagtcgagaagaagctggggttggttcagtgcacagaccaggagcgggttgtcttcgcaactcatcagttgatatcacatgttcccgcaggaatgatcacactgagaaaacgagagttccgctacctgaatcaagaagatttgaccgtcacagagtacctgcacgagttccatcgtttggctcactatgcaccggaagatgtggaaaatgatgaagacaaacaagagaagtttctccaggcgttaaaagatgagatcgcagtgcaactactcctagaggaatatgaagattttgagaaacttgtggacaaagccatacaactcgaaagtgagcataatcggatgaagaactgtaagaggaggattgtcagcatcccagtatcttcatgtggtaaccaaagacagcgcactgagccacttcagatcatcggatcttctgttgcacatcaagagtttccgccccaagaagatggacacaatgcagacaacaacattagcaatactaatgatgatgataccaccaacaaccatgctccatgccccattagtgaccactcaaaccaagcgtgcaatgtcaacatcattcaccaaggtgtcgacgatagtatcgatgatggcacccaaaatgacaaccctagcaattgtgactctgagaaagactccaatggtgatagcaactatggtaccactgatgccaatgttagcaaggatttccaaccaccaattccaactccaagtcagaatgatcgtccccagacggatagctcagcaaagaagacgttgatttgctacaattgcaaagaaccaaggcattactcgagggactgcctgcaaccaaggcaaagtcgacctccacattaccgccaagttacacaaagcagacatcccaatcgtattgtggtcactggagcaaacaccgtacccgtgaggcctcgtgttaatcagaacccatag

SEQ ID NO: 23423 - DNA, 6150 bp, Oryza sativa; identical to SEQ ID NO: 15595
  Clone ID: TF_OsC359_6999

SEQ ID NO: 23424 - DNA, 484 bp, Oryza sativa
  Clone ID: TF_LIB3434-029-P1-K1-D7
aatgagtccatcaaggagcaggagcaacagcaggagcagaagcagaagcagaagcgggagcaagagcaagagcaagagcaagagcaggagtcgcagcaggagcaggagccgaagccgaagccctcggcgagaaaggctgcgtagtgagcgtgtatcacgtcgcagccgcagccgcagccgtagccgtagcccaattcgtagaagagaacatcgcggccacagggatcttatatgcaagaattgcaggaggcctggtcactttgctagggattgccaatctactgctacatgcaacagatgcaatcttccaggacacttcgcagcagaatgcacttctgaaactgtttgttggaactgcaagcagtctggccacattgctaccgaatgcaagaatgacgccctgtgtcacacctgcagcaagacaggtcatctggcacgtgattgcccaagttcaggatctagtaagctatgcaacaaatgtttt

SEQ ID NO: 23425 - DNA, 1036 bp, Oryza sativa
  Clone ID: TF_OsC103556_1
atggagcaggtctgccgctgttacaatgagtccatcaaggagcaggagcaacagcaggagcagaagcagaagcagaagcgggagcaagagcaagagcaagagcaagagcaggagtcgcagcaggagcaggagccgaagccgaagccctcggcgagaaaggctgcgtattgttctgccaatcccccagacttgacccacctcaacccccaagggatcttatatgcaagaattgcaggaggcctggtcactttgctagggattgccaatctactgctacatgcaacagatgcaatcttccaggacacttcgcagcagaatgcacttctgaaactgtttgttggaactgcaagcagtctggccacattgctaccgaatgcaagaatgacgccctgtgtcacacctgcagcaagacaggtcatctggcacgtgattgcccaagttcaggatctacctgggcacatagctcgggagtgcacgaacgagcctgtttgcaacctgtgcaatgtctctgggcatcttgctcggaactgtcaaaaaacgaccatttcttcagagatacagggcggccctttccgtgacattacctgccgcttgtgtggcaagccagggcacatcagccgcaactgcatgacaaccatgatctgtggcacctgcggtgggaggggtcatatgtcatatgagtgcccatctgcaaggatgtttgatcgtgggctccgcaggttctgatgacagccatccatacgcactgctggttctgatgctcggaatttcgcattgttccattgattctgcttagatagcttgcttgactataccgaaacggttcttttataccttttgctctctgggagttgaggaatgattctgtaggatgtatttgggtgaaacttttgcttgtgttaatcagggtgttgtagcctttcgtgggggaacaaatgatgtatcttcccaagagagacatccagaaaaactgctttggtagaccaggccatatcaagtattgtgcatgactgtttgagctaaaaaaaaaaaaaaa

SEQ ID NO: 23426 - DNA, 2380 bp, Oryza sativa; identical to SEQ ID NO: 15533
  Clone ID: TF_OsC1713_4732

SEQ ID NO: 23427 - DNA, 2409 bp, Oryza sativa; identical to SEQ ID NO: 15529
  Clone ID: TF_OsC359_5625

SEQ ID NO: 23428 - DNA, 1948 bp, Oryza sativa
  Clone ID: TF_OsC359_6528
cctagctcgctccctcctccaaatccgcctcattcaaaccggggattccaaaattaagtggggggttttttctcccccctccagtaagagaagcttttgagaagaggtcttaggtggagtcctggcttataccccagttgagcgcctgtgaagatggagccataggcccgctagtccgctgctgtttatttttgattgtcaggccttaagtgcctttgtaataacgtaaatattatcgaccccgtgacacagccggaggagaggacgacgctgcgacgtcgacggaggagacagcgacgtcggtcggtgctcgggcacggcggaaggggctgccggaggtggtgcagtggcagcaacgccactgtttaccggcgaggacgcgtctccgatggtttccccacgaaacagaggcgacgtcggggaagaggatgcacttgacttatccctggttgcacctctagctgacttcgactgggttgcggcacttgaagatggggcttcagttcgagaacttctcatagttcatatcttgggtgtcaactttctcaaccaagtactcttcactctgagagttgtggatgcttctggtggcaatgtggtccttgggcttgctgcctttcagagaaacaggtatggcgtttgctccagtgaccacaaggcgagtgacttgtcttcttcttgcataatgcccggagtgatggcgcaggttacgcttcggttgtggacaatctctagagaaatgacctggttctttgcagttgtaacaaatcaacttcttctttactgagctgtccgtctgggaacgatcattctgacttggagttggaattggtggttggaaatccttgctaacattggcatcagtggtaccatagttgctatcaccattggattctttctcagagtcacaattgctagggttgtcattctgggtgccttcattgatactatcgtcgacatcttggtgaatgttgttgacattgcacgcttgattcgagtggtcactaatggggcaagaaccatggttggtggtggtatcatcatcattagtattgctaatgttgttgtctgcattgtatccatcttcttggggcaggaactcttgatgcgcaacagaagatccggtgatctgaagtggctcagttcgctgtctttggttaccacatggaattactgggatgttgacaatccttctcttgcagttcttcatctgattatgctcactttcgagttgtatggctttgtccagaagtttctcaaaatcttcataatcctctaggagtagttgcactgcaagctcatcttttaacccctggagaaacttctcttgtttatcttcatccgtttccacatcttctggtgcatagtgagccaaacgatggaactcgtgcaggtactctatgacggtcaaatattcttgctttaggtagcggaactctcattttcttagtgtgatcattcctgcgggaacatgtgatctcttgaatacagctaaaaactcgtcccaagtgatggtatgtccttctggccgtgatacttcgtagctatcccaccattctgaagctagcccaaccaactgatgagttgcgaagacaacccgctcctggtctgtgcactgaatcaaccccagattcttctcgactgtgcgcaaccaatcattggcttccataggatcgacggcaatggcaaaggttggaggcccagttttgagaaattctgataacttgcactgttgctggactataggtacttgaacgttggttgcccatgctgggttgttccgattctgtaatagttgaaatgctgttgccaacatgttggtttggttaaccacaatttggattagctatggtaaggtttcgttgatgcttttctcattcccattggcttgggttcttgagtcatcggatccatcattcccatagcctttgttaccagtgttatccat

SEQ ID NO: 23429 - DNA, 2018 bp, Oryza sativa
  Clone ID: TF_OsC359_6849
atggataacactggtaacaaaggctatgggaatgatggatccgatgactcaagaacccaagccaatgggaatgagaaaagcatcaacgaaacctcacccgagctaatccaaattgtggttaaccaaaccaacatgttggcaacagcctttcaactattacagaatcggaacaacccagcaggggcaaccaacgttcaagtacctacagtccagcaacaatgcaagttatcagaatttctcaaaacggggcctccaacctttgccatggccgtcgatcctatggaagctagtgattggttgcgcacagtcgagaagaagctagggttgattcagtgcaccgaccaggagcgggttggcttcgcaactcatcagttggttgaaccggcttcagagtggtgggatagctacgaagcatcacggccagaaggacataccatcacctggaacgagttttcatctgtattcaagagatcacatgttcccgcaggaatgatcacactaagaaaacgagagttccgctacctgaagcaaggagatttgaccgtcacagagtacctgcacgagttctatcgtttggctcactatgcaccagaagatgtggaaacggatgaagacaaacaagagaagtttctccaggggttaaaagatgagcttgcagtgcaactacttctagaggattatgaagattttgagaaacttgtggacaaagccatgcaactcgaaagtgagcataatcggatgacgaactgcaagagaaggattgtcaacatcccagtatttccaggtggtaaccaaagacagcgcactgagccacttcagatcaccggatcttctgttgcgcatcaagagtttccgccccaagaagatggacgcaatgcagacaacaacactagcaatactaatgatgatgataccaccaacaaccatggttcttgccccattagtgaccactcgaataaagcgtgccatgtcagtagcattcaccaagatgtcaacgatagtatcaatgatggcacccaaaatgacaaccctagtaattgggactctgggaaggactccaatggtgatagcaataatggtaccactgatgccaatgttagcaaggattcccaaccaccaattccaactccaagtcaaaatgatcgtccccagatggacagctcagtaaagaagacgttgatttgttacaactgcaaagaaccaggtcatttctctagagattgtccacagccgaagcgtaacctgcgccatcactccggccattatgcaagaagaagacaggtcactcgccttgtggtcactggagcaaacgccgtacctgtttcactgaaaggcagcaagccaaaggacctcatcgtcaccagaagcatccacaactctcggagtgaagagtacctggtggacaaagttgacgccaaagatatgaattatgagaagttctggaactgaagtcccatcttcaagtgccacaatccagtcgaagtcagctagaggtgcaaccagggaaaagtcaggtgaagagaagattccatctataacaggagatcgagccaagcagtccagagtggagaagttttgctaggcaagtttgttatagaagacgcgacggaagaagtcagacaagaagagaagaccgcgcaacctatcttcttgctagccacctcgaatctcggggacgagattcttccctctccctcccgggctgcctctccctcctctcctcctgggccgcctccgggcccaagccgaggggcgccctcccgcccgtgccgcgcacgtgcgcgcgctgaccgcgcgcccgcgtggggcccacgtgccaggtcgtcttcctcctcccgcccggcctcctcctctctcctccgtgaaccctagccatttcctccctcaaatccgcgcgattcaaaccgggaattccaaaattgacgccaactccggccgctttccatggctgccggccgccatttccgccgccgttccccactcctcctgtgctcggctcgcttccccgggctgcagga

SEQ ID NO: 23430 - DNA, 1506 bp, Oryza sativa; identical to SEQ ID NO: 15536
  Clone ID: TF_OsC359_6888

SEQ ID NO: 23431 - DNA, 2575 bp, Oryza sativa
  Clone ID: TF_OsC359_7436
attttctcccccttcccaacattatataaacactccccgtgcctccctccaccgtttccgccactgaccgctctctctttcggcgggaatcaagctggcgcagtcgctctctctctcagcggtcacagccgagctccggtccgccgccgtcgtcgccccggaccttctcccgcttcggcgtcgccttcttcgggttcgccgcaacctcgccgacctcgtccacctctccgtttcggtcgccgactgccggaacgccgccgtgcccgtcgacccgagccgcgccgccgcctctctccgctccggtcgtcgtacccgtcgtcgccgtcgacccggggtgagccgtggaccgccgattcgtttcccccttccctcccctctctcgggcgccgctccgccgcgccggtggtcgccggcggcgaccatcggggcacgagtgcgccacctcccgtcggctgtgccggcgtggccgccttcgggcgcgtcccgcggctgccatgtggggcccggccgttagccgcccgcgccctcggatgcggctgacgcatgggacccacggcgccggccggtgtgagccgggtgcacccggtccaccgtggacccacctcggccatataaggaccggtcttcgggcctctgttgcaaagcactaccgtacttccacatgtctagtgggacaaatgaaggctacacgagctgcggcccggtagtcgagatgtcatggcacagggccggtgtcctgctgctaggggctcagtcctgcctgcctgtcccgagggttccagccgtaggtgggattgggtcgatgtacacctctgatcagagtataatctattcgaatagccgcgccctcggttatgggcaagccgagcaatgtacccaagtcagtgttttaattcttaaaatttgcttaacaactaaaatgtggaatggttggcctcggttggcttgggacgagctgtgacccagggtcgggttgccagttcggtctgaatcatcgtaggccttgggttaaggcagtactagatggccagctttgcgaagaagaagatgtcgccaattgtttgccgaagctccggaagactggaggatccgcttcagaagtgcaggaagcagtgaagccagctgtgaaggaaacaaaaagagttagttcctttaaggtcttatccctagttctggtctattctttccttgtatgcttcccctctcaatctctaccttgtgacagatggataacactggtaacaaaggctatgggaatgatggatccgatgactcaagaacccaagccaatgggaatgagaaaagcatcaacgaaacctcaccagagctaatccaaattgtggttaaccaaaccaacatgttggcaacagcctttcaactattacagaatcggaacaacccagcaggggcaaccaacgttcaagtacctacagtccagcaacagtgcaagttatcagaatttctcaaaacggggcctccaacctttgccatggccgtcgatcctatggaagccagtgattggttgcgcacagtcgagaagaagctagggttgattcagtgcaccgaccaggagcgggttggcttcgcaactcatcagttggttggaccggcttcagagtggtgggatagctacgaagcatcacggccagaaggacataccatcacctggaacgagttttcatctgaattcaggagatcacatgttcccgcaggaatgatcacactaagaaaacgagagtttcgctacctgaagcaaggagatttgaccgtcacagagtacctgcatgagttctatcgtttggctcactatgcaccagaagatgtggaaacggatgaagacaaacaagagaagtttctccaggggttaaaagatgagcttgcagtgcaactacttctagaggattatgaagattttgagaaacttgtggacaaagccatgcaactcgaaagtgagcataatcggatgacgaactgcaagagaaggattgtcaacatcccagtatttccaggtggtaaccaaagacagcgcactgagccacttcagatcaccggatcttctgttgtgcatcaagagttcctgccccaagaagatgaacacaatgcagacaacaacactagcaatactaatgatgatgataccaccaacaaccatggttcttgccccattagtgaccactcgaataaagcgtgcaatgtcagtagcattcaccaagatgtcaacgatagtatcaatgttggaacccagaatgacaaccttagcaatttcgacactgagaaagactccaatggtgatagcaactatggtaccactgatgccaatgttagcaaggattcccaaccaccaattccaactccaagtcaaaatgatcgtccccagatggacagctcagtaaagaagacgttgatttgttacaactgcaaagaaccaggtcatttctctagagattgtccacagccgaagcgtaacctgcgccatcactccggccattatgcaagaagaagacaagtcactcgccttgtggtcactggagcaaacgctgtacctgtgaggcctcatgttaattctaacccatag

SEQ ID NO: 23432 - DNA, 1943 bp, Oryza sativa
  Clone ID: TF_OsC359_7475
atggataatactggtaacaaaggctatgggaatgatggatccgatgactcaagaacccaagccaatgggaatgagagaagcatcaacgaaacctcaccagagctaatccaaattgtggttaaccaaaccaacatgttggcaacagcctttcaactattacagaattggaacaacccagcaggggcaaccaacgttcaagtacctacagtccagcaacagtgcaagttatcagaatttctcaaaacggggcctccaacctttgccatggccgtcgatcctatggaagccagtgattggttgcgcacagtcgagaagaagctagggttgattcagtgcaccgaccaggagcgggttggcttcgcaactcatcagttggttggaccagcttcagagtggtgggatagctacgaagcatcacggccagaaggacataccatcacctggaacgagttttcctctgtattcaggagatcacatgttcccgcaggaatgatcacactaagaaaacgagagtttcgctacctgaagcaaggagatttgaccgtcacagagtacctgcacgagttctatcgtttggctcactatgcaccagaagatgtggaaacggatgaagacaaacaagagaagtttctccaggggttaaaagatgagcttgcagtgcaactacttctagaggattatgaagattttgagaaacttgtggacaaagccatgcaactcgaaagtgagcataatcggatgacgaactgcaagagaaggattgtcaacatcccagtaattccaggtggtaaccaaagacagcgcactgagccacttcagatcaccggatcttctgttgtgtatcaagagttcctgccccaagaagatgaacgcaatgcagacaacaacactagcaatactaatgctgatgataccaccaacaaccatggttcttgccccattagcgaccactcgaacaaagcgtgcaatgtcagtagcattcaccaagatgtcaacgatagtatcaatgttggaacccagaatgacaaccttagcaattttgactctgagaaagactccaatggtgatagcaataatggcaccactgatgccaatgttagcaaggatttccaaccaccaattccaactcctagtcagaacgatcgttcccagacggacaactcagcaaagaagacgttgatttgttacaactgcaaagaaccaggtcatttctccagagattgtccacagccgaagcgtaacctgcgtcatcactccggccattatgcaagaagaagacaagtcactcgccttgtggtcactggagcaaacgccgtacctgtttcacggaaaggcagcaagccaaaggacctcatcgtcaccagaagcatccacaactctcggagtgaagagtacttggttgacaaagttgactccaaagatatgaactatgcaaagttctggaactgaagccccatcttcaagtgccgcaacccagtcaaagtcagctaaaggttcaaccagggacaagtcagtctcttcctcctttgggccaagcccagcccaaaaatctccctttcctccctctttttctctccctctccttctctccctccttctcttgggctcccctttccctcggcccactccctcctccctctctctcccgggctgcctttcccccccctcttccctcccggcctgctcggcccaggccgctgtcacgtcctgataaattcatcccgaaaataaaaatcatcttctaaaaggaataatagaattaattaaaattcgaaaagaaattggcaaacactaaaatacgtacaaaaaaaattcaaatgtgacccggagaatttttgttaaattctccttggtctaaaaggagccctcaaattttaatggaattttcagagcacaaataataattgaaagaaataaacaaagttgaaaaggtttataaaaag

SEQ ID NO: 23433 - DNA, 1422 bp, Oryza sativa
  Clone ID: TF_OsC359_7477
atgtcatggcagagggttggtgccctgctgctaggggctcagtctcgcctgcctgtcccgggggttccggccgtaggcgggattgggtcggtactcttgtctatggctaggatgggttggaaactatgtcacgtcttccgtctgtataccgtggtgatggataatcctggtaaccaaggctatgggaatgatggatccgatgactcaagaacccaagccaatgggaatgagagaagcatcaacgcaacctcaccagagctaatccaagttgtggttaaccaaaccaacatgttggcaacagcctttcaactattacagaattggaacaacccagcaggggcaaccaacgttcaagtgcctacagtccagcaacagtgcaagttatcagaatttctcaaaactgagcctccaacctttgccattgccgtcgatcctatggaagccagtgagtggttgcgcaccatcgagaagaagctagggttgattcagtgcaccgaccaggagcgggttggcttcgcaactcatcagctggttggaccggcttcagagtggtgggatagctacgaagcatcacggccagaaggacataccatcacctggaacgagttttcatctgtattcaggagatcacatgttcccgcaggaatgatcacactaagaaaacgagagtttcgctacctgaagcaaggggatttgaccgtcacagagtacctgcacgagttctatcgtttggctcgccatgcaccagaagatgtggaaacggatgaagaaaaacaagagaagtttctccaggggttaaaagatgagcttgcagtgcaactactcctagaggattatgaaaattttgagaaacttgtggacaaagccatgcaacttgaaagtgagcataatcggatgacgaactgcaagagaaggattgtcaacatcccagtatttccaggtggtaaccaaagacagcgcactgagccacttcagatcatcggatcttctgttgggtatcacgagttcctgccccaagaagatgaacgcaatgtagacaacaacaacatcattcaccaagatatcgacgatagtatcaatgaaggcacccagaatggcaaccctagcaattttgactctgagaaagactccaagggtgatagcaataatggtaccactgatgccaatgttagcaaggatttccaaccaccaattccaactcctagtcaggacgatcgttcccaggcggacaactcagcaaagaagacgttgatttgttacaactgcaaagaaccaggtcatttctcgagagattgtccacagccgaagcgtaacctgcgtcatcactccggccattatgcaagaagaagacaagtcactcgccttgtggtcactggagcaaacgtcatacctgtgaggcctcgtgttaatcataacccatag

SEQ ID NO: 23434 - DNA, 1650 bp, Oryza sativa; identical to SEQ ID NO: 15525
  Clone ID: TF_OsC359_7569

SEQ ID NO: 23435 - DNA, 2426 bp, Oryza sativa
  Clone ID: TF_OsC359_7686
ccgccgccgctccggacttcctcccgactcggcgacccctccatccgcttcgccgtgttgccgccgaccccgtccgccgctccgcttcgcccgcagaccgtcggagcgccgtcgccatcgtcatcccgagccgcgccgccgtcttcttccgctccgtccgccattctcgtcgtcgtcgttgtcccggggtgagctgtggaccgtccccttcgtttcccccttccctcctctctctcgggtgccactccgccgcgccgttggtcgccggcggcgaccatcggggcgcgggtgcgcgccgctcccgtcggccgcgccggcgaggccgccctcgggcgcgccctcgcggctgccaagtgggcccggccgtcagccgcccgcgcccgtgggtgcggctgacgcgcgggacccacggggccgaccgccgccagccgcgtgcgcccggtccaccgtggacccaccccggccactataaggattaagctcgggcctctgttgcaaagcactaccgtacttccacatgtctaatggggcaaatgaaggctacacgagctgcggcccggtagtcgagatgtcatacggcggagggttggtgcccaatgctaggggctcagttctgcctgcctgtcccgggtatcccggccgtaggtaggattgggtcggtactcttgtctaaggctaggatgggttggaaactatgtcacatctttacgacgggttccaaggccatggatagtactggtaacaaaggctatgggaatgatggatccgatgactcaagaacccaagccaatgggaatgagaaaagcatcaacgaaacctcaccagagctaatccaagttgtggttaaccaaaccaacatgttggcaacagcctttcaactattacagaatcggaacaacccagcaggggcaaccgacgttcaagtacctacagtccagcaacagtgcaagttatcagaatttctcaaaacggggcctccaacctttgccatggccgtcgatcctatggaagccagtgattggttgcgcacagtcgagaagaagctagggttgattcagtgcaccgaccaggagcgggttggcttcgcaactcatcagctggttggaccggcttcagagtggtgggatagctacgaagcatcacggccagaaggacataccatcacctggaacgagttttcatctgtattccggagatcacatgttcccgccggaatgatcacactaagaaaacgagagtttcgctacctgaagcaaggagatttgaccgtcacagagtacctgcatgagttctatcgttcggctcactatgcaccagaagatgtggaaacggatgaagacaaacaagagaagttcctccaggggttaaaagatgagctcgcagtgcaactacttttagaggattatgaagattttgagaaacttgtggacaaagccatgcaactcgaaagtgagcatagtcggatgacgaactgcaagagaaggatggttaacaacccagtatttccaggtggcaaccaaagacagcgcactgagccacttcagatcaccggatcttctgttgtgtatcaagagttcctgccccaaggagatgaacgcaacgcagacaaccacaatagcaatactaatgctgatgataccaccaacaaccatggttctggccccattagtgaccactcgaataaagcgtgcaatgtcagtagcattcaccaagatgtcaacgatagtatcaatgttggaacccagaatgacaaccttagcaattttgactctgagaaagactccaatggtgatagcaactatggtaccactgatgccaatgttagcaaggatttccaaccgccaattccaactccacgtcacaatgatcatccccagatggacagctcagcaaagaagacgttgatttgttacaactgcaaagaaccaggtcatttctctagagattgtccacagccgaagcgtaacctgcgccatcactccggccattatgcaagaagaagacaggtcactcgccttgtggtcactggagcaaacgccgtacctgtttcactgaaaggtagcagaccaaaggacctcatcgccaccagaagcatccacaactctcggagtgaagagtacttagtgaccaaggttgactccaaagatatgaactatgcaaagttctggaactgaagccccatcttcaagtgccgcaacccagtcgaagtcagctaaaggttcaaccagggacaagtcaggtgaagagaagattccatctgcaacaggagatcgagccaagcagtccagagtgaagaagttttgttaggcaagtttgttatagaagacagagcctcctccctctctttctctccctctccttctctccctcctcttgggcctcctcccctctcggcccagctccatttccccccctctctctcccgg

SEQ ID NO: 23436 - DNA, 3400 bp, Oryza sativa
  Clone ID: TF_OsC359_7766
atggagagctcaccggcgtgcgatggaaacggcgcttcggcgacgtttggcggcaagcgagcggcggccgaggtagctctagctgcggcggcggttgcgcggcgcggcggcgagcctagcagcgacggcgtgcggccgaaggtcggcagcgggcggcggaggcaagaaaaaggggaaacttcagggcgtgacaagaagccttccatgagcccaccaccctcttgcctcaccttcctcggctccggcctactccgactcagctccctcttcctcaccgcgcgccatctccttgccgccaacagctacgccagtcacctcgtctgcgtcgatgatccttgcaccgaccaggagcgggttggcttcgcaactcatcagctggttggaccggcttcagagtggtgggatagctacgaagcatcacggccagaaggacataccatcacctggaacgagttttcatctgtattccggagatcacatgttcccgccggaatgatcacactaagaaaacgagagtttcgctacctgaagcaaggagatttgaccgtcacagagtacctgcatgagttctatcgttcggctcactatgcaccagaagatgtggaaacggatgaagacaaacaagagaagttcctccaggggttaaaagatgagctcgcagtgcaactacttttagaggattatgaagattttgagaaacttgtggacaaagccatgcaactcgaaagtgagcatagtcggatgacgaactgcaagagaaggatggttaacaacccagtatttccaggtggcaaccaaagacagcgcactgagccacttcagatcaccggatcttctgttgtgtatcaagagttcctgccccaaggagatgaacgcaacgcagacaaccacaatagcaatactaatgctgatgataccaccaacaaccatggttctggccccattagtgaccactcgaataaagcgtgcaatgtcagtagcattcaccaagatgtcaacgatagtatcaatgttggaacccagaatgacaaccttagcaattttgactctgagaaagactccaatggtgatagcaactatggtaccactgatgccaatgttagcaaggatttccaaccgccaattccaactccacgtcacaatgatcatccccagatggacagctcagcaaagaagacgttgatttgttacaactgcaaagaaccaggtcatttctctagagattgtccacagccgaagcgtaacctgcgccatcactccggccattatgcaagaagaagacagcatcgccgccacctcctccacgccggcctgccctccgtttcgcgaggagacccccggaactacgttcccgccgtcgccctcccctttccctcgcgccggccacctccagccgccttcctctcctcgcccgaacgccgcccggccgcgccgtcttctccctcggcctcgcagctgccccctctccctcggtcagccctccgtttcgcggggaaatcaccggagacgcgccctcgccggcgtccagtggcgtcgccaccacttctccgcctccggccgcctctgccacgtccccggagcgccggccgacgtcgccaccaccttcctcggctccacgacgccgctctcatccccggcatcacctccgcctcgcccgaacttcgccggaacaccgtcgcccgcgccggtttctccttcctcctcggcggcatctcctccggctgccccggtcgccgcgccagagcgtcggccgacgtcgccgtctcctccctcggcgtcgccgcatcgccctccaccccggcctgccctcggtttcgccggaacgtcgccgcgaacctctccgtccgcctcaccggagttgttcggccgcccgtccctcctcgccgtgcatcggtcggccacctccaccaccatcttcggcatcgcagcggcaaggtcgtcctcggcatcgtttcccctccatccaaacccctccgcggtccatcatcgtcgtctccgatcgttctcgtcgtcgacgtcccgttcatcctcgctcggctcgtcgtctcgcggcgccgcctccgtcatcgtcatcgctgcggcgtgttccgcgtcgtccccgtctctgtgcagccactgccggctgccctcgtcgccccctcgccggtcccggtcgtcgtcgtcgtcgtcgtcctctcgtcgttcccggtcgctgcagcccccgtcatcgtcttcgtcctcgcctccgcgtcgtcaagcctcgtgccggccgcgtctcgccttcgtccaaggatcgccgccgaagccgtcccctcgccgttcgtctccgttgtgcccgtctgtctccgccgcgcccgttcgtcgttgtcgttcccgcgcctcgtcgcgtggtggtaaggatccgtcctctcgcttccccgccctcgtcctctcggtgtcgccccgtacccgttgtgcggtcgtcgaccccggtacccgtgtaccggtgtcggtagtcgttcacgtgtgctggagtccgtttgtcggccactcgcctcggttgacacacggggtccgcttccgtcgacccgtggaccgtctctgtgtacccggtctaccgtggtcctttaggttgacatgtggggcttgtagctttgcttgtgtgcttcgcgtagcttctgtcgttccggaggttcccgaagcgtggttcgtggtcgtcgccgtaggttcggaaggccgttctctctcgggtactataaggattaagctcgggcctctgttgcaaagcactaccgtacttccacatgtctagtgggtaaggcttagtttgtggctcagtctcgcgtacccccaccaccctctcctcgtcagcacaaaggagagcccgtcggtcagccttgacatcgaggcgatcgacagctccaacgttgtcaaggccctcgggcagccgaaggcacggcgacgactcgtcaggagtgtcgcgcctctccgcgcgagacgcccgctccccgcgaccattcccggtgggaccgggtgcaaggccttcgtggtgagtctccggaatgtccggtggcccccgaagttccgccccaacctcaccgagaaatatgatggcagcatcaacccctccgagttcctccagatctataccacgatcatcatggcagcagggggtgatgaccgggtcatggcgaattactttcccatggcccttaagggtcaggcgtgcggctggctcatgacccaaccccccgactccatctactcctgggaggacctttgccagcagttcgttacgaacttccaaggcacgaaccagcccaggaaaggaggcagatctgcacgctgtgcagcggaaggatgacgagtccctccgctcatacatacagcgtttctgccaggtccgcaacaccatcccctgcataccggcccatgcggtcat

SEQ ID NO: 23437 - DNA, 2019 bp, Oryza sativa
  Clone ID: TF_OsC359_7894
atggataatactggtaacaaaggctatgggaatgatggatccgatgactcaagaacccaagccaatgggaatgagaaaagcatcaacgaaacctcaccagagctaatccaaattgtggttaaccaaaccaacatgttggcaacagcctttcaactattacagaatcggaacaacccagcaggggcaaccaacgttcaagtacctacagtccagcaacagtgcaagttatccgaatttctcaaaacggggcctccaacctttgccattgccgtcgatcctatggaagccagtgattggttgcgcacaatcgagaagaagctagggttgattcagtgcaccgaccaggagcgggttggcttcgcagctcatcagttggttggaccggcttcagagtggtggtatagctacgaagcatcacggccagaaggacataccatcacctggaacgagttttcatctgtattcaagagatcacatgttcccgcaggaatggtcacactaagaaaacaagagtttcgctacctgaagcaaggagatttgaccgtcacagagtacctgcatgaattctatcgtttggctcactatgcaccagaagatgtggaaacggatgaagacaaacaagagaagtttctccaggggttaaaagatgagcttgcagtgcaactacttctagaggattatgaagattttgagaaacttgtggacaaaaccatgaaactcgaaagtgagcataatcggaggacgaactgcaagagaaggattgtcaacatcccagtatttccaggtggtaaccaaagacagcgcactgagccacttcagatcaccggatcttctgttgcgcatcaagagtttccgccccaagaagatggacgcaatgcagacaacaacactagcaatactaatgatgatgataccaccaacaaccatggttcttgccccattagtgaccactcgaataaagcgtgcaatgtcagtagcattcaccaagatgtcaacgatagtatcaatgttggaaaccagaatgacaaccttagcaattttgactctgagaaagactccaatggtgatagcaactatggtaccactgatgccaatgttagcaaggatttccaaccaccaattccaactccaagtcacaatgatcgtccccagatggacagctcagtaaagaagacgttgatttgttacaactgcaaagaaccaggtcatttctctagagattgtccacagccgaagcgtaacctgcgccatcactccggccattatgcaagaagaagacgagtcactcgccttgtggtcactggagcaaacgccgtacctgtttcactgaaaggcagcaagccaaaggacctcatcgtcaccagaagcatccacaactctcggagtgaagagtacttgtatgaggttgacgccaaagatatgaattatgagaagttctggaactgaagtcccatcttcaagtgccacaatccagtcgaagtcagcaagaggtgcaaccagggaaaagtcaggtgaagagaagattccatctgcaacaggagattgagccaagcagtccagagtggagaagttttgcgtctcctcgccggaaactcgccggaacggtgcccccgccggcaaccagtggcattggtgccactgtactccctccagccggctgctgttcatcgccggtgcgccgatcgacgccgccgtctcctccttcgacaccgcggcatcgccttcttccccggcatcacctcctcctcgcccgaatttcgccggaacgccgtcgcccgcgccggcctcaccttcctcctcgtcgacatctcctccggctgccccggtcgccgcgccagagcgtcggccgacgtcgccgtctcctccctcggcgacgccgcatcgccctccaccccggcctgccctcggtttcgccggaacgtcgccgcgaacctctccgtccgcctcgccggagttgttcggccgcccgtccctcctcgccgtgtaccggtcggccacctccaccaccatcttcggcat

SEQ ID NO: 23438 - DNA, 2434 bp, Oryza sativa
  Clone ID: TF_OsC359_7944
ccgacaccggtacatgggtaccggggtcgacaaccgcacaacgggtacgggggacaccgaaaggacgaggacggggcagcgagggagagggaaccttaccaccacgcgacgaggcgtgggaacgacaacgacgaacgggcgcggcggagacagacgggcacaacggagacgaacggcgaggggacggcttcggcggcgatccttggacgaaggcgagacgcggccggcacgaggcttgacgacgcggagccgaggacgaagacgaggacggggctgcagcggttcgcttgacgaacgcggacgacggacgagaacggctcgacggagggacgaacgccacgacgaccgggaacgacgagaggacgacgacggcgacgaccggggccggcgaggaggcgatgagggctgccggcagcggctgcacggaggcgaggatggcgcggaccacgccgctgcgatgccgacgacggaggcggcgccgcgagacgatgagccaggcgaccgacgtgacgtcgatcggcgaggacgaacggtgacgaggaaacgatgatggcaggcagcagcggctgagcggaggaggggacggcgtggaacgcgctgctgcgatgttggagaaggtggtggtgcagcggggcgacgagccgacgaggaggaatgggtggccgaaaggacgccggcgacgaagaggatggagaggccggcgcggcgacggtgttccggcgaaaccgaggagcagccggggtggagggcggcgtcgcggagccgagggaggtggtggcgacgtcggccggcgcacgggaaacgcgacagtggcggccggaggtggaacagtggcggcaacgccactgttttgccggcgagaacgcgtctccggtgctttccccgcgaaacggagggctgaccgagggagaggaggtggctgacttgaaccagggtgcaccttttagctgacttcgactgggttgtggcacttgaagatgggacttcagttccagaacttctcataattcatatctttggcgtcaactttgtcaactaagtactcttcactccgagagttgtggatgcttttggtgacgatgtggtacttgagcctgctgcctttcagagaaacaggtacggcgtttgctccagtgaccacaaggcgagtgacttgtcttcttcttgcataatggccggagtgatggcacaggttacgcttcggctgtggacaatctctagagaaatgacctggttctttgcagttgtaacaaatcaacgtcttctgtactgagctgtccatctggggacgatcattttgacttggagttggaattggtggttggaaatccttgctaacattggcatcagtggtaccatagttgctatcaccattggagtctttctcagtgtcaacattgctaaggttgtcattctgggttccaacattgatactatcgttgacatcttggtgaatgctactgacattgcacgctttgttcgagtggtcactaatggggcaagaaccatggttgttggtggtatcatcatcattagtattgctagtgttgttgtctgcattgcgtccatcttcttggggcgggaactcttgatgcacaacagaaggtccggtgatctgaagtggctcagtgcgctgtctttggttaccacatggaaatactgggatgttgacaatccttctcttgcagttcgtcatccgattatgctcactttcaagttgcatggctttgtccacgagtttctcaaaatttccataatcctctagaagtagttgcaccgcaagctcatcttttaacccctggagaaacttctcttgtttgtcttcatccgtttccacatcttctggtgcatagtgagccaaacgatagaactcgtgcaggtactctgtgacggtcaaatctccttgcttcaagtagcgaaactctcgttttcttagtgtgatcattcctgcgggaacatgtgatctcctgaatacagatgaaaactcgttccaggtgatggtatgtccttctggccgtgatgcttcgtagctatcccaccactctgaagccggtccaaccagctgatgagttgcgaagccaacccgctcctggtcggtgcactgaatcaaccctagcttcttctcgattgtgcgcaaccaatcactggcttccataggatcgacggcaatggcaaaggttggaggctcagttttgagaaattctgataacttgcactgttgctggactgtaggtacttgaacgttggttgcctctgctgggttgttccaattctgtaatagttgaaaggctgttgccaacatgttggtttggttaaccacaatttggattagctctggtgaggtttcgttgatgcttttctcattcccattggcttgggttcttgagtcatcggatccatcattcccatagcctttgttaccagtgttatccat

SEQ ID NO: 23439 - DNA, 2073 bp, Oryza sativa
  Clone ID: TF_OsC359_8145
gtcatatggcagagggttggtgccctgctgctaggggctcagttctgcctgcctgtcccgggtatcccggctgcaggtgggattgggtcggtactcttgtttatggctaggatgggttgggaactatgtcacgtcttccgtccgtataccgtggtgatggataacactggtaacaaaggctatgggaatgatggatccgatgactcaagaacccaagccaatgggaatgagaaaagcatcaacaaaacctcaccagagctaatccaaaaagtggttaaccaaaccaacatgttgacaacagcttttcaactattacagaattggaacaacccagcaggggcaaccaacgttcaagtacctacagtccagcaacagttcaagttatcagaatttctcaaaactgagcctccaacctttgccattgccgtcgatcctatggaagccagtgattggttgcgcacagtcgagaagaagctagggttgattcagtgcaccgaccaggagcgggttggcttcgcaactcatcagttggttggaccggcttcagagtggtgggatagctacgaagcatcacggccagaaggacataccatcacctggaacgagttttcatctgtattcaagagatcacatgttcccgcaggaatgatcacactaagaaaacgagagtttcgctacctgaagcaaggagatttgaccgtcacagagtacctgcacgagttctatcgtttggctcgctatgcaccagaagatgtggaaacggatgaagacaaacaagagaagtttctccaggggttaaaagatgagcttgtagtgcaactacttctagaggattatgaagattttgagaaacttgtggacaaagccatgcaactcgaaagtgagcataatcggatgacgaactgcaagagaaggattgtcaacatcccagtaattccaggtggtaaccaaagacagcgcactgagccacttcagatcaccggaccttctgttgtgcatcaagagtccccgccccaagaagatggacgcaatgcagacaacaacactagcaatactaatgatgatgataccaccaacaaccatggttcttgccccattagtgaccactcgaacaaagcgtgcaatgtcagtagcattcaccaagatgtcaacgatagtatcaatgttggaacccagaatgacaaccttagcaattttgacactgagaaagactccaatggtgatagcaactatggtaccactgatgccaatgttagcaaggatttccaaccaccaattccaactccaagtcacaatgatcatccccagatggacagctcagcaaagaagacgttgatttgttacaactgcaaagaaccaggtcatttctctagagattgtccacagccgaagcgtaacctgcgccatccctccggccattatgcaagaagaagacaggtcactcgccttgtggtcactggagcaaacgccgtacccgcagcaagccaaaggacctcatcatccccagaagcgtccgcaatccacattaaagaataccacctgttagagataagccgaaagatgattgataaaaagagattggcaaagatgttctctagcataaaagaagtaggccgaaaggtgattgataaacagaaacatgctctgcatcgctcaaggaagacccctgattgtaattgccccgcaacagtcaccttgtcattaagtaagcaagatgacctaggtaaaagtgtttctatgaaggcaaggagtgaaatcttcaactcggtatcagatgctacacgaagtgaaaagtgcaagcaccggttaccagttgataacttgtctgaggttgactccgaagatatgaatcatgagaagttctggaacggaagcatcactgaactaccgcaacctagtctgagtcagccaaaaggtgcaccctggtccaagtcaggtgaagagaagattccatccgcaacaggaggtcaagccaagcagttccgagtggtaaagttttgctggaagttcgtcaagacgcaacggaagaagtcagacaagaagagaagaccgcccaacctaccttcttgctag

SEQ ID NO: 23440 - DNA, 6711 bp, Oryza sativa
  Clone ID: TF_OsC1713_5408
tcactcttgtagaggaggaggacgcgccgaagtggaaggatgaggagcatcacgacgacgatgatacacaaatgcttgggagctctccaacatttggactcgagaatccaatgtacccactctagtgtgcaatctccccacagaagcattcaagtctccaacatctgtgcgcaatccacgaacattctcatgcaaagcttcatgcccggtggacaagcgttgaatgctttcacttagggtattaatagccccaagtaccgggttaaagtattcgtttggttgcattccaaagtaggcatactgaggatagaaaaaagcatttggatcatacccatgaggaggaggaggtgctgagcttgagctagctccaggatgagaggagggtgccgccctaggagcacggggagctccaagctgaaggcggggcttgtactgcttgtgcttctttaaattttgcccaacagccccaagcttgtcttgaatcaacctcatgatgtaaggggcataatagattccctgagtgaatgtagccttagagatggcaatctcttgcatcataagagacacaatgtcgaattgatggccctgaatgatggcatcgatgacgtgccaagccacccccctaatgtcatcattgttaccaaggcgagggaggatggtaactctcacaatcctgttaaccacacaggggatggtcctcaagccggcaaccttcccatgtgtgtaccacactccgtcttcgtaaaactgagagacgtagtctatggagagcggattgtgagtgtgctcctcatgcaagtcatctccaaagtccaagcgaatactgaggagccgccagaattgcctcctagagatagaacactgaagggtgtcggacatccacttcatctcactatagtctccagccacccacatcttttggaaagcggtgtgaaaacggggattccgggtgtcccgaggcctcaaaaactgatcatggtgcctcaaaatggtatactgcgatggattcctcatgttcacaacaaactggatggagggatcaatgtgcatatcatcacttccttcatcctcatcctctccacttccactgacatcatctccactttcctcctcactagccccctcaacattggcctcaacctcttcatcactttgagcgtactcatctccgcttgactcctcactcacgggatcgggcgtgggctcacgacgactatgacgagtgcggggaggcatttgcggtggataacggccggtcagaccgccgtccacatgtcggtcagaccgtcggccgagctcggtcagaccgtcgaccgctgaccgagctcgatcagaccacctcaactttgttttgaaacttttctcaaattctctctcaatctcattttggaggaaaatctcattttggccaaaaataagaatatagtttccgccgaaacatattccgcctcggcggtagagggctacggagttttgtttcttggatgaccatgacacaagggatctaccaagcatttggcaactaccgaatgtgctctttctatccactttgcaaccggcataatccgaatcggaatagccaacaagtttaaacttagcaccttttaagtaccacaagccaatagtagaggaatgctttaaatatcttagaatccttttcacggccactaagtgacactccttaggagcggcttgaaaccgtgcacacatgcaaacactaaacatgatatccggcctagatgcagtaaggtaaagcaagctaccaatcatagaacgataaagctttaaatctaccggtttacctccctcatcaaggtcgagatgcccgttggttgccataggtgtcttgatgggcttcgcatcctccaagccaaacctcttgagtagatccttgatgtacttggtttggctcacgaacgtcccatccttgagttgcttgatttgaagtccaaggaagaagctcaattcttcaatcatggacatctcaaattccctagacatcatatcaccaaatcccttgcaaaataccttattagtagaaccgaaaatgaaatcatcaacataaatttgacacacaaagaaatcatcaccaatgatttttgtgaaaagggtggtgtcaacttttccaattttgaaatcctttgacaaaagaaaatctctcaatctttcataccaagccctaggagcttgttttaaaccataaagagcttttgagagtttataaacatggttaggatttttaggatcttcaaaaccgggaggttgttcaacaaagacaagttcggcaatttcaccatttagaaaagcacttttcacatccatttgaaatagttttatatcaaagcataatgcaaatgcaagaaggatgcgaatagcctcaagtcttgccacgggggcaaaagtttcaccgaagtccaaaccttcaacttgtgtgaaaccttgtgccaccaaccttgccttgtttctcaccaccaacccgttctcatcttgtttgttcctaaagacccactttgtccctatgacattgtggtctctaagtctttcaaccaaagtccacacattatttcttgcaaagttgttgagctcttcatgcatagcattcatccaatccggatcacaaagagcttcatctacatgttttggctcaagacaagaaacaaacgagtaatgttcacaaattgaagcgacacgagatcgagtttgaacacccttactaatgtcactcaacacttggtcaattgggtgatccttggaaagagcggtgtgtatccttggtggcataggtggatcttgtgccttctcctcctccacttcaacttgagcttgacttggcgtagcggaagtagatggctcatcttgagtggaggtggatggcttgtcttccacttcagtaggcttgacatctccaattgacatgttcttcatagctctcatcaagccttcatcacctacatcatccagattcttgtgcccctcttgggagccattagtctcatcaaattgaacatcggcggtttcttccacaatacctttgttcttgttgtagacccggtatgccttgctatttgaggcataacctagaagaaacccttcatcacaacgactttcaaatttggttagtctaacacccttttgataaatataacacttgcaaccaaaaactcgaaaataggcaacatttggcttcctcccaataattcgctcatagaaagtctttttcatgagacgatgcaaataaagccaattggttgcatggcaagcggtgtttatggcttccgcccaaaaggaatcagaaacaccatattcatcaagcatagtcattgccatctcaatcaatgtacgatttttcctctccacaccaatgctcttataggttgttgggccaaacaaatccatatgcaagagctccaatggtctagatgtggacatgatactcttagtaggatgagaacatgcaacttgcttgccagcttgacaagcactacaaagcttatctttctcaaacttcacatctttcaagcccacaactagatcacgttttgaaagtttgctcaattgattcacgcaaacatgggctagcctcctatgccaaagccaacccattgaagtttttgcaactaacccaattacctttcctttgctattgtctccaaatgtcactttctcttgttctttccctcctacttcaaatatggtgaacatagccctatcaccagtcatgtgttgagtgcatccactatcaagcacacaatggctcccaccggtgcggtagttcaccacggagtataggggaacccacatatctagcaataatgctaccatcatgagccttcccttgaagcacatctccaaactcttgttgagcttaaccacttgctccttaagctcattgttctcaacaacaagtgaggcatcacaaatagaaacacaagtgctagagctagagctaggcatatccacaagatcatcacaagaggtagaaatgctagatgatacaacatgagcaatatggcaaatagcactatcatcaagcaaatcacaagatatgccaacatcaatgagaactccatgttgagtagtggaaaggaggttgtcatgagcttccttaagcttctcatgagaaatggtgagtctctcatgagaggtctttagctcctcatacaagacctccaaagaagcatgatccttctttcgggccttgaacttgacaatctccttctcactataagcatagagctccttaaacatactcacaagctcatcataggaaacatcatcacaatcatcatcactctcactatcactaagaaatgctaccttagaggagtcctttgccatgagacaaagtggagcgaagagtgatggagcctccttgatggcaacaacggccatcttcttcttcttggagcttgcatcatcaccaccttcttcttcggacccggatgaggcggagctctcctcatttgagtcccattccccgataaaggcctcaatattcttgccttccttcttgagcttcttcatgagcttgtagcctccactcttcttcttggatgacttgtctccatcatcatccttggaagggcacttggaagcaaagtgtcccttctcaccacactcaaagcaccttctagcaagaagggcaatctcttcctttcctttactattgtctctaaatgtcactttctcttgttcttttcctcctacttcaaatatggtgaacatagccctatcaccggtcatgtgttgaatgcatccactattaagcacccaatggctcccaccgatgcggtagttcacccaaacttgtttgggtccttggaggttagagaccaaagctttgggcacccaaatggcattctttttaccaccaagtataggggaacccacatatctagcaacaatactaccatcatgagccttcttaagcatataatgagaatcaaacatgcatgtcttggaaggcttactaccggggcaatcattcaccaaatgcccaacctcatgacacttggagcaatacttaccgttgctcttgacaaaacgagtgacacggtgagaaggtttcttacccttctttggaatgtatccaagtcccttattgttaaggatgcaccgttgctcactgaaaatcttgtcaagagtgttcttacccttgaagcacctctccaaactcttgttgagcttggccacttgctccttaagctcattgttctcaacaacaagtgaggcatcacaaatagaaacacaagagctatagctagagctaggcatatccataagatcatcacaagaggtagaaatgctagatgatgcaacatgaggaatatgactagaagcactatcatcaagcaagtcacaagatatgccaacatcaatgtgagctccatgttgagtagtggaaaggaggttatcatgagcttccttaatcttctcataagaaatggtgagtctctcatgagaagtctttagctcctcatacaagacctccaaagaagcatgatccttctctagggccttaaacttgacaatctccttttcactatacgcatggagcttctcaaacatactcacaagctcatcataggaaacatcatcacaatcatcgtcactctcactatcactaagagatgctaccttagaagagcccttagccatgagacaaagtggagcgaagagtgatggagcctccttgatggctacaacggccatcttcttcttcttggagcttgcatcatcaccaccttcttcttcggacccggatgaggcggagctctcctcatttgagttccattccccgatgaaggcctcaatcttcttcccttccttcttgagcttcttcatgagcttgtaacctccactcttctttttggatgacttgtctccatcattatccttggaagggcacttggaagcaaagtatcccttctcaccacactcaaagcacctcaagttagagagagtcttgttgggtcttttatttcttctcttattggagttggagccccttcctctctcctttcttcttcctaagagattattgaaccttctagcaagaagggcaatctcttcctccaagtcatcattgacttcattcaccttgctcttgcccttgtcttcaacttcggcttggaaggtgaggcttcctccatctccttcttcttcaacttgtacatgtcattggtgttgattttccccaagaggcttgcgggtgtcatccttgacatgtcggagttgatgagcatggtgacaagggtctcatacttctccggtagagccctaagcatcttttgggcaacctcaagatcggtgtagtttgccccaagccccttgagatcattcacaatgacattgagcctcccatacatgtcattcacactcttatgaggcaacatggggaatgtctcatattggatcttgaggaaatgaagcttggcatccttgtactcgcttgtgacctcatggatctccgccaacttgttccaaatctcatatgcggttctcaaggttgctcactctatcgaactccttttggctcaaagagttgaacaaagcattcatggcttgggcattgagttggaggttgcggtgatcaatctcagtcaagggcgtgccggtgatagcaaagcaattagcgcttgtcattaattaccaaaattaacaacgtgggcctagatgcttcacacgagtacttgatgtaaagctctcaga

SEQ ID NO: 23441 - DNA, 2833 bp, Oryza sativa
  Clone ID: TF_OsC359_7994
tcaaatagcagaagtagctatcacccggagaccaggaaagctaatatgaggcagttggtggcgagttagaagcaaatgacaagcatggtatcttagtaatgacgagctgatctcgacgcatgacatgaagtgggtaacttgtatgaggttgactccaaagatatgaactatgcaaagttctggaactgaagccccatcttcaagtgccacaatccagtcgaagtcagctagaggtgcaaccagggaaaagtcaggtgaagagaagactccatctgtcatcgccttcctcgcgccgctcccgccgcccgcccgtgccctagcgccgccgccgccgcggattccgccgcatcccgccatccccgcgcaccattaagagggggaaatcactccccgtgattccctccctcttttcccccgctttcccctctctctctccctcgggttcgttcggatttgctcccgcgatcttcgccggcgcatcaatggcgcccgagatggccgcggccgtttccttcccctccggcctctctctctccctcccggcgctatataatcgttccccgtgcctccctcctccgtttccgccgctcgccgctcgctctccccgtcggaatcaagcccgcgccgtcgtcctctctctccgccgtcgccgccgagctccggttcgccgccgtcgtcgccccggacctcctcccgcttcggcgtcgcctccttcggcttcgccgcgtcttcgtcgacctcgtccgctccttcgtttcgcccgccgaccgccggagcgccgccgtcctcgtcgatccgaaccgcgccgccgcctctcgccgtttcggtcgccgtttccgtcaccgccgtcgacccggggtgagccgaggaccgccgcttcgcttccctcttctctcctctctctcggccgccgctccgccgtgcctatggccgccgccggcgaccataggggcgcgggcgcgccgcctcccgtcggccgtgccggcgaggccgccttcgggcgcgccccgtggctgccaggtggggcccggccgtcagccgcccgcgcccgcgggtgcggctgacgcgtgggacccacggcgccggccggctttgcttaatcaacttgcagaataagcctaacatacatcataacagcaaaagacttagatctgttaaggtcctatccttagtttctaatctgtctctcccctttgttttctctctctccctctccaaacctttgcaacagatggctaacaatgagaaaggcaataaggtcagaagtcaggacattggtacctcaagctcccgagtgaatgaagcaccagacaccagttgtgtgacactggtccaacacttgattaaccagaaccgattgcttatagagatactacagcagcatcagacgccaattctgaatctgagtcagatacaacctcaagtgcagttggaggcagtccaagcactcacaccacgagtcagcatgccgccagcatcccgaaagacccatggtgacgtgccacatgttgactcaaaagaagcaagcaagggagtgtcctcagcagaaaagaaaaacaccaatgcgaaccgaagatgaagtccgtaagatgatcattaccagcacagaatggcctccaccaggaatgacaaaacgtcaaagaagaaataccttccgaggtgcaccacagttgacagagcatcttttagctaatggaggtagagtgtttgatagtgaagattcagatcaagtctcctcagatgatgaagatgaaatggaacgtaaggcatgctctcgttgtggagaaatcggtcatgttgccagctcgtgtgccactacatgcgttcattgtgaggaagaccatccacccgacaggtgtccaacgagcaggatcacttgtttcttttgtgaaggaactgatcatgtactaaaagattgtcaattcagttttctgctgacgaagaagatggccaaccaacccgccagttccaacggagagaagcatcaaggcaacacaaatcctcgccaagattacagtttcagcctaactccagtgccaggacagaggaatcaaaatgagaagaaaatgccgagtccgggaagatatctgttgcttcaattgtcaaggaatgggtcatttcgccgacaagtgcccaaaaccgagaaacatagctgccggcccgtcagtccacgcaactccctgcaatcagaagcttgctcctcagcgaattgtcatccatgcatcccgaagcagcccaatagcccgcgttgcaacagctccaaccccagcgagtgcattaccacaaggtgtcaatgctcaatttcagccccagccgtcagttgacaagacagaggccagtatcggcattgtacctttggatgttccagcacagcagccaagaaatcaagtacaagatgaagaacccgagcaagaccatccaccaggggagtgccccactcgcaaggtgacatgttttctgtgcgaagaaacaaaccatgtgcccaaggattgccaactcagtgtgttgttgaccaagaccgcagaaatccaacgaacaaccctacgattgtctcatcagctagtcagctccaacagcaacattgacgatatcatccacagcaccaatgctcctcctgccccacctaactctgcaacaaatcatagcactaataccttcagcaccaaccattctctgcaccgacagcctcagcaaagaattgtcgtcgatggaagaagttgtttctcgacctactccaggccgagcgaagggcaatcaacctcaggagggcgataccaagcagaagaccgttattcgcttcaaccagcaatcagaaggaagcttctcctgtgaa

SEQ ID NO: 23442 - DNA, 3259 bp, Oryza sativa
  Clone ID: TF_OsC359_7971
atggagcccgagatcaccgcgccggtttccttcccctccggccactctctcccctttccaaccctatataaaccctccccgtgcctccctcacccgtttccgcccttgccgcaccgtctcctcgccggaatcgagctcgcgccgtcgctctctctctctgccatcgccgtcgagctccggtccgccgccgccgtcgccccggaccacctcccacctcggcgccgcctccttcggcttcgccgcatcctcgccgacctcgtccacccctctgtttcggtcgccgaccgccggaacgccgttgaccccgtcgacccgagccgcgccgccgccttcctccgctccggccgcctttttcgtcgtcgccgtcgacctagggtgagccgaggaccgccgcctcttttcccccttcccttcccctctctcggccgccgctccaccgtgcctatggccgccgccggcgaccataggggcgcgggcgccgcctcccgccggccgcgccgagtggccgccgcgtggggcccggctgtcagccgcccgcgtcctcgggtgtggctgacgcgtgggacccatggcaccgggcggtgcgagcccgggtgcgcccggtccaccgtggaccacgctgcagcttcggaagatccgctcttcgtggaagttgaagccgacgtttgggaaagcgagcaaggcaagtcacatcatccttgaacatattgaatcccaatggacgaagtcggggtcgatggacatctctaggacaaatgaaggctacacgagctgcggcccggtagtcgagatgtcatggcacagggctggtgtcctgctgctaggggctcaatcctgcctacctgtcccggaggttccggccgtaggtgggattgggtcggtactcttgtctatggctaggatgggttgggaactatgtcacgtcttccgtccgtataccgtggtgaataagcctaacatacatcataacagcaaaagacttagatctgttaaggtcctatccttagtttctaatctgtctcttccctttgttttccctctctccctctccaaacctttgcaacagatggctgacaatgagaaaggcaataaggtcagaagtcaggacatcggtacctcaagctcccgagtgaatgaagcaccagacaccagttgtgtgacactggtccaacacctgattaaccaaaaccgattgcttatagagatactacagcagcatcagacgccaattctgaacctgagtcagatacagcctcaagtgcagttggaggcagtccaagcactcacaccacaagtcagcatgccgccagcatcccaaaagaccgatggtggcgtgccacatgttgactcaaaagaagcaagtatcatttgttttatgtgtgatgagcaagggcactatgcaaggaactgtcctcagcagaaaggaaaaacaccaatgcgaaccgaagatgaagtccgtaagatgatcattaccagcacagaatggcctccaccaggaatgacaaaacgtcagagaagaaataccttccgaggtgcaccacagttgacagagcatcttttagctaatggaggtagagtgtctgatagtgaagattcagatcaagtctcctcagatgatgaagatgagaagtctccccaagattgtcaattcagttttttgctgacgaagaagatggccaaccaacccgccagttccaatggagagaagcatcaaggcaacacaaatcctcgccaagattacagtttcagcctaactccagtgccaggacagaggaatcaaaatgagaaaagaaaatgccgagtccgggaagatatctgttgcttcaattgtcaaggaatgggtcatttcgccgacaagtgcccaaaaccgagaaacatagctgccagcacgtcagtccacgcaactccctgcaatcagaagcttgctcctcagcgaattgtcatccatgcatcccgaagcagtcctatagcccgcgttacaacagctccaactccagcgagtgcattaccacaaggtgtcaatgctcaatttcagccccagccaccagttgacaagacagaggccagtatcggcattgtacctttggatgttccagcacagcagccaagaaatcaaaattggaacaacccagcaggggcaaccaacgttcaagtacctacagtccagcaacagtgcaagttatcagaatttctcaaaattgagactccaacctttgccattgccgtcgaacctatggaagccagtgattggttgcgcacagtcgagaagaagctggggttgattcagtgcacagaccaggagcgggttgtcttcgcaactcatcagttggttggactggcttcagaatggtgggatagctacgaagcatcacggccagaaggacataccatcacctgggacgagttttcatctgtattcaagagatcccatgttcccgcaggaatgatcacactgagaaaacgagagttccgctacctgaagcaagaagatttgaccgtcacagagtacctgcacgagttccatcgtttggctcactatgcaccagaagatgtggaaaatgatgaagacaaacaagagaagtatctccaggggttaaaagatgagatcgcagtgcaactactcctagaggaatatgaagattttgagaaacttaattgtaagagaaggattgtcagcatcccagtattcccatgtggtaaccaaagacagcgcacggagccacttcagatcaccggatcttctgttgcgcatcaagagtttccgccccaagaagatggacacaatgcagacaacaacattagcaatactaatgatgatgataccaccaacaaccatgcttcttgccccattagtgaccactcaaatcaagcgtgcaatgtcaacatcattcaccaaggtgtcgatgatagtatcaatgatggcacccaaaatgacaaccctagcaattgtgactctgagaaagactccaatggtgatagcaactatggtaccactgatgccaatgttagcaaggatttccaaccaccaattccaactccaagtcagaatgatcgtccccagacggatagctcagcaaagaagacgttgatttgctacaattgcaaaggaccagggcattactcgagggactgcctgcaaccaaggcaaagtcgacctccacattaccgccaatttacacgaagcagacatcccaatcgtattgtggtcactggagcaaacgccgtacccgtgaggcctcgtgttaatcagaacccatag

SEQ ID NO: 23443 - DNA, 1312 bp, Oryza sativa
  Clone ID: TF_OsC34615_1
cttcctcctcctcgagaccgcggcgcctcgcacgccacgcttctcctcctcttcctatcccaatccactcggcgacccccctcgccgtcgccgcgctgcgccggcgagcgccacgggagcagcagccctcgccgctccgcggctagctagctcgtctcctcgtccgcctcgcgcctgctggagatccgccccccgacccccgtggaaggaaggaagaagggagggttgtaacagcctaacaggttgtgggagtcttggaggtgctggttttgtggtgtggtgttcgcagtttggttggagcttggagatttagaaggaaggtttgacgatgagcagccgcagcccgccaccaaaggaccgcaggattcgtactgagcgtacctcataccgtgatgcgccatacaggagagacagccgccgtggtcctagcagatttcctaatgatttgtgcaacaattgtaagcgtccaggacattttgctagagattgtccaaatgtggctctttgccatgcatgtgggcttccagggcacattgcagcagagtgttcttccaaagatctctgctggaactgcaaagaacctggccacatggctaacagctgcccaaatgaagggatatgccgcaactgtggcaagtcgggtcacattgcaagagaatgcagtgctccaccaatgctgccaggtgaaatgaggctttgcagcaactgctacaaaccagggcaccttgctgcggaatgcaccaatgagaaggcctgcaacaactgtaggaagagtggccatcttgctcgtaactgccctaacgagcccgtctgcaacctatgcaacgtgtcaggacatttggcccgagagtgccccaaatctgatgctatcaatgagaggggtgggcctcctcccttccgtggtggatacagtgatgtggtctgccgtgcttgcaatcaggttggtcatatgagccgtgattgcatggccggtgcgttcatgatctgccacaactgcggtggtcgtggtcacatggcttatgagtgcccatctgggaggcttatggatcggtttccccctcgccgtttttgagtgattttccaagtgctcaatcagatgactcttcgttgggaccggcattatgaataatcatatctcgtgctttatgccttaagaatgttagtgtatttcagatacttcagttttcatagtttgtcagcttacttgtatttgtcggttctgctgtttaactgcgatactcgttgatcggtgaggatgaattccagatgggatacttgttttaattcctaaaaaaaaaaaaaaaaaaaaaaa

SEQ ID NO: 23444 - DNA, 2592 bp, Oryza sativa; identical to SEQ ID NO: 15635
  Clone ID: TF_OsC359_7184

SEQ ID NO: 23445 - DNA, 3708 bp, Oryza sativa
  Clone ID: TF_OsC1528_1980
atggctggttttgccgatgcactgaggccggataaattcaccggtgtgcattttaagagatggcagatcagggtcactctgtggctgacagctatgaaatgcttctgggtgagtactggcaaacctgaaggagttcttactgctgaacagcagaagcaattcgaggaagccactactctctttgtgggatgcattcttagcgttcttggcgatcgtctggtcgaggtgtatatgcatatgaccgacgctaaggagttatgggatgcactgaatactaaattcggtgctactgatgctagcaatgatctgtatatcatggagcagtttcatgactacaaaatggctgacaaccgttctgtagtcgaacaggctcatgagatacaaaccatggctaaggaactcgaactccttaagtgtgtcttacccgacaaatttgtggccgggtgcattattgcaaaactacctccatcttggaggagtttcggtactgcactcaaacacaagagacaggaatactccgttgaggggttgattgcgtctcttgatgttgaggagaaagctcgggaaaaagatgccgcgtctaagggcgatggtgggcagtccagtgccaatgttgtgcacaaggcccagaacaagagcaaggagaaatacaaagctcagcagaccaccaacttcaagaagcagaagaagaacaacaacaatcctaatcaggatgagaggacttgctttgtgtgtggccaagttggtcatctggctaggaagtgtccacaccgcaaggggatgaaggcacctgcagggcagacttctaagtctgctaatgtgaccattggcaacactggagatggaagcgggtatggtcgcacggggttccaccgtcctaatggggaatgggtcacatgcttctgttcatggtgttggcacggtagatctgaagtttacttcgggaaagatcgtgcagctgaagaacatgcagcatgtcccttctatcgacaggaatcttgttatgagtgcggaggcctgttccgcttttccctttctgatttctgcaataagtatgtgaaccatatttgtggcagtgtggatgatgaggctaatgtttggcattcacgtttatgtcatattaattttggcttgatgtctcggctttccagcatgtgtttaattcctaagtttttcattgtcaaaggttctaagtgccatagttgtgtgcaatcgaagcaacctcgcaagcctcacaaggctgccgaggagagaaacttggcaccactagaactcctacattcagatctttgtgaaatgaatggggtgttgacgaagggtggaaaacgatatttcatgacattgattgatgatgctactagattttgctatgtgtacttgttgaaaacgaaagacgaggctctagactattttaaaatttataaggcagaagttgaaaatcaacttgacagaaagataaaaaggcttaggtctgatcgtggtggagagtttttctcgaacgagtttgacttattctgtgaggaacatggcatcatacatgagaggacgcctccctattctcccgagtctaatgggattgctgaaaggaagaaccgcacactgactgacttggtgaatgccatgttggacaccgcgggactgcctaaggcatggtggggggaggcattgttgacctcaaatcatgtgttaaacagagttcctaacagaaataaggacaaaacaccatatgagatatggattggtagaaaaccatcactttcttatttgcgcacatgggggtgcttggcgaaagtcaatgtaccaataacgaagaagcgcaaacttggacctaagactgtggactgtgtttttctgggatatgctcatcatagcattgcctatagatttttaatagttaaatccgaggtaccggacatgcatgttggtacaattatggagtctcgtgatgctaccttccttgagagctttttcccaatgaaggatacacatagtggttcgaaccaaccctctgaaataattcccagttcaatcacaccaccagaacaaactgaacatacacatgaacttgtgtctgaggaggatgtcagtgaagctcctcgaaggagtaagagacaaaggacggctaagtcttttggtgatgacttcactgtgtacctcgtggatgacactcctaagtcaatttcaaaagcatatgcatctcctgatgcagactactggaaggaggctgtccgtagtgaaatggattccattatcgctaacgggacttgggaggtgacagagcgaccctatgggtgtaaacctgtggggtgcaagtgggtgttcaagaagaagcttaggcctgacggtactattgaaaagtacaaggctcggcttgttgctaagggctatactcagaaagaaggcgaagatttctttgacacttactcacctgttgctagattgaccacaattcgtgtgctactttccctagcagcctcacatggtcttctcgttcatcaaatggacgttaagacagcttttcttaatggagagctggatgaggagatctatatggatcaacctgatgggtttgtagttgaaggtcaagaaggcaaagtgtgcaaattgttgaagtctttgtatggtctgaaacaagctcctaagcaatggcatgagaaatttgacaaaacattgacatctgcaggctttgcagtcaatgaggcagataaatgtgtgtactatcgccatggtgggggtgaaggagttattttgtgcttgtatgttgacgacatactgatatttgggacaaaccttcaggtgataaatgaggttaaatcattcttgtctcaaaattttgatatgaaagatttgggagtagctgatgttatcttaaacattaagctaattagaggtgagaatgggattaatctcttgcagtcccattatgtggagaagatcttgaatcgctttggctacattgatagtaagccttctccaacaccttatgatcctagcttgttgcttcgcaagaacaagagaattgctaggaatcaactggaatactctcaaatcattggctcgttgatgtacctggctagtgcaactaggcctgatatctcctttgctgtgagcaagttgagccgatttacttctaatccgggagatgatcactggcgtgcgcttgagcgagtaatacgctatctgaaaggtactgtggaattggggcttcactatactgggtatcctgcggtactggagggtcatagtgattctaactggatctctgatgtggatgagatcaaagccactagtggatatgttttcacactgggtggtggtgctgtttcatggaggtcttgcaaacagacaattttgacgaggtcaaccatggaagcagagctaacggcactggatactgctactgttgaggcagaatggctgcgtgatctattaatggatcagcctgttgttgaaaaaccggtgccggctatccttatgaactgtgacaatcaaacggtaattgtcaaagtgaatagttctaaggataatatgaaatcgtctagacatgtgaaaagacgattgaagtctgtcaggaaattaagaaactccggagttataacgttggattacatccaaacagcgagaaacctggcagatcccttcacgaagggactatcacgaaatgtgatagacaatgcatcgaaggagatgggtttgagacccatgtga

SEQ ID NO: 23446 - DNA, 1680 bp, Oryza sativa; identical to SEQ ID NO: 15755
  Clone ID: TF_OsC359_6691

SEQ ID NO: 23447 - DNA, 4353 bp, Oryza sativa
  Clone ID: TF_OsC359_7135
atggagctcacttcggagcaagaacaactcatctaccgcaatgctcaagcttccaatgcaattctctccgccttgaatccggaggagttcaacaaggttgatggactagaggaggccaaggagatatgggatactttgcaattggctcatgagggatgtcccgccgttcgtgaggccaagattgaattattggaaggaaggcttggaagatttgtaatggatgacaaggagacagcacaagagatgaaagacttcaagagactcaccccaagtgacattcttggaagaatagtgtctcatgagatgcaagaagaggaagctcgtgaagtgagacaaatgatgaagaatgccgccatgatcaaaaatcaagaagttgctttgaaggcaaaacaagaagaagagtcaagttgtgaagaaagtgaagatgaagaaatggcttttattgtcaagaggttcaagcactttctttacaagagtggctatggcaaagggaggaaggacgatgacaagggaaagaggcaatcaaagagagcgtgcttcaattgtggcgaatatggccacttcattgccgattgtcccaagtcaaatgaagctaacgctaagggaggcaagaagaagccggagcgtgctcatgtggcggaggcacacatggcggaagtgtggtacttcggagatgaagaagatcccgaggtcaagcccaagcccaagtcaaaagacaaggttgaaggagaaggtggtgttgctaccgtcgccttcaaatcatcctcttcaagcaaggagcgtctcttcaacaacttgagtgatgacgacgacgactcctaccactactcttgcttcatggcccaaggccgcaaggtgatgactcaaaagccctctcaaacttctcttgatgttgattctagtgatgaggaaagtgataatgaattagatgatgtgcttaagagctttagcaaacccgctatgcaacatttggctaagttaatgagagctttggatagtaaagaacaatcactcgaaaggcaagaagaattgcttattcttgagaagaaaagaaaccttgtcttagaggagagcttagctaaagaatgtgctaaaaataaacaacttgctaatgagcttaatttggctaatggttctttagctagccttagggatgttaatgaaactcttcaagaaaaatttgctaatttagacaaaagtcataaagatcttgaagttcaatttgacactctttggaatagcacctctcaaccaaatgtggtttctaattcttctaacccttctactagcaatgctcttaagaaagagaatgaaaagttgtgcactttggtgaaatatggatgcatcaagacataccattcaaaagatgccctttacaagaccatcaccgctcatcctaacaaggatggacacgggttcgggttttcgggtagaagtcctgtgtctaagcgtgtgatggtaaatgggaaagaatgcttgatgtttgtgcgagaaggtaaagctccacaagcaagtgaggtgactggtcttgtgagctgccagggacccggaacatccggacaaaccgggcgaaacctccgggtgggagtctctgtctctcaaaaattcccaccagaaagttccggccggtttgccaagaagttccgggccaatggccgtgcacaagacatgaccggaagttccgggcataatgccaggaggttccggccagatggtctttactatgattcatatgtaatttccaaaaatttagagggaaaagtgggtgcttattttaatgggaattacaatgatgagtaccgcacttgtgtgtgggtgccaaaggctttggcatactcctccggtggttcaagttgggttgtggacagtggttgcaccaatcatatgactggagagaggagtatgtttacaagtcttgatgaggagaacggaactcgtgagaatattgtatttggagatgatggtaaaggaaagctacaatttattatccgtttctcaattatggatgactcctctgtagcattcaaaggcaagttaaagggtgatctctatcttgtcgatttcgatgtggatagagtgaatccagaagcttgtttgattgctaaatcctccatgggttggctatggcatcatagactagcccatgttggaatgcagaatttggcaactcttctaaagggggaacacatcctcgggctcactaatgtcacatttgagaaagatcgtgtgtgtagtgcttgccaagcagggaaacaagttgggaatccacatcctatcaagaacatcatgactacaacacgccctcttgagcttctacatatggatttatttgggcccgtggcttacataagtattggaggtaacaagtatgtttttgtcattgttgatgatttttcacgcttcacttgggtgtactttctccatgacaaaagcaaagctcaagatgtcttcaagcgctttgcaaagcaagcccaaaacctctatgatctcactatcaagagggtgcgaagcgacaatggaggagaattcaagaacactcaagtggaggaatttcttgatgaagaaggaatcaagcacgagttctccgccccctatgatcctccccaaaatggcattgttgagaggaagaaccgaaccctcattgaagccgcaagggcaatgcttgatgagtacaagacttcggatgtcttttgggcggaggccgtgagtaccgcatgtcatgccatcaaccgcttgtacctccacaagatcctaaagaaaacttcatatgaactcttgagtggtaagaagcctaatgtttcatattttcgtgtctttgggagcaaatgttttattttaagtaagaggccttgctcatctaaattctcacctaaggtggatgagggattcttacttggctatgaatcaaatgcacatgcctatcgtgtcttcaacaaaacctccggtattgttgaagtcactagggatgtgatatttgatgaatctaatggctcccaaggagagcaagttgttgtacatgttgtaggtgatgtggatccaagtcaagctataggcactaaggctattggagacatacgaccagtcgagacgcaggatgaccaagaggatagggatcaacctccgtcatcgacatccaatagccctacaagtgttgtgtctgctgagccagaagttccgggtcctattgaccggaacctccggacatctccaggcccggaagttccgggttctacagtccggaacctccggaccagtggcagtgaagacgtgccaacggcacaagtggatgggatcgatgctgcgggcactttagaggttgaagatgaacttggtgatccggattgggtgatggctatgcaagaggagttgaataacttcattcgcaaccaagtatggacgttggtggagagacccgaccaaaatgtcatcggcaccaagtggatcttccgcaacaagcaagatgaacatggagtggttgtaaggaacaaagcccggttatatcaaatggatgtcaaaagcgcctttctcaatggacccatctcggagttagtctttgtggagcaaccaccggggttcgaggatccaaagttgccaaaccatgtgtacaagctccacaaggcgctctacgggctcaaacaagcccctagagcttggtatgaatgtctccgagattttcttttgaaaaatggttttgaaattgggaaggcggacactactctcttcactaaaaagtttgaaaataatttattcatttgccaaatttatgtcgatgacataatatttggttctactaatgcctctttttgtgaagaatttagtagtatcatgactaaaaggttcgagatgtctatgatgggtgagctaaccttctttctcgggctacaagtcaagcaagcacaagaaggtaccttcatctctcaaaccaagtacgtgaaggacattgttaagaagtttgggatggaagatgccaaacccatcaagactcccatgcctaccaatggtcaccttgatcttgatgaaaatggtaaatgtgtggaccaaaaggtatatcgctccataataggatccttgctttacttatgtgcatctcgtcccgatatcatgcttagtgtttgcatgtgtgctcgctttcaagcggagcctaaagagtgccatttgattgccgtcaagagaattctaagatatttagttcatactcctaatcttggcttgtggtatcctaagggttgtgactttgagcttttgggctattccgattcggattacgccgggtgtaaggttgatagaaaaagcacaaccgggacttgccaatttcttgggcggtcccttgtttcctggtcctccaagaagtaa

SEQ ID NO: 23448 - DNA, 6336 bp, Oryza sativa; identical to SEQ ID NO: 15756
  Clone ID: TF_OsC359_7430

SEQ ID NO: 23449 - DNA, 3545 bp, Oryza sativa
  Clone ID: TF_OsC359_7882
atgtcgcatctagagggagacgaatatttggaggagaagggagacgcttctagcaccaaggagactggatcaaagggagctactattcactttgattacatcaaacttaatgttcctcctcataactttgtctccgtgccttccgggcgtgcacctcattttgatgggacacattatgccgcttggaagcacaagatgaagttgcatctaatctctttgcatccaagtatttggaaagttgtttgtacaggtattgatgtacccaatgatgacatggagctcacttcggagcaagagcaactcatccaccgcaatgctcaagcttccaatacaattctctccgccttgagtccgaaggagttcaataagtttgatggtcttgaggaggccaaagagatatgggatactttgcaattggctcatgagggatcacccgccgttcgtgaggacaagattgaattgttggaaggaaggcttggaagatttgtgatggatgacaaggagacacctcaagagatgtatgataggatgatgatccttgtcaacaagattaaaggatttgggagtgaggacatgacaaatcactttgtggtcaagagacttctccgtgcatttggtccaagaaatcccactcttgtatcaatgatacgtgagaggaaagacttcaagaggctcaccccaagtgacattcttggaagaattgtgtctcatgagatgcaagaagaggaagctcgtgaagtgaggcaaatggtgaagaatgccgccatgatcaaaaatcaagaagtggctttgaacgcaaaacaagaagaagagtcaagttgtgaagaaagtgaagatgaagagatggctcttattgtcaagagattcaagcactttcttctcaagagtggctatggcaaaggaaggaaggatgatgacaagggaaagaggcaatcagagagagcttgcttcaattgtggcgaatatggccacttcattgccgattgccccaaaacaaatgaagctaaggctaaaggagacaagaagaagccggagcgtgctcatgtggtgaaggcacacatggtggaggtgtggtactccgaagatgaagaagcttccgaggacaagcccaaacccaagccaaaagacaagattgaaggagagggtggtattgctaccgtcgccttcaagtcatcctcttcaagcaaagagtgtctcttcaacaacttgagtgatgacgacgacgactcctaccactactcatgcttcatggcccaaggccgcaaggtgatgactcaaaagccttctcacacttctcttgatgatgattctagtgatgaagaaactagccttagggatgtcaatgaaactcttcaagaaaaatttgctattttagacaaaagtcataaagatcttgaagttcaattagacactctttggagtagcacctctcaaccaaatgtggtttctaattcttccaatccatctactagtaatggttgtgctaggtgttacaatattgatttgacctcttatgctactaatgttgatgctatgcaagctcttaagaaagagaatgaaaggttgggtacattggtgaaatatggatgcatgaagacttaccattcaaaagatgccctttacaagaccatcaccgctcatcctaacaaggatggacacgggctcgggttttcgggtggaatgtcacgtcctgataaattcatcccaaaataaaaatcattttgccacctccccgccgtcgtcccctctctcccgtgccgccggccgtcttcagctgcccctgccgccgcgttagcacgctggccggctgtgccgtcgcctcctccagcgtcgcagccacctcctcttcgccggcctgccctctgtttcccgcgaagacctccggaagtgcatccccgccggcaacagtggcgttgccgccactgttccgcctccggccacctctgccgcgtcccctgtgcgccggccgacgttgccaccacctctcccggcaccggaatgccatcctcttccccggccaagccacggcatcgctcgtatttcgccggaatgccgtcgcgcgcgccgcctcttcctcggtctccggcgtcgcagcggcaagatcgccctcggcctcgcctccccttcgaccgaacccctctgcggtccatcgtcgtcgtctccgttcgttctcgtcgtcgacgtcccgtcgtcgcccagctcgtcgtctcgcggcgccgcctccgtcgtcggcatcgcagcggtgtgttccacgccatcctcgtcttcgtgcagccgctgtaggctgcccacgtcgcctcctcgccggccccggtcgtcgtcgtcgtcgccctctcgtcgttcccggtcgtcgtggcgttcgtccctccgtcaagccgttctcgtttgtcgtcctcgcttcgtcaagtgctgcagcctcgtcgtcgtcttcgtcctcggctccgcgtcgtcaagccttgtgccggccgcgtctcgcccgtgtaccggtgttggtagtcgttcacgtgtgcgggtggtgaccgtgtagtgtccgtgttagtgtgcccgctcggtagccgcgtggtttccacgtgtgcagcccgtgtggtgtctagtggagtccgtttgtcggccactcgcctcggttgacacacggggttcgcttccgtcgacccgtggaccgtctctgtgtactcggttttctttttatgtattgttattgcttctttataggcttgtagctttgcttgtgtgcttcgcgtagcttctgtcgttccggaggttcccgaagcgtggttcgtggtcgtcgccgaaggttcggaaggccgttctctctctccccctctattcaaaacccccaaaatggttttaggctgggctcgaggtgcgtggttgggttttgtttgtcgtacctcgggtactataaggattaagctcgggcctctgttgcaaagcactaccgtacttccacatgtctagtgggtaaggcttagtttgtggctcagtctagttaaacagaagtacacggatggagatggacgaagtcgggggtcgatggacatctctagggcaaatgaaggctactcgagctgtggcccggtagtcgagatgtcatggcacagggctggtgtcctgctgctaggggctcagtcctgcctacctgtcccggaggttccggccgtaggtggggttgggtcggtactcttttctatggctaggatgggttggaaactatgtcacgtctcccgtccgtataccgtgatggtatgtggcacgtggttacacataaggaagatgtgtcttgtggcacttatgggtgtgtcttgttgagtacggtggttgtactcagtcttgctcaatttttcccaaacccagaagaggagttcctggaagatgaaggctttggtgtctagctcgtgcctgccgtcaagcgcccgtggtcgtcgccctagtcttccgctgtcttttcgtttgtcttcatgtgtgctgggccttgcctcttgggacaaggaacaatacacgcacgcaaggaacgcccgttgggtgatttccggtcgtgacaagtt

SEQ ID NO: 23450 - DNA, 6344 bp, Oryza sativa
  Clone ID: TF_OsC359_8323
atgttggacttagggggaaagaatggggaaaatggaaatgaagatgaagcaagcagcaagggaactccaccacccaagggagctactataccttttgattacagcaaacttactattccctctcactacttcgtctccatgccttccgggcatactcctcaatttgatgggacatattatgacgcttggaagcacaaggtgaagttgcatctaatctctttgcatccaagtatttggaaagttgtttgtacaggtattgatataccccatgatgacatggagctcacttcggggcaagaacaattcatccaccgcaatgctcaagcttctaatgcaattctctccgccttgagtccggaggagttcaacaaggttgatggactagaggaggctaaggagatatgggatactttgcaattggctcatgagggatcacccgccgttcgtgaggccaagattgaattattggaaggaaggcttggaagatttgtgatggatgtcaaggagacaccacaagaaatgtatgataggatgatgattcttgtcaacaagattaaaggacttgggaagacttctgcgtgcatttggtccaagaaatcccactcttttttatcaatgatacgggaaaggaaacacttcaagagactcaccccaagtgacattcttggaagaattgtgtctcatgagatgcaagaagaggaagctcgtgaagtgagacaaatggtgaataatgccgccatgataaaaaatcaagaagttgctttgaaggcaaaacaagaagaagagtcaagttgtgaagaaagtgaagatgaagaaatggcttttattgtcaagagattcaagcactttcttcgcaagagtggctatgacaaagggaggaaggatgatgacaagggaaagaggcaatcaaagagagcgtgcttcaattgtggcgaatatggccacttcattgccgattgtcccaagtcaaatgaagctaaggctaagggaggcaagaagaagccggagcgtgctcatgtggcggaggcacacatggcggaagtgtggcactccggagatgaagaagatcccgaggtcaagcccaagcccaagtcaaaagacaaggttgaaggagaaggtggtgttgctaccgtcgccttcaagtcatcctcttcaagcaaggagtgtctcttcaacaacttgagtgatgatgacgacgactcctaccactactcttgcttcatggcccaaggccgcaagagctttagcaaacccgctatgcaacatttggctaagttaatgagagctttggatagtaaagaacaatcactcgaaaggcaagaagaattgcttattcttgagaagaaaagaaatcttgccttagaggagagcttagctaaagaatgtgctaaaaataaacaacttgctaatgagcttaatttggctaatggttctttagctagccttagggatgtcaatgaaactcttcaagaaaaatttgctaatttagacaaaagtcataaagatcttgaagttcaatttgacactctttggaatagcacctctcaaccaaatgtggtttctaattcttctaacccttttactagcaatggttgtgctaggtgttacgatattgatttgaactcttatgctactaatattgacgctatgcaagctcttaagaaagagaatgaaaggttgagcactttggtgaaatatggatgcatgaagacataccattcaaaagatgtcctttacaagaccatcaccgctcatcctaacaaggatggacacgagctcgggttttcgggtggaagtcctgtgcctaagcgtgtgatggtaaatgggaaagaatgcttgatgtttgtgcgagaaggtaaagctccacaagcaagtgaggtgactggtcttgtgagctgccagggacccggaacatccggacaaaccgggcgaaacctctgggtgggagtctctgtctctcaaaaattcccaccgggaagttccggccggtttgccaggaagtttcgggccaatggccgtgcacaagacatgaccggaagttccgggcataatgccaggaggttccagccagatggtctttactatgattcatatgtaatttccaaaaattcagagggcaaagtggttgcttattttaatgtgaattacaatgatgagtaccgcacttgtgtgtgggtgccaaaggctttggtaactaacatcaagggacccaaacttagacaggcatactcctccggtggttcaagttgggttgtggacagtggttgcaccaatcatatgactggagagaggagtatgtttacaagtcttgataaggagaacggaactcgtgagaatattgtgtttggagatgatggtaaaggaaagttgggttacaattgcttgtttaccgatgaggatgtgaccgtctttagaagggatgactcctccgtagcattcaaaggcaagttaaagggtgatctctatcttgtcgatttcgatgtggatagagtgaatccggaaacttgtttgattgctaaatcctccatgggttggctatggcatcgtagactagcccatgttggaatgcggaatttggcaactcttctaaagggggaacacatcctcgggctcactaatgtcacatttgagaaagatcgtagtgaggctcaagatgtcttcaagcgcttcgccaagcaagcccaaaacctctatgatctcaccatcaagagggtacgaagtgacaatggaggagaattcaagaacacacaagtggaggaattccttgatgaagtgggaatcaagcacgagttctccgccccttatgatcctcctaaaaatggcattgttgagaggaagaaccgaactcttattgaagccgcaagagcaatgcttgataagtacaagacttcggatatcttttgggcggaggccgtgagcaccgcatgccatgccatcaattgcctgtacctccacaaaattctaaagaaaacttcatatgagctcttgagtggtaagaaaccaaatgtttcctattttcgtgtctttgggagtagatgctttattttgagtaagaggcctcgttcatctaagttctcacctaaggtggacgagggattcttacttggctatgagtcaaatgcacatgcctaccgtgtcttcaataaaaccttcggtattgttgaagttataagggatgtgacatttgacgaatctaatggctcccaaggagagcaagttgttgtacatgttgtaggtgatgtggatccaagtcaagctataggtactaaggctattggagacatacgaccagtcgagacgcaggatgaccaagaagatagggatcaaccttcgtcatcgacatccaatagccctacatcgagtcaagagtcagttgacccggaagttccgggaccagatgatcggatcctccggacctccccaagccaggaagttccgggtccatctgccaggaagttccgggcagaggacagtcaaggcgtgcctgtggatgggattgatgccgagggcactgtagagcatcctgatcaggctcaggtcccctcggtgcaccatccaagaatacatcacactgtccaaagagatcatcccgtcgacaacatacttggtgacataagaaaggggataactactcgttctcgtgtcgctaacttttgtcaacactattcgtttgtctcttctttggaaccaaccagggttgaagatgcacttggtgatacggattgggtgatggctatgcaagaggagttgaataacttcactcgcaaccaagtatggacgttgttggagagacctgaccaaaatatcatcggcaccaagtggatcttccgcaacaagcaagatgaacatagagtggttgtaaggaacaaagtccggttagttgcgcaagggttcacccaagtcgagggtctcgattttggtgaaaccttcgcacctgttgctcgccttgagtcaatccgaatccttttagcctatgccgctcaccatgatttcaggttattccaaatggatgtcaagagtgcctttctcaatagacctatctcggagttggtctatgtggagcaaccaccggggttcgaggatccaaagttgccaaaccatgtgtacaagctccacaaggcgctctacgggctcaaacaagcccctagagcttgtagtatcatgactaaaaggttcgagatgtctatgatgggtgagttgaccttcttcctcgggctacaagtgaagcaagcacaagagggcactttcatctctcaaaccaagtacgtgaaggacattctcaagaagtttgggatggaagatgccaaacccatcaagactcctatgcctactaatggccacctagacctcgacgacaatggtaaatgtgtggaccaaaaggtatatcgctccaaaagtgtttgcatgtgtgctcactttcaagcggagcctaaagagtgccatttgattgccgtcaagagaattctaagatatttagttcatactcctaatattggcttgtggtatcctaagggttgtgactttgagcttttgggctattccgattcggattatgccgagtgtaaggttgatagaaaaagcacaaccgggacttgtcaattccttgggcggtcccttgtttcttggtcctccaagaagcaaaattccattgccctatccaccgccgaagccgaatatgtcgccgccggttcttgttgtgcccaactcctttggatgaaacaaaccctaaaagattttggctacaacttcaccaagatcccactcctatgtgataatgagagtaccatcaaaatagccaacaatcccgttcaacactcaagaaccaagcacatagatattcgccaccacttcttgagagatcatgaaaccaaaggagacatatgccttacccatgtgagaaccgagagccaattagccgacattttcaccaaacctttagatgagaaaagattttgcgagcttaggataagcactatgcctcgtgagaaaagacagaaagcctctcaggatgtgtccggtgataagagtcctcctattcgttttcctcgtggtcgtttgggtaaagagaaagtggttgatgcggcagtggtagcagtactcgtacttgtcctaggtttaccagtgattatggctagagaaaatccagtggttgagatgaagtggattgattgggcttacatgaggaagaagaacaatgaagtgttcaaccaagtgatgcaagtgtgccacaacaagaatcttggagatattcttgccttggagtatgattggaatgaggaggtcattgcacagttctatgcgacagcattctttggtactacaaggaagggaaccccttatgtgaagtggttgactgaggatgatgaggatctcaataggcccaacattcatagtgaagcatctctccccatgatcaagaccaagttcatgtatgcaaaggatgctcctaggacttgcatgggatctactcatggattgcatcccaactacaaggtgttgtactccatctttcattggtctttgcttccaaaggttggagatgctactgctttgccatccaagcatgctcatcttctcagtcgcatgcgctacaatcagcctcccttcaatgtgatgaaattgatttgccctttcttagcggagtgcctgaaggaatttcattcaacatatgatgatgaactcttgcagtggaatggtgctgaacttatgacaagagtaatcagaaatatgtccgacaaagcagatgacaacagtgggcatcttgacataaagtttgaaccttctgttgcattttatcccataagctcaacagatattacaaggtacttctcagaagcagatagcacggatgaaagagcccaacatgatgctctgttttctaggattgtaaatgactctactactttccacctctggaacagcattacttcttcgctggttcctgaacccaactctcttgttgagagaatccttaaccgttactgtcttcattgccttgatgttttatagtttgtagcgggttgaagttctgacgaagagcttcattttgggttagaatacatatacagaagaaattcatgagtttaatgggcgacaatatggctagtagtatattgttgaattttgcccaaaaattagttggggggataaaatggtggcattgtagatatatattcttttcaacagggctgcagtgttggtgctacaggcatgtacaattgtgttgacctgactacccattgtcactttttgacagcagatttgcttactggaaacactcaactcaagaactagaggcatttggaaattgagatgtttaaccagttaaaaaaaaaaaaaaaaaa

SEQ ID NO: 23451 - DNA, 1350 bp, Oryza sativa
  Clone ID: TF_OsC9918_3
tcacaagagagttggttcatcatcacttgatgctgtggcaagaagcgctatctccttgttcttcttttttgctggacactcaaacgcaaaatgaccgagctcttggcagtgatagcacatcaccttggatttatcaaacctcttgctgcgggctcgaccagcaccatcatcagtgttgcgtgtggtgagaagaagctgctccccataattgtcactgtgcttccgtatcctctcctcgaaagctttgaggcggccaatagcctcctcaaatggcatggtgtccaaatcgcagaattgctctatcgctgcaattatgtgcaaaaacttttcaggcactgagtcaagtagcttcttgacgagctcatcgtccgtcatggttgcaccaagaccgctcatcgcgtttgccaggccactgattttgccggcaaactcgtcgatggtctcggtgtccttcatgcgcagtgccttgaattcgctcttcaaggtttgcacccgcgccttcttcactcgctcaacgccaaggaacctcgtcttgaggctctcccaggcctccttcgccgtcttcttcttcgcgatctgctgcagcacctcttcggggacggccccgaagagacacgcccgcgcctgcttgtccttcttcttctccacggcctcatcggccgcgggctcgatggcatcccagatgccttgcgcctccatgttggcctccatcttgatcgcccaggtggagtagttggtggaggtgagcaccgggtatggcagcgacacgccgccctccctcatcgatcgcgacgcggagtgctcgacgatggccatcttgttgaagcgcaggatcttgggcataaattggctctgataccaattgttagaatctctcctcttggctcggatcctttgctgccacacactactaccttgtgcaaaacttgacgctgcggcaaggagcgctatctccttcttcttctttttctcagggcactcatacgcaaagtgtccaagttcttgacagtagtagcacattgtcttggacctgtccggcttcttgacgcggctgcggccaccgcttgtgtcgccggacgtgaaaagtagatgctcgccattcttgtcatcacgcttgcgtatcctttcctcgtatgccttgaggcgaccaattgcctcatcaaatggcatgctgtccaagtcagagaactgctcaattgcagcgatgacatgcagaaacttatctggcacagaatcgagtagtttcttgacttgctcatcatcgtccatggttacaccaagatcgctcaacttgtttgccaggccactgattttgccggcaaactcgtcgattgactcggtgtccttcat

SEQ ID NO: 23452 - DNA, 4581 bp, Oryza sativa
  Clone ID: TF_OsC1528_1921
tcagagccacactttcctgtaggctaaacatctcttgttccaccccttcccaagctcggttgagctctcagccagcagcagcagcagcaccggttgctcctccttcccctttccctttcccccctccacgcagcagccccccggaggtgcgccatgtccgacgctcggtctcggagttcggtcgcctcgagcactcggcgtcagcaggacgccgagctcgctgcagcagaagagcgcaggcgagcaacggctcagaccgctgtagcagtagcgagggcggccagactggcggcagcggagttggcagcagccagggcggaggcggaggcggcggaagatgcggcacgtgcggcggaggtagaggttgagaccttgcgtagcagcatcaacggctccatcgccggtgacatcaccgccgacagggagcttgaggagctggcaagaggaagggcacgggagcgggcagagcggtgggcagcagcccacctccacggcggcggcggcggcccaagggaccgcgcgcccgccgacgggaacccagacgggcgcgggcgtgccagcggcagcccggagcccgcacgcgcccctcgcaggcagcgcggctctctctcccttgacctgcgccatggtcaccacggcgtccagacggtggtcagggactttggtcccggcggtgggtggcctaccctcaccaaaaccaactacatcgagtgggccgcggtgatgagggtgaggctccaggtgcggcacatgtgggaggcagtccgcaacgaccgcgcccgcaagtccacactgcaggcactccgcaaggagtgggagaacctggccttcaagccaggtgaggatattgatgactttgctctccgtctcaagactctcttgcagaaaatggtgcagtacggcgacgacacctactacgaggagagagctgtcgagaagctcttccgctgcgtccctgagaagtacaggcagatcgctcgctcgatcgaatctctgctggacctctccacgatgtcgctcgaggaggcgttaggtcgcctcaaggtcgtcgatggtaatgagccacagcctctctcggggcccatcaccattggcgggaagctccatctcactcgggagcagtgggaggcctctcagggtgacgggaggaagggggagtcatcttcctcgacaggcggccgtaagccgcgcaaggtgcgggaaggtgtccagctacggtgggcgcgaaaacgtgccgagggtggcgcccgcagaggcgcccagggcgttgccaccggcaaccacaagccggcacaagacgacgcctgccgcaactgtggcaagcttggccattgggccaaagactgtcgacagccacgacgcggccaggcccacgtcgcacgggtggaggagaaaaagccggctctgctcttggctcacgcaagcatcgaactacctccagcggcaccggccgcagcggctttcctccaccttgatgagccgaaggtactcgtctccctctgcaacggctccagcaacgacaaggctgatgggtggtacctcgacaccggcgccacccatcacatgaccggccgacgggagttcttcaccgagttcgactccagcgtccgaggctccgtcaagttcgggaacgcctccggcgtggagatcaagggtgttggctccgtcaccttcaccgccaagtccggtgagcataggctgctcaccggagtctactacatccccacgttgaggaattctatcatcagcgtgggacagctgaatgagaacggctcacgcgtgttggttgaggacggactcatgaggatttgggatcgccgtcgtcgccttcttgccaaggtaaccggaggcactaatcgactctacatcctcagcgcgcaggtcgcacaaccagtttgcctcgccgctcgtcgggacgacgaggcgtggcagtggcacgagcgcttcgggcacctccacttcgaggccctgaagcagctcagtgccaaggagatggtgcgaggcatgccgtgccttgaccatgtggagcagctctgcgacgtctgcgtggtgacgaagcagcggcggctcccctttccccagcagacgagcttccgagccaaggaacggctcgagctcatgcacggggacttgtgtggcccagtgacaccggccacaccaggaggacgatgttacttcctgctgctcgttgacgacctctcccgctacatgtgggtgatggtcctcggcagcaagggagaggctgcggacgccatcaggcatgcgcaggctgctgcagaggtggagtgcggccgcaagctgcgcgtgctgcgcaccgacaacggcggcgaattcacagcggctgaattcacgtcgtactgcgctgatgagggcattcagcgccactacaccatgccgtatagcccgcagcagaacggcgtcgtcgagcggcgcaaccagacggttgtggggatggctcgggccctcctcaagcagagggggatgccggccatcttctggggggagacggtggtgacggctgcctacatcctcaaccgctcgcctaccaaggccctcgatggtaggacaccgtacgaggtttggcatgggcgcaagccggcggtctcccacctacgggtcttcagctgcctcgcgttcgccaaggagcttggccacatcggcaagctcgacgacaggagcaccccaagggtgttcatcggctacgcgaagggctcgaaggccttccgcatcctcgacccggagacacagcgtgtgcgcactgcgcgcgatgttgtgttcgacgaagggcgagggtgggtatgggacaaggcggtggacgatggttcgactccgacgtacgacgacttcaccgtcgagtacgtctacttcgagggagctgggggagtaggtagctcttcttcaccgagcgtgtctaccccagcccccgaatccccaccgactccgacaccaacacaccctcgggccacgacttcgactacgacgagctcttcgttgacaccaccccagccagtgactccacatgctccagcaccaacagccactcctccaagcacgtctactccgacgccagctcgtgttgagcgcagcccggtggagttcgctactccgctctcccacgacggggagcgcatcgacgcgtaccacgacggcgagcagctacggtaccgtacgatggaggatcttctcggcgaccagccggtgccggtgcctcgcgacctagaggcgcagttgcaccttgcgtgcaacgacggtgagcctcggtcttttgcagaggccgagaaacacgcggcatggcgtgccgcgatgcagtcggagatggacgcggttcaggagaaccgcacctgggagcttgctgacctccctcgtggtcaccgcgcgatcacccttaagtgggtgttcaagctgaagagggatgaagccggagccatcgtcaagcacaaggctcgcttggtggcacgcggtttcgtgcagcaggaggggatcgactacgacgatgccttcgctcccgtggcacggatggagtccgaaggctggggcgtccatcacatggacgtcaagtcggcgtttctgaacgacaacttgaaggaggaggtctacgtgcaccagccgccgggatttgtgatccccggcaaggagggcaaggatgcagaggtcgcggcgttcaaggaggagatgaaggccaccttccagatgagtgatctggggcctctctccttctacctggggatcgaagtgcaccaggacgactccgagatcacgcttcgacagaccgcctacgccaagcgcgtcgttgagctggctgggctcaccgattgcaacccagctctcactccgatggaggagagactgaagctgagccgcgacagcacagcggaggaggtggatgctacacagtaccggtgtcttgtggggagccttcgctacctcacccacacacggccggacttggccttctccgtcggctacgtcagtcggttcatgcagcgaccgacgatggagcaccagcaggctgtgaagaggatcatccgctacattgcggggactctcgaccacggtctctactacccaaggtgtcctggcaaggcacacttcgtcgggtacagcgacaacgaccacgccggcgacatcgacaccaacaagagcacgagcaggattctcttcttcctcggcaagtgcctcgttagctggcagtcggacaagcagcaagtggtggccctgtccagctacaaggccgagtacatagcggcctccgccgcttcgacccaggcgctctggcttgctcgactgcttagtgatctccccggcagagacactggaacggtggagctcagggtggatagcaagtccgctctggccctggcaaagaaccccgtttttcacgaacggagcaagcacatccgggtgaggtaccacttcatccgaagctacttggaggaagggagcatcaaggcgagctacatcaataccaaggaccagcttgcggacttgctcaccaagcctcttgggaggatcaagttcctcgagctctgctccaggatcgggatggcccaacttgcccacaagacgacgcacaagacttag

SEQ ID NO: 23453 - DNA, 4452 bp, Oryza sativa
  Clone ID: TF_OsC1528_2034
atgtccgacgctcggtctcggcgttcggtcgcctcgagcactcggcgtcagcaggacgccgagctcgccgcagcagaagagcgcaggcgagcaacggctcagaccgctgcagcagcagctagggcggccagactggcggcagcggagttggcagcagccagggcggaggcggaggcggaggcggcggaagatgcggcacgtgcggcggaggtagaggttgagaccttgcgcatcagcatcaacggctccatcgccggcgacatcaccgccgacagggagcttgaggagctggcaagaggaagggcacgggagcgggcagagcggtgggcagcagcccacctccacggcggtggcggcggcccaagggaccgcgcgcccgccaacgggaacccagatgggcgcgggcgtgccggcggcagcccggagcccgcacgcggccctcgcaggcagtgcggttctttctcccctgaccgacgccatggtcaccacggcgtccagacggtggttagagactttggtcccggcggtgggtggcctaccctcaccaaaaccaactacatcgagtgggccgcggtgatgagggtgaggctccaggtgcggcacatgtgggaggcagtccgtcccgcccgagatgcagttctcgctttcccagaagcggactgccaaggaggcctaggacgccatcactgcggcatgcatcggcagcgaccgcgcccgcaagtccacactgcaggcacccgcaaggagtgggagaacctggccttcaagccaggtgaggatgttgatgactttgctctccgtctcaacactctcttgcagaaaatggtgcagtacggcgacgacacctacgacgaggagagagctgtcgagaagctcttccgctgcgtccctgagaagtacagacagatcgctcgctcgatcgaatctctgctagacctctccacgatgtcgatcgaggaggcgttaggtcgcctcaaggtcgtcgatggtgatgagccacagcctctctcggggcccatcaccatcggcgggaagctccatctcactcgggagcagtgggaggcctctcagggtgacgggaggaagggggagtcatcttccccgacaggcggccgtaagccgcgcaaggcgcggggaggtgtccagctacggtgggcgcgaagacgtgccgagggtggcgcccgcagaggcgcccagggcgttgccaccggcaaccacaagccggcacgagacgacgcctgccgcaactgtggcaagcttggccattgggccaaagactgtcgacagccacgacgtggccaggcccacgtcgcacgggtggaggaagagccggctctgctcctggctcacgcaagcatcgagctacctccagcggcaccggccgcagcggctttcctccaccttgatgagccgaaggtactcgtctccctctgcaacggctccagcaacgacaaggctgatgggtggtacctcgacaccggcgccacccatcacatgaccggccgacgggagttcttcaccgagttcgactccagcgtccgaggctccgtcaagttcggggacgcctccggcgtggagatcaagggtgttggctccgtcaccttcaccgccaagtccggtgagcacaggctgctcaccggagtctactacatccctgcgttgaggaattctatcatcagcgtgggacagctggatgagaacggctcacgcgtgttggtcgaggacggactcatgaggatttgggatcgccgtcgtcgccttcttgccaaggtaaccagaggcactaatcgactcgacatcctcaacgtgcaggtcgcacaaccagtttgcctcgccgctcatcgggacgacgaggcgtggcagtggcacgagcgcttcgggcacctccacttcgaggccctgaagcagctcagtgccaaggagatggtgcgaggcatgccgtgtcttgaccacgtggagcagctctgcgacgtctgcgtggtgacgaagcagcggcggctcccctttccccagcagacgagcttccgagccaaggagcggctcgagctcgtgcacggggacttgtgtggcccagtgacaccagccacaccaggaggacgacgttacttcctgctgctcgtcgacgacctctcccgctacatgtgggtgatggtcctcggcagcaagggagaggctgcggacgccatcaggcatgcgcaggctgctgcaaaggcggagtgcggccgcaagctgcgcgtgctgcgcactgacaacggcggcgaattcacagcggctgaattcgcgtcgtactgcgctgatgagggcattcagcgccactacaccacgccgtacagcccgcagcagaacggcgtcgtcgagcggcgcaaccagacggttgtggggatggctcgggccctcctcaagcagagggggatgccggccatcttctgggggcaggcggtggtgacggccgcctacatcctcaaccgctcgcctaccaaggccctcgatggcaggacaccgtacgaggcttggcatgggcgcaagccggcggtctcccacctgcgggtcttcggctgcctcgcgttcgccaaggagcttggccacatcggcaagctcgacgacaggagcaccccaggggtgttcatcggctacgcggagggctcgaaggcctaccgcatcctcgacccggagacacagcgtgtgcgcactgcgcgcgacgttgtgttcgacgaagggcgagggtgggtatgggacaaggcggtggacgatggttcgactccgacgtacgacgacttcaccgtcgagtacgtccacttcgagggagctgggggagtaggcagctcttcttcacctagcgtgtctaccccagcccccgaatctccaccgactccgacaccaacacaccctcgggccacgacttcgactacgacgagctcttcgtcgacacaaccccagccagtgactccacatgctccagcaccaacagccactcctccaagcacgtctactccgacgccagctcgtgttgagcgcagcccggtggagttcgctactccgctctcccacgacggggagcgcatcgacgcgtaccacgacggcgagcagctacggtaccgtacgatggaggatcttctcggcgaccagccggtgccgggactggtgcctcgcgacctagaggcgcagttgcaccttgcgtgcgacgacggtgagcctcggtcttttgtagaggccgagaaacacgcggcatggcgtgccgcgatgcagtcggagatggacgcggttcaggagaaccgcacctgggagcttgctgacctccctcgtggtcaccgcgcgatcacccttaagtgggtgttcaagctgaagagggatgaagccggagccatcatcaagcacaaggctcgcttggtggcacgcggtttcgtgcagcaggaggggatcgactacgacgatgccttcgctcccgtggcacggatggagtctgtgcgactccttgcgctggctgctcgggaaggctggggcgtccatcacatggacgtcaagtcggcgtttctaaacggcgacttgaaggaggaggtctacgtgcaccagccgccgggatttgtgatccccggcaaggagggcaaggtgctacgcctgcacaaggccctctacggcttgcggcaggcaccgagggcgtggaatgccaagttggattccacgctcaaggggatgggcttcgagcaaagcccgcacgaggcggccatctaccggcggggcaatggaggaaatgccttgctagtgggtgtctacgtcgacgacttggtgatcaccggcaccaaggatgcggaggacaactccgggatcacgcttcgacagaccgcctacgccaagcgcgtcgttgagctggctgggctcaccgattgcaacccagctctcactccgatggaggagagactgaagctgagccgcgacagcacggcggaggaggtggatgctacacagtaccgacgtcttgtggggagccttcgctacctcacccacacacggccggacttggccttctccgtcggctacgtcagtcggttcatgcagcgaccgacgacggagcaccagcaggctgtgaagaggatcatccgctacgttgcggggactctcgaccacggtctctactacccgaggtgtcctggcaaggcacacttcgtcgggtacagcgacagcgaccacgccggcgacatcgacaccagcaagagcacgagcgggattctcttcttcctcggcaagtgcctcgttagctggcagtcggtcaagcagcaggtggtggccctgtccagctgcgaggccgagtacatggcggcctccgccgcttcgacccaggcgctctggcttgctcgactgcttagtgatctcctcggcagagacactagaacggtggagctcagggtggatagcaagtccgctctggccctggcaaagaaccccgtttttcactaa

SEQ ID NO: 23454 - DNA, 4068 bp, Oryza sativa
  Clone ID: TF_OsC1528_2045
atgagggtgaggctccaggtgcggcacatgtgggaggcagtccggtacggcgacgtcgactacgacgaggatcggcaggcactggatgccctcatcgctgcagtcccgcccgagatgcagttctcgctttcccagaagcggactgccaaggaggcctgggacgccatcactacggcacgcatcgacagcgaccgcgcccgcaagtccacactgcaggcactccgcaaggagtgggagaacctggccttcaagccaggtgaggatgttgatgactttgctctccgtctcaacactctcttgcagaaaatggtgcagtacggcgacgacacctacgacgaggagagagctgtcgagaagctcttccgctgcgtccctgagaagtacaggcagatcgctcgctcgatcgaatctctgctggacctctccacaatgtcgatcgaggaggcgttaggtcgcctcaaggtcgtcgatggtgatgagccacagcctctctcggggcccatcaccatcggcgggaagctccatctcactcgggagcagtgggaggcctctcagggtgacgggaggaagggggagtcatcttcctcgacaggcggccgtaagccgcgcaaggtgcggggaggtgtccagctacggtgggcgcgaagacgtgccgagggtggcgcccgcagaggcgcccagggcgttgccaccggcaaccacaagccggcacgagacgacgcctgccgcaactgtggcaagcttggccattgggccaaagactgtcgacagccacgacgcggccaggcccacgtcgcacgggtggaggaggaagagccggctctgctcctggctcacgcaagcatcgaactacctccagcggcaccggccgcagcggctttcctccaccttgatgagccgaaggtactcgtctccctctgcaacggctccagcaacgacaaggctgatgggtggtacctcgacaccggcgccacccatcacatgaccggccgacgggagttcttcaccgagttcgactccagcgtccgaggctccgtcaagttcggggacgcctccggcgtggagatcaagggtgttggctccgtcaccttcaccgccaagtccggtgagcataggctgctcaccggagtctactacatccccacgttgaggaattctatcatcagcgtgggacagctggatgagaacggctcacgcgtgttggttgaggacggactcatgaggatttgggatcgccgtcgtcaaaaaaatgccaaggtaaccggaggcactaatcgactctacatcctcagcgcgcaggtcgcacaaccagtttgcctcgccgctcgtcgggacgacgaggcgtggcagtggcacgagcgcttcgggcacctccacttcgaggccctgaagcagctcagtgccaaggagatggtgcgaggcatgccgtgccttgaccatgtggagcagctctgcgacgtctgcgtggtgacgaagcagcggcggctcccctttccccagcagacgagcttccgagccaaggaacggctcgagctcatgcacggggacttgtgtggcccagtgacaccggccacaccaggaggacgatgttacttcctgctgctcgttgacgacctctcccgctacatgtgggtgatggtcctcggcagcaagggagaggctgcggacgccatcaggcatgcgcaggctgctgcagaggtggagtgcggccgcaagctgcgcgtgctgcgcaccgacaacggcggcgaattcacagcggctgaattcacgtcgtactgcgctgatgagggcattcagcgccactacaccatgccgtatagcccgcagcagaacggcgtcgtcgagcggcgcaaccagacggttgtggggatggctcgggccctcctcaagcagagggggatgccggccatcttctggggggagacggtggtgacggctgcctacatcctcaaccgctcgcctaccaaggccctcgatggtaggacaccgtacgaggtttggcatgggcgcaagccggcggtctcccacctacgggtcttcagctgcctcgcgttcgccaaggagcttggccacatcggcaagctcgacgacaggagcaccccaagggtgttcatcggctacgcgaagggctcgaaggccttccgcatcctcgacccggagacacagcgtgtgcgcactgcgcgcgatgttgtgttcgacgaagggcgagggtgggtatgggacaaggcggtggacgatggttcgactccgacgtacgacgacttcaccgtcgagtacgtctacttcgagggagctgggggagtaggtagctcttcttcaccgagcgtgtctaccccagcccccgaatctccaccgactccgacaccaacacaccctcgggccacgacttcgactacgacgagctcttcgttgacaccaccccagccagtgactccacatgctccagcaccaacagccactcctccaagcacgtctactccgacgccagctcgtgttgagcgcagcccggtggagttcgctactccgctctcccacgacggggagcgcatcgacgcgtaccacgacggcgagcagctacggtaccgtacgatggaggatcttctcggcgaccagccggtgccggtgcctcgcgacctagaggcgcagttgcaccttgcgtgcaacgacggtgagcctcggtcttttgcagaggccgagaaacacgcggcatggcgtgccgcgatgcagtcggagatggacgcggttcaggagaaccgcacctgggagcttgctgacctccctcgtggtcaccgcgcgatcacccttaagtgggtgttcaagctgaagagggatgaagccggagccatcgtcaagcacaaggctcgcttggtggcacgcggtttcgtgcagcaggaggggatcgactacgacgatgccttcgctcccgtggcacggatggagtccgaaggctggggcgtccatcacatggacgtcaagtcggcgtttctgaacgacaacttgaaggaggaggtctacgtgcaccagccgccgggatttgtgatccccggcaaggagggcaagcggggcaatggaggaaatgccttgctggtgggtgtctacgtcgacgacttggtgatcgccggcaccaaggatgcagaggtcgcggcgttcaaggaggagatgaaggccaccttccagatgagtgatctggggcctctctccttctacctggggatcgaagtgcaccaggacgactccgagatcacgcttcgacagaccgcctacgccaagcgcgtcgttgagctggctgggctcaccgattgcaacccagctctcactccgatggaggagagactgaagctgagccgcgacagcacagcggaggaggtggatgctacacagtaccggtgtcttgtggggagccttcgctacctcacccacacacggccggacttggccttctccgtcggctacgtcagtcggttcatgcagcgaccgacgatggagcaccagcaggctgtgaagaggatcatccgctacattgcggggactctcgaccacggtctctactacccgaggtgtcctggcaaggcacacttcgtcgggtacagcgacaacgaccacgccggcgacatcgacaccaacaagagcacgagcaggattctcttcttcctcggcaagtgcctcgttagctggcagtcggacaagcagcaagtggtggccctgtccagctacgaggccgagtacatagcggcctccgccgcttcgacccaggcgctctggcttgctcgactgcttagtgatctcctcggcagagacactggaacggtggagctcagggtggatagcaagtccgctctggccctggcaaagaaccccgtttttcacgaacggagcaagcacatccgggtgaggtaccacttcatccgaagctacttggaggaagggagcatcaaggcgagctacatcaataccaaggaccagcttgcggacttgctcaccaagcctcttgggaggatcaagttcctcgagctctgctccaggatcgggatggcccaacttgcccacaagacgacgcacaagacttag

SEQ ID NO: 23455 - DNA, 4803 bp, Oryza sativa; identical to SEQ ID NO: 15681
  Clone ID: TF_OsC1528_2070

SEQ ID NO: 23456 - DNA, 7818 bp, Oryza sativa
  Clone ID: TF_OsC1528_2158
atggcgctggagaggcggctcgcgtacgccgcgctcatcccgttcctccttctcgcgctccccatcctgccgtccgattccccgtccggcggcggcggcggtggcgcgggtgggggtgggggagggggagaaaccctagacccgcccgcggcgaagtacgtggtgcggttcgtcgagtaccggcccgccgacgagcaccgggagtacctggaggacggcctccgcggggccgcgcggcctccccccgccgcgtcgtggcggtgggtggagcggcggaaccccgccgccgcgttccccaccgacttcgccgtgctcgagatccgcgacgcgtgccgcgcggctgtcgtcgacgccgtcagtgcgctcggccgtgtccgggacgtgcacgccgatgcgagctactccaggggcgtcctgtctgcggatcggccgcggcagcaggggaagctgttcacagccatgtcgttcgagggggaggaaggagggggagatagggaggtcgggtgcagcactgatagtaataattcctcttctgctggttggaggcggaagcttctcgtgcagagatcacaagtaacgtctctttttggagctgaacgactatgggggagaggtttcactggtaggaaagtcaagatggccatttttgacactggtattcgagcagatcatccgcacttccgtaatattaaggagcgcactaattggacaaacgaagacacactaaatgataaccttggacatggaacatttgtagctggagttattgctggtcaagatgcagaatgccctggatttgcacctgacactgagatatatgcatttcgagtgttcacagatgctcagatatcctacacatcgtggttcttggatgcatttaattatgcaattgcaactggtatggatgtactgaatttgagtattggtggacctgattatctggatctcccctttgtggaaaaggacgccgagctcgccgcagcagaagagcgcaggcgagcaacagctcagaccgctgcagcagcagcgagggcggccagactggcggcagcggagttggcagcagccagggcggaggcggaggcggaggcggcgaaagatgcggcacgtgcggcggaggtagaggttgagaccttgcgcagcagcatcaacggctccatcgccggcgacatcaccgccgacagggagcttgaggagctggcaagaggaagggcacgggagcgggcagagcggtgggcagcagcccacctccacggcggcggcggcggtccaagggaccgcgggcccgccaacgggaacccagatgggcgcgggcgtgccggcggcagcccggagcccgcacgcggccctcgcaggcagcgcggctctttctcccctgaccggcgccatggtcaccacggcgtccagacggtggtcagggactttggtcccggcggtgggtggcctaccctcaccaaaaccaactacatcgagtgggccgcagtgatgagggtgaggctccaggtgcggcaaatgtgggaggcagtccggtacggcgacgtcgactacgacgaggatcggcgagcactggatgccctcatcgctgcagtcccgcccgagatgcagttctcgctttcccagaagcggactgccaaggaggcctgggacgccatcgctgcggcacgcatcggcagcgaccgcgcccgcaagtccacactgcaggcactccgcaaggagtgggagaacctggccttcaagccaggtgaggatgttgatgactttgctctccgtctcaacactctcttgcagaaaatggtgcagtacggcgacgacacctatgacgaggagagagctgtcgagaagctcttccgctgcgtccctgagaagtacaggcagatcgctcgctcgattgaatctctgctggacctctccacgatgtcgatcgaggaggcgttaggtcgcctcaaggtcgtcgatggtgatgagccacagcctctctcggggcccatcaccatcggcgggaagctccatctcactcgggagcagtgggaggcctctcagggtgacgggaggaagggggagtcatcttccccgacaggcggccgtaagccgcgcaaggcgcggggaggtgtccagctacggtgggcgcgaagacgtgccgagggtggcgcccgcagaggcgcccagggcattgccactggcaaccacaagccggcacgagacgacgcctgccgcaactgtggcaagcttggccattgggccaaagactgtcgacagccacgacgcggccaggcccacgtcgcacgggtggaggaggaagagccggctctgctcctagctcacgcaagcatcgagctacctccagcggcaccggccgcagcggctttcctccaccttgatgagccgaaggtactcgtctccctctgcgacggctccagcaacgacaaggctgatgggtggtacctcgacaccggcgccacccatcacatgacctgccgacgggagttcttcaccgagttcgactccagcgtccgaggctccgtcaagttcggggacgcctccggcgtggagatcaagggtgttggctccgtgaccttcaccgccaagtccggtgagcacaggctgctcaccggagtctactacatccccgcgttgaggaattctatcatcagcgtgggacagctggatgagaacggctcacgcgtgttggtcgaggacggactcatgaggatttgggatcgccgtcgtcgccttcttgccaaggtaaccagaggcactaatcgactctacatcctcagcgcgcaggtcgcacaaccagtttgcctcgccgctcgtcgggacgacgaggcatggcagtggcacgagcgcttcgggcatctccacttcgaggccctgaagcgcctcagtgccaaggagatggtgcgaggcatgccgtgccttgaccacgtggagcagctctgcgacgtctgcgtggtgacgaagcagcggcggctcccctttccccagcagacgagcttccgagccaaggagcggctcaagctcgtgcacggggacttgtgtggcccagtgacaccggccacaccaggaggacgacgctacttcctactgctcgtcgacgacctctctcgctacatgtgggtgatggtcctcggcagcaagggagaggctgcggatgccatcaggcgcgcgcaggccgctgcagaggcggagtgcggccgcaagctgcgcgtgctgcgcaccgacaacggcggcgaattcacggcggctgaattcgcgtcgtactgcgctgatgagggcattcagcgccactacaccgcgccgtacagcccacagcagaacggcgtcgtcgagcggcgcaaccagacggttgtggggatggctcgggctcttctcaagcagagggggatgccagccatcttctggggggaggcggtggtgacagccgtctacatcctcaatcgctcgcctaccaaggccctcgatggcaggacaccgtacgaggcctggcatgggcacaagccggcggtctcccacctacgggtcttcggctgcctcgcgttcgccaaggagctcggccacatcggtaagctcgacgacaggagcaccccaggggtgttcatcggctacgcggagggctcgaaggcctaccgcatcctcgacccggagacacagcgtgtgcgcactgcgcgcgatgttgtgttcgacgaagggcgagggtgggtatgggacaaggcggtggacgatggttcgactccgacgtacgacgacttcaccatcgagtacgtccacttcgagggagctgggggagtaggcagctcttcatctagcgtgtctaccccagcccccgaatctccaccgactccgacaccaacacaccctcgggccacgacttcgactacgacgagctcttcgtcgacaccaccccagccagtgactccacatgctccagctccaacagccactcctccaagcacgtctactccgacgccagctcgtgttgagcgcagcccggtggagttcgctactccgctctcccacgacggggagcgcatcgacgcgtaccacgacggcgagcagctacggtaccgtacgatggaggatcttctcggcgaccagttggtgccgggactggtgcctcgcgacttagaggcgcagttgcaccttgcgtgcgacgacggtgagcctcggtcttttgcagaggccgagaaacacgcggcatggcgtgccgcgatgcagtcggagatggacgcggttcaggagaaccgcacctgggagcttgctgacctccctcgtggtcaccgcgcaatcacccttaagtgggtgttcaagctgaagagggatgaagccggagccatcgtcaagcacaaggctcgcttggtagcacgcggtttcgtgcagcaggaggggatcgactacgacgatgccttcgctcccgtggcacggatggagtccgtgcgactcctttttgcgctggctgctcaggaaggctggggcgtccatcacatggacgtcaagtcggcgtttctaaacggcgacttgaaggaggaggtctacgtgcaccagccgccgggatttgtgatccccggcaaggagggcaaggtgctacgcctgcacaaggccctctacggcttgcggcaggcaccgagggcgtggaatgccaagttggattccacgctcaaggggatgggcttcgagcaaagcccgcacgaggcggccatctaccggcggggcattggaggaaatgccttgctggtgggtgtctacgtcgacgacttggtgatcaccggcaccaaggatgcggaggtcgcggcgttcaaggaggagatgaaggccactttccagatgagtgatctggggcctctctccttctacctggggatcgaagtgcaccaggacaactccgggatcacgcttcgacagaccgcctatgccaagcgcgtcgttgagctggctgggctcaccgattgcaacccagctctcactccgatggaggagagactgaagctgagccgcgacagcacggcggaggaggtggatgctacacagtaccgacgtcttgtggggagccttcgctacctcacccacacacggccggacttggccttctccgtcggctacgtcagtcggtttatgcagcgaccgacgacggagcaccagcaggccgtgaagaggatcatccgctacgttgcggggactctcgaccacggtctctactacccgaggtgtcctggcaaggcacacttcgtcgggtacagcgacagcgaccacgccggcgacattgacaccagcaagagcacgagcgggattctcttcttcctcggcgagtgcctcgttagctggcagtcaatcaagcagcaggtggtggccctgtccagctgcgaggccgagtacatggcggcatccgccgcttcgacccaggcgctctggcttgctcgactgcttagtgatctcctcggcagagatactggagcggtggagctcagggtggatagcaagtccgctctggccctggcaaagaaccccgtttttcacgaacggagcaagcacatccgggtttgggagctcacagcaaataacattattatggtatcagctattggaaatgatggccctctttatggcacgctaaataacccggctgatcagagtgacgtcattggtgttggtggtattgattacaataaccatatagcttcattttcctctcgaggcatgactacttgggagcttcctcatgggtatggccgtgttaaacctgatgttgttgcgtatagtcgtgatataatgggttcaaagatcagcacaggttgtaaaaccctttcaggcaccagtgttgcaagcccggtggttgctggtgtagtatgcttgcttgttagtgttataccagaggagcatcggaaatccatccttaaccctgcaacaatgaaacaagcccttgtagagggtgcttctaggctttcaggaccaaacatgtatgagcagggcgctggcaagattgacctctggcaatcatacgaaatcttgaaaagttaccaaccgcgtgcaagcatctttcctaatacccttgacttcactgattgtccctatttctggcctttttgccgccaacctctgtatgctggagctatgccagtggtcttcaatgctacaattctgaacgggatgggggtgattggttatgttaaggatcctcctgtatggcagccctctgaggatgtcggcaatattcttagtgttcacttcacctactcagatgtcatatggccttggacaggttatcttgccctgcacttacaagttaaagatgaaggatctcagttttcaggcataatcagtggcaaggtcacattgtcaatttacagcccagcagcccatggggaaagcagtccacgaagtagttcatgtgttctttacctgaaggtcaaggtggtgccaacacctgttaggtccagaagaatattgtgggaccaatttcataatatcaaatacccatctggttttgttccaagagattcacttaatgtgcataatgatatccttgactggcatggcgatcacttgcacacgaattttcatatactgttcaacatgctgagagatgcaggatactacattgagacccttggatctccacttacctgctttgatgctagcaattatgggacactgcttatggttgaccttgaggatgagtacttcagtgaggagattcagaaacttaaggatgatgttgtacacaaagggcttggcgttgttgtttttgcagagtggtatcatgtcgacacaatggttaagatgacattctttgatgaaaatacacgcagttggtggactccaattactgggggtgcaaatgttcctgcacttaatgaacttttggcaccatttggcattgcttttggggacaaagtactaagtggtgacttctcaatcaatggtgagcagacccactatgcttctgggactgatatagtgcaattcccagcaggaggttttttgcatagcttccaactccaggacaactctaaaatttctcaggataactcaagaagcgcagatacacaaaataccccagataaaagcaagtgcctcctagtctgtggctctgtgcacatgctctcttctattcttggaatgatggaagcaggcaaaggtcgggttgcagtctatggagattcaaattgccttgacagtagtcacatggtaacaaactgctattggcttttgagaaaacttgtggagttcactggcaatagaatcaaagatcctgttcttttctcagaatctgctcagttaaaatttccagtttttgagagcatccatcaactgtcacgtagaccagatgtgaacttctcaacatattcaactgtcgttggcaatgaattgatctgtcaccaggattcccgatttgaggtttggggaacgaaaggttatggtacccaacaaacaggcacaacaagaaagttgccagagtaccagaaaagtgaagcttacaacatttcaacaccaatagcttctgacagcacaccagatgaagctggcctgcaaagaaatatttcaacaccaatagcttctaagtttgataaaagaatggactattttggttttctcgggcacgaagagaattctggatccctttatgctgtacaatttgtgcacacgcttagtaatagtaagattgacataggaatgctagtggcaagccaatggatggtaccttgctttgctgctactgcctgccttatgttgtacctaagttgcagagtgcaacaaaagcgccgacgacgaaagaaggggtcaacagctgctagattgtcaagtatggaccgtatggtctaa

SEQ ID NO: 23457 - DNA, 5217 bp, Oryza sativa
  Clone ID: TF_OsC1528_2206
gcggcccgtacccttcccaaggagaggcggcggcagcggcggcggaggtggcggcggccgtatgcgggagagagaaagagctcagctcgcatggccatcgcggtgaggtcggctgcggcggtggcgaggcactccctgcgccctccgctggccgcgcccggcagcatccgcggcgcctcgctcctgccgccgcagcgcgctcgcggcgtgggcccgtgtcgcgcccgcgctcgcgcggcgagctcctccgcgactggaggtggcgggcaccttcctccgctgttcagcgtggcgccgatgatggactggacggacaaccactaccggacgctcgcgcggctgatctcgaagcacgcgtggctctacacggagatggtggtcgcggagaccatcgtgcatcagaaagataacttggatagatttttagcgtttcctgctgaacagcatcctattgtgttgcaaattggtggaagtaatctggataacttagcgaaggcaactgaactggcaaatgcttattcgtacgatgagatcaacctaaactgtggctgccccagtggcaaagttgctggtcatggttgcttcggtgctcgcttaatgtttgatccagagtttgtaggggatgctatgtcagctattgctgccaattgtaatgtcccagtcagcgttaagtgcagaattggtgttgatgatcgtgactcctacgaagaactttgtgaatttgtagataaggttgtttcaaaatcaccaactaggcatttcattattcatgcccggaaggcattgctaagtggcctcagtcctgcagaaaatcggaacgttcctcctttaaaaaaaccagaaaattgccccatctcgagtgccatcctcttctcaatgagagtaaccattgaagttctaacatctgggagcttgaggagctggcaagaggaagggcacgggaacgggcagagcggcggcggcggcccaagggaccgcgcacccgccgacgggaacccagatgggcgcgggcgtgccggcggcagcccggagcccgcgcgcggccctcgcaggcagcgcggctctccctcccctgaccggtgccatggtcaccacggcgtccagacggtggtaagggactttggtctcggcggtgggtggcctaccctcaccaaaaccaactacatcgagcgggccgcggtgatgagggtgaggctccaggtgcggcacatgtgggaggcagtccggtacggcgacgttgactacgatgaggatcggcgggcactggatgccctcatcgctgcagtcccgctcgagatgcagttctcgctttcccataagtggactgccaaggaggcctgggatgccatcgctgtggcacgtatcggcagcgaccgcgcccgcaagtccacactgcaggcactccgcaaggagtgggagaacctggccttcaagccaggtgaggatgttgatgactttgccctccgtctcaacactcttttgcagaagatggtgcagtacggcgacgacacctacgacgaggagagagctgtcgagaagctctttcgttgcgtcccagagaagtacaggcagatcgctcgctcgatcgagtctctgctggacctctccacgatgtcgatcgaggaggcgttaggtcgcctcaaggtcgtggacggcgatgagccacagcctctctcggggcctatcaccattggcgggaagctccatctcactcgggagcagtgggaggccagccagggtgacgggaggaagggggagtcctctccctcgacaggcggccgcaagccgtgcaaggcgcgcggaggcgtccaactgcggtgggcgcgaagacgcgccgagggtggtgctcgcagaggcgcccagggcggcgccgccggcaaccacaagccggcacgagacgacgcttgccgcaactgtggcaagcttggccattgggccaaagactgtcgacagccacgacgcggcatcgagctatctccagcggcaccggccgcaacggctttcctccacctcgatgagccgaaggtacacgccttcctcggcaacagctccagcaacgacaaggctgatgggtggtacctcgacaccggcgccacccatcacatgactggccggcgggagttcttcaccgagcttgactctagcgtccgaggctccatcaagtttggggatgcctccggcatggagatcaagggcgtcggctccgtcaccttcaccgcaaagtccggtgagcacaggctgctcaccggagtctactacatccccgtgttgaggaactctatcatcagcgtgggacagctggatgagaacggctcacgcgtgttggtcgagcacggagtcatgacgatttgggatcgccgccgtcgccttcttgccaaggtaaccagaggcactaatcgactctacatcctcagcgcgcaggtcgcacaaccagtttgcctcgccgctcgtcgggacgacgaggcgtggcagtggcacgagcgtttcgggcacctccactttgaggccctaaagtggctcagcgccaaggagatggtgcgaggcctgccgtgccttgaccacgtggagcagctctgcgacgtctgcgtcctaacgaagcagaggcggctcccctttccccagcagacgagtttccgagccaaggagcagctcgagctcgtgcacggggacttgtgtggcccagtgacaccggccacaccaggaggacgacgttacttcctgctgctcgtcgacgacctctcccgctacatgtgggtgatggtcctcggcagcaaggcagaggctgcggacgccatccggcgcgcgcaggctgctgcagaggtggagtgcggccgcaagctgcgcgtgctgcgcaccgacaacggcggcgaattcacggcggctgaatttgcgtcgtactgcgctgatgagggcattcagcgccagtacaccgcgccgtacagcccgcaacagaacggtgtcaagcggcgcaaccagacggttgtagggatggctcgggctctcctcaagcagagggggatgccggccatattctggggagaggtggtggtgacggccgtctacatcctcaaccgctcgcctacgaaggccctcgatggcaggacaccgtacgaggcttggcatgagcgcaagccgggggtctcccacctgcgggtcttcggctgccttgcgttcgtcaaggagcttggccacatcggcaagctcgacgacaggagcaccccaggggtgttcatcggctacgcggagggctcgaaggcctatcgcatcctcaactcggagacacagcgtgtgcgcacagcgcgcgatgtagtgttcgacgaagggcgagggtgggtatgggacaaggcggtggacgatggttcgactccgaagtacgacgacttcaccgtcgagtacgtccacttcgagggagctgggggagtaggcaactcttcttcaccgagcgtgtctaccccagtccccgagcctccaccgactccgacaccaacacactctcgggccacgacttcgactacgacgagctcctcgcctacaccaccacagccggtgaccccacgcgctccagcaccaacagccactcctccgagcacgtctactccgacgccagctagtgttgagcgcaacccggtggagttcgctactccgctctcccacgacggggagcgcatcgacgcgtaccacgacggcgagcagctacggtaccgtacgatggaggatcttctcggcgaccagccggtgccgggactggtgcctcccgacctggaggcgcagttgcaccttgcgtgcgacgacggtgagcctcggtctttcgcagaggccgagaaacacgtggcatggcgtgccgcgatgcagtcggagatggacgcagttcaggagaaccgcacctgggagcttgctgaccttcctcgtggtcaccgcgcgatcacccttaagtgggtgttcaagctgaagagggatgaagccggagccatcgtcaagcacaaggctcgcttggtggcacgcggaaggctgggcgtccatcacatggacgtcaagtcggcgtttctaaacggcgacttgaaggaggaggtctacgtgcaccagccgccaggatttgtgatccccggcaaggagggcaaggtgctacgcctgcacaaggccctctacggcttgcggcaggcaccgagggcgtggaatgccaagttggattccacgctcaaggggatgggcttcgagcaaagcccgcacgaggcggccatctaccggcggggcaatggaggaaatgccttgctggtgggtgtctacgtcgacgacttggtgatcaccggcaccaaggatgcggaggtcgcggcgttcagggaggagatgaaggccaccttccatatgagtgatcaggggcctctctctttctacctggggattgaggtgcaccaggacgactccgggatcacgcttcgacagaccgcctacgccaagcgcgtcgttgagctggctaggctcaccgattgcaacccagctctcactccaatggaggagagactgaagctgagccgtgatagcacgacggaggaagtggatgctacacagtaccggcgtcttgtgggaagccttcgctacctcacccacacggctggacttggccttctccgtcggctacgtcagtcggctgtgaagaggatcatccgctacgttgcggggactctcgaccacggtctctactacccgaggtgtcctggcaaggcacacttcgtcgagtacagcaacagcaaccacgccggtgacatcgacaccagcaagagcacgagcgggattctcttcttcctcggcgagtgcctcgttagctggcagtcagtcaagcagcaggtggtggccctgtccagctgcgaggccgagtacatggcggcctccgccgcttcgacccaggcgctctggcttgctcgactgcttagtgatctcctcggcagagatactggagcggtggagctcagggtggatagcaagtccgctctggccctggcaaagaaccccgtttttcacgaatggagcaagcacatctgggtgaggtaccacttcatccgaagctacttggaggaagggagcatcaaggcgagctacatcaacaccaaggaccagcttgcggacctgctcaccaagcctcttgggaggattaagttcctcgagctctgcttcaggatcgggatggctcaacttccccacaagacgacgcacaagacttag

SEQ ID NO: 23458 - DNA, 5271 bp, Oryza sativa
  Clone ID: TF_OsC1528_2209
ctaccgccggccggcgccagatccacgccgcccaccgccggcctccgcgccgccacgcgtgcaccggccgccacccacgcgcgcgccagactccgccgccttgcgccgcagcagccctctccaccaccgaccgagccgctcaacatgcgccgccccacggtgccgccgccagcactccggccgaaaggcggagggactggctagatccggcgacggcgccgccggatccgcctgccgtcgccacccaccgaagccgtcgcggcagtcgagcccgctgccttcgcccgtcgcagcccgccgcgcgagcctgcccgccgccgccgcccgtcgccgcccgccgcgtgttgcgccgctctcggccggccgccggctgccgcgcgccccgccctggaaattgtcaaaagacctagcaggtatgttgtcgtcaaattccttcatcatatcccatggaccatctccaactccaaccaaaattatagacaagggaaattcacccttcccaagctcggttgagctctcagccagcagcagcagcagcaccggttgctcctccttcccctttcccttccccctctccacgcagcagccccccgcaggtgcgccatgtccgacgctcggtctcggcgttcggtcgcctcgagcactcggcgtcagcaggacgccgagctcgctgcagcagaagagcgcaagcgagcaacagctcagaccgctgcagcagcagcgagggcggccagactggcggcagcggagttggcagcagccagggaggaggcggaggcagaggcggcggaagatgcggcacatgcggcggaggtagaggttgagaccttgcgcagcagcatcaacggctccatcgccggcgacatcaccgccgacagggagcttgaggagctggcaagaggaagggcacgggagcgggcagagcggtgggcagcagcccacctccacggcggcggcggcggcccaagggaccgcgcgcccgccaacgggaacccagatgggcgcgggcgtgccggcggcagcccggagcccgcacgcggcccttgcaggcagcgcggctctctctcccctgaccggcgccatggtcaccacggcgtccagacggtggtcagggactttggtcccggcggtgggtggcctaccctcaccaaaaccaactacatcgagtgggccgcagtgatgagggtgaggctccaggtgcggcacatgtgggaggcagtccggtacggcgacgtcgactacgacgaggatcggcgggcactggatgccctcatcgctgcagtcccgcccgagatgcagttctcgctttcccagaagcggactgccaaggaggcctgggacgccatcgctgcggcacgcatcggcagcgaccgcgcccgcaagtccacactgcaggcactccgcaaggagtgggagaacctggccttcaagccaggtgaggatgttgatgactttgctctccgtctcaacactctcttgcagaaaatggtgcagtacggcaacgacacctacgacgaggagagagctgtcgagaagctcttccgctgcgtccctgagaagtacagacagatcgctcgctcgatcgaatctctgctggacctctccacgatgtcgatcgaggaggcgttaggtcgcctcaaggtcgtcgatggtgatgagccacagcctctctcggggcccatcaccatcggcgggaagctccatctcactcgggagcagtgggaggcctctcagggtgacgggaggaagggggagtcatcttccccgacaggcggccgtaagccgcgcaaggcgcggggaggtgtccagctacggtgggcgcgaagacgtgccaagggtggcgcccgcagaggcgcccagggcgttgccaccggcaaccacaagccggcacgagacgatgcctgccgcaactgtggcaagcttggccattgggccaaagactgtcgacagccacgacgcggccaggcccacgtcgcacgggtggaggaggaagagccggctctgctcctagctcacgcaagcatcgagctacctccagcggcaccggccgcagcggctttcctccaccttgatgagccgaaggtactcgtctccctctgcaacggctccagcaacgacaaggctgatgggtggtacctcgacaccggcgccacccatcacatgaccggccgacgggagttcttcaccgagttcgactccagcgtccgaggctccgtcaagttcggggacgcctccggcgtggagatcaagggtgttggctccgtcaccttcaccgccaagtccggtgagcacaggctgctcaccggagtctactacatccccgcgttgaggaattctatcatcagcgtgagacagctggatgagaatggctcacgcgtgttggtcgaggacggactcatgaggatttgggatcgccgtcgtcgccttcttgccaaggtaaccagaggcactaatcgactctacatcctcagcgcgcaggtcgcacaaccagtttgcctcgccgctcgtcgggacgacgaggcatggcagtggcacgagcgcttcgggcacctccacttcgaggccctgaagcgcctcagtgccaaggagatggtgcgaggcatgccgtgccttgaccacatggagcagctttgcgacgtctgcgtggtaacgaagcagcggcggctcccctttcctccgcagatgagcttccgagccaaggagcggctcgagctcatgcacggggacttgtgtggcccagtgacaccggccacaccaggaggacgacgttacttcctgctgctcgtcgacgacctctcccgctacatgtgggtgatggtcctcggcagcaagggagaggctgcggatgccatcaggcgcgcgcaggccgctgcagaggcggagtgcggccgcaagctgcgcgtgctgcgcaccgacaacggcggcgatgagggcatccagcgccactacaccgcgtcgtacagcccacagcagaacggcgtcgtcgagcggcgcaaccagacgggggaggcggtggtgacagccgtctacatcctcaatcgctcgcctaccaaggccctcgatggcaggacaccgtacgaggcttggcatgggcacaagccggcggtctcccacctacgggtcttcggctgcctcgcgtttgccaaggagcttggccacatcggtaagctcgacgacaggagcaccccaggggtgttcatcggctacgcggagggctcaaaggcctaccgcatcctcgacccggagacacagcgtgtgcgcacagtgcgcgacgtagtgttcgacgaagggcgagggtgggtatgggacaaggcggtggatgatggttcgactccgacgtacgacgacttcaccatcgagtacgtccacttcgagggagctgggggagtaggcagctcttcttcaccgagtgtgtctaccccagtccccgagcctccaccgactccaacaccaacacaccctcgggccacgacttcgactacgacgagctcttcgtcgacaccaccccagccggtgtccccacgcgctccagcaccaacagccactcctccgggcacgtctactccgacgccagctcgtgttgagcgcagcccggtggagttcgttactccgctctcccacgacggggagcgcatcgacgcgtaccacgacggcgagcagctacggtaccgtacgatggatgatcttctcggcgaccagccggtgccgggactggtgcctcgcaacctggaggcgcagttgcaccttgcgtgcgacgacggtgagcctcggtcttttgcagaggccgagaaacacgcggcatggcgtgccgcgatgcagttggagatggacgcggttcaggagaaccgcacctgggagcttgctgacctccctcgtggtcaccgcgcaatcacccttaagtgggtgttcaagctgaagagggatgaagccggagccatcgtcaagcacaaggctcgcttggtagcacgcgacttcgtgcagcaagaggggatcgactacgacgatgccttcgctcccgtggcacggatggagtccgtgcgactccttgcgctggctgctcaggaaggctggggtgtccatcacatggacgtcaagtcggcgtttctgaacggcgacttgaaggaggaggtctacgtgcaccagccgccgggattcgtgctccccggcaaggagggcaaggtgctacgcctgcacaaggccctctacggcttgcggcaggcaccgagggcgtggaatgccaagttggattccacgctcaaggggatgggcttcgagcaaagcccgcacgaggcggccatctaccggcggggcaatggaggaaaatgccttgctgatgcggaggtggcgacgttcaagaaggagatgaaggccaccttccagatgagtgatctggggcctctctccttctacctggggatcgaagtgcaccaggacgactccggaatcacgcttcgacagaccgcctacgctaagcgcgtcgttgagctggctgggctcaccgattgcaacccagctctcactccgatggaggagagactgaagctgagccgtgacagcacggcggaggaggtggatgctacacagtaccggcgtcttgtggggagccttcgctacctcacccacacacgatcggacttggccttctccgtcggctacgtcagtcgattcatgcagcaaccgacgacggagcaccagcaggctgtgaagaggatcatccgctacgttgcggggactctcgaccacggtctctactacccgaggtgtcctggcaaggcacacttcgtcgggtacagcgacagcgaccacgccggcgacatcgacaccagcaagagcacgagcgggattctcttcttcctcggcgagtgcctcgttagctggcagtcggtcaaacaacaggtggtggccctgtccagctgcgaggccgagtacatggcggcatccgccgcttcgacccaggcgctctggcttgctcgactgcttggtgatctcctcggcagagacactggagcagtagagctcagggtggacagcaagtccgctctggccctggcaaagaaccccgttttccacgaacggagcaagcacatccgggtgaggtaccactttatccgaaactacttggaggaagggagcatcaaggcgagctacatcaacaccaaggaccagcttgcggacttgctcaccaagcctcttgggaggatcaagttcctcgagctctgctccaggatcgggatggcccaactttcccacaagacgacacacaagacttag

SEQ ID NO: 23459 - DNA, 1213 bp, Oryza sativa
  Clone ID: TF_OsC10527_2
tcacaggtaccggctatcagtatctgtggctgttccatgagcccaaagtagaagaggacttgacatggctggagacggtactagaaccacaatttgcggtggggcaatcacgggaccagtgcccgctcttaccacacttgaaacacgcatcgggagagcttgcagaagtaaatgttctcccacctttgtcaggataatcatctacagctcagcaggtcaatcactgagctgattcgcatagactgaagcttatttaacaggtcgaaaccagatacaactgattgtagtcatagctcaaagcacaccatcatattggatcagtacatacaaagcgtgcgtattgacaccgtctaattggattagtacattcgaagtggataagtaggctttggttcaccagtccatgcctaaattccttgaggtaaacagatcttcaacgtagagaattactggtccagatgctctgatgaaagtctgcatttgaacctttgccgaattttcatcttcattcaatttcttcaggagctgcgattttgagggaagggcgtacattccagcagcaacggctttccttatggcccacccatggtgaggagcaaaaacctgagcataagccttagatgctgcatcccttaaggagttgccctctgtaaccagtatttgctcaaacagaattttaaccatatcaatcccacgcttaaccctcagcatattcctagtatggctcccagcttgcctgacggtgcccttctgaatgtccaactcaaccatctcaggcaattttgagattgacttggatgcctccagcaaatcatcaacctgaaacggaggtagtagcaaacaattaatagccgacctaactcctcgaggacaagggagagcgaagactagagagcgggggtggcggcgggggcttgccttggcgacgtagtccatctcggcgaacttgaaggcgatgccgaggcagccgaagaggacggagacgttggagcaggcgcgggcgaaggagcccacctccatggccgggccgggggcctgctgcttggccaccgcctcgagctcctcgaacgacgccgcgatccgccgcagcggcttgtccccgtcgctcgaccccatccccacctcccgctcccgcttgctccgccgatgcggctcgtcgccggcggcgtcaagctctccgcctccggtatggttggggtgggaaagtcaaaac

SEQ ID NO: 23460 - DNA, 2079 bp, Oryza sativa
  Clone ID: TF_OsC1713_4329
tcacttcaacttgagcttgacttggcgtagcggaagtcgatatggctcatcttgagtggaggtggatggcttgtcttccacttcaataggcttgacatctccaatagacatgttcttcatagctctcatcaagccttcatcacctacattatccaaattctcgtgcccctcttgggagccattagtttcatcaaattgaacatcggcggtttcttccacaatacctttgttcttgttgtagacatggtatgccttgctatttgaggcataaccaccggggcaatcatttaccaaatgcccaacatcacgacacttggagcaatacttaccattgctcttgacaaaatgaatggcacggtgagaaggtttcttacccttctttggaatgaatccaagtcccttcttgttaaggatgcaccgttgctcactcaaaatcttgtcaagagtgttcttacccttgaagcatctctccaaactcttgttgagcttagccacttgctccttaagctcattgttctcaacaacaagtgaggcatcacaaatagaaacacaagaccacggcggaaaagcaacggacggcggcggcgacgaggaagaagcggcggcggtcttcggcttgacgacgacggcggtgctccggcggtctacagcggcggcgaaggggcggacgaggacggcgacgcgacggcgaccacgatggcgacctccccgagcgacgacgacaactggagcgacggcggcgcacggctggagcgacggcggcgacggcggctcgaggtcacacggcgctagggcgcttccgacggcgagagacgaaggcgaaggtggcggcgggtagaggagacaccggtgatcctccaaagaagcatgatccttctttagagccttgaacttgacaatttccttctcactataagcatggagctcctcaaacatactcacaagctcatgataggaaacatcatcactctcactatcactaagagatgttaccttagaagagccctttgccatgagacaaagtggagcaaagagtgatggagcctccttgatggctacaacggccatcttctttttcttggagcttgcatcatcaccaccttcttcttcggacccggatgaggcggagctctcctcatttgagtcccattccctgatgacggcctcaatcttcttcccttccttcttgagcttcttcatgagcttgtagcctccactcttcttcttggatgacttgtctccatcatcatccttggaagggcacttggaagcaaagtgtcccttctcaccacactcaaagcacctcaagttggtgagagtcttattgggtcttctatttcttctcctattggagttggagccccttcctctctcatttctttttcccaagagatcattgaaccttctagcaagaagggcaatctcttcctccaagtcttcattggctacattcaccttggtcttccctttgtcttcaacttcggcttggagagcaatgcacttcttggaaggtgaggcttcctccatctccttcttcttcaacttgtatatgtcattggtgttgatcttcaccaagaggcttgcgggtgtcatccttaacatgtcggagttgatgagcatggtgacaagggtctcatacttctctggtagagccctaagcatcttttgggcatcctcaagatcggtgtaggttgccccaagtcccttgagatcattcacaatgacattgagcctcccatacatgtcattcacactctcatgaggcaatatggagaatgtctcatattggatcttaaggaaatgaagcttggcatccttgtactcacttgcaccctcatggatcttcgccaacttgttccaaatctcatatgcggtctcaaggttgctcaccctatcgaactcctcttggcttaaagagttgaacaaggcattcatggcttgggcattgagttggaggttgtggtgatcaatctccgtcaagggcgtgccggtgatagcaaagcattttaattttccaagtggagtagttgtgccatttaacatatgagccttccctacatggttcacctcgttcgacat

SEQ ID NO: 23461 - DNA, 2877 bp, Oryza sativa
  Clone ID: TF_OsC1528_1666
atggcggcagcggttctccctgcgctgcgcccgaccccgccggcgagcaattttccggcgctgctcccgaccccgccgaggagccagatgctgcctctgctcccgacgccgtgcctcatcatcctccccgcctccttccgcgctccgccggcctccgatcccaagcccggccgcgccgacgccgtcgagaggtgggacgcgcgcaaggaagccggcagttcggcagcgtcatcgtcatcgtctagctccagcagcgggcttccctgccgcgccgactcctgcgagcgttgggacgcgcacaagaacaagaaagccggcggctcggcagcgtcgtcgtcgtcgagggccaggggcgggatcagccccggccgcgccgactcctacgaacgctgggacgcgcacaagacaccaggcagccctgcgtcgtcgaccggcagcagcaggagcccctgccgcgcggactccgtcgagcgatgggacagcaacaagcggccgctgagccgcgcgtcgtcggccgagcgctgggacatcaacaagaagcctcgccccaagaaagacgctgtcggcagcggcaagaacaactccacaagccagacgacgacgatggtctccggaacctctgccttcgacgtcctgcaccgggagaagacggcaataaggtttttgggaagcgcttcgcgcgactgctccctgttcgtccgcgacggctcgccttcctctccgctcgcgtgcttcgcgccttcgtcgacgctcgcaaccgcgagtagttcctgccgagcaaccggtctttccaccacctcgatcagggtcactctgtggctgatggttatgaaatgcttctgggtgagtactggcaaacctgaaggaattcttactgctgatcaccagaagcaatttgaggaagccactactctctttgtgggatgcattcttagcgttcttggcgatcgtctggtcaaggtgtatatgcatatgaccgacgctaaggagttgtgggatgcactgaatactaaattcggtgctactgatgctagcaatgatctgtatatcatggagcagtttcatgactacaagatggctgacaaccgttctgtagtcgaacaggctcatgagatacaaaccatggctaaggaactcgaactccttaagtgtgtcttacccgacaaatttgtggccgggtgcattattgcgaaactacctccatcatggagaagtttcggtactgcactcaaacacaagagacaggaatactccgttgaggggttgatagcgtctcttgatgttgaggagaaagctcgggaaaaagacgccgcgtctaagggcgatggtgggcagtccagtgccaatgttgtgcacaaggtccagaacaagagcaaggggaaatacaaagctcaacagaccaccaacttcaagaagcagaagaagaacaacaacaatcctaaccaggatgagaggacttgctttgtgtgtgggcaacctggtcatctggctaggaagtgtccacaacgcaaggggatgaaggcacctgcagggcagacttctaagtctgctaatgtgaccattggcaacactggagatggaagcgggtatgttggcacggtagatctgaagtttacttcgggaaagatcgtgcagctgaagaacgtgcaacatgtcccttctatcgacaggaatcttgttagtggctcccgtctgactagagacggatttaagttagtttttgagtctaataaagtagtcgtgtctaaacatggatattttattggtaaaggttatgagtgcggaggcctgttccgcttttccctttctgatttctgcaataagtctgtgaactatatttgtgccagtgtggatgatgaggctaatgtttggcactcaccctcacatggtcttctcgttcatcaaatggacgttaagacagcttttcttaatggagagctggatgaggagatctatatggatcaacctgatgggtttgtagttgaagtcaatgaggcagataaatgtgtgtactatcgccatggtgggggtgagggagttattctgtgcttgtatgttgatgacatactgatatttgggacaaaccttgaggtgataaatgaggttaaatcattcttgtctcaaaattttgatatgaaggatttgggtgtagctgatgttatcttaaacattaagctaattagaggtgagaatgagattacactcttgcagtcccattatgtggagaagatcttgaatcgctttggctacagtgatagtaagccttctctaacaccttatgatcctagcttgttgcttcgcaagaacaaaagaattgctaggaatcaactggaatactcccaaatcattggctcgctgatgtacctggctagtgcaactaggtctgatatctcctttgctgtgagcaagttgagccggtttacctctaatccgggagatgatcactggcgtgcgcttgagcgagtaatgcgctatctgaaaggtaatatggaattggggcttcactatactgggtatcctgcggtactggagggttatagtgattctaactggatctctgatgtggatgagatcaaagccactagtggatatgtcttcatactgggtggtggtgctgtttcgtggaggtcttgcaaacagaccattttgacgaggtcaactatggaagcagaactgacggcactggatactgctactgttgaggcagaatggctgcgtgatctattaatggatctgcctattgttgaaaaaccgccggttggagccgagccccaaccgccggcgccccacctccccacgccgcccgccttctccgcccctcttcgcgccccactccgcgcccgcgtcgccgcccaccttccccacatctcccggccc

SEQ ID NO: 23462 - DNA, 1439 bp, Oryza sativa
  Clone ID: TF_OsC1528_1686
atggctgacaaccgttctgtagtcgaacatgctcatgagatacaaaccatggctaaggaactcgaactccttaagtgtgtcttacccgacaaatttgtggccgagtgcattattgcaaaactacctccatcttggagaggtttcggtactgcactcaaacacaagagacaggaatactccgttgaggggttgatagcatctcttgatgttgaggagaaagctcgggaaaaagatgccgcgtctaagggcgatggtggacagtccactgccaatgttgtgcacaaggcccagaacaagagtaaggggaaatacaaagctcagcagaccaccaacttcaagaagaagaagaacaacaacaatcctaatcaggatgagaggacttgctttgtgtgtggtcaacctggtcatctggccaggaagtgtccacaacgcaaggggatgaaggcacctgcagggcagacctctaagtctgctaatgtgaccattggcaacactggagatggaagcgggtatggtaatttatctactgttttttcagttaatcagtctactaattggtgggttgatacagggggcaatgtcgcgcggggttccaccgtcctaatggggaatgggtcatatgcttctattcatggtgttggcacggtaggtcgagccgaaccaactaactgctacagccaaaaatgcaagggcaatttcacattacgaaaatgcagcctccgcctagccgccgaggatgagatccatgccctcctcgccatcatggagctcggcgcattccttcactcactcctcctccgcccggctgccagggatgagatcaatgccttcatgtcggcatggagttcggcgcgctcctccgcttactcggcccctgtctggcaaagcccacttctaataccatcgagttcgacgtgggttccgtcgagtttgatcgacgtgctcgcctccatactcacagaactcatcgtcgggccttgctgccccatcatcaccctcgaccaggcggaggtcaccgaggccttcagggcctttgactgcaagggcaacggcttcatctctgccattgagctcacacgctccatagctgacacggcgacaccgacagcctcatcatccttttatttgactgtgggtcccatcacccactgacatgtgggtcatagtattttttttcttatttgtttaactgatatgtgggccccacatattttgttttaaatttgtagttttcaattttgctcgttttattttttcgggatcaaactactacgtaagcgctacattaatgccacgtgggacaaagtcctcgtcaatcaaaatcagggagcaagaaatctcgtttgactggttttgtaagttgagagacgggatgaaactggtttttcggttcatggaccaaaatcagactaggacaaatttctaaaaaaaaaaaaaaa

SEQ ID NO: 23463 - DNA, 4383 bp, Oryza sativa; identical to SEQ ID NO: 15717
  Clone ID: TF_OsC1528_1816

SEQ ID NO: 23464 - DNA, 2682 bp, Oryza sativa; identical to SEQ ID NO: 15727
  Clone ID: TF_OsC1528_2002

SEQ ID NO: 23465 - DNA, 3249 bp, Oryza sativa; identical to SEQ ID NO: 15729
  Clone ID: TF_OsC1528_2106

SEQ ID NO: 23466 - DNA, 4068 bp, Oryza sativa; identical to SEQ ID NO: 15705
  Clone ID: TF_OsC1528_2166

SEQ ID NO: 23467 - DNA, 4524 bp, Oryza sativa
  Clone ID: TF_OsC1528_2167
atggctggttttgccgatacattgaggccggataaattcaccggtgtgcactttaagagatggcagatcagggtgagtactggcaaacctgaaggagttcttactgctgaacagcagaagcaattcgaggaagccactactctctttgtgggatgcattcttagcgttcttggcgatcgtctggtcgaggtgtatatgcatatgaccgacgctaaggagttgtgggatgcactgaatactaaattcggtgctactgatgctagcaatgatctgtatatcatggagcaatttcatgactacaagatggctgacaaccgttctgtagtcgaacaggctcatgagatacaaaccatagctaaggaactcgaactccttaagtgtgtcttacccgacaaatttgtggccgggtgcattattgcgaaacttcctccatcttggagaagtttcaatactgcactcaaacacaagagacaggaatactctgttgaagagttgatagcgtctcttgatgttgaggagaaagctcgggaaaaagatgctgcgtctaagggcgatgatgggcagtccagtgccaatgttgtgcacaaggcccagaacaagagcaaggggaaatacaaagctcagcagaccaccaacttcaagaagcagaagaacaacaacaacaatcctaatcaggatgagaggacttgctttgtgtgtggccaacctggtcatctggctaggaagtgtccacagcgtaaggggatgaaggcacctgcagggcagacttctaagtctgctaatgtgaccattggcaacactggagatggaaacgggaatcttgttagtggctcccgtctgactagagacggatttaagttagtttttgagtctaataaagtagtcgtgtctaaacatggatattttattggtaaaggttatgagtgcggaggcctgttccgcttttccctttctgatttctgcaataagtctgtgaaccatatttgtggcagtgtggatgatgaggctaatgtctggcactcacgtttatgtcatattaattttggcttgatgtctcggctttccagcatgtgtttaattcctaagttttccattgtcaaaggttctaagtgccatagttgtgtgcaatcaaagcaacctcgcaagcctcacaaggctgctgaggagagaaacttggcacatctagaactcctacattcagatctttgtgaaatgaatggggtgttgacgaagggtggaaaacgatatttcatgacgttgattgatgatgctactagattttgctatgtgtacttgttgaaaacgaaagacgaggctctagactattttaaaatttataaggcagaagttgaaaatcaacttgacagaaacataaaaagacttaggtctgatcgtggtggagagtttttcttatacgagtttgacttattctgtgaggaatatggcattatacatgagaggacgcctccctattctcccgagtctaatgggattgccgaaaggaagaaccgcacactgactgacttggtgaatgccatgttggacaccgcgggactacctaaggcatggtggggggagtctcgtgatgttaccttctttgagagctttttcccaatgaaggatacacatagtaattctagtcaaccttctgaaataattcccagttcattcacaccaccagaacaaattgaatatacacatgaacatgtcactgaggaggatgatagtgaagctcctcgaaggagtaaaagacaaaggacgactaagtcttttggtgatgatttcactgtgtacctcgtggacgacactcctaagtcaatttcagaagcatatgcatctcctgatgcagactactggaaggaggctgtccgtagtgaaatggattccattatcgctaacggaacttgggaggtgacagagcgaccctatgggtgtaaacctgtggggtgcaagtgggtgttcaaaaagaagctgaggcctgacagtaccattgaaaagtacaaggctcggcttgttgctaagggctatactcaaaaagaaggtgaagatttctttgacacttactcacctgttgccagattgaccacaatttgtgtgctactttccctagcagcctcacatggtattctcgttcatcaaatggacgttaagacagcttttcttaatggagagctggatgaggagatctatatggatcaacctgatgggtttgtagttgaaggtcaagaagccaaggtgtgcaaattgttgaagtctttgtatagtctgaaacaagctcctaagcaatggcatgagaaatttgatagaacattgacatctgcatgcttcgcagtcaatgagacagataaatgtgtatactatcgccatggtgggggtgagggagttattttgtgcttgtatgttgatgacatactgatatttaggacaaatcttgaggtgataaatgaggttaaatcattcttgtctcaaaaatttgatatgaaggatttgggagtagctgatgttatcctaaacatcaagctaattagaggtaagaatgggattacactcttgcagtcccattatgtggagaagatcttgaatcactttggctacattgatagtaagccttctccaacgccttatgatcctaacttattgcttcgcaagaacaagagaattgctaggaatcaactggaatactcccaaatcattggctcgctgatgtacctggctagtgcaactaggcctgatatctcctttgctgtgagcaagttgagccggtttacctctaatccaggagatgatcactggcgtgcgcttgagcgagtaatgcgctatctgaaaggtactatggaattggggcttcactattctgggtaccctgcggtactggaaggatatagtgattctaactggatctctgatgtggacgagatcaaagccactagtgggtatgtcttcacactaggtggtagtgctgtttcgtggaggtcttgcaaacagaccattttgacaaggtcaaccatggaagcagagttaacggcactggatactgctactgttgaggcagaatggctgcgtgatctattaatggatctgcctattgttgaaaaaccggtgccggctatccttatgaactgtgacaatcaaacggtaattgtcaaagtgaatagttctaaggataatatgaaatcgtctagacatgtgaaaagacgattgaagtctgtcaggaagttgagaaactccggagttataacgttggattacatccaaacaactagaaacctggcagatcctttcacgaagggactatcacgaaatgtgatagacaatgcatcgaaggaaatgggtttgagacccatcgaagatgctgtcctacagagcattcttgaaagaactcacctttgtgagcttgactgttggtcgcagtctatgaagattttgggtgaatcttctaggaagcttactaaagacctaggagactgcggtcactgcgggcgggcgttggcggcacacgcggcaggtctgcagcagtgcgctagtgcggcactgcggctgcggcggcagccggccaaggcggcggactgcattcacatgctcgtccttgtcccatgcatactgctgttgattgcatgcccctttctcatgctcatcctcaacccatgccgatgcaattcccttcaagacgagaaaactatccgtctttcgcgtcttggggacaagtggaacatcaggctttctgattcgagtggtaacagaaggatggttggtggatgccgaaagtttgcggaagacaatgatgttggagtgggtgatatctgcctgttcgagcctgtattcggcggacttgatagcgggcttcttcttgggcgagaggccgtcgacgacgagcgcgcagtgcacgttgaccgtcacctcccggaggtcgacgtcgcccagccggagcgtcaccggcgcgctgacgtacacgtcgagcggcacgttgccggcctcctcgctctcctccagcgcgccctgcagccccggcccgaagccgtgccgcccctccatggccaccctcaccaccgtcgtgttccggtggccctggtagaacgccggcagccgccccgagcacagcgtcgtgccgcggtacgacaccgccgcccgcgacccggcgccgtagccgatcccgaccatgtcgttggggttctccgcgcggacggacgccaccagcttggcgtacacggtgaggtcggaggagctcacgtcgaaccgcgccacggacatgtcggacacggagtaggacggggccttgggcctgcacgcgtacaggaggtacgccgacgtcgccgccaccgccacgacgaggaggaggaggaagcagcagcaccagcagaggcagccgcgcaggctgccaccgtccgtgatgcggtgccggggcatgttgcggctggcgccaggcgggaccgtggccagcgagctggagccgtactcctccgtgagcatcacgtaccgcggcggcggcggaggcttggacggccccgagcccccgtcgtacgccat

SEQ ID NO: 23468 - DNA, 3719 bp, Oryza sativa
  Clone ID: TF_OsC1528_2230
atggctaaggaactcaaactccttaagtgtgtcttacccgataaatttgtggccgggtgcattattgcgaaactacctccatcatggagaagtttcggtactgcactcaaatacaagagacaggaatactccgttgaggggttgatagcgtctcttgatgttgaggagaaagctcgggaaaaagacgccgcgtataagggcgatggtgggcagtccagtgccaatgttgtgcacaaggcccagaacaagagcaaggggaaatacaaagctcaacagaccaccaatttcaagaagcagaagaagaacaacaacaatcctaaccaggataagaggacttgctttgtgtgtgggcaacctggtcatctggctaggaagtgtccacagcgcaaggggatgaaggcacctgcagggcagacttctaagtctgctaatgtgaccattggcaacactggaaatggaagcgggtatggtaatttacctactgttttttcagttaatcagtctactaattggtgggttgatactggggccaatgtacatgtttgtgctgacatctcattgttttcttcttatcaggtcgcacggggttccaccgtcctaatggggaatgggtcacatgcttctgttcatggtgttggcacggtagatctgaagtttacttcgggaaagatcgtgcagctgaagaacgtgcagcatgtcccttctatcgacaggaatcttgtcagtggctcccgtttgactagagacggatttaagttggtttttgagtctaataaagttttcgtgtctaaacatggatattttattggtaaaggttatgagtgcggaggcctgttccgcttttccctttctgatttctgcaataagtctgtgaaccatatttgtggcagtgtggatgatgaggctaatgtttggcactcacgtttatgtcatattatttttggcttgatgtctcgactttccagcatgtgtctaattcctaagttttccattgtcaaaggttctaagtgccatagttgtgtgcaatcgaagcaacctcgcaagcctcacaaggctgccgaggagagaaacttggcaccactagaactcctacattcagatctttgtgaaatgaatggggtgttgatgaagggtggaaaacgatatttcatgacgttgattgatgatgctactagattttgctatgtgtacttgttgaaaacgaaagacgaggctttagactattttaaaatttataaggcagaagttgaaaatcaacttgacagaaagataaaaaggcttaggtctgatcgtggtggagagtttttctcgaacgagtttgacttattttgtgaggaacatggcatcatacatgagaggacgcctccctattctcccgagtctaatgggattgctgaaaggaagaaccgcacactgactgacttggtgaatgccatgttggacaccgcgggactacttaaggcatggtggggggaggcattgttgacctcaaatcatgtgttaaacagagttcttaacagaaataaagacaaaacaccatatgagatatggattgggagaaaaccatcactttcttatttgcgcacatgggggtgcttggcgaaagtcaatgtaccaataacgaagaagcgcaaacttggacctaagactgtggactgtgtctttctgggatatgctcatcatagcattgcctatagatttttactagttaaatccgaggtaccggacatgcatgttggtacaattatgaagtctcgtgatgctaccttctttgagagctttttcccaatgaaggatacacatagtggttcgagtcaaccctctgaaataattcccagttcaatcacaccaccagaacaaattgaacatacacatgaacatgtctctgaggaggatgtcagtgaagctcctcgaaggagtaagagacaaaggacggctaagtcctttggtgatgatttcactgtgtacctcgtggatgacactcctaagtcaatttcagaagcatatgcatctcctgatgcagactactggaaggaggctgtccgtagtgaaatggattccattatcgctaacgggacttgggaggtgacagagcgaccctatgggtgtaaacctgtggggtgcaagtgggtgttcaagaagaagcttaggcctgacggtactattgaaaagtacaaggctcggcttgttgctaagggctatactcagaaagaaggcgaagatttctttgacacttactcacctgttgctagattgaccacaattcgtgtgctactttccctagcagcctcacatggtcttctcgttcatcaaatgaacgttaagacagcttttcttaatggagagctggatgaggagatctatatggatcaacctaatgggtttgtagttgtaggtcaaggcaaagtgtgcaaactgttgaagtctttgtatggtctgaaacaagctcctaagcaatggtataagaaatttaacaaaacattgacatctgcaggctttgcagtcaatgaggcagataaatgtgtgtactatcgccatggtgggggtgagggagttattctgtgcttgtatgttgacgacatactgatattgggacaaaccttgagaggtgagaatgggattacactcttgcagtcccattatgtggagaaaatcttgaatcgctttggctacattgatagtaagccttctccaacaccttatgatcctagcttgttgcttcgcaagaacaaaataattgctaggaatcaactggaatactcccaaatcattggctcgctgatgtacctggctagtgcaactaggcctgatatctcctttgttgtgagcaagttgagccggtttacctctaatccgggagatgatcactggcatgcgcttgagcgagtaatgcactatctgaaaggtactatggaattagggcttcactatactgggtatcgtgcggtactggagggttatagtgattctaactggatctctgatgtggatgagatcaaagctactagtggatatgtcttcacactgggtggtggtgctgtttcgtggaggtcttgcaaacagaccattttgacgaggtcaaccatggaagcaaaactgacggcactggatactgctactgttgaggcagaatggttacgtgatctattaatggatctgcctattgttaaaaaaccggtgccggctatccttatgaactgtgacaatcaaacggtaattgtcaaagtgaatagttctaaggataatatgaaatcgtctagacatgtgaaaagacgattgaagtctgtcaggaaattgagaaactccggagttataacgttggattacatccaaacagctagaaacctggcagatcccttcacgaagggactatcacgaaatgtgatagacaatgcatcgaaggagatgggtttgagacccatcgaagatgctgtcctgcagagcagtcttgaaagaactcacctttgtaagcttgactattggtcgcagtctatggagattttgggtgaatcttctaggaagcttactaaagacctaggaatgcctgcgaaaagtttcgaccgagcagccggtctttccgccacctcggtacgtagctcggctgcgatagcgctgggaccgggagcacgtccgagctatgcttgccgtccggctgcgactactagaggaagaagacgactggatggagatcgatctgtccctcccatgcaagtcaacga

SEQ ID NO: 23469 - DNA, 2745 bp, Oryza sativa
  Clone ID: TF_OsC1528_2260
atggcagatcagggtcactctgtggctggcagcgatgaaatgcttctgggtgtatacatgaccgacgctaaggagttatgggatgcactgaatactaaattcggtgctactgatgctagcaatgatctgtacatcatggagcagtttcatgactacaggatggctgacaaccgttctgtagtcgaacaagctcatgagatacaaaccatggctaaggaactcgaactccttaagtgtgtcgtacccgacaaatttgtggccgggtgcattattgcaaaactacctccatcttggagaagtttcggtactgcactcaaacacaagagacaggaatactctgttgaggggttgatagcgtctcttgatgttgagaagaaagctcgggaaaaagatgctgcgtctaagggcgatggtgggcaatccagtgccaatgttgtgcacaaggcccataacaagagcaaagggaaatacaaagctcaacagaccaccaacttcaagaagcagaagaagaagaagaacaatcctaatcaggatgagaggacttgctttgtgtgtggccaacctggtcatctggccaggaagtgtccacaacgcaaggggatgaaggcacctgcagggcagacttctaagtctgctaatgtgaccattggcaacactagagatggaagcgggtatgtcgcacggggttccaccgtcctaatggggaatgggtcacatgcttctgttcatggtgttggcacggtagatctgaagtttacttcgggaaagatcgtgcagctgaagaacgtgcagcatgtccctactatagacatgaatcttgttagtggctcccgtctgactagagacggatttaagttggtttttgagtctaataaagtagtcgtgtcaaaacatggatattttattggtaaaggttatgagtgcggaggcctgttctgtttttccctttctgatttctgcaataagtctgtgaaccatatttgtggcagtgtggataggggtgggaaaaataagaccgaaccgaagaaccgaaccgaaaagaccgagaccgagaccgaaaagaccgagatcgagaccgaaaagaccgagaccgagaaattcgggtctgatcatggtggagagcttttctcaaacaagtttgacttattttgtgaggaacatggcatcatacatgagaggacgcctccctattctcccgagtctaatgggattgctgaaaggaagaaccgcacactgactgacttggtgaatgccatgttggacaccgcgggactacctaaggcatggtgggggaaggcattgttgacctcgaatcatgtgttaaacagagttcctaatagaaataaggacaaaacaccatatgagatatggattgggagaaaaccatcactttcttatttgcgcacatgggggtgcttagcgaaagtcaatgtaccaataacgaagaagcgcaaacttggacctaagactgtggactgtgtctttctgggatatgctcatcacagcattgcctatagatttttaatagttaaatctgaggtacctgacatgcatgttggtacaattatggagtctcgtgatgctaccttctttgagagctttttcccaatgaaggatacacatagtagttcgagtcaaccctctgaaataattcccaattcaatcactgaacatacacatgaacatgtcactgaggaggatgtcagtgaagctcctcgaaggagtaagagacaaaggacggctaagtcctttggcgatgatttcactgtgtacctcgtggatgatactcctaagtcaatttcagaagcatatgcatctcctgatgcagactactggaaggaggctgtccgtagtgaaatggattccattatcgctaacgggacttgggaggtgacagagcgaccctatgggtgtaaacctgtggggtgcaagtgggtgctcaagaagaagcttaggcctgacggtactattgaaaagtacaaggctcgacttgttgctaagggctatactcagaaagaaggcgaagatttctttgacacttactcacctgttgctagattgaccacaattcgtgtgctactttccctagaagactcacatggtcttctcgttcatcaaatggacgttaagacagcttttcttaatggagagctggatgaggagatctatatggatcaacctgatgggtttatagttgaagtcaatgaggcagataaatgtgtgtactatcgccatggtgggggtgagggagttattctgtgcttgtatgtggacgacatattgatatttgggacaaatattgaagtgataaatgagtcccattatgtggagaagatcttgaatcactttggctacattgatagtaagccttctccaacaccttatgatcctagcttgttgcttcgcaagaacaagagaattgctaggaatcaactggaatactcccaaatcattggctcacttatgtacctggctagtgcaactaggcctgatatctcctttgctgtgagcaagttgagccggtttacctctaatccgggagatgatcactggtgtgcgcttgagcgagtaatgcgttatctgaaaggtactatggaattggggcttcactatactgggtatcctgcagtactagagggatatagtgattctaactggatctttgatgtggatgagattaaagccactagtggatatgtcttcacactaggtggtggtgctgtttcgtggaggtcttgcaaatag

SEQ ID NO: 23470 - DNA, 645 bp, Oryza sativa; identical to SEQ ID NO: 15732
  Clone ID: TF_OsC359_5521

SEQ ID NO: 23471 - DNA, 1985 bp, Oryza sativa; identical to SEQ ID NO: 14872
  Clone ID: TF_OsC359_6217

SEQ ID NO: 23472 - DNA, 4029 bp, Oryza sativa; identical to SEQ ID NO: 14913
  Clone ID: TF_OsC1713_3583

SEQ ID NO: 23473 - DNA, 3699 bp, Oryza sativa; identical to SEQ ID NO: 14912
  Clone ID: TF_OsC1713_4249

SEQ ID NO: 23474 - DNA, 1535 bp, Oryza sativa
  Clone ID: TF_OsC24769_1
cccgggctgcaggcggaagaacggaacggaacggaacaccagccgctgctccggcaagcgctcgccgccggcgaggcaaagatggagaacactcaatttagccgtccaaaggcggtaccctataatgactcctgggagatacccaattctgactatattctcttgtatctcaatgacaaacaaactgggaagatcacttgcatggtatgtgggaaagaaggacactacacttgtgagtgccccatgaagaataaagaaaaatatgtcatatgtactctttgtggcaaggttggccactgtcacttatggtgctgccatcagaatgagagtgagaggcgtgcttgccgtcgttgtggagaaaaaggacactatgataattggcatcacctaggttgctccagctgtgagaagcatcatccactcgggagatgtcctatgggaaaaattacatgttttctttgtgaaggcaatggacatgtccctgttcaatgtcatttgagtccaatgctcactgcaataactcagaatcaacgagagagtttccgagctactctgagacaagcattgagagaaacaagcaacacagcagtcacaccaattacattgaccagagaattagagccatataatgataagaatggaggccaacctaaaggggacaatgaaatggtgcccagggtcttaggcttcaatcaaggagaggaaggccattctgctttgaggaaccctaacagatgccatgtaccatcctctgacaaggctaacgttgctgcagataaggcaccaaaccaatctttaggagtaacctgcttcaactgtgggggcaaaggtcactattcaaataaatgtcctcaaaagcaaaagcaacatggagtcagatcaaccaatgctgcagctatgaaagataagacaccgaacctaacaggagtgacctgcttcgactgtggtgacagaggtcacttttcttatacatgtcctcaaaatctactagaagtcatgttgactgcagaactagagccacatgatgatacctatgaacgccaacctaaagcggataatggaacagtaccaactgtcctaagcctgaattgtggtgaggcaagccattgtggtaggaataatcccatgaaaagtctggaatcatcctctgataagatcaattctacagctatgacatataaggcaccaaaacgagtgttaggtgtaatctgcttcaactgtcatgaggaaggtcattatgcaaatagatgtcctcaaaagcaacagggaatcaactcaggtacttcccaatccccaataaagcggcagaggaaggaatgactgatgtaagttgatatcgagcaaacttgtcttaacatagatgttgataaaaaagaactaataatatattgttccgtgaaattgtaatggatgaaagatttatcagatattcaaaggaggttgtggttgtaaaaccataaccatttttggtattgtagaatttgatattgaataatatcaagtgatccgtgtgttgcatgaaaaaaaaaaaaaaa

SEQ ID NO: 23475 - DNA, 5867 bp, Oryza sativa
  Clone ID: TF_OsC73154_1
ccctctcaacgtcacgggcttgcagatctggcccgtgaaacggttattggcccagacaaagagaggtagtccagaagctgatagccttgacacttcttgcagttcgcctcccacaggcggactagctgatcgagaaggttgattgtgatagataaacccgcatcgagggtcaggtcatgcacccaggagtcgtcttctttcccttgccgtagggatttcttcctatttttggagatctcatagaccaacggcattaggtcttttggtcttcggccgttaatccatgcggagtcccagaagcgcgtcgtattcccatcgcccacagttatctttgttgaggcggcgaagaggttcctatccacaccatcacaaggcgtttccaaacccacccaaggcttgcttggatctctccattcgttccacaaccatcgcaatcttagagctcttgtgaatttgtccaagcttaggacaccaaggcccccctggctggtcggcaagcatgtctttgcccagttgaccttgcatttccccccggtgatatcccccgtaccagcccaaaggaagcgacgtctctgcttgtcaagctgctccagggattccttcatcaccttcaaggcagtgaggagataaattggctgtgctgaaagcacagactttacaagcgtggttctcccggctgctgccatgtttttccccctccaacttgcaactctccctgatattttgtcgaagaccggttgcaagtccgtttttcgcagccttcccagagcaagcgggaggcccaagtattttagtgggaaatttgcccgcttcgccggaacgccttggaggacctcttccaggtctatattgccgcatcttatggccgcaacctgggatttctgaaggttggtgacgagtcctatggctgtgccaaaacgatgtaggatgttcgcggaagtcgcaacatcgttctgggtgggattaatgaagatcacatcatcatccgcatacattgagatccgcagccgagttgttcttcctcgtaattttgaaattgcacccaactctgttgccttggaaaggatacgttgggatatcgaagacgacagtaaagcccctagccagtctatccatcttgtcgggaagcccttgcgctgcagcaaggccagtaggtaatcccatcgcacggagtcgaaggcttttgttatatccaacttgaagagcaacattgctcgtctttggcggtggtatcttctgatcgtgtttcttacgaagaggtagttgtcatgaatacttctcccctttatgaaagcgctttgattgaccgagatcaactcatgcatgtggggccttaaccgcagcgctagcatcttagcgaagatcttggcgatgctatgaattagactaattggcctatagtccgaaacgctttcagccccatccttttttgggattaggacgatgtttgctgagttgagcaaattcaggtgcgcacatctcaggttatagatggagctgaagactagcagaatgtcatccttgatgatttcccagcaaactttgaagaaggccccagtgaagccgtctggtcccggtgctttgtcggctggcatttccttaattgccttatgcacctcctcctcagtgaagggttcccccagcgtggctagatcaatcggtgtgatgtccaacgtctcccagtttagctcgtttggcctcggccccggcctccccatgaagcttgcgaagtgatcatggatcgtcaattccttatcaccgtgcgtcaccgcccaaccactgtcctttttcaatctttggattgtattccttctccttcgcgcattaaccttgaggtggaagaacttcgtgttcgcatctccttcacggatgtgagttaccctggaggcttgctttttccttgccctttctatagaagcgagtcctaggactttccgcttgagagccgccctcagtcgcgtttccaggggggtgagttctctgtgctcttgtgccacgtcgagtctttggatgacattgagtgccatatggaattgcaatttagcctctgagcagatgccttttgtccaatctctaaggccgaccgccgtatgttgcagcttttgattcaggcggtgcataggctcagtgtgcgaagaaggttggctccagatgtccttgactttgtccttgaaccccgggacccgtgtccaaaagttttcaaacttgaaggtcctcggacgatgtgggccttgcgggttggacagtacaagagggtaatggtcggatggccctgtaggaagggcatggagaacatggtgggggaaagcaagatcccattcctcattgcaaaagcaacggtcaagcttgacaagggttgcctttcgacgctcattactccaagtgaacttcctgttttgcagggggatctcatgcagctcacatcgatcaatgactgcgcgaaaacgtctcatgcgtgcgaggttgaggttgctattgtttttgtccctagcacggtagatcatgttgaagtctccaaggatgagccatccttccccagggctgggccttaatctcctaatgtgccggaggaacgaatctttgaggtggtgccttgttggcccgtagacaccagtgaggaggaacgtaactcctgagcgaatatctgttatttgcgcggagatcgagaagcggccgattcgaacctcctggacatcaaaatctccactactccaaaggagaaggattcctcctctcgtgcctctcgccggcttgaaggcaaatttatcaagcttgtagcctcctaagaaacgagcaaggccgtcatctatgctttggagtttggtctcttggaagcaggccaaggtgcactttgtgtcgagcatgagctcatggactacgttgcagcgcgcaggtgagtttaggcctctcacattccaggagatgagataacagtctgtcggagcgggtgcaaacacaacagcacgcaaatggaagaggaggaagacgaagttcttgccaacattggcttcgccaactagagatatcagcgccgcatccattgtctcctgctcttcgtcgtcgatgccgaagatggtggtgagggcggcgatgacgtgcgccggcagtgggccatcgaacatggcgacgtactcggcgatgacctgctcaattgaagcgccttcttcgccgttgaggacgcccagccttttgaagagaacgcgttggcagcgctccatcgtcggccgtgctggttgcttggcaatgcgctcactgcgtcgggtgggctggctgtgctgccttgtgcggatcttgaggcgtcgtcccatgtggagcggtcgcgcacacggcgatcttggtggcgacctcggcggtgaggcgatgatcggttgcggcggcgaggcgaacagagcatcgaggacgcccgtcgagatcggtgacgccgaggctgctgcttgggcaagctgggtggcaaccggggaaggtggcggcggcgccacaatgtcgtcaatctccatcgcgccggtggggactaccgggccttgggctaatgccggcgaggtgacccgcgggggcggcgagtcaatctgcgggaatggctctcccacaggggggtcggtcgccgcagccgccagctcaatccgcaggagcgcctcctctacttgttggcaagtagtcgtcgaggtaggcggcggcagcgccgacttgatgcgcgcgaaggcgtgttcgaccgggatcggctcccaggccgcgttctggaaccaggcttcaatcctcggtttggctgggcgacccgagagggctggcgtggcagccttgtctgcgatgatggagagccactgcagttggctcaccggcgacaacgtgttcgtctggggttcctgacacaagaagctggagttgtgcagcgcgtggagcaaacgaaattcacctacctctgcctggttcgcggatttgtgtagaaggggaatgttcatcagtttgctcgagtcgtagaccggatcagccgtgcgccgcgtgccgccgccgctacggttggcgcctcccctgtcccagcgacgcggggagcgcgtgcgctcacggcggtagttgttgtcgcttccccgcctatcatcccggccacggccgagatcccggcctcggtcatcacgatcatcatcgcggtcattgcggcgccagggtctcgggtggtcattgccagacccccgacgacgaccacgcccgccgcgcccgccctgatcgcgggcatggcggccatcgcgatcagcacagccgtcgcggtcgtcgcgctcgccatcccaatcatcctcgtcatcgtggtcgccttcatcatgaaggtgtcctccccgtactgcgcgtccacggcggggtctgtccgcgcggccatcgatggcgtcgcggtcagaccggcgttctggccggcgagcctcccggcgctcgtcatcccgatcacgccctccgaggcgctcgtggaccgatcgtggcggcggcgggtggtgcgggaagtcttcaaagactcgccctgggacctgttcaccgtcgagcactcccaggctccaaggcggtaggcggcgcttggccggctggaagctgccttgcccctccaaatcaatggtcgccgccgtgtagtcatgaatctcctccaagtggaagagcaccggatggcgcacccccctctgccagtgctccagtgggttctccaccgcaaataggggcgccaggttcgggtccttcgcccgctttgtgaagccaagccacatcctcttcgggatggtgctaggattcgccgtccacgcccataggtcgatggagcgcgtgttaccagactccactgggtggacgacgtccgtctcgatctgttccagggcgcaagtgcgaccaatgatgcgctcagcaatgtccgcggcccaggcatgcatggggacgccgtcaagacacaaccgaactcggaacatcagggcgacaccaagcgcgctcttgaggctgcgccacttgatgaagtggatctcaatgccgtgccgcttgacgtatcccttcgccagcgcttcctcacaatgtcgacggtgctggaacttgatgaggaaagcttgtgggtgatggagagacacggccacctcgccacggcggagcttgaactcgtcgaggaaggcctgctcgacgtcgcgcggctcggtggtcggcggagcgcgggccgcccaggagaccaatcttagccaggggcggtcgcggaggcggcgtcgggggccgggtgacgggatcctgcttggcgggtgacggcagtggagcaggggaggcgcggttgcgtggcgaatgcgctggcgagcgggcgcgacgaggggcgggggggtgcgtgtcaggaaggcggcgcgtgttggtacgacggcgaggtggagtgcgttggcgaggcggaggcggggagtgtgaggtagaacgaactcgacgtggtggaggggacgagagccgagcacggtcagcgcgagaagcgccgcagagtcgaggcgcgcggttcgcagcgtcgcggtggcgacagtcgcgcgcccgatggccggagcgacggcagaggaagcagcggactggatctctacactgggctgcacggtggccgcgggagaggcaaatgaaacatttcccactgatctgcgcccaaaagtcgcggtgggagaggcagcctcgcctagtccggacgacgtcgtttcgccttgaaggtggccggtgcgccctgcttgaatgctctccgcttgaatgctctgcacgtctccaccaatgcttccgctgaacccggatccagcccggttctccggggagagagccgcccatgtcctgctcggcgacgcgacgcggaggcaggctagcatcgtagggagcagctctccgcggcgaggtgtcat

SEQ ID NO: 23476 - DNA, 1502 bp, Oryza sativa
  Clone ID: TF_OsC73154_11
ttagccaggggcggtcgcggaggcggcgtcgggggccgggtgacgggatcctgcttggcgggtgatggcagtggagcaggggaggcgcggttgcgtggcgaatgcgtcgacgtggtggaggggacgagagccgagcacggtcagcgcgagacgcgccgcggagtcgaggcgtgcggttcgcagcgtcacggtggcgacagtcgcgcgcccgatggccggagcgacggcagaggaagcagcggactggatctctacactgggctgcacggtggccgcgggagaggcaaatgaaacatttcccactgatctgcgcccaaaagtcgcggtgggagaggcagcctcgcctagtccggacgacgtcgtttcgccttgaaggtggccggtgcgccttgcttgaatgctctccgcttgaatgctctgcacgtctccaccaatgccaactccaggtttgtcagtgacgatccataaatccgtcaccgagaatccatcacggattaacaagtttcttgtagtgcccgcagcagcctccaccggctcgtggtccagcacgacgacgtgctcgccgcggacctccccgctcagtgccgccgacatggacgacgccgcggaggtggccgggagggagaagcggagcacgccgtcgatgcggcggcggagaaggaggagcacgctggccaccgcgccgcggcgggatccggcggggacgagggagacgacgacactgacgagaaggagaggatcccgtcgggagtagcgagcgcggggcacgctgacgccgacgaccaccatgccaaccgctagggggctaccgcctccacaggctccgcctccgccaccgctgcctactggccgccacgcgctcgactgcccgccgccaccgccgcgcatttgctccactccgcttcgctggccgtcgcgcttgcacgccgcctccgcgaccgccgtccttctctcccgcctcgcccgcgcagaccggcatgacgccccgtttgagaggacggcaatcggcacggtggaaaacgaggctgaaatccagacaaacctaagctcccaggagaggacgagcagcaacacggtggagaccatcacgaagaccctcaatggccccagcgccacgccgctcccggacacggcgaacgcgagcgcggcgaccgcgaggagcacgctggggaggcggcgcgcgcgccgcctagcggtggcgacggcccggaccacgacgagcagcgtgacgacctggacgagctgcaggcgcgcctccagggcgcccacgacggcctcctcgagctggtccatcagctcggccgcctcggcgtcgacgcccgccggcgccaggcgcctggctcgcgcgagcaggggcaccagcatggcgaggcgggcggcgttgtcgcgcatcctggcgtgggcgacgtcgagggcgaactgcacggtgtcgacgtcgcggaggagcgggaggaggttgcggagcaccaacgggaccatgggatgcgcgttcgccattgggg

SEQ ID NO: 23477 - DNA, 1432 bp, Oryza sativa
  Clone ID: TF_OsC1713_5364
atgctccgtagccgcgctcgcctgccgctgcgcctgcctccagccgtgcgccgctgccgctccccatctgcggcaaaggaaaaggatgccacatcagtaaaaccggacaaaaatactgccgagggacctcaggagatgcctcgctatgatgatcattatggaagcacacgcttgtatgttggtagactgtcttcgcgcactcgttctcgtgacctagaatatcttttcggcagatatggaaggtcttgtgtgtttgacttgaatgatcttgttgaaggtttttcggttttttacacaacccgggagtggaagttgcaagtcggtgatgcatttgagtacttgagtcatgatggcttactgtttggcaaccattggtgcagaatacgtgaagtggagttgaagcgcgactacgcgtttattgaattcagtgatccccgtgatgctgatgaagcgcggtataacctagatggcagggatgttgatggaagccgcattcttgttgagtttgctaaaggagttccacgtggtgctgctggtggttcacgtgaatatatggggagaggacctcctccaggaacaggtcgctgttttaactgtgggattgatggtcactgggcaagagactgcaaggctggtgactggaagaacaaatgttaccgttgtggagaaagaggtcacatagaaagaaactgccaaaacagtccaagaaatctcagccgatctaggtccagatccctatctggatctcccaggggacgcagagatcgtgatgataggagatcaaggagtcttagctacagcagaagtcccaggcgatccatctccccagcagcaaatggaaaggagcgcaaccccagcccgaatggtaggcggagtccaaggagtccacaggatcgggtaagcccaccacccaaggataatgatgagcgcaatggtgacagcccctggggcagggagaacagcaggagcccatctgacggctaccgtagccctgtggctgccaatgggcgcagcccaagcccaaggaacaatggaagccctagtccaatggacaacaatagccgaagcccaagggacaacggcagcccgagccctagggatggaaatggtgatggtggtagccgtggcggctcacgctcgcccagagcaagcgagtcccctgaagcttgaaatttaatcccagtctctggcgttcatcttgtggatggtcatgctatggttgtaatagttatatttccggtttaagacgagatcaaggagtcttaacacctgaaaggatttggtgcccttggggctatgctatattgctattggtgtgtaatggatcgatgaactttctattagcctgcattgtttttgcggtctggtatcaccctgagattgcaacttttgttgctttggtcgctgaacaacgttgacgacagttctcttt

SEQ ID NO: 23478 - DNA, 1319 bp, Oryza sativa
  Clone ID: TF_OsC1713_5535
ccggccgggctcgaccgactctcccgtctcctcgcgagttcacccgcccgccgcctgcggcgatctccatccagcgagcagcggcgccggcgccggcgtaccgctgcttccgccgcatcctctatctctggagatgcctcgctatgatgatcattatggaagcacacgcttgtatgttggtagactgtcttcgcgcactcgttctcgtgacctagaatatcttttcggcagatatggaagaatacgtgaagtggagttgaagcgcgactacgcgtttattgaattcagtgatccccgtgatgctgatgaagcgcggtataacctagatggcagggatgttgatggaagccgcattcttgttgagtttgctaaaggagttccacgtggtgctgctggtggttcacgtgaatatatggggagaggacctcctccaggaacaggtcgctgttttaactgtgggattgatggtcactgggcaagagactgcaaggctggtgactggaagaacaaatgttaccgttgtggagaaagaggtcacatagaaagaaactgccaaaacagtccaagaaatctcaggcgagagagaagttattcgcgctccccatcgccacgccgtggacgtggtcatggtcgtagtcgtagctatagccggagccggagcaggagttacagccgatctaggtccagatccctatctggatctcccaggggacgcagagatcgtgatgataggagatcaaggagtcttagctacagcagaagtcccaggcgatccatctccccagcagcaaatggaaaggagcgcaaccccagcccgaatggtaggcggagtccaaggagtccacaggatcgggtaagcccaccacccaaggataatgatgagcgcaatggtgacagcccctggggcagggagaacagcaggagcccatctgacggctaccgtagccctgtggctgccaatgggcgcagcccaagcccaaggaacaatggaagccctagtccaatggacaacaatagccgaagcccaagggacaacggcagcccgagccctagggatggaaatggtgatggtggtagccgtggcggctcacgctcgcccagagcaagcgagtcccctgaagcttgaaatttaatcccagtctctggcgttcatcttgtggatggtcatgctatggttgtaatagttatatttccggtttaagacgagatcaaggagtcttaacacctgaaaggatttggtgcccttggggctatgctatattgctattggtgtgtaatggatcgatgaactttctattaaaaaaaaaaaaaaaaaaaca

SEQ ID NO: 23479 - DNA, 1295 bp, Oryza sativa
  Clone ID: TF_OsC1713_5589
ccggccaggtccgcccttctgacagccgccgcatccgcgccgcccccgacctaggattccgccgccattctcctccaaggagatgccgcgctatgatgatcgttatggaagcacgcgcttgtatgttggtagactgtcttcccgcactcgttctcgtgacctagaataccatttcagcagatatggaagaatacgtgaagtggagttgaagcgcgactacgcatttattgagttcagtgatccccgtgatgctgaggaagcaaggtacaaccttgatggcagggatgttgatggaagccgcattcttgttgagtttgctaaaggggttccacgtggtcctggtggttcacgtgaatatatggggagaggacctcctcctggaacaggtcggtgttttaactgtgggattgatggtcactgggcaagagactgcaaggctggtgactggaagaacaaatgttaccgctgtggggagagaggtcacatagaaagaaactgtcaaaacagcccaagaaatctcaggcgtgagagaagttattcatgctctccatcgccacgccgtggacgtggtcgcagtcggagctatagccggagccggagccggagccgcagttacagccggtctaggtccagatccctgtctggatctcccagggcacgcagagagcttgaaagatcaaggagtcttagttacagcaggagtcccaggcgatccatctccccagcagcaaatgaaaagaagcgcagccccacccctgatggtagccgtagtccaaggagtccacaggaccaggtgagcccaccacccaaggataatgctgagcgtaatggctcagatcacggtgacagcccccggggcagggagaacagcaggagcccgtctgatggctaccgtagccctgcagctgccaacgggcgcagcccaagcccaaggaacaatggaagccctagcccaatggacaacggtagccgaagtcctagggatggaaatggtgacggtggtagccgtggtggctcacgctcacctagaccgagcgagtctcctgaagcctgaaatttaatcgcagtctatggcgttcgtcatgctatggttgtaatggttacattcccggtttaagacgagatgagtgtatttgctcttttctcaaaaacgacagcgtattttgttactttgtgaatgtcatgctatggttgtaatagtcacagtcctgttttaagacgagataagtgtatttggttcttttctcaaaacgacagcgtattttgctaaaaaaaaaaaaaaaaaaaaaaaaaaa

SEQ ID NO: 23480 - DNA, 3861 bp, Oryza sativa; identical to SEQ ID NO: 14828
  Clone ID: TF_OsC1713_4259

SEQ ID NO: 23481 - DNA, 3469 bp, Oryza sativa
  Clone ID: TF_OsC1713_4290
tgaagaatgttctacataatctcaactaacacccagtcgtcaacgtactgctgtacacgtggagcccaaagtgcgcctgctagctgtccccgtcgagtcaacctgtgaagagaggtaaattatatggctcgatgaagtaatccgcctaaaaatttagaaatgaacaatccgaactcacgagtggtcggcagggaggacaggggggaggcaaaaatcgccctcccccagggcggcaagggggccgcctgcaaaattccatgccccctcgccgcccatttgcaggcgccccccccccccacagtacaaaatcgccctagcggagggcggcaagggggccgcctgcaaaattccatgccccccctcgccgcccatttgcaggcggccccccgcacagtataaaatcgccctagcggagggcggcaagggggccgccctgcaaatttcgttgacggccgtcgcccgagagcgaacggccgtctgccacgtcattttcgccgccctcggagagggcgatttttaaaaatcgccctcccagagggcggtaggcgaccgtcgcgtccaacgccgccgtcggcgaggccgccgcgtctctagaagaaggcatgtttaggaacgctaacacccctggctcgccggcgaagaattctccgtccgtctggtagtggtaccacagactgcagcgcaccccgagcaccatgccttccgtcaggccattgctgaccatctccttcccttggtcggtgatgccgcccaggcaactccggcaacgctccggcggcatgccgtccatgcactgcgccagcccgtatactactggctgactctcctggccgtcgaaccaccccttccccttgcccgtcaagtagctggcccgactactcaccatggcgtcggagatcctctccatgagctcagagaaaagctcgctgaaccgcgtgcgatcagcatccctctgagggacagcagggttcaggtaattgctcactatgcacgccggcgcgttgctgaagctggagatgaagtccgtgtcagagaagcttagcagcgcctggaactcatggtcgtacaaggttacagtactcttgtgcgactgggactgggagtcactctcactactggtagatccattattactgatgctggctgtgtcgagcactctctgtaagcggctgctgcagttggtggagtctccccggcagagtacggcgccgtagacgatgtcgggacctgtcgtcccagccgtggcgccggcggccgagtgcgaccccgtcttggtgacattggcgatcaggtctttggcgaggttgagcaggttggtcttgtaggtgccctctgccatgtaggcgagggtgttcgcgttgctgctgctgctgctcgagaacgtcccaccgctggattttgaggcagtattgcctccgttgatgtcgttcatcttcttgtctccaatctccgttgacatcttggtgaaggcgccgatgcagcagcagtagccgcgaagaacaagagcagtcgcgcttgaagcgctaccaaaaacttgatcgcccgccagcaagtccatcaggagctcacgaagccgttcggcctcaactgtggcagtatctaaagctgtgagctctgcttccattgttgacctcgttaagatggtctgcttgcaagacttccaggaaacagcgccacctccaagtgtgaacacataccctcttgtggcctttatcttatcagcatcagatatccagtttgaatcactatagccctccagcacttttgggtacccggcatagtgaattccatagctcattgtcccttttagatagtgtattactctttcaagagcatgccaatgatcatctcccggatttgaaacaaactggctcaacttgctcacagcaaatgagatgtcaggcctcgttgcactagctaagtacatcaatgaaccaatgatctgggagtatctcaattgatcccttgctattcttcggtttttccttaatagcacactaggatcataaggagtaggagctgccttgcagtcactataaccaaagcgactcaagactttgtccacatagtgagattgcacaagtgtaatctcaccctcatctcctctcagtagtttaatgttaagaataacatcagccactcccaaatccttcattttaaagcttttggacagaaagtccttgacctcctcaatcacattgaggctgttcccaaagatcaatatgtcatcgacatataaacacaagatcactccctctcccccaccatagcgatagtacacacatttgtcagcttctttcacaacaaagccaacagatgtaagtgtattgtcaaacttctcatgccattgcttaggcgcttgtttgagaccatataaggacttcaacagcttgcacaccattccctcctgaccttctagtacatacccatctggttgatccatatagatctcctcctccaactctccattgaggaaagctgtcttaacatccatcttgtacttttcaattgtaccatcaggccacaatgttcctccgccctcactaataaccatgtttgcagacttcttgtccttgcgctcaggacaatccttggcccaatgcccaggcttgccacacacaaagcaatctccttttgcctttcctttgcctttcttcttaaaattggttgtagccttggatttgatgtcaggtttgactttcttgttgttgttgtgggatgcgtgagtgttcttcttctgcaccaaattagcgctagaacctccctcgatctttttgccctggttgtcctttgccctcaccttctcctcaatacccaaagagccaatgagatcagtaacactgaacttttgcctcttgtgttttagagaagtagcaaagtccgaccaagaaggtggcaatttggcaataatgcctccagccacaaacttgtccggcaactcgcagttgttgttctcaagttcctttaccagcatctgaatctcataagcctgttccactacagaacggtaatcgaccatcttgtagtcatagaactgctccatgacatacagctcgctgccggcgtcggaaaccccgaacttgacctcaagagcatcccacatgtccttcccccgagaacgtcccatcgctggatttgaggcagtattgcctccgttgatgtcgttcatcttattgtctccaatctccgttgacatcttggtgaaggcgccgatgcagcagcagtagccgcgaagaacaagagcagtcgcgcttgaagcgctaccaaaaaacttgatcgcccgcctacccgtgcaagttctcaagcggacggagttccggaggcacctgctcgtcccgtacacctgtgcgcgcaggtgaacagaaccggggaaggattctctcggtgaaggccgaaagctgtatataagatcacaaacatgaaatccactattgtctatctcaacattgctgaaaggataagtgtccat

SEQ ID NO: 23482 - DNA, 2229 bp, Oryza sativa; identical to SEQ ID NO: 14842
  Clone ID: TF_OsC359_7892

SEQ ID NO: 23483 - DNA, 2892 bp, Oryza sativa; identical to SEQ ID NO: 14824
  Clone ID: TF_OsC1528_1838
